United States Patent Application Publication US 2008/0034453 A1 - sequence listing, part 32

SEQ ID NO: 254913 - DNA, 411 bp, Glycine max
  unsure (1)..(411): unsure at all n locations
aaataaggataatgctgttgttaaatcacagctagttgtagatggagttatttggcatgtgacctgtgttagcatggggaatccacactgtgtaactttcagtagagaaggaagccagaatttgcttgttgatgaattgaagctagcagaaattgggccaaaatttgaacatcatgaggtgttccctgcacgaactaacacagagtttgtgcaagtattatctaactctcacttgaaaatgcgtgtttgggagcggggagcaggagcaaccctagcctgtggaactggagcttgtgctactgttgttgcagcagttcttgagggtcgtgctgggaggaattgcacggttgatctacctggagggcctcttcagattgagtgganggaggaagataatcatgtttatatgac

SEQ ID NO: 254914 - DNA, 405 bp, Glycine max
gacagcaaaaacaattaataaagatgagtttgaagaacaacatggtggtgctaaaggtgtgtttgttgcttcttttccttgtgggggttacagctgcacgcatggaactgagcttcttcaaaagtgatcagtcatcaagttatgatgatgatgagtattcaaaaccatgctgtgatctctgcatgtgcacacgctcaatgcctcctcaatgcagctgtgaagatattaggctgaattcatgccactcagattgtaagagctgtatgtgcacacgctcacagccaggacagtgtcgttgtcttgacaccaacgacttctgctacaaaccttgcaagtccagagatgactagaaaaactaatagctctctcaaatggacgaagcccctttaagctttgtttgttatg

SEQ ID NO: 254915 - DNA, 419 bp, Glycine max
gagcgccaatgtttttttcagaggagtttcatcttgtaatcaaaagagtttatcttatagtaagaaatcgatgtcttactccattttaaggaacaaaacaagagaacaatagcctgacaaagggtttagccataaaatcgaatccatcattgatttgagatattgataaggtgaatactcatttctcgtcaatgctaggcataatgcgggtatagggacctaaaaaagattatcttttcttcctatcttatgaactttaaggtgtatgaagtgtcatttcctatcttagattttaattttagtaggtagataaagagtccatttaacttaagttgatctaggccagaagcagacctacgtcaagataatccttctttgaaacactttggtagtgctcttagattgtaatccaaataaaa

SEQ ID NO: 254916 - DNA, 384 bp, Glycine max
gatcgcacaacattattctttcgcaccttgcagaatcaattttctctctcaatcgtccttcatggctcgtaccaagcaaaccgctcgcaaatccaccggtgggaaggctcctaggaagcaactcgccaccaaggctgcaagaaaatctgcacctaccaccggtggagtcaagaagcctcatcgctatcgtcctggaactgttgctcttcgtgagatccgaaaataccaaaagagcacagagcttctgatccgcaagctcccctttcagcgtcttgttcgtgaaatcgcgcaagacttcaagactgatttgaggttccagagtcacgcggttcctgcgcttcaggaagctgcgggggcttacttggtgggtttgtttgaagacac

SEQ ID NO: 254917 - DNA, 413 bp, Glycine max
gacagaagaaaaaagagaagaagatgggtttgaagaacaacatggtggtgctaaaggtgtgtttggtgctacttttccttgtggggggtactactactgccaacttgaggctgagtaagcttggcctgctcatgaaaagtgatcatcatcaacactcaaatgatgatgagtcttcaaaaccatgctgtgatcaatgcgcatgcacaaagtcaaaccctcctcaatgccgctgttcagatatgaggctgaattcgtgccattcagcttgcaaatcttgtatttgcgcattatcgtatcctgcacagtgtttttgtgttgacataaccgatttctgctatgaaccttgcaaacccagtgaggatgacaaggaaaactactaatgaacaagtgttatgcatgtaagctctctctcc

SEQ ID NO: 254918 - DNA, 303 bp, Glycine max
gattcacacagctaactaagaaagtcttccatagccccccaaaaatgaagagcaccatcttctttgctctctttcacttttgtgccttcagcatcgcataccgaccttcagccatcgctgatttcgtgctcgataatgaatgtaaccctcttgaaaatggtggcacatattatatcgtgtcagacataacaacatttggtggaataagagcagccccaacgggaaatgaaagatgccctctcactgtggtgcaatctcgcaatgagctcgacaaggggattggaacagtcatctcgtcgccat

SEQ ID NO: 254919 - DNA, 290 bp, Glycine max
gacagcaaaaacaattaataaagatgagtttgaagaacaacatggtggtgctaaaggtgtgtttgttgcttcttttccttgtgggggttacagctgcacgcatggaactgagcttcttcaaaagtgatcagtcatcaagctatgatgatgatgagtattcaaaaccatgctgtgatctctgcatgtgcacacgctcaatgtctcctcaatgcagctgtgaagatattacgctgaattcatgccactcagattgttagagctgtatgtgcacacgcccacagccaggacag

SEQ ID NO: 254920 - DNA, 400 bp, Glycine max
gacagcaaaaacaattaataaagatgagtttgaagaacaacatggtggtgctaaaggtgtgtttgatgcttcttttccttgtgggggttacagctagacgcatggaactgagcttcttcaaaagtgatcagtcatcaagttatgatgatgatgagtattcaaaaccatgctgtgatctctgcatgtgcacacgctcaatgcctcctcaatgcggctgtgaagatattatgctgaattcatgccactcagattgtaagagctgtatgtgcacacgctcacagccaggacagtgtcattgtcatgacaccaacgacttctgctacaaaccttgcaagtccatagatgactagagaaactaataactctctcaaatggacgaagcccctttaagctttgtttg

SEQ ID NO: 254921 - DNA, 360 bp, Glycine max
gacagcaaaaacaattaataaagatgagtttgaagaacaacatggtggtgctaaaggtgtgtttgttgcttcttttccttgtgggggttacagctgcacgcatggaactgagcttcttcaaaagtgatcagtcatcaagttatgatgatgatgagtattcaaaaccatgctgtgatctctgcatgtgcacacgctcaatgcctcctcaatgcagctgtgaagatattaggctgaattcatgccactcagattgtaagagctgtatgtgcacacgctcacagccaggacagtgtcgttgtcttgacaccaacgacttctgctacaaaccttgcaagtccagagatgactagaaaaactaat

SEQ ID NO: 254922 - DNA, 414 bp, Glycine max
gatgcaactgaataattaagaaaagccatttccatagcagcctaagaaaatgaagagcactagcttgttcgctatctttctactttgcgccttcacctcatacctaccttccgccaccgcccaggacgtgctcgacgtggatggcgatccgattcggaacggtttcatatactacgttttgccggcaataagaggaaacggtggcggaatagaacgagtcgcactcgggaaagacacttgccctatcactgtagtgcaatctcccaatccaaactctaaggggttagaaattaagtttgaatctgcataccccgcctattacataaacgaaaccctaattttgcaaataaagttcagttacccacagcagtgtgaaagaaagaatccttggtgggccatttctaaggatatatc

SEQ ID NO: 254923 - DNA, 405 bp, Glycine max
gacagcaaaaacaattaataaagatgagtttgaagaacaacatggtggtgctaaaggtgtgtttgttgcttcttttccttgtgggggttacagctgcacgcatggaactgagcttcttcaaaagtgatcagtcatcaagttatgatgatgatgagtattcaaaaccatgctgtgatctctgcatgtgcacacgctcaatgcctcctcaatgcagctgtgaagatattaggctgaattcatgccactcagattgtaagagctgtatgtgcacacgctcacagccaggacagtgtcgttgtcttgacaccaacgacttctgctacaaaccttgcaagtccagagacgactagaaaaactaatagctctctcaaatggacgaagcccctttaggctttgtttgttatg

SEQ ID NO: 254924 - DNA, 441 bp, Glycine max
gacacaactaactaagaaagtcttccatagccccccaaaaatgaagagcaccatcttctttgctctctttctcttttgtgccttcaccacctcagacctagcgtcagccatcgctgatttcgtgctcgacaatgaaggtaaccctcttgaaaatggtggcacatattatatcttgtcagacataacagcatttggtggaataagagcagccccaacgggaaatgaaagatgccctctcactgtggtgcaatctcgcaatgagctcgacaaagggattgggacaatcatctcgttcccatatcgaatccgttttatcgccgaacgccatcctttgagccttaagttcgattcacttgcagttataatgccgtgtgttgggattcctaccgagtggtctgttgttgaggatctacagaaaggactgctgttaacattggtgag

SEQ ID NO: 254925 - DNA, 386 bp, Glycine max
gacagcaaaaacaattaataaagatgagtttgaagaacaacatggtggtgctaaaggtgtgtttgttgcttcttttccttgtgggggttacagctgcacgcatggaactgagcttcttcaaaagtgatcagtcatcaagttatgatgatgatgagtattcaaaaccatgctgtgatctctgcatgtgcacacgctcaatgcctcctcaatgcagctgtgaagatattaggctgaattcatgccactcagattgtaagagctgtatgtgcacacgctcacagccaggacagtgtcgttgtcttgacaccaacgacttctgctacaaaccttgcaagtccagagatgactagaaaaactaatagctctctcaaattgacgaagcccct

SEQ ID NO: 254926 - DNA, 404 bp, Glycine max
gacagcaaaaacaattaataaagatgagtttgaagaacaacatggtggtgctaaaggtgtgtttgttgcttcttttccttgtgggggttacagctgcacgcatggaactgagcttcttcaaaagtgatcagtcatcaagttatgatgatgatgagtattcaaaaccatgctgtgatctctgcatgtgcacacgctcaatgcctcctcaatgcagctgtgaagatattaggctgaattcatgccactcagattgtaagagctgtatgtgcacacgctcacagccaggacagtgtcgttgtcttgacaccaacgacttctgctacaaaccttgcaagtccagagatgactagaaaaactaatagctctctcaaatggacgaagcccctttaggctttgtttgttat

SEQ ID NO: 254927 - DNA, 407 bp, Glycine max
gattcacacaactaactaagaaagtcttccatagccccccaaaaatgaagagcaccatcttctttgctctctttctcttttgtgccttcaccacctcatacctaccttcagccatcgctgatttcgtgctcgataatgaaggtaaccctcttgaaaatggtggcacatattatatcttgtcagacataacagcatttggtggaataagagcagccccaacgggaaatgaaagatgccctctcactgtggtgcaatctcgcaatgagctcgacaaagggattggaacaatcatctcgtccccatatcgaatccgttttatcgccgaaggccatcctttgagccttaagttcgattcatttgcagttataatgctgtgtgttggaattcctaccgagtggtctgttgtg

SEQ ID NO: 254928 - DNA, 409 bp, Glycine max
ggcatcgaacagagagagagagaatggcagcacttggtgggaatcgtgatgtgacaggaagccggaacagcgttgagatcgatgctctagctcgctttgctgttgaagaacacaacaaaaaacagaatgcccttttggagtttgaaaaggtggtaactgcgaaacagcaagtggtttctggtaccttgtacaccatcactttggaggcaaaagatggtgggcaaaagaaggtttatgaagccaaagtttgggagaagtcatggttgaacttcaaggaggtgcaagagttcaagcttgttggagatgcacctgcatagtctagtgcttaattaggttgctgaagagtgaagaatgagacagcctggttcgaaggggaaaagcctaacgatatatcaaaggatcctatatg

SEQ ID NO: 254929 - DNA, 315 bp, Glycine max
gacagcaaaaacaattaataaagatgagtttgaagaacaacatggtggtgctaaaggtgtgtttgttgcttcttttccttgtgggggttacagctgcacgcatggaactgagcttcttcaaaagtgatcagtcatcaagttatgatgatgatgagtattcaaaaccatgctgtgatctctgcatgtgcacacgctcaatgcctcctcaatgcagctgtgaagatattaggctgaattcatgccactcagattgtaagagctgtatgtgcacacgctcacagccaggacagtgtcgttgtcttgacaccaacgact

SEQ ID NO: 254930 - DNA, 324 bp, Glycine max
ggtagttccaccgagtagcaacaatgtcgaagcgaggtcgcggaggatcggcgggaaacaagttccgcatgtcgctgggtctgccggtggcggcgacggtgaactgcgccgacaacaccggcgcgaagaacctctacatcatatcagtgaacgggatcaagggtaggctgaaccggttgccgtcagcttgcgtcggagacatggttatggccaccgtcaagaagggaaagcccgatctccgtaagaaggtgctgcccgccgtcatcgtccgccaccgcaagccttggcgccgaaagtaacgtgtttacatctacttccaagata

SEQ ID NO: 254931 - DNA, 300 bp, Glycine max
taccgctgctacaatacgacagaatgggacagcaacaacagttaataacgatgactttgatgatcaacatggtggtgctaaaggtgtgtttgttgcatcttttccctgtgggggttacatctgcacgcatggaactgagcttcttcaaaactgatcagtcatcaagttatgatgatgatgagtattcagaaccatgctgtgatctctgcatgtgcacacgctcaatgcctcctcactgcagctgtgaagatactacgctgaattcatgccactcagattgtaagagctgtatgtgcacac

SEQ ID NO: 254932 - DNA, 374 bp, Glycine max
gcgaacgagaggctgaagagaacagcaagatattattcatccaattggagaacctgggctgctgtcaacattcaatttgcttggagacgttacaggcagaggactaaaggtccagtgacccctgtaagggacactaatggaggcactgaacgcaggctcttgcaatatgctgcaatgttcatgtcaataaggccacatgaccaccttgaatgaaaactggtgtgtccatgatttttcttattgttgttggttattgatcctcaataaaattgtatttcaaatccattagacctgttgaaggtgaaatgtattaaaaaaaaaaaacaacacagtgagtacgagtaattgacaaaattattgagaccccttctttc

SEQ ID NO: 254933 - DNA, 421 bp, Glycine max
gacacacagctattcctcttaagcttgctactgagtttccacactgcataccttaggtcttccgaattcgaagttaatttgcaagatggctaaggaaaaggctcagatcaacattgtggtggttggtcatgtggaccctgaggaggcaaccaccattaacgagctgaagaagcctgttgtggagaaagaagctccagggcatgccatatgagggcatgcacgtacggcctcggaggggaaccagaaaattatgttaacaaaataatctggaaccctaatgtatcggtgtcatcatcagtgtgtagtttaagctagctttgctatggttacgttctttgagatgagagtcttgatgaacagtaccattctgatgtattgctttccttgaaagttaatgcatgcttcttatcttctgtcaaaa

SEQ ID NO: 254934 - DNA, 395 bp, Glycine max
gattcacacaactaactaagaaagtcttccatagccccccaaaaatgaagagcaccatcttctttgctctctttctcttttgtgccttcaccacctcatacctaccttcagccatcgctgatttcgtgctcgataatgaaggtaaccctcttgaaaatggtggcacatattatatcttgtcagacataacagcatttggtggaataagagcagccccaacgggaaatgaaagatgccctctcactgtggtgcaatctcgcaatgagctcgacaaagggattggaacaatcatctcgtccccatatcgaatccgttttatcgccgaaggccatcctttgagccttaagttcgattcatttgcagttataatgctgtgtgttggaattcccaccgag

SEQ ID NO: 254935 - DNA, 421 bp, Glycine max
cagcaagagcaaggaggtcatcaaagccagaaaggaaagcatcagcaagaagaagaaaacgaaggaggcagcatattgagtggcttcaccctggaattcttggaacatgcattcagcgtggacaagcagatagcgaaaaacctacaaggagagaacgaaggggaagacaagggagccattgtgacagtgaaaggaggtctgagcgtgataaaaccacccacggacgagcagcaacaaagaccccaggaagaggaagaagaagaagaggatgagaagccacagtgcaagggtaaagacaaacactgccaacgcccccgaggaagccaaagcaaaagcagaagaaatggcattgacgagaccatatgcaccatgagacttcgccacaacattggccagacttcatcacctgacatctacaacc

SEQ ID NO: 254936 - DNA, 387 bp, Glycine max
gacagcaaaaacaattaataaagatgagtttgaagaacaacatggtggtgctaaaggtgtgtttgttgcttcttttccttgtgggggttacagctgcacgcatggaactgagcttcttcaaaagtgatcagtcatcaagttatgatgatgatgagtattcaaaaccatgctgtgatctctgcatgtgcacacgctcaatgcctcctcaatgcagctgtgaagatattaggttgaattcatgccactcagattgtaagagctgtatgtgcacacgctcacagccaggacagtgtcgttgtcttgacaccaacgacttctgctacaaaccttgcaagtccagagatgactagaaaaactaatagctctctcaaatggacgaagcccctt

SEQ ID NO: 254937 - DNA, 414 bp, Glycine max
ggaagtaagggatcgagcctcggaggagggaatcgcagcgaagtccactatgccgaagcaaattcacgagattaaggacttcctcctcactgctaggaggaaggatgcacgctctgtgaaaatcaagcggagcaaggatgtggtgaagttcaaggtccgttgctccaagtacctttacaccctctgtgtgtttgattctgagaaggctgataagttgaagcaatcacttcctccaggtttaagcgtgcaggatgtgtgattcttactgctgtatgaagatcaggtttttctctggattttggggattcatagttagtaaaatggttcagagaattttcgtatttgttgttacattcgggatcatgctagtattttgtttaagacggatccaacttgcttggggattatgtggct

SEQ ID NO: 254938 - DNA, 207 bp, Glycine max
gatagcaaaatcgtttctccaatttaatcaccattgtacaacccaattcccttcgtcgttttcgattaagagagcaatggcacgtaccaagcaaaccgctcgcaagtccaccggacgaaacgctccgaggaagcaattggcaaccaaagccgctcgcaagtcagccccggcgaccggcggagtgaacaagccccaccgcttcaggcc

SEQ ID NO: 254939 - DNA, 420 bp, Glycine max
  unsure (1)..(420): unsure at all n locations
gacggcaaaaacaattaataaagatgagtttgaagaacaacatggtggtgctaaaggtgtgtttgttgcttcttttccttgtgggggttacagctgcacgcatggaactgagcttcttcaaaagtgatcagtcatcaagttatgatgatgatgagtattcaaaaccatgctgtgatctctgcatgtgcacacgctcaatgcctcctcaatgcagctgtgaagatattaggctgaattcatgccactcagattgtaagagctgtatgtgcacacgctcacagccaggacagtgtcgttgtcttgacaccaacgacttctgctacaaaccttgcaagtccagagatgactagaanaactaatagctctctcaaatggacgaagcccctttacgctttgtttgttatgttacgggagacaaat

SEQ ID NO: 254940 - DNA, 359 bp, Glycine max
gacagcaaaaacaattaataaagatgagtttgaagaacaacatggtggtgctaaaggtgtgtttgttgcttcttttccttgtgggggttacagctgcacgcatggaactgagcttcttcaaaagtgatcagtcatcaagttatgatgatgatgagtattcaaaaccatgctgtgatctctgcatgtgcacacgctcaatgcctcctcaatgcagctgtgaagatattaggctgaattcatgccactcagattgtaagagctgtatgtgcacacgctcacagccaggacagtgtcgttgtcttgacaccaacgacttctgctacaaaccttgcaagtccagagatgactagaaaaactaa

SEQ ID NO: 254941 - DNA, 376 bp, Glycine max
gattcatgcaactgaataattaagaaaagccatttccatagcagcctaagaaaatgaagagcactagcttgttcgctatctttctactttgcgccttcacctcatacctaccttccgccaccgcccaggacgtgctcgacgtggatggcgatccgattcggaacggtttcatatactacgttttgccggcaataagaggaaacggtggcggaatagaacgagccgcactcgggaaagacacttgccctatcactgtagtgcaatctcccaatccaaactctaaggggttagaaattaagtttgaatctgcataccccgcctattacataaacgaaaccctaattttgcaaataaagttcagttacccacagcagtg

SEQ ID NO: 254942 - DNA, 339 bp, Glycine max
ggttctactgtgtgaatgtttgttgttgtaactcgttcatcttcttttgttgttctgtgtttgtgtttgttttttctctcagctgaaaatgtcttgctgcggtggtaactgtggttgcggaagctcctgtaagtgaggaaacagctgcagaggctgcaagatgtacccagacttgagctacactgagtcaaccaccaccgagaccttggtcatgggagtggcacctgttaatgctcaatttgagggtgctgaaatgggtgtgcacgctgagaaagatggctgcaaatgtggagcaaactgctcctgcaatccctgcacgtgcaagtgacgtgttgggag

SEQ ID NO: 254943 - DNA, 351 bp, Glycine max
gactttgagttcgaactaaacaattcaattcaatctgcctcgatcatggagaggaaaacatttgggtttttgttcttgctcctccttgtcttagcttctgatgtgacggtgaagagagcagaggcgaaagattgcttgacaaggaggcacgggttccagggtagatgcttattcgacaggcaatgtgcacatgtgtgcaggagcgatggtttcatcggtggtcagtgccgaggccctcttcgcaaatgcttttgcagcaggccatgttgatcgaaattactactgccaaagaggccatgaaataaacaaacaaacaaataaataaatagctctaaccgacacatatgtacg

SEQ ID NO: 254944 - DNA, 349 bp, Glycine max
agaagaggaggaagaacacgcaggaagagggcacgaaaggagaaaagaagaagaagaaacagcacggagggaacaagaacaagaacaggctgaaagacagcaacaaaagagagaaaagaggagacaaaaggaggaacaaggagaaggagaagaagaagaagaagaagatgaagaggaaccaacatggtgggagagaagagaaagaagaaaacagaaggggaaaagtccagaagaaggagtagaatgggagcaagaacaagctacgagagaagcagaagaagcacagagggaacaagaacaagctaaaagagaagcagcacagagggaacaagaacggggcaaaagagag

SEQ ID NO: 254945 - DNA, 406 bp, Glycine max
gattcacacaactgactaagaaagtcttccatagccccccaaaaatgaagagcaccatcttctttgctctctttctcttttgtgccttcaccacctcatacctaccttcagccatcgctgatttcgtgctcgataatgaaggtaaccctcttgaaaatggtggcacatattatatcttgtcagacataacagcatttggtggaataagagcagccccaacgggaaatgaaagatgccctctcactgtggtgcaatctcgcaatgagctcgacaaagggattggaacaatcatctcgtccccatatcgaatccgttttatcgccgaaggccatcctttgagccttaagttcgattcatttgcagttataatgctgtgtgttggaattcctaccgagtggtctgttgt

SEQ ID NO: 254946 - DNA, 403 bp, Glycine max
gattcacacaactaactaagaaagtcttccatagccccccaaaaatgaagagcaccatcttctttgctctctttctcttttgtgccttcaccacctcatacctaccttcagccatcgctgatttcgtgctcgataatgaaggtaaccctcttgaaaatggtggcacatattatatcttgtcagacataacagcatttggtggaataagagcagccccaacgggaaatgaaagatgccctctcactgtggtgcaatctcgcaatgagctcgacaaagggattggaacaatcatctcgtccccatatcgaatccgttttatcgccgaaggccatcctttgagccttaagttcgattcatttgcagttataatgctgtgtgttggaattcctaccgagtggtctgt

SEQ ID NO: 254947 - DNA, 287 bp, Glycine max
gagagaaagagagagaaagatgtcgaagcgtggtcgtggtggttcggcggggaacaagttccgcatgtcgctgggtcttccagtggcggcgacggtgaactgcgccgacaacacgggggcgaagaacctctacatcatttcggtgaaagggatcaaaggccgtttgaaccgtcttccctcggcctgcgttggcgacatggtgatggccaccgtgaagaagggaaaacccgatctgaggaagaaggtcttgccagctgtcatcgttcgccagcgcaagccatggcgcc

SEQ ID NO: 254948 - DNA, 400 bp, Glycine max
gggggggcagcgcagcaatacgtaacaagttctatcattgaggaagtttccggtctccgaaaatgaacgacgcagatgtctcgaagcaaatccagcaggtggtgcggttcatccgccaggaagctgaggaaaaggccaacgagatctctgtctccgccgaagaggaattcaatatcgagaagctgcagttggtcgaagccgacaagaagaagatcgggcaagaatacgaacgcaaagagcgccaagtcgaaattcgcaagaagattgggtactcgatgcagctgaatgcttctcggatcaaagttcttcaagctcaagatgacgtgatcagttccatgaaagaagctgcatccaaggaactgttgaatgtgagtcatcatcatcatttgaatctactgag

SEQ ID NO: 254949 - DNA, 406 bp, Glycine max
gacggcactcgttttcgttctcgttctggtttatggatctttgcgaaggaggtttacagcgctcaaccaaagatgcagaacgaggaaggacagatcactgagctttacattcctaggaagtgctccgccacaaacagattgattaccgctaaggaccatgcttcggttcagatcaacattgggcatgtggatgagaatggcgtctacaatggccatttctccacttttgccctctgcggattcatccgtgctcagggtgatgctgacagtgccctagaccgcttgtggcagaagaagaaagttgaagttaagcaacagtagacacccatgatagtttgttacttcgttatgtattaattcctactcttgctagagatatttgagtactatgattgtcgttttgagc

SEQ ID NO: 254950 - DNA, 409 bp, Glycine max
ggaagaagatggcgtcgagcggagcggtgccgttttggagggcagcggggatgacatacatcacatactcaaacatatgcgcgaatctggtcaggaattgcctcaaggaaccctacaaggctgaagccatccctcgtgagaaggtccattttgctctctccaaatgggtcgacgccaagcctgaaaaacctactattcgttcagacaccccaaagcagtgatccggaatagttggaagctataaatgcataaatctttgagatctggaagttcattgtcattttgaacctttcctgtatgtttagttcctttgcttctttttttttcattccaataaatggagcatacactggattttgactttcatgagtaatcctgtaataatacaatttaaacaattattttgacc

SEQ ID NO: 254951 - DNA, 369 bp, Glycine max
acacaaaagggattccattgtgtagtaaccaatcatctttagttcttcagtaatttattgtgggattctattctaagattttgagaatgtctagctgtgggtgtggaagcagctgcaactgtggcagcaactgcggttgcaacaagtactcttttgacttgagttacgttgagaagacaaccacagagactctagttttgggtgttgggcctgtgaaggcccaattggagggtgctgaaatgggtgttgcatctgagaacggtggctgcaactgtggattaagctgcacctgtgacccatgcaactgcaagtaaggtcaagatgtataaccttgaagcagagatagctgtaatatatgtttcaacaaat

SEQ ID NO: 254952 - DNA, 440 bp, Glycine max
gacagcaaaaacaattaataaagatgagtttgaagaacaacatggtggtgctaaaggtgtgtttgttgcttcttttccttgcgggggttacagctgcacgcatggaactgagcttcttcaaaagtgatcagtcatcaagttatgatgatgatgagtattcaaaaccatgctgtgatctctgcatgtgcacacgctcaatgcctcctcaatgcagctgtgaagatattaggctgaattcatgccactcagattgtaagagctgtatgtgcacacgctcacagccaggacagtgtcgttgtcttgacaccaacgacttctgctacaaaccttgcaagtccagagatgactagaaaaactaatagctctctcaaatggacgaagcccctttaggctttgtttgctatgttaggggagacaaataaaacaagaaataaaagctc

SEQ ID NO: 254953 - DNA, 436 bp, Glycine max
gggggtgtgactccaaacaaaaactactacttgcttagcacacaatattatgaaaaccaccgcagaggttgtttcatctcattgtcttgttgtagcagagtgctctcaatccagccccacacaactttctgctatggaacctcagattctgaatttggggtgcatgcattacagaaggagatgcaagatcagagcgccgtgctgtgatgaggtttttgactgtaggcattgccataatgaagctaagaattctgaggaggttgatgctgtggatcgtcatgatgttccacgccatgaaattaagaaggttatctgctccttatgtgatgtagagcaagatgttcagcagtactgtataaactgtggaatatgcatgggcaagtacttttgtactatatgcaaattctttgatgatgatatttcaaagaatcaatac

SEQ ID NO: 254954 - DNA, 428 bp, Glycine max
  unsure (1)..(428): unsure at all n locations
gagcaaaaacaattaataaagatgagtttgaagaacaacatggtggtgctaaaggtgtgtttgttgcttcttttccttgtgggggttacagctgcacgcatggaactgagcttcttcaaaagtgatcagtcatcaagttatgatgatgatgagtattcaaaaccatgctgtgatctctgcatgtgcacacgctcaatgcctcctcaatgcagctgtgaagatattaggctgaattcatgccactcagattgtaagagctgtatgtgcacacgctcacagccaggacagtgtcgttgtcttgacaccaacgacttctgctacaaaccttgcaagtccagagatgactagaanaactaatagctctctcaaatggacgaagcccctttaggctttgtttgttatgttagggagacanttaaacagaaata

SEQ ID NO: 254955 - DNA, 373 bp, Glycine max
  unsure (1)..(373): unsure at all n locations
ggagtgcagtgatagagataagaaaatgtggcttgtgcagctctcaaccccatttctgaacggacatggtcattccaccacccttctctccaagcacagttcggcggtgactcagacccactgggccccaccgagtttcctgcctcaaatcaatgcgatgaagacaatgcaggggagagtggtgtgctccaccagcgacaagacggtggcagtggaggtggtgcggctggcccctcacccaaagtacaagaggcgcgtgaggaagaagaagaagtaccaggcccacgaccccgataaccaattcaaagtcggcgacatcgtccagctccagannagacagcccatcagcaaagacaaggcctttctcgcactc

SEQ ID NO: 254956 - DNA, 262 bp, Glycine max
cagaacgggaccgcactccttttccttctcgttctggtttatggatctttcccaacgatgtttacagcgctcaaccacatattcgggaccacgggggacaggtcacttaactttacattcctacgcagtgctccctcacatacacattgactatcgctaatgaacatgcttcggttcacattaacattgcgcatgtcgatcacaatggcgtctacaactggtcatttctccatttttgccccctgcggattcatccgtgctc

SEQ ID NO: 254957 - DNA, 416 bp, Glycine max
gacagcaaaaacaattaataaagatgagtttgaagaacaacatggtggtgctaaaggtgtgtttgttgcttcttttccttgtgggggttacagctgcacgcatggaactgagcttcttcaaaagtgatcagtcatcaagttatgatgatgatgagtattcaaaaccatgctgtgatctctgcatgtgcacacgctcaatgcctcctcaatgcagctgtgaagatattaggctgaattcatgccactcagattgtaagagctgtatgtgcacacgctcacagccaggacagtgtcgttgtcttgacaccaacgacttctgctacaaaccttgcaagtccagagatgactagaaaaactaatagctctctcaaatggacgaagcccctttaagctttgtttgttatgttaggggagac

SEQ ID NO: 254958 - DNA, 338 bp, Glycine max
gcactcactcatatgtgtgagaccagcttttgcttctttgtgaacatggagatgaggaactcatgtggcttcttcttcttgctcctcctccttgtctttgcttcccaggtggtggtgcatacggagggaacagtgtgtgagtcacaaaaccactggtactagggtttgtctaatataaaccacaagtgtgctttggtctgcaagaaccaatgtttctccggtggtaagtgtaaaggcttccgctgccgttgcttttgcaccaagatttgttgagatctcatcaaatacgactcttgccatgccaattcataaatcatagctaggccaaatgaaatgca

SEQ ID NO: 254959 - DNA, 440 bp, Glycine max
  unsure (1)..(440): unsure at all n locations
gatgtgtgaacaatcgtgaagttttttctttgagaagtaaaagatcttagtgcaagtaattaacatggaatctcagcaagcaaaccgtgaagaacttgatgagaaggcaaggcaaggtgaaactgttgttcctggaggaactggtgggaagagtcttgaggctcaagaacatcttgctgaaggaaggagccgtggagggcagacgaggaagcagcagctagggtcagaggggtatcatgaaatggggaccaaaggagggcagacaaggaaggaacagatggggagagaagggtaccaagagatgggacgcaaaggaggactcagcaccatggacaagtctggtggagaacgtgctgaagaggaaggcatanaaatanatgagtctaagtttaaaatttactaaaaaactaaaaaattgtgaggaagaagtgttttgttgt

SEQ ID NO: 254960 - DNA, 442 bp, Glycine max
ggcagcagcaactttaaacgccgaagaaagttcatccaatctccgaagcccttcaccgcattgcaaccatgtcgagaagaaaggttagagagccaaaggaagaaaacgtgactctgggcccagctgttagagatggcgaacatgtctttggcgtcgctcgcatctttgcctccttcaatgataccttcattcatgtcactgatctgtccgggagggaaacacttgtccgcatcacaggtggaatgaaggttaaggctgacagagatgaatcgtctccctatgctgctatgcttgctgcacaggacgttgctgccagatgcaaggaactgggcataactgctcttcacatcaagctccgtgcgacgggtggaaacaagacaaaaacacctggtcctggtgctcaatcagctcttcgtgtccttgctcgttctggaatgaaaat

SEQ ID NO: 254961 - DNA, 444 bp, Glycine max
ggtagttccaccgagtagcaacaatgtcgaagcgaggtcgcggaggatcggcgggaaacaagttccgcatgtcgctgggtctgccggtggcggcgacggtgaactgcgccgacaacaccggcgcgaagaacctctacatcatatcagtgaaggggatcaagggtaggctgaaccggttgccgtcagcttgcgtcggagacatggttatggccaccgtcaagaagggaaagcccgatctccgtaagaaggtgctgcccgccgtcatcgtccgccagcgcaagccttggcgccgaaaggacggtgtttacatgtacttcgaagataatgctggtgttatcgtgaatcccaagggtgaaatgaaaggttctgctatcactggtccaattgggaaggagtgtgctgatctgtggcccaggattgcaagtgctgccaatgctattgttt

SEQ ID NO: 254962 - DNA, 378 bp, Glycine max; identical to SEQ ID NO: 239511

SEQ ID NO: 254963 - DNA, 382 bp, Glycine max
gactcactcatacaatagagaccagcttttgcttctttgtgaacatggagatgaggaaatcatgtggcttcttcttcttgctcctcctccttgtctttgcttcccaggtggtggtgcagacggagggaagagtgtgtgagtcacaaagccacgggttccatggtttgtgtaatagagaccacaactgtgctttggtctgcacgaacgaatgtttctccggtggcaggtgcaaaggcttccgccgccgctgcttttgcaccaggatttgttgagatctcatcagacactactcttgccatgcaaattaataaatcatagctaggccaaataaattgcatctactctttatccaattgggagctagctacaaaagcaactcata

SEQ ID NO: 254964 - DNA, 326 bp, Glycine max
ggattcacacaactaattaacaacttcttccatacccccccaaaaatcaacagcaccatcttctttgctctctttctcttttgtgccttcacgacctcatacctaccttcatccatcgctgatttcctgctctataattaacgtaaccctcttcaaaatcgtggcacatattatatcttgtcagacataacagcatttggtcgaataataccatctccacacgcaaattaaaccatctcctcccactgtgtcgcaatctcacaatgcgctccacaaacggattccaacaatcctctcgtccccactatctagtctgtctttattcc

SEQ ID NO: 254965 - DNA, 306 bp, Glycine max
gacagcaaaaacaattaataaagatgagtttgaagaacaacatggtggtgctaaaggtgtgtttgttgcttcttttccttgtgggggttacagctgcacgcatggaactgagcttcttcaaaagtgatcagtcatcaagttatgatgatgatgagtattcaaaaccatgctgtgatctctgcatgtgcacacgctcaatgcctcctcaatgcagctgtgaagatattaggctgaattcatgccactcagattgtaagagctgtatgtgcacacgctcacagccaggacagtgtcgttgtcttgaca

SEQ ID NO: 254966 - DNA, 375 bp, Glycine max
gaggcaagggatgagttgcacaagacgttgaatgaggatgaacttagagatgctgttttgcttgtttttgccaacacgcaatatcctcccaatgcaatgaatgctgcacaaatgactgacaagcttggacttcattcactccgtcaacgccactggtatatccaaagcacttgtgcaacttctggacagggtctctatgagggtttggactggctttctaacaacattgccagcagggcatgagacatttgaaaatttttggtcctgtctggtgatttcctgctgagtatggcggttcttggagaaagatgcatatcccttcttgtcaatgttgtaatagcagaatgcctgctagaagtactctcttcatttgtg

SEQ ID NO: 254967 - DNA, 394 bp, Glycine max; identical to SEQ ID NO: 245100

SEQ ID NO: 254968 - DNA, 443 bp, Glycine max
  unsure (1)..(443): unsure at all n locations
gattcacacaactaactaagaaagtcttccatagccccccaaaaatgaagagcaccatcttctttgctctctttctcttttgtgccttcaccacctcatacctaccttcagccatcgctgatttcgtgctcgataatgaaggtaaccctcttgaaaatggtggcacatattatatcttgtcagacataacagcatttggtggaataagagcagccccaacgggaaatgaaagatgccctctcactgtggtgcaatctcgcaatgagctcgacaaagggattggaacaatcatctcgtccccatatcgaatccgttttatcgccgaaggccatcctttgagccttaagttcgattcatttgcagttataatgctgtgtgttggaattcctaccgagtggtctgttgtggaggatctancagaaaggactgctgttaaattggtg

SEQ ID NO: 254969 - DNA, 406 bp, Glycine max
gattcacacaactaactaagaaagtcttccatagccccccaaaaatgaagagcaccatcttctttgctctctttctcttttgtgccttcaccacctcatacctaccttcagccatcgctgatttcgtgctcgataatgaaggtaaccctcttgaaaatggtggcacatattatatcttgtcagacataacagcatttggtggaataagagcagccccaacgggaaatgaaagatgccctctcactgtggtgcaatctcgcaatgagctcgacaaagggattggaacaatcatctcgtccccatatcgaatccgttttatcgccgaaggccatcctttgagccttaagttcgattcatttgcagttataatgctgtgtgttggaattcctaccgagtggtctgttgt

SEQ ID NO: 254970 - DNA, 420 bp, Glycine max
ggaaggtcagaactgagaaacgcaatgagctcgtcgaacctcagagatcttcaacgcgaattggagaacaaagccaatgatcgcagcaagcttcaaaaggaaattgcgaagaatcaccaaatgagaaagaaatacacggtccagcttggcgagaacgagctcgtccttaaggaactggatttattgaaagacgacgcaaatgtttataagttgattgggccagtacttgttaagcaagatttggccgaggccaatgcaaatgtccgcaagagaatcgaatacatctcagctgaattgaagcgtctggatgccactgttcaagatttggaagagaagcaaaataccaagaaagatacgatactaaaattgcaacaaaggattcaatcatttcgggctggggaaaggaacgcgtagttttcc

SEQ ID NO: 254971 - DNA, 419 bp, Glycine max
gacagcaaaaacaattaataaagatgagtttgaagaacaacatggtggtgctaaaggtgtgtttgtcgcttcttttccttgtgggggttacagctgcacgcatggaactgagcttcttcaaaagtgatcagtcatcaagttatgatgatgatgagtattcaaaaccgtgctgtgatctctgcatgtgcacacgctcaatgcctcctcaatgcagctgtgaagatattaggctgaattcatgccactcagattgtaagagctgtatgtgcacacgctcacagccaggacagtgtcgttgtcttgacaccaacgacttctgctacaaaccttgcaagtccagagatgactagaaaaactaatagctctctcaaatggacgaagcccctttaggctttgtttgttatgttaagggagacaaa

SEQ ID NO: 254972 - DNA, 435 bp, Glycine max
gacagcaaaaacaattaataaagatgagtttgaagaacaacatggtggtgctaaaggtgtgtttgttgcttcttttccttgtgggggttacagctgcacgcatggaactgagcttcttcaaaagtgatcagtcatcaagttatgatgatgatgagtattcaaaaccatgctgtgatctctgcatgtgcacacgctcaatgcctcctcaatgcagctgtgaagatattaggctgaattcatgccactcagattgtaagagctgtatgtgcacacgctcacagccaggacagtgtcgttgtcttgacaccaacgacttctgctacaaaccttgcaagtccagagatgactagaaaaactaatagctctctcaaatggacgaaacccctttaggctttgtttgttatgttaggggagacaaataaaacaagaattaaa

SEQ ID NO: 254973 - DNA, 399 bp, Glycine max
gacagcaaaaacaattaataaagatgagtttgaagaacaacatggtggtgctaaaggtgtgtttgttgcttcttttccttgtgggggttacagctgcacgcatggaactgagcttcttcaaaagtgatcagtcatcaagttatgatgatgatgagtattcaaaaccatgctgtgatctctgcatgtgcacacgctcaatgcctcctcaatgcagctgtgaagatattaggctgaattcatgccactcagattgtaagagctgtatgtgcacacgctcacagccaggacagtgtcgttgtcttgacaccaacgacttctgctacaaaccttgcaagtccagagatgactagaaaaactaatagctctctcaaatggacgaagccctttaaggcttgtttg

SEQ ID NO: 254974 - DNA, 323 bp, Glycine max
gagggttttgcgctgttgttgctgctcatcctccgtaacctccgagctctgcaccgaaaaactaggccatggggaagacagatggcatgggatctgctcacaagctcaagtctcaccgcacgaggcaaacgtgggctgacaagtcatacaacaaatcacatcttggaaatgaatggaagaaaccttttgctggttcatctcatgccaagggaattgtcccttaacagatacgtaatgatgccaagcatcccaactctgccactctctagtgtgtcagcgttcaacctatcaagaatcggaagaatatccccgcttttgtccct

SEQ ID NO: 254975 - DNA, 347 bp, Glycine max
gactttgagttcgaactaaacaattcaattcaatctgcctcgatcatggagaggaaaacatttgggtttttgttcttgcgcctccttgtcttagcttctgatgtgacggtgaagagagcagaggcgaaagattgcttgacaaggaggcacgggttccagggtagatgcttattcgacaggcaatgtgcacatgtgtgcaggagcgatggtttcatcggtggtcagtgccgaggccctcttcgcaaatgtttttgcagcaggccatgttgatcgaaattactactgccaaagaggccatgaaatagacaaacaaacaaataaataaatagctctaaccgacacatatg

SEQ ID NO: 254976 - DNA, 355 bp, Glycine max
gacggcaaaaacaattaataaagatgagtttgaagaacaacatggtggtgctaaaggtgtgtttgttgcttcttttccttgtgggggttacagctgcacgcatggaactgagcttcttcaaaagtgatcagtcatcaagttatgatgatgatgagtattcaaaaccatgccgtgatctctgcatgtgcacacgctcaatgcctcctcaatgcagctgtgaagatattaggctgaattcatgccactcagattgtaagagctgtatgtgcacacgctcacagccaggacagtgtcgttgtcttgacaccaacgacttctgctacaaaccttgcaagtccacagatgactagaaaaa

SEQ ID NO: 254977 - DNA, 354 bp, Glycine max
  unsure (1)..(354): unsure at all n locations
gagagcgaagaagaagaagaaacacgacacaagtccaaagtttgattccaaaatgcgatcctcaagcattcgcagcttcaccatcttcaccctctttctcattgcgatcctcncccacggacacgcaacaactccaacctccaaacttcgcctcaaacctctctcttctcccttttcaaccgccctcgaaaccctccagaaacaactcgggtacaccttcaagagcatcgatcttcttcgtcgcgccatgacacacgcttccttctccgaagaaaacaacaaagctttcgccattctcggcgccagcgtcatcgaaacctccgtctctttccatctgctctccagagacgttga

SEQ ID NO: 254978 - DNA, 386 bp, Glycine max
gacagcaaaaacaattaataaagatgagtttgaagaacaacatggtggtgctaaaggtgtgtttgttgcttcttttccttgtgggggttacagctgcacgcatggaactgagcttcttcaaaagtgatcagtcatcaagttatgatgatgatgagtattcaaaaccatgctgtgatctctgcatgtgcacacgctcaatgcctcctcaatgcagctgtgaagatattaggctgaattcatgccactcagattgtaagagctgtatgtgcacacgctcacagccaggacagtttcgttgtcttgacaccaacgacttctgccacaaaccttgcaagtccagagatgactagaaaaactaatagctctctcaaatggaacaaaccccc

SEQ ID NO: 254979 - DNA, 347 bp, Glycine max
gactttgagttcgaactaaacaattcaattcaatctgcctcgatcatggagaggaaaacatttgggtttttgttcttgctcctccttgtcttagcttctgatgtgacggtgaagagagcagaggcgaaagattgcttgacaaggaggcacgggttccagggtagatgcttattcgacaggcaatgtgcacatgtgtgcaggagcgatggtttcatcggtggtcagtgccgaggccctcttcgcaaatgcttttgcagcaggccatgttgatcgaaattactactgccaaagaggccatgaaataaacaaacaaacaaattaataaatagctctaaccgacacatatg

SEQ ID NO: 254980 - DNA, 385 bp, Glycine max
gacagcaaaaacaattaataaagatgagtttgaagaacaacatggtggtgctaaaggtgtgtttgttgcttcttttccttgtgggggttacagctgcacgcatggaactgagcttcttcaaaagtgatcagtcatcatcttatgattattatgagtactcaaaaccatgctgtgatctctgcatgtgcacacgctcaacgcctcctcaatgcagctgtgaagatattacgctgaattcatgccactcagattgtaagagctgtatgtgcacacgctcacagccaggacagtgtcgttgtcctgacaccaacgacttctgctacaaaccttgcaagtccagagatgactaaaaaaactaatagctctctcaaatggaccaagcccc

SEQ ID NO: 254981 - DNA, 389 bp, Glycine max
ggagtcgagaaacggcgcactccgtctgttcctcaccgtcaccggcgcgcgcaccctctgttccagcgactcctaattaagttgggaaataaaaaagacttcaaatttcccagatggctgcagcctttgcttccagatgctctcgtgtgggccgttctctgtctggtggattaagcaacagttcccctggtttatttacctcatcacatggcatgacatgcaacaatttgttttctcagcaacaacgtaccttcatacagatgaggactgttctcaaggttgtcgataactcaggtgctaaaaaggtgatgtgcatacaggcattgaaagggaagaaaggggcaagattaggtgacacaataatagcatctgtgaaggaagcacatcct

SEQ ID NO: 254982 - DNA, 415 bp, Glycine max
gacagcaaaaacaattaataaagatgagtttgaagaacaacatggtggtgctaaaggtgtgtttgttgcttcttttccttgtgggggttacagctgcacgcatggaactgagcttcttcaaaagtgatcagtcatcaagttatgatgatgatgagtattcaaaaccatgctgtgatctctgcatgtgcacacgctcaatgcctcctcaatgcagctgtgaagatattaggctgaattcatgccactcagattgtaagagctgtatgtgcacacgctcacagccaggacagtgtcgttgtcttgacaccaacgacttctgctacaaaccttgcaagtccagagatgactaaaaaaactaatagctctctcaaattggacaaaccctttaggctttttttgttatgttagggagaca

SEQ ID NO: 254983 - DNA, 301 bp, Glycine max
gattcacacaactaactaagaaagtcttccatatccccccaaaaatgaaccaggagcatcttgggttgctctctttctcttttgtgccttcaccacctcatacctaccttcagccatcgctgatttcgtgctcgataatgaaggtaaccctcttgaaaatggtggcacatattatatcttgtcacacataacagcatttggtggaataagagcacccccaacgggaaatgaaagatgccctctcactgtggtgcgatctcgcaatgagctcgacaaagggattggaacaatcatctcttcc

SEQ ID NO: 254984 - DNA, 346 bp, Glycine max
gattcacacaactaactaagaaagtcttccatagccccccaaaaatgaagagcaccatcttctttgctctctttctcttttgtgccttcaccacctcatacctaccttcagccatcgctgatttcgtgctcgataatgaaggtaaccctcttgaaaatggtggcacatattatatcttgtcagacataacagcatttggtggaataagagcagccccaacgggaaatgaaagatgccctctcactgtggtgcaatctcgcaatgagctcgacaaagggattggaacaatcatctcgtccccatatcgaatccgttttatcgccgaagggcatcctttgagccttaa

SEQ ID NO: 254985 - DNA, 379 bp, Glycine max
ggttcacacaactaactaagaaagtcttccatagccccccaaaaatgaagagcaccatcttctttgctctctttctcttttgtgccttcaccacctcatacctaccttcagccatcgctgatttcgtgctcgataatgaaggtaaccctcttgaaaatggtggcacatattatatcttgtcagacataacagcatttggtggaataagagcagccccaacgggaaatgaaagatgccctctcactgtggtgcaatctcgcaatgagctcgacaaagggattggaacaatcatctcgtccccatatccaatccgttttatcgcccgaaggcatcctttgagccttaaattcgattcatttgcagttataatgctgtgtgt

SEQ ID NO: 254986 - DNA, 383 bp, Glycine max
gattcacacagctaactaagaaagtcttccatagccccccaaaaatgaagagcaccatcttctttgctctctttctcttttgtgccttcaccacctcatacctaccttcagccatcgctgatttcgtgctcgataatgaaggtaaccctcttgaaaatggtggcacatattatatcttgtcagacataacagcatttggtggaataagagcagccccaacgggaaatgaaagatgccctctcactgtggtgcaatctcgcaatgagctcgacaaagggattggaacaatcatctcgtccccatatcgaatccgttttatcgccgaaaggcatcctttgagccttaagttcgattcatttgcagtttatatgctgtgtgttggg

SEQ ID NO: 254987 - DNA, 262 bp, Glycine max
taatttgggaattattgctcccatcgccattggtttcattgtcggcgctaacattttgttgggtggggccttctctggagcggccatgaaccccgctgtgacatttgggcctgctgtcgtgagctggacctggaccaaccactggatctactgggccgggcctctcatcggtggtggaatcgctggccttgtttacgaggttgtctttatcagccacacccacgagcagcttcccaccactgactactagagggggggaaat

SEQ ID NO: 254988 - DNA, 278 bp, Glycine max
agccgtcacttttggggaagaggtcgagtttcacagcagcaatggtgtacgtcaaggctcagaaatcaaaagcctacttcaagagatatcaagtcaagttcaagagaagaagagagggaaaaaccgattaccgtgccaggattcggttgattaatcaggacaagaacaaatataacactccgaaataccgatttgttgttcgctttagcaacaaggacattgttgcacaaataatatctgctagcattgctggcgatattgttcttgctgcagcatat

SEQ ID NO: 254989 - DNA, 374 bp, Glycine max
gattcacacaactaactaagaaagtcttccatagccccccaaaaatgaagagcaccatcttctttgctctctttctcttttgtgccttcaccacctcatacctaccttcagccatcgctgatttcgtgctcgataatgaaggtaaccctcttgaaaatggtggcacatattatatcttgtcagacataacagcatttggtggaataagagcagccccaacgggaaatgaaagatgccctctcactgtggtgcaatctcgcaatgagctcgacaaagggattggaacaatcatctcgtccccatatcgaatccgttttatcgccgaaggccatcctttgagccttaagttcgattcatttgcagttataatgctg

SEQ ID NO: 254990 - DNA, 319 bp, Glycine max
gattcacacaactaactaagaaagtcttccatagccccccaaaaatgaagagcaccatcttctttgctctctttctcttttgtgccttcaccacctcatacctaccttcagccatcgctgatttcgtgctcgataatgaaggtaaccctcttgaaaatggtggcacatattatatcttgtcagacataacagcatttggtggaataagagcagccccaacgggaaatgaaagatgccctctcactgtggtgcaatctcgcaatgagctcgacaaagggattggaacaatcatcccgtccccatatcgaatccgttttat

SEQ ID NO: 254991 - DNA, 382 bp, Glycine max
  unsure (1)..(382): unsure at all n locations
ggccgctctctgagaaaaacagatagtgtgggagagagaagagcggaagagaaaatgacgaccaggttcaagaagagcaggaagaagagaggtcacgtcagcgccggacacggccgtatcggaaagcatcgcaagcatcccggaggtcgcggtaacgccggtggcatgcatcagcaccgtatcctcttcgacaagtaccatcctggtttcttcgggaaggtaggcatgcgctacttcgagaaacttcgcaacaaattctacaatccgatcatcaacatcgacaagctgtggtcnctcctcccccaggaggccaaagacaaggccaccgccgacaaggcacccttgcccgatggtcaccagttcagttactttaagggtttgg

SEQ ID NO: 254992 - DNA, 190 bp, Glycine max
  unsure (1)..(190): unsure at all n locations
cagaagggtacggcctacanaacgggatcaagacccagttcaatatcctactacatcgtattaaagaatttactatatactatcatcatatctcggttcccagggggtgttggtgggagttgtcttcctcacaccactgtcttctccatttcgcattccctattttgatctgcaccagtccactccccct

SEQ ID NO: 254993 - DNA, 324 bp, Glycine max
  unsure (1)..(324): unsure at all n locations
ggaagtcgccgtttgttttcttttcgttcgcatcttctctctctctcagaaagatgaaggtggtcgccgcgtatttgctcgccgtccgcggtggcaacaacatcccctccgccgatgtcatcaaggaaatccttggctccgttggagtagaagcagatgaagataggattgaatcgtttttgtctgaagttaacggtaaggatatagttgagcttattgctgccggtatggaaaagttggccacggttccttctggtggtggtggtgccgttgccntcgccgcatctcctgggggaggtgctgctgctgctgctcctgctgctg

SEQ ID NO: 254994 - DNA, 370 bp, Glycine max
gacagcaaaaacaattaataaagatgggtttgaagaacaacatggtggtgctaaaggtgtgtttgttgcttcttttccttgtgggggttacagctgcacgcatggaactgagcttcttcaaaagtgatcagtcatcaagttatggtgatgatgagtattcaaaaccatgctgtgatctctgcatgtgcacacgctcaatgcctcctcaatgcagctgtgaagatattaggctgaattcatgccactcagattgtaagagctgtatgtgcacacgctcacagccaggacagtgtcgttgtcttgacaccaacgacttctgctacaaaccttgcaagttcagagatgactagaaaaactaatagctctctca

SEQ ID NO: 254995 - DNA, 411 bp, Glycine max
gatgcaactgaataattaagaaaagccatttccatagcagcctaagaaaatgaagagcactagcttgttcgctatctttctactttgcgccttcacctcatacctaccttccgccaccgcccaggacgtgctcgacgtggatggcgatccgattcggaacggtttcatatactacgttttgccggcaataagaggaaacggtggcggaatagaacgagccgcactcgggaaagacacttgccctatcactgtagtgcaatctcccaatccaaactctaaggggttagaaattaagtttgaatctgcataccccgcctattacataaacgaaaccctaattttgcaaataaagttcagttacccacagcagtgtgaaagaaagaatccttggtgggccatttctaaggatat

SEQ ID NO: 254996 - DNA, 379 bp, Glycine max
gacagcataaacaattaataaagatgagtttgaagaacagcatggtggtgctaaaggtgtgtttgttgcttcttttccttgtgggggttacagctgcacgcatggaactgagcttcttcaaaagtgatcagtcatcaagttatgatgatgatgagtattcaaaaccatgctgtgatctctgcatgtgcacacgctcaatgcctcctcaatgcagctgtgaagatattaggctgaattcatgccactcagattgtaatagctgtatgtgcacacgctcacagccaggacagtgtcgttgtcctgaaaccaacgacttctgctacaaaccttgcaagtccagagataactagagagaactaatagctctctcaaatggacg

SEQ ID NO: 254997 - DNA, 404 bp, Glycine max; identical to SEQ ID NO: 254877

SEQ ID NO: 254998 - DNA, 300 bp, Glycine max
cacgacaacagagtacgcaagtaatgacattcacgaacattccaccttcacgtaaaggatgattgtggcgacattacggatctggagtctctgtggcacatctgaggactgagcttcctcaaaaggtattcatccacattctgaggagtcacgaggtatgcacactcgtaccattgtctcagcatgcgcacacgctgaatgcatcttcactacacttgtgaatatcggaagctgaactcggactggtcaaacttccacagctgtctgtgcacactctcacatacacgacggtctcattgt

SEQ ID NO: 254999 - DNA, 418 bp, Glycine max
gattcacacaactaactaagaaagtcttccatagccccccaaaaatgaagagcaccatcttctttgctctctttctcttttgtgccttcaccacctcatacctaccttcagccatcgctgatttcgtgctcgataatgaaggtaaccctcttgaaaatggtggcacatattatatcttgtcagacataacagcatttggtggaataagagcagccccaacgggaaatgaaagatgccctctcactgtggtgcaatctcgcaatgagctcgacaaagggattggaacaatcatctcgtccccatatcgaatccgttttatcgccgaaggccattctttgagccttaagttcgattcatttgcagttataatgctgtgtgttggaattcctaccgagtggtctgttgtggaggattctac

SEQ ID NO: 255000 - DNA, 400 bp, Glycine max
gacagcaaaaacaattaataaagatgagtttgaagaacaacatggtggtgctaaaggtgtgtttgttgcttcttttccttgtgggggttacaactgcacgcatggaactgagcttcttcaaaagtgatcagtcatcaagttatgatgatgatgagtattcaaaaccatgctgtgatctctgcatgtgcacacgctcaatgcctcctcaatgcagctgtgaagatattaggctgaattcatgccactcagattgtaagagctgtatgtgcacacgctcacagccaggacagtgtcgttgtcttgacaccaacgacttctgctacaaaccttgcaagtccagagatgactagaaaaactaatagctctctcaaatggacgaagcccctttatgctttgtttg

SEQ ID NO: 255001 - DNA, 246 bp, Glycine max
gacagcaaaaacaattaataaagatgagtttgaagaacaacatggtggtgctaaaggtgtgtttgttgcttcttttccttgtgggggttacagctgcacgcatggaactgagcttcttcaaaagtgatcagtcatcaagttatgatgatgatgagtattcaaaaccatgctgtgatctctgcatgtgcacacgctcaatgcctcctcaatgcagctgtgaagatattaggctgaattcatgccact

SEQ ID NO: 255002 - DNA, 205 bp, Glycine max
gattcacacaactaactaataaagtcttccatagccccccaaaaatgaagagcaccatcctctttgctctctttctcttttgtgccttcaccacctcatacctaccttcagccatcgctgatttcgtgctcgataatgaaggtaaccctcttgaaaactgtggcacatattacatcttgtcagacataacagcatttggtggaac

SEQ ID NO: 255003 - DNA, 403 bp, Glycine max
gattcacacaactaactaagaaagtcttccatagccccccaaaaatgaagagcaccatcttctttgctctctttctcttttgtgccttcaccacctcatacctaccttcagccatcgctgatttcgtgctcgataatgaaggtaaccctcttgaaaatggtggcacatattatatcttgtcagacataacagcatttggtggaataagagcagccccaacgggaaatgaaagatgccctctcactgtggtgcaatctcgcaatgagctcgacaaagggattggaacaatcatctcgtccccatatcgaatccgttttatcgccgaatgccatcctttgagccttaagttcgattcatttgcagttataatgctgtgtgttggaattcctaccgagtggtctgt

SEQ ID NO: 255004 - DNA, 425 bp, Glycine max
  unsure (1)..(425): unsure at all n locations
ggagttagagactcgaaatcgggcaaaagcagaataccctgatcaacgaaatcttgaatcatctatctcaaaccaagaaaaagatattgaaaacgattatgtaggatcagacagtgaaaagaatagtaagggtataaagaaaaagaaagacaagaacaagatggaggcagaacttaatttcttactaagaaattttttgattttacatttaaattggaataatttcttaggtcaaagaatatttaacaatgtcaaagtatattgtctcctgattagattaaaaaatttaagagaaattacaatagcctctattcaaagaggagaactaggtctagatattatgatgattcanaatcagaagaatttaattcttctaggcttaaggaaaaagaaaaataacaaatttatgaaaaaagaaatatttg

SEQ ID NO: 255005 - DNA, 409 bp, Glycine max
  unsure (1)..(409): unsure at all n locations
gccgccgcagcatccgaattcctttgatcgttggtgtggagcgatggaacacggctcatacactgatcagagtaaatcaacatttagtctcgtagatgaggatcatacttttgcaaacgctgttagattcaccttaaatcaagacccaagagtgtcattttgtggctacagcattcctcatccttcagataatcgtgttaatatcagagtccagacaacaggcgatccatcacgcgaggtgttaaaagatgcatgtcaagatctgatgcttatgtgccagcatgttaggagcacttttgataaggcagtcagtgattttaaaatcagcaaggctangaagaataatgaggatatggatgtcgagtaaatattttgcctgcgtagcagctatacactgaaatatgatgag

SEQ ID NO: 255006 - DNA, 376 bp, Glycine max
  unsure (1)..(376): unsure at all n locations
gcacacaactaactaagaaagtcttccatagccccccaaaaatgaagagcaccatcttctttgctctctttctcttttgtgccttcaccacctcatacctaccttcagccatcgctgatttcgtgctcgataatgaaggtaaccctcttgaaaatggtggcacatattatatcttgtcagacataacagcatttggtggaataagagcagccccaacgggaaatgaaagatgccctctcactgtggtgcaatctcgcaatgagctcgacaaagggattggaacaatcatctcgtcnccatatcgaatccgttttatcgccgaaggccatcctttgagccttaagttcgattcatttgcagttataatgctgtgtgt

SEQ ID NO: 255007 - DNA, 386 bp, Glycine max
gacccatcaatagcaaaatgaccaagttcacaatcctcctcatctctcttctcttctgcatcgcccacacttgcagcgcctccaaatggcagcaccagcaagatagctgccgcaagcagctccagggggtgaacctcacgccctgcgagaagcacatcatggagaagatccaaggccgcggcgatgacgatgatgatgatgacgacgacaatcacattctcaggaccatgccgggaagaatcaactacataaggaggaacgaaggaaaagacgaagacgaagaagaggaaggacacatgcagaagtgctgcacagaaatgagcgagctgagaagccgcaaatggcagtgcaaagccgctgtagaagataatggagaaccagagcca

SEQ ID NO: 255008 - DNA, 391 bp, Glycine max
ggaactttgttactctcacacatgtctcgctccgtgcctttggtttcaaccatctttgtcttgcttctgcttctggtggccactgagatgatggggccaacaatggtggcagaagcaagaacttgtgagtctcagagccaccgtttcaaggggccatgtttgagtgacaccaactgtggctctgtttgccgaaccgaacgtttcactggaggacactgccgtggcttccgtcgcagatgcttctgcaccaaacattgttaattttaaaaaattaattaagagtgctttgatacaacatgatagatctatcatctttctactcgtgttgttaattagacactttgtgtttgagaataagggttacgcattctactatgggtttctttgtttg

SEQ ID NO: 255009 - DNA, 410 bp, Glycine max
gagtgtatgtgattgttgtgactcgttcttcttcgtcgttatcttcttcttttgttgtttgtgtgtttgttttttctctcacctgaaaatgtcttgctgcggtggtaactgtggttgcggaagcgcctgcaagtgcggcaacggctgcggaggctgcaagatgtacccagacttgagctacaccgagtcaaccaccaccgagaccttggtcatgggagtggcaccagttaacgctcaattcgagagtgctgaaatgggtgttcccgctgagaacgatggctgcaaatgtggagctaactgcacctgcaacccctgcacttgcaagtgaggtgttggagagctaaagcttcaagcagaaatggcccttacaaataatgataaaaactatatgtaatttcagaacttcaaaa

SEQ ID NO: 255010 - DNA, 406 bp, Glycine max
ggacagcaaaaacaattaataaagatgagtttgaagaacaacatggtggtgctaaaggtgtgtttgttgcttcttttccttgtgggggttacagctgcacgcatggaactgagcttcttcaaaagtgatcagtcatcaagttatgatgatgatgagtattcaaaaccatgctgtgatctctgcatgtgcacacgctcaatgcctcctcaatgcagctgtgaagatattaggctgaattcatgccactcagattgtaagagctgtatgtgcacacgctcacagccaggacagtgtcgttgtcttgacaccaacgacttctgctacaaaccttgcaagtccagagatgattagaaaaactaatagctctctcaaatggacgaagcccctttaagctttgtttgttatg

SEQ ID NO: 255011 - DNA, 342 bp, Glycine max
gattcacacaactaactaagaaagtcttccatagccccccaaaaatgaagagcaccatcttctttgctctctttctcttttgtgccttcaccagctcatacctaccttcagccatcgctgatttcgtgctcgataatgaaggtaaccctcttgaaaatggtggcacatattatatcttgtcagacataacagcatttggtggaataagagcagccccaacgggaaatgaaagatgccctctcactgtggtgcaatctcgtaatgagctcgacagagggattggaacaatcatctcgtccccagagcgaatccgttttatcggccgaagaccatcctttgagc

SEQ ID NO: 255012 - DNA, 400 bp, Glycine max
gacagcaaaaacaattaataaagatgagtttgaagaacaacatggtggtgctaaaggtgtgtttgttgcttcttttccttgtgggggttacagctgcacgcatggaactgagcttcttcaaaagtgatcagtcatcaagttatgatgatgatgagtattcaaaaccatgctgtgatctctgcatgtgcacacgctcaatgcctcctcaatgcagctgtgaagatattaggctgaattcatgccactcagattgtaagagctgtatgtgcacacgctcacagccaggacagtgtcgttgtcttgacaccaacgacttctgctacaaaccttgcaagtccagagatgactagaaaaactaatagctctctcaaatggacgaagcccctttaggctttgtttg

SEQ ID NO: 255013 - DNA, 359 bp, Glycine max
ggacctagccaagccaacacagacggcacagaagagggtttcttttcgtttcgtttcaatggggagcgaagaggacaacggcgaattctacctgcgatactacgtcgggcacaatggcaagttcggtcaccagttcttggacttcgagttccgccccgacgggaagctccgctacgccaacaactccaactagacgaaacgacaccatcatccgcgaggaggtttacctcacccccgccgttctccgcgagtgccgtcgcatcatctccgagagcgacattatgagtgaagatgatgacaattggccggaaccctgatcggggtgcggcggcatgagcctgagattgttatggggaacg

SEQ ID NO: 255014 - DNA, 417 bp, Glycine max
ggtcacaggtgtttgcaatactagcgatagctgataagagagataccaacaagaaaagaaaaaaagaagagttgagattccctttgaagaaaagatggcatcccataggcaaagctatgaagctggtcaaactaagggccgaactgaggaaaagacgaaccagacgatgggcaatattggagagaaggctcaagctgcaaaggagaagacccaggaaatggcccaagctgcaaaggagaagacccaacaaacagcccaagctgccaaggacaagacttgcgacacttcccaagcggcaaaggagaagacccaacagaatacaggagctgctcaacaaaagacctcagagatgggccagtccacgaaggaatcggcccagtcagggaaggacaacacccaagggttcctgcagcagac

SEQ ID NO: 255015 - DNA, 388 bp, Glycine max
gatgcaactgaataattaagaaaagccatttccatagcagcctaagaaaatgaagagcactagcttgttcgctatctttctactttgcgccttcacctcatacctaccttccgccaccgcccaggacgtgctcgacgtggatggcgatccgattcggaacggtttcatatactacgttttgccggcaataagaggaaacggtggcggaatagaacgagccgcactcgggaaagacacttgccctatcactgtagtgcaatctcccaatccaaactctaaggggttagaaattaagtttgaatctgcataccccgcctattacataaacgaaaccctaattttgcaaataaagttcagtttaccacagcagtgtgaaagaaagaatcct

SEQ ID NO: 255016 - DNA, 405 bp, Glycine max
attcacacaactaactaagaaagtcttccatagccccccaaaaatgaagagcaccatcttctttgctctctttctcttttgtgccttcaccacctcatacctaccttcagccatcgctgatttcgtgctcgataatgaaggtaaccctcttgaaaatggtggcacatattatatcttgtcagacataacagcatttggtggaataagagcagccccaacgggaaatgaaagatgccctctcactgtggtgcaatctcgcaatgagctcgacaaagggattggaacaatcatctcgtccccatatcgaatccgttttatcgccgaaggccatcctttgagccttaagttcgattcatttgcagttataatgctgtgtgttggaattcctaccgagtggtctgttgt

SEQ ID NO: 255017 - DNA, 416 bp, Glycine max
gaagacgacagaaggggacagcaaaaacaattaataaagatgagtttgaagaacaacatggtggtgctaaaggtgtgtttgttgcttcttttccttgtgggggttacagccgcacgcatggaaccgagcttcttcaaaagtgatcagtcatcaagttatgatgatgatgagtattcaaaaccatgctgtgatctctgcatgtgcacacgctcaatgcctcctcaatgcagctgtgaagatattaggctgaattcatgccactcagattgtaagagctgtatgtgcacacgctcacagccaggacagtgtcgttgtcttgacaccaacgacttctgcgacaaaccttgcaagtccagagatgactagaaaaactaatagctctctcaaattgacgaagcccctttaggctttgtttg

SEQ ID NO: 255018 - DNA, 402 bp, Glycine max
ggcagcaaaaacaattaataaagatgagtttgaagaacaacatggtggtgctaaaggtgtgtttgttgcttcttttccttgtgggggttacagctgcacgcatggaactgagcttcttcaaaagtgatcagtcatcaagttatgatgatgatgagtattcaaaaccatgctgtgatctctgcatgtgcacacgctcaatgcctcctcaatgcagctgtgaagatattaggctgaattcatgccactcagattgtaagagctgtatgtgcacacgctcacagccaggacagtgtcgttgtcttgacaccaacgacttctgctacaaaccttgcaagtccagagatgactagaaaaactaatagctctctcaaatggacgaagcccctttaggctttgtttgtt

SEQ ID NO: 255019 - DNA, 381 bp, Glycine max
gatgcaactgaataattaagaaaagccatttccatagcagcctaagaaaatgaagagcactagcttgttcgctatctttctactttgcgccttcacctcatacctaccttccgccaccgcccaggacgtgctcgacgtggatggcgatccgattcggaacggtttcatatactacgttttgccggcaataagaggaaacggtggcggaatagaacgagccgcactcgggaaagacacttgccctatcactgtagtgcaatctcccaatccaaactctaaggggttagaaattaagtttgaatctgcataccccgcctattacataaacgaaaccctaattttgcaaataaagttcagttacccacagcagtgtgaaagaaa

SEQ ID NO: 255020 - DNA, 361 bp, Glycine max
aagacgacagaagggattcacacaactaactaagaaagtcttccatagccccccaaaaatgaagagcaccatcttctttgctctctttctcttttgtgccttcaccacctcatacctaccttcagccatcgctgatttcgtgctcgataatgaaggtaaccctcttgaaaatggtggcacatattatatcttgtcagacataacagcatttggtggaataagagcagccccaacgggaaatgaaagatgccctctcactgtggtgcaatctcgcaatgagctcgacaaagggattggaacaatcatctcgtccccatatcgaatccgttttatcgccgaaggccatcctttgagccttaag

SEQ ID NO: 255021 - DNA, 423 bp, Glycine max
gcgagagacgacagaaggggactcatacaatagagaccagcttttgcttctttgtgaacatggagatgaggaaatcatgtggcttcttcttgctcctcctccttgtctttgcttcccaggtggtggtgcagacggagggaagagtgtgtgagtcacaaagccacgggttccatggtttgtgtaagagagaccacaactgtgctttggtctgcatgaacgaaggtttctccggtggcaggtgcaaaggcttccgccgccgctgcttttgcaccaggatttgttgagatctcatcaaacactactcttgccatgcacattaataaatcatagctaggccatataaattgcatctagtctttatccatttgggagctagctaccagaagcaactcatacttggtcattggattgcttcgctttggc

SEQ ID NO: 255022 - DNA, 406 bp, Glycine max; identical to SEQ ID NO: 254969

SEQ ID NO: 255023 - DNA, 426 bp, Glycine max
gaacgaaaaaccgtgtttcactcggatcgcgcattcacaaataaggttgaagagggccctgccggaagaagataaataccgtctttcattttccggcgatctcttttttcttccatcaccgttttccggctatccctaatccttaacagaaatgacgacatcaaggcgccttgcggacaggaaggtggagaagtttgagaaaaacatcaccaaaagaggatttgtgccagacacaaccactaaaaaggggaaagactaccctgttggcccagtgctgctcggtttcttcgtctttgttgtcattggatcatctctcttccagataatcaggacagcaacgagtggaggcatggcttaaatggagctttattttggattgtgtcatcatctcttagcctcctcgtagaaaatgctaatacttctcta

SEQ ID NO: 255024 - DNA, 378 bp, Glycine max
gacaggtgtttgcaatactagcgatagctgataagagagataccaacaagaaaagaaaaaaagaagagttgagattccctttgaagaaaagatggcatcccataggcaaagctatgaagttggtcaaactaagggccgaactgaggaaaagacgaaccagacgatgggcaatattggagagaaggctcaagctgcaaaggagaagacccaggaaatggcccaagctgcaaaggagaagacccaacaaacagcccaagctgccaaggacaagacttgcgacacttcccaagcggcaaaggagaagacccaacagaatacaggagctgctcaacaaaagacctcagagatgggccagtccacgaaggaatcggcccagtc

SEQ ID NO: 255025 - DNA, 387 bp, Glycine max
gacagcaaaaacaattaataaagatgagtttgaagaacaacatggtggtgctaaaggtgtgtttgttgcttcttttccttgtgggggttacagctgcacgcatggaactgagcttcttcaaaagtgatcagtcatcaagttatgatgatgatgagtattcaaaaccatgctgtgatctctgcatgtgcacacgctcaatgcctcctcaatgcagctgtgaagatattaggctgaattcatgccactcagattgtaagagctgtatgtgcacacgctcacagccaggacagtgtcgttgtcttgacaccaacgacttctgctacaaaccttgcaagtccagagatgactacaaaaactaatagctctctcaaatggacgaagcccctt

SEQ ID NO: 255026 - DNA, 384 bp, Glycine max
ttcaagggtccatcgacccgtccgaaggctgaaagaacacgacagaaaggggagagtcagattcgcacgcattgcttcgcctcataacagcagcttcatcagcaatggttctcaaacgacgtggaatggctccggctcttgccgcgtaagaagaagcctgagaacgtcacgaaaccgttgttcgagaagcgtccgaagcaattcggaatcggacgggccttgcctccaaccagacacttgactaggttcgtgaagttgccagagcatgttcaaattcagaggaagaaggggattccgaagcagaggttgaaggttcccccacctttgaaccagtttaccataactcctgacaaaaacctagcaacaagtctgttcaagttgcct

SEQ ID NO: 255027 - DNA, 418 bp, Glycine max
gacagcaaaaacaattaataaagatgagtttgaagaacaacatggtggtgctaaaggtgtgtttgttgcttcttttccttgtgggggttacagctgcacgcatggaactgagcttcttcaaaagtgatcagtcatcaagttatgatgatgatgagtattcaaaaccatgctgtgatctctgcatgtgcacacgctcaatgcctcctcaatgcagctgtgaagatattaggctgaattcatgccactcagattgtaagagctgtatgtgcacacgcccacagccaggacagtgtcgttgtcttgacaccaacgacttctgctacaaaccttgcaagtccagagatgaactagaaaactaatagctctctcaaatggacgaaacccctttaagctttgtttggttagttaggggagacaa

SEQ ID NO: 255028 - DNA, 405 bp, Glycine max
gacagcaaaaacaattaataaagatgagtttgaagaacaacatggtggtgctaaaggtgtgtttgttgcttcttttccttgtgggggttacagctgcacgcatggaactgagcttcttcaaaagtgatcagtcatcaagttatgatgatgatgagtattcaaaaccatgctgtgatctctgcatgtgcacacgctcaatgcctcctcaatgcagctgtgaagatattaggctgaattcatgccactcagattgtaagagctgtatgtgcacacgctcacagccaggacagtgtcgttgtcttgacaccaacgacttctgctacaaaccttgcaagtccagagatgactagaaaaactaatagctctctcaaatggacgaagcccctttaggctttgtttgttatg

SEQ ID NO: 255029 - DNA, 376 bp, Glycine max
gcttcacagcaaaaacaattaataaagatgagtttgaagaacaacatggtggtgctaaaggtgtgtttgttgcttcttttccttgtgggggttacagctgcacgcatggaactgagcttcttcaaaagtgatcagtcatcaagttatgatgatgatgagtattcaaaaccatgctgtgatctctgcatgtgcacacgctcaatgcctcctcaatgcagctgtgaagatattatgctgaattcatgccactcagattgtaagagccgtatgtgcacacgctcacagccaggacagtgtcgttgtcttgacaccaacgacttctgctacaaaccttgcaagtccagagatgactagaaaaactaatagctctctcaaa

SEQ ID NO: 255030 - DNA, 399 bp, Glycine max
ggggttctcctttggcagaaaaagcgatgattgattgcttctctctatctccacatttcttgcgtactcttcccttccggaccaaatcaaacctttttcataggtcgtttatcgagttttcgctttgacacttttacctcgttgatcctcgtcagtgtagaattctccgaattgaggtatggggaggctgtttgtgaaccatctggaggggcatgtctatagctgcaaacactgccgcacccaacttgctcactatgaagacatcgtttccaagtcgttccacagtagacatgggaaagcttatcgcttcagtaaggtcgtgaatgttaacgttggagtatatgacgacagatatatgctcaatgggatgcaaactgtggctgacattttctgtgtggg

SEQ ID NO: 255031 - DNA, 273 bp, Glycine max
ggcaactgaataattaagaaaagccatttccatagcagcctatggagatgcagagcgcgagcttgttcgctatcttcctagtttgcgccttcaccgcatacctagcttccgccatcgcccaggacgtgctcgacgtggatagcgatccgattcggtacggtttcatatactatgttttgccggcaatcagacgaaccggtggccgactataacgagccgcactcgggaaagagacttgccctatcactgtagtgcaatctcccaatctaaact

SEQ ID NO: 255032 - DNA, 399 bp, Glycine max
gacagcaaaaacaattaataaagatgagtttgaagaacaacatggtggtgctaaaggtgtgtttgttgcttcttttccttgtgggggttacagctgcacgcatggaactgagcttcttcaaaagtgatcagtcatcaagttatgatgatgatgagtattcaaaaccatgctgtgatctctgcatgtgcacacgctcaatgcctcctcaatgcagctgtgaagatattaggctgaattcatgccactcagattgtaagagctgtatgtgcacacgctcacagccaggacagtgtcgttgtcttgacaccaacgacttctgctacaaaccttgcaagtctagagatgactagaaaaactaatagctctctcaaatggacgaagcccctttaggctttgttt

SEQ ID NO: 255033 - DNA, 400 bp, Glycine max; identical to SEQ ID NO: 255012

SEQ ID NO: 255034 - DNA, 416 bp, Glycine max
gattcacacaactaactaagaaagtcttccatagccccccaaaaatgaagagcaccatcttctttgctctctttctcttttgtgccttcaccacctcatacctaccttcagccatcgctgatttcgtgctcgataatgaaggtaaccctcttgaaaatggtggcacatattatatcgtgtcagacataacagcatttggtggaataagaggagccccaacgggaaatgaaagatgccctctcactgtggtgcaatctcgcaatgagctcgacaaagggattggaacaatcatctcgtcaccatatcgaatccgttttatcgccgaaggccatcctttgagccttaagttcgattcatttgcagttataatgctgtgtgttggaattcctaccgagtggtttgttgtggaagatcta

SEQ ID NO: 255035 - DNA, 405 bp, Glycine max
caccgtgctattcagataagaaggtcttcataccatgatgtgattagggttaatgagattcagaaggtgttggacatcacaggggtccaaacctacattatcaacagcgcaagggttgttttcttgaatgagaggcctcagccaaggcctggtaaaggtgtcaccaacacttgtgaagtctgcgagcgcagccttcttgattccttccgattctgttctcttggttgcaagattgttgggacttcaaggaacttccagaagaagaaaaagtcagcggcaatgggatcagacacagacgattcttcgtacagcagcaacagcagccatgggaagaagaacagcttcacaccgttcacaccgcctccaacttctgttaattacagaacggccaagagaagaaaggaa

SEQ ID NO: 255036 - DNA, 189 bp, Glycine max
cgggattcacacaactaactaagaaagtcttccatagccccccaaaaactaagagggccatcttctttgctctctttctcttttgtgcggtcaccacctcatacctaccttcagccatcgctgatttcgtgctcgatacacaaggtaaccctcttgaaaatggtggcacatattatatcctgtcatatc

SEQ ID NO: 255037 - DNA, 182 bp, Glycine max
gagtgcaatttagctgaagcaaagcaatggctacttcaaagttgaaaacccagaatgtggttgtatctctctccctaaccttaaccttggtagtggtgctactgaccagcattgcaacctcagcggaaaccgtctcgttcatctggaacaactccgtgccgacacatccagacatgatcctc

SEQ ID NO: 255038 - DNA, 254 bp, Glycine max
cgggattcacacacctaactacgaaagtcttccatagccccccaaaaatgaatagcaccatcttctttgctctctttctcttttgtaccttggggaggtcatacctaccttcacccatccctgatttcgtgctcgataatgaatgtaaccctcttgaaaattcttgcacatactacaccctgtcagacataacaacacttcgtggactcatagctgccccaactggaaattaaacatgccctctcactgtggtg

SEQ ID NO: 255039 - DNA, 128 bp, Glycine max
ggcacaagtgagtttgttgatcgagataactagaaacagtctgatgaaaatgaaggtccttgttttcttcgttgctacaattttggtggcatggcaatgccatgcctacgatatgttccctctctgaa

SEQ ID NO: 255040 - DNA, 238 bp, Glycine max
ggcgagatagaagagaaagccgtcgctatcctagtctcttcttcccctctacccatttcagtttcaggatggagtctcaggtgaagcaggcccttgttgtcaaagttatgggtcatactgggtctacggggcaggtgactcacgttagagtgaagtttttggatgatcaaaaccgacacatcatgaggaacgtcaagggacgcgtgagagaatgagacattctcacccctacctgagt

SEQ ID NO: 255041 - DNA, 120 bp, Glycine max
gacagcaacaacaattaataaagatgagtttgaagaacaacatggtggtgctaaaggtgtgtttgttgcttcctgtgcttgtgggggttacagctgcacgcaaagaactgagcttcttca

SEQ ID NO: 255042 - DNA, 421 bp, Glycine max
gacagcaaaaacaattaataaagatgagtttgaagaacaacatggtggtgctaaaggtgtgtttgttgcatcttttccttgtgggggttagagctgcacgcatggaactgagcttcttcaaaagtgatcagtcatcaagttatgatgatgatgagtattcagaaccatgctgtgatctctgcatgtgcacacgctcaatgcctcctcaatgcagctgtgaagatattacgctgaattcatgccactcagattgtaagagctgtatgtgcacacgctcacagccaggacagtgtccttgtcttgacaccaacgacttctgctacaaaccttgcaagtccagagatgactagaaaaactaatagctctctcaaatggacgaagcccctttacgctttgtttgttatgttaagggagacacatg

SEQ ID NO: 255043 - DNA, 211 bp, Glycine max
gcttcacagcaaaaacaattaataaagatgggtttgaagaacaacatggtggtgctaaaggtgtgtttgttgcttcttttccttgtgggggttacagctgcacgcatggaactgagcttcttcaaaagtgatcagtcatcaagttttgatgatgatgagtattcaaaatcatgctgtgatttccgcatgtgcacaagctcaatgcctcctc

SEQ ID NO: 255044 - DNA, 385 bp, Glycine max
ggcgagatagaagagaaagccgtcgctatcctagtctcttcttcccctctacccatttcagtttcaggatggagtctcaggtgaagcacgcccttgttgtcaaagttatgggtcgtactgggtctagggggcaggtgactcaggttagagtgaagtttttggatgatcaaaaccgacacatcatgaggaacgtgaagggacccgtgagagaaggagacattctcaccctacctgagtctgaaagagaagcaagaaggttgcgctagaggatctcttcatggtttggctcaggacttaaacaaaacatcgttgtttttgttgtacttaaaggatgtcaaatgttaattgtcatggacctgaattatgcacctactatgtgtgacat

SEQ ID NO: 255045 - DNA, 369 bp, Glycine max
gatagaagaagcagaaagagaagcattagcaaaagcaagaagaactagtctaagcagaaatggcctcttcagtgatggcatctgtggcccggaaacctgcccctttcactgttgagaagtcctcagttagaggccttccctccctctcaaggaactcctcttcattcagagttgtggccagtggtggcaagaagatcaagactgacaagccttatggaattaatggtggcatggctttgagggaaggagttgatgcatctggcaggaaaggaaagggaaagggcgtttaccagtttgtagacaaataccgtgctaatgtccatgggttcagtcccatctacgaaaccaaagactgggtctccaccggtg

SEQ ID NO: 255046 - DNA, 278 bp, Glycine max
gatgcaactgaataattaagaaaagccatttccatagcagcctaagaaaatgaagagcactagcttgttcgctatctttctactttgcgccttcacctcatacctaccttccgccaccgcccaggacgtgctcgacgtggatggcgatccgattcggaacggtttcatatactacgttttgccggcaataagaggaaacggtggcggaatagaacgagccgcactcgggaaagacacttgccctatcactgtagtgcaatctcccaatcaaaactcta

SEQ ID NO: 255047 - DNA, 349 bp, Glycine max
ggatcctttgtattctattcttcaagattcaggtactgcgtttcggaagcagacacagatgactcgtacgaagcaaaccgctcgtaagtccacaggaggaaaggctcctaggaagcagcttgcaaccaaggctgtacgtaagtctgcaccaactactggtggtgtgaagaagccccaccgttatcgtcctggtaccgttgctcttcgtgagattaggaaataccagaagagtaccgagcttttgatccggaagctccccttccagaggctggttcgtgaaattgctcaggacttcaagactgatctgcgtttccagagccacgccgtgcttgcattgcaagagctgctg

SEQ ID NO: 255048 - DNA, 386 bp, Glycine max
gatagcagcaacatacagagcattgggttcagctgcttaagttcaatccatgggtattgctttcatcctcagaaccaaagatgtcgaacacatacggcaactgcgactgacgctgacaagactatctgcaccaaaggaaacagctatggtgttattgtcgagacggataagagttacatcgagaccgttgtcatggaagttccaccagctgagcatgatgcgaagtgcaaatttggcactcactgcacttgcacggactgcacctgttgccattaaggaataattacgacaatgtcactgccacatgtttggcactacacatctcctaataatgtaatcttcgtacgaataaatctgtgtgctgtaaccctaaatgcacacgctca

SEQ ID NO: 255049 - DNA, 289 bp, Glycine max
gactttgagttcgaactaaacaattcaattcaatctgcctcgatcatggagaggaaaacatttgggtttttgttcttgctcctccttgtcttagcttctgatgtgacggtgaagagagcagaggcgaaagattgcttgacaaggatgcacgggttccagggtagatgcttattcgacaggcaatgtgcacatgtgtgcaggagcgatggtttcatcggtggtcagtgccgaggccctcttcgcaaatgcctttgcagcacgccatgttgatcgaaattaccactgccaa

SEQ ID NO: 255050 - DNA, 310 bp, Glycine max
gattcacacaactaactaagaaagtcttccatagccccccaaaaatgaagagcaccatcttctttgctctctttctcttttgtgccttcaccacctcatacctaccttcagccatcgctgatttcgtgctcgataatgaaggtagccctcttgaaaatggtggcacatattatatcttgtcagacataacagcatttggtggaataagagcagccccaacgggaaatgaaagatgccctctcactgtggtgcaatctcgcaatgagctcgacagagggattggaacaatcatctcgtccccatatcgaat

SEQ ID NO: 255051 - DNA, 378 bp, Glycine max
gacagcaaaaacaattaataaagatgagtttgaagaacaacatggtggtgctaaaggtgtgtttgttgcttcttttccttgtgggggttacagctgtacgcatggaactgagcttcttcaaaagtgatcagtcatcaagttatgatgatgatgagtattcaaaaccatgctgtgatctctgcatgtgcacacgctcaatgcctcctcaatgcagctgtgaagatattaggctgaattcatgccactcagattgtaagagctgtatgtgcacacgctcacagccaggacagtgtcgttgtcttgacaccaacgacttctgctacaaaccttgcaagtccagagatgactagaagaactaatagctctctcaaatggacg

SEQ ID NO: 255052 - DNA, 304 bp, Glycine max
gattcacacaacggactaagaaagtcttccatagccccccaaaaatgaagagcaccatcttctttgctctctttctcttttgtgccttcaccacctcatacctaccttcagccatcgctgatttcgtgctcgataatgaaggtaaccctcttgaaaatggtggcacatattatagcctgtcaaacaaaacaacaattggtggaataagaacacccccaacggaaattaaaagatccctcccactgtggtgcaatctcgcacatagccccacaaagggatttggacaatcaactcgtccccaaat

SEQ ID NO: 255053 - DNA, 420 bp, Glycine max
gacagcaaaaacaattaataaagatgagtttgaagaacaacatggtggtgctaaaggtgtgtttgttgcttcttttccttgtgggggttacagctgcacgcatggaactgagcttcttcaaaagtgatcagtcatcaagttatgatgatgatgagtattcaaaaccatgctgtgatctctgcatgtgcacacgctcaatgcctcctcaatgcagctgtgaagatattaggctgaattcatgccactcagattgtaagagctgtatgtgcacacgctcacagccaggacagtgtcgttgtcttgacaccaacgacttctgctacaaaccttgcaagtccagagatgactagaaaaactaatagctctctcaaatggacgaagcccctttaggctttgtttgttatgttaggggggacaaat

SEQ ID NO: 255054 - DNA, 198 bp, Glycine max
ggaaggcattgggatggtggctgatagcggtaggcacgcttcgattggcctccgtgtggttcggtttcttcgacatttgggctcttcgactcgccgtcttctccaacactacaatgactgaagttcatgggcgcacatttggaacttggacactgttgacctgcaccctttgctaaatctgcgcattcaaccttgaaa

SEQ ID NO: 255055 - DNA, 376 bp, Glycine max
gaaggctgaaaaactctgaccgagtccgagaggcatcatggcgacactggattccgacgtgaccgtgtttccggccggcgaagcctccagcagcgccggtccttcttcgtccaccaagaagccgaagcgtttcgagatcaagaagtggaatgcggtttccctctgggcttgggatattgtcgtggataattgcgctatttgtcggaaccatatcatggatctctgtattgagtgccaggccaaccaggctagcgccactagccaggaatgcactgtagcttggggagtttgtaaccatgcttttcacttccattgcataagccgatggctcaagacccgtcaagtatgtcctctatataatagcgagtgggaattt

SEQ ID NO: 255056 - DNA, 281 bp, Glycine max
gactttgagttcgaactaaacaattcaattcaatctgcctcgatcatggagaggaaaacatttgggtttttgttcttgctcctccttgtcttagcttctgatgtgacggtgaagagagcataggcgaaagattgcttgacaaggaggcacgggttccagggtagatgcttattcgacaggcaatgtgcacatgtgtgcaggagcgatggtttcatcggtggtcagtgccgaggccctcttcgcaaatgcttttgcagcatgccatgttgatcgaaattact

SEQ ID NO: 255057 - DNA, 248 bp, Glycine max
ggagagagaagcctccatttataaaacatcgtgtgcgcactctctcttctcctaggtttcgctcccatcaacggcaacgatggtgcagaggctcacttatcgcaagcgccatagctatgctaccaaatccaaccagcaccggtttgtaaaaacccctgttggaaatttggtttaacaaacaactagaagaaaaccaattgaacctaattgccctgtcactggcaagaggatccaagggattccacact

SEQ ID NO: 255058 - DNA, 395 bp, Glycine max
gaaggaagagtgagcgtgaaagatgccttcggcgaggctttcagggtcaccaaggctcgacgttgctattgacatgggcaatccatttctcaatctcactgttgatggtttccttaagatcggagctgtcgcagccacgcgatcagctgctgaagatacttatcatattatccgaaacgggaatatctcaagtcatgatttcgagaaaacgttgaagaagatgtgtaaagaaggtgtatattggggaactttagctggtgtttatcttggaatggaatatggggtagagaggatccgtggcaccagagattggaagaatgccatgattgggggtgcactaactgcgactctgttatctgttgccaccaccaacaacagagacaaaattgtacctg

SEQ ID NO: 255059 - DNA, 384 bp, Glycine max
gacaacagaaacaattaataaagatgagtttgaagaacaacatggtggtgctaaaggtgtgtttgttgcttcttttccgtgtgggggttacagctgcacgcatggaactgagcttcttcaaaagtgatcagtcatcaagttatgaagatgatgagtattcaaaaccatgctgtgatttccgcatgtgcacaagctcaatgcctcctcaatgcagctgtgaagatattaggctgaattcatgccactcagattgtaagagctgtatgtgcacgcgctcacagccaggacagtgtcgttgtcctgacaccaacgacgtctgctacaaaccttgcaagtccagagatgactagaaaaactaataactctctcaaatggacgaagccc

SEQ ID NO: 255060 - DNA, 424 bp, Glycine max
gattcacgcaactaaataagaaatgaagagtactatcttctttgctcactttctagtttgtgccttcaccatctcatacctgccttcaggcaccgctcagttcgtgctcgacactgatgatgatcctcttcaaaacggtggcacatactatatgttgccagttatgagaggaaagggcggtggaatagaagtagattcaactggaaaagaaatatgccctctcgctgttgtgcaatcacccaatgagctcgataaggggattggactagtctttacatctccattacatgccctttttatcgccgaaggctatcctttgagcattaagtttggttcatttgcagttataacgctgtgtgccggcatgcctactgagtgggctattgtggagagagagggtctacaagctgttaaacttgctgca

SEQ ID NO: 255061 - DNA, 199 bp, Glycine max
gtcacacaactaactaagaaagtcttccatagccccccaaacatgaagagcaccatcttctttgctctctttctcttttgtgccttcatcagctcatacctaccttcagccatcgctgatttcgtgctcgataatgaaggtaaccctcttgaaaatggtggcacatattacatcttgtcagacataacaccatttcgtg

SEQ ID NO: 255062 - DNA, 417 bp, Glycine max
gacagcaaaaacaattaataaagatgagtttgaagaacaacatggtggtgctaaaggtgtgtttgttgcttcttttccttgtgggggttacagctgcacgcatggaactgagcttcttcaaaagtgatcagtcatcaagttatgatgatgatgagtattcaaaaccatgctgtgatctctgcatgtgcacacgctcaatgcctcctcaatgcagctgtgaagatattaggctgaattcatgccactcagattgtaagagctgtatgtgcacacactcacagccaggacagtgtcgttgtcttgacaccaacgacttctgctacaaaccttgcaagtccagagatgactagaaaaactaatagctctctcaaatggacgaagcccctttaggccttgtttgttatgttaggggagaca

SEQ ID NO: 255063 - DNA, 416 bp, Glycine max
gatgcaactgaataattaagaaaagccatttccatagcagcctaagaaaatgaagagcactagcttgttcgctatctttctactttgcgccttcagctcatacctaccttccgccaccgcccaggacgtgctcgacgtggatggcgatccgattcggaacggtttcatatactacgttttgccggcaataagaggaaacggtggcggaatagaacgagccgcactcgggaaagacacttgccctatcactgtagtgcaatctcccaatccaaactctaaggggttagaaattaagtttgaatctgcataccccgcctattacataaacgaaaccctaattttgcaaataaagttcagttacccacagcagtgtgaaagaaagaatccttggtgggccatttctaaggatatacctg

SEQ ID NO: 255064 - DNA, 422 bp, Glycine max
gaataatgttaatatcagagagacagcttatccttaaggcttgacccaaagccactcactcgtgcgtgtgtatagcgtagcagctaaggggaatgcccactttgaatctcttcacaaacgttcctgtcgacaccgtcgttgcttctgacattctcagagatgccaccaaagctgttgcaaaaatcatcggaaaacccgaatcctatgtgatgattttgttgaatgggggagtgcctattgcatttgctggaactgaagagccagctgcttatggagaactgatctcgattgggggccttggtccgagtgtcaatggaaaactgagttctacaattgcagaaattcttgaaactaagctatacattgacagttcccgtgtctatatcaagttttatgatgttcagcgctcattctttgggttc

SEQ ID NO: 255065 - DNA, 213 bp, Glycine max
gacagcaaaaacaattaataaagatgagtttgaagaacaacatggtggtgctaaacgtgtgtttgttgcttcttttccttgtgggggtgacagctgcacgcatggaagtgaccttctgcggggagtgatcagtcatcaagttatgattatgatgagtattcaaaaccatgctgtcatctctgcacgtgcacacgctcaatgcctcgtcaatgc

SEQ ID NO: 255066 - DNA, 246 bp, Glycine max
gattcacacaactaactaataaagtcttccatatccccccataaatgaagagcaccatcttctttgctctctttctcttttgtgccttgagcacctcatacctatcttcatccatcgctgatttcgtgctcgataatgaaggtctccctcttgacaatggtggctcatactatatcttgtcagacataacaccatttggtgcaatactagcagctcctacgggaatttaaacatgccctctcactg

SEQ ID NO: 255067 - DNA, 388 bp, Glycine max
gacagcaaaaacaattaataaagatgagtttgaagaacaacatggtggtgctaaaggtgtgtttgttgctccttttccttgtgggggttacagctgcacgcatggaactgagcttcttcaaaagtgatcagtcatcaagttatgatgatgatgagtattcaaaaccatgctgtgatctctgcatgtgcacacgctcaatgcctcctcaatgcagctgtgaagatattaggctgaattcatgccactcagattgtaagagctgtatgtgcacacgctcacagccaggacagtgtcgttgtcttgacaccaacgacttctgctacaaaccttgcaagtccagagatgactagaataactaatagctctcccaaatggacgaagccccttt

SEQ ID NO: 255068 - DNA, 309 bp, Glycine max
gacagcaaaaacaattaataaagatgagtttgaagaacaacatggtggtgctaaaggtgtgtttgttgcggctttgccttgtgggggttacagctgcacgcatggaactgagcttcttcaaaagtgatcagtcatcaagttatgatgatgatgagtattcataaccatgctgtgatctctgcatgtgcacacgctcaatgcctcctcaatgcagctgtgaagatcttacgctgaattcatgccactcagattgtaagagctgtacgtgcacacgctcacagccaggacagtgtcgttgtcctgacacca

SEQ ID NO: 255069 - DNA, 163 bp, Glycine max
cggtaccgctgccacaataccacagaatgggacagcacagacaattgggtaccatcactttcaaaaacaacatggtggtcctaaatgtctctttgttgcttcttttccttcttggggttacatctcctcacattgatctcaccttcttcaaacctcatcactc

SEQ ID NO: 255070 - DNA, 321 bp, Glycine max
gacagcaggggcaattaataaagatgagtttgaagaacaacatggtggtgctaaaggtgtgtttgttgcttcttttccttgtgggggttacagctgcacgcatggaactgagcttcttcaaaagtgatcagtcatcaagttatgatgatgatgagtattcaaaaccatgctgtgatctctgcatgtgcacacgctcaatgcctcctcaatgcagctgtgaagatattaggctgaattcatgccactcagattgtaagagctgtatgtgcacacgctcacagccaggacagtgtccttgtcctgacaccaacgacttctgct

SEQ ID NO: 255071 - DNA, 251 bp, Glycine max
cagaaggggacacaactaactaagaaagtcttccatagccccccataagtgatgagcaccatcttctttgctctctttctcttttgtgccttcaccatctcgggggggggcttcagccatcgctgatttcgtgctggatagtgaacgtaatcctcttgaaaatggtggcacatattatatcttgtcagagataacagcatttggtggaataagagctgtcccaacggcgaaatcagacatgtcctctcact

SEQ ID NO: 255072 - DNA, 420 bp, Glycine max
  unsure (1)..(420): unsure at all n locations
ggagagagaagcctccatttataaaacatcgtgtgcgcactctctcttctcctaggcttcgctcccatcaacagcaacgatggtgcagaggctcacttatcgcaagcgccatagctatgctaccaaatccaaccagcaccgggttgttaagacccctggtgggaagttggtgtaccagaccactaagaagagagcaagtggacctaagtgccctgtcactggcaagaggatccaagggattccacacttaagacctgctgaatacaagaggtctagattgcctangaaccgcaggaccgtaaaccgagcctatggaggtgttttatccgggggagctgttagagaaaggattattcgcgctttccttgttgaagagcaaaaaattgtgaaaaaggtattgaagattcagaaggcaaaaga

SEQ ID NO: 255073 - DNA, 426 bp, Glycine max
gaaggaagggagggaagaatagaatgggatctggaagtggaaaacacactggagagttcttcaggagaagggatgcatggaggaagcatccgatgctcaccaatcagctccgccacgccacccctggccttggcatcgccgtcgtcgccttcggtatctacctcgtcggcgaacaagtctacaataggctctatgctcccgatcctcattcgatttctcacgtgaaagccggggatcaccactaaacgtttggacggacgcactccattccatcatcacttaataagcttgctagcatgttctcgcagcctttaatgtttaaatttcagaccgtgttcgcttctttggcactcactatgttgtcctgtatgcctacattttatgccttcaatttgcattcacaatgaaactcaatttactataaaa

SEQ ID NO: 255074 - DNA, 420 bp, Glycine max
gacagcaaaaacaattaataaagatgagtttgaagaacaacatggtggtgctaaaggtgtgtttgttgcttcttttccttgtgggggtgagagctgcacgcatggaactgagcttcttcaaaagtgatcagtcatcaagttatgatgatgatgagtattcaaaaccatgctgtgatctctgcatgtgcacacgctcaatgcctcctcaatgcagctgtgaagatattaggctgaattcatgccactcagattgtaagagctgtatgtgcacacgctcacagccaggacagtgtcgttgtcttgacaccaacgacttctgctacaaaccttgcaagtccagagatgactagaaaaactaatagctctctcaaatggacgaagcccctttaggctttgtttgttatgttaggggagacaaat

SEQ ID NO: 255075 - DNA, 258 bp, Glycine max
taatttgggaattattgctcccatcgccattggtttcattgtcggcgctaacattttgttgggtggggccttctctggagcggccatgaaccccgctgtggcatttgggcctgctgtcgtgagctggacctggaccaaccactggatctactgggccgggcctctcatcggtggtggaatcgctggccttgtttacgaggttgtctttatcagccacacccacgagcagcttcccaccactgactactagaggggggg

SEQ ID NO: 255076 - DNA, 257 bp, Glycine max
acacgtctcttattacccatcctcccacatttcggtaattttgcaaataatgctcccatcgccctttgtttcattctctgttctaacattttgttctgtgtggccttctcttcatctgttatgtgtgcctcggtgccatttgtgcctaaaaacctgagctggaccttcaccaacctctggatctattgtgtcgggcctctcatccgttgttttctccctgtcttttatttaccatgttttctttatcttcttctctc

SEQ ID NO: 255077 - DNA, 245 bp, Glycine max
gacagcaaaaacaattaataaagatgagtttgaagaacaacatggtggtgctaaaggtgtgtttgtgacttcgggtccttgtgggccttacaaatgcacgcatggaactgagcttcttcaaaagtgatcagtcatcgacttatgatgatcaccagtactcaggatcatgctgtgatccctgcatgtccacacgctcaatagttcctcactgctactctggggataataagctgcattcatgccaa

SEQ ID NO: 255078 - DNA, 353 bp, Glycine max
gacagcaaaaacaattaataaagatgagtttgaagaacaacatggtggtgctaaaggtgtgtttgttgcttcttttccttgtgggggttacagctgcacgcatggaactgagcttcttcaaaagtgatcagtcatcaagttatgatgatgatgagtattcaaaaccatgctgtgatctctgcatgtgcacacgctcaatgcctcctcaatgcagctgtgaagatattaggctgaattcatgccactcagattgtaagagctgtatgtgcacacgctcacagccaggacagtgtcgtcgtcttgacaccaacgacttctgctacaaaccttgcaagtccagagatgactaagag

SEQ ID NO: 255079 - DNA, 414 bp, Glycine max
gacactgattgagagaaaaataatggaggcttacactaaggttgtttgcattcttggacttttaatttttgtaagcatttcagatattcatagagtggagggtgcaggggaatgtgggaggtctactactccagataatgaagcaataaagcttattccttgtgtctctgccgcaaaagatgaaaatgttaaagttactaagaattgctgtgctcagatcgagaaacttggcaagaaccctagttgtctgtgtgctgttatgctctccaacacagcaaaaatgtctggagccgatcctaaggttgccataaccatcccaaaacgctgcaaccttgctaatcgccctgttggttacaagtgtggaccttacactcttccttaagatagtactgaggacaaggacggatttgggcg

SEQ ID NO: 255080 - DNA, 405 bp, Glycine max; identical to SEQ ID NO: 254914

SEQ ID NO: 255081 - DNA, 395 bp, Glycine max
  unsure (1)..(395): unsure at all n locations
ggcagccaagaaaagaaaatcctcacccattttcttcgtagccaaacactctgaaattctcagttatgtcgtggcaagcgtatgtggatgatcacctactgtgtgaaatcgaaggtaaccacctcactcacgccgctatcatcggccaagacggaagcgtttgggctcagagcaccaacttccctcagttcaaacctgaggaaataactgccatcaataatgactttaatgagcctggatcacttgctccaactggattgtatatcggtggcaccaaatacatggtcatccagggtgagcctggtgctgtcattcgagggaagaagggtcctgntggtgttactgtgaagaagaacggtgcggccttgatcattggcatttaagatgaaccaatg

SEQ ID NO: 255082 - DNA, 403 bp, Glycine max; identical to SEQ ID NO: 254946

SEQ ID NO: 255083 - DNA, 383 bp, Glycine max
gacaacacaaacattctctccattgtctttgaacactcatcaccatggccaagcttgttctttccctttgtttccttcttttcagtggctgcttcgctctgagagagcaggcacagcaaaatgagtgccagatccaaaagctgaatgccctcaaaccggataaccgtatagagtcggaaagtgggttcattgagacctggaaccctaacaacaagccattccagcgtgccggtgttgccctctctcgctgcacccttaaccgcaatgcccttcgtagaccttcctacaccaacggtccccaggaaatctacatacaacaaggtaatggtatttttgggatgatattcccgggttgtcctagcacttatcaagagccgcaagaa

SEQ ID NO: 255084 - DNA, 417 bp, Glycine max
  unsure (1)..(417): unsure at all n locations
ggtgttttcatcgttgtcgttcagttctgaacggaaaagcaccgtcgcaccttccctgaggcttctcttgtctgtcgcgagtgaccatggtgagggttagtgtgctgaacgatgctctgaagagcatgtacaatgctgagaaaaggggaaagcgccaagtcatgattcggccatcctctaaagtcattatcaaattccttttggtgatgcagaagcacggatacattggagagtttgagtatgttgatgaccacagggctggtaaaatcgtggtcgaattgaacggtacactgaacaagtgtggggttattagtccccgttttgatgtcngcgtcaaagagattgaacgttggactgctaggcttctcccctcaagacagtttgggtataatgtattgactacctctgccggcatca

SEQ ID NO: 255085 - DNA, 200 bp, Glycine max
cacatagagggatgcacggaactgacgatcgaagtcttccatagggccccgcagttgaaaggcaccatcttgtttgctctctttctcttttgtgccttcagcagctcatagctaccgtcagccatcgctgatttcgtgctcgatactgcaagtagacctcttgaatatggtaggacatagtatatcttgtcatacatggg

SEQ ID NO: 255086 - DNA, 410 bp, Glycine max
acaactcaaacattctctccattggtccttaaacactcatcagtcatcaccatggccaagctagttttttccctttgttttctgcttttcagtggctgctgcttcgctttcagttccagagagcagcctcagcaaaacgagtgccagatccaaaaactcaatgccctcaaaccggataaccgtatagagtcagaaggagggctcattgagacatggaaccctaacaacaagccattccagtgtgccggtgttgccctctctcgctgcaccctcaaccgcaacgcccttcgtagaccttcctacaccaacggtccccaggaaatctacatccaacaaggtaagggtatttttggcatgatatacccgggttgttctagcacatttgaagagcctcaacaacctcaacaaag

SEQ ID NO: 255087 - DNA, 407 bp, Glycine max
gattcacacaactaactaagaaagtcttccatagccccccaaaaatgaagagcaccatcttctttgctctctttctcttttgtgccttcaccacctcatacctaccttcagccatcgctgatttcgtgctcgataatgaaggtaaccctcttgaaaatggtggcacatattatatcttgtcagacataacagcatttggtggaataagagcagccccaacgggaaatgaaagatgccctctcactgtggtgcaatctcgcaatgagctcgacaaagggattggaacaatcatctcgtccccatatcgaatccgttttatcgccgaaagccatcctttgagccttaagttcgattcatttgcagttataatgctgtgtgttggaattcctaccgagtggtctgttgtg

SEQ ID NO: 255088 - DNA, 409 bp, Glycine max
  unsure (1)..(409): unsure at all n locations
gataacaatccctattaaaatcttctaaaattaaattaccatatatagtcacattttctttacactttgtgaggtctaaaatgttgtccatttttcacaaggggtttgctcacccacctgaagagcttaaaagccctgcatctaacagtggctccaacaagcctaagattcctgaggaaactctaagagaatttctttctcatcatccccataacactttttctctgagttttggtcactctgctgttctagcttatactcgtcctgattcaccttcctttgttcatcaaaggttgttttgtgggattgatgacatatactgtatctttttggggagcttgaacaatttgtgctcactcaacaagcagtatggtttggcaaanggcaccaacgaagccatgtttgtgat

SEQ ID NO: 255089 - DNA, 377 bp, Glycine max
gacacaactaactaagaaagtcttccatagccccccaaaaatgaagagcaccatcttctttgctctctttctcttttgtgccttcaccacctcatacctaccttcagccatcgccgatttcgtgctcgataatgaaggtaaccctcttgaaaatggtggcacatattatatcttgtcagacacaacagcatttggtggaataagagcagccccaacgggaaatgaaagatgccctctcactgtggtgcaatctcgcaatgagctcgacaaagggattggaacaatcatctcgtccccatatcgaatccgttttatcgccgaaggccatcctttgagccttaagttcgattcatttgcagttataatgttgtgtgttg

SEQ ID NO: 255090 - DNA, 306 bp, Glycine max
gacactcctagtcatcaaacgtcttcgataacaccacaaacttgaagatcaccatcttcgttgctctcgttctcgctcgtgccttcggaacctcatacctagcttcatgtatcgctgatttcgtgctccatagtgattggtaaccctcttgaatatggtggcaatgatatatcttgtcatgacatagcatcatttggttgaatatgacctgccacaacgggaggtgacagatgatctctcactgtggtgcaaactagcagtgagctcgacaaacggattggaacactcatctcatcaccatatcga

SEQ ID NO: 255091 - DNA, 301 bp, Glycine max
tcaatcgcaactgtcgctcgacgctcacaaaccggtaccgtagctcccaacacgtgttcaccggcacggatcgcgtcatgacgggaggagggtccagctgcgaatctaagacagccgggtatcctgctgctgtgatgacaaacggagccgccaccactgcgacgtaagcccccggcaaagggaaagcagcgaaagaacctaacaagcgaacgaggcgtctaagtgctttcttcgctttcatggaagatttcaggactgtattcaagatacaacatccctgaatacaaggcagtgtctgctg

SEQ ID NO: 255092 - DNA, 408 bp, Glycine max
ggccggctccagcaacctctgccaatctttaatgggtgtgattgatttctacaacactggtgctttgtgctgggttaagtccaacgccaatctgaagcagcaagtgggtttggcaccaagacccatttgttcatttgaggggaataatcagaggaagtttgtggcaatggcttctaccgttcctgtggagcaagtcaacaatggccccctgcaggtgacaggtgactccttcatcagagagcatctgaggaagttggctccttatcagcccattttgccctttgaggttttatcagctcgccttggacgtaagcctgaggatatcgtgaagttagatgctaatgaaaatccttatggtccccctccagaggtcatggaagccctaagatcaatgcaatttccatatgt

SEQ ID NO: 255093 - DNA, 255 bp, Glycine max
gacagcaaaaacaattaataaagatgagtttgaagaacaacatggtggtgctaaaggtgtgtttgttgcttcttttccttgtgggggttacagctgcacgcatggaactgagcttcttcaaaagtgatcagtcatcaagttatgatgatgatgagtattcaaaaccatgctgtgatctctgcatgtgcacacgctcaatgcctcctcaatgcagctgtgaagatattaggctgaattcatgccactcagattgta

SEQ ID NO: 255094 - DNA, 422 bp, Glycine max
gatagtattatcattcattctcatctttctctcttctctctccacccaaaccctaactcccgaccctgttcccctctcgcatccgtcatgaaaggaggaaagtccaagaccgaatctaagagagccgatcccaaacttgctgtgaataagaagggagccgccaccaaggctaggaaacccgccggcaaggggaaggcagcgaaagaccctaacaagccaaagaggcctccaagtgctttcttcgttttcatggaggagttcaggaaggtattcaacaaagaacatcctgaaaacaaagcagtgtctgctgtgggcaaagctgctggagcaaaatggaagaccatgtctgatgctgaaaaagcaccttatgtggcaaagtctgagaaaaggaaagtggagtacgagaagaacatgagagccta

SEQ ID NO: 255095 - DNA, 412 bp, Glycine max
  unsure (1)..(412): unsure at all n locations
gattcacacaactaactaagaaagtcttccatagccccccaaaaatgaagagcaccatcttctttgctctctttctcttttgtgccttcaccacctcatacctaccttcagccatcgctgatttcgtgctcgataatgaaggtaaccctcttgaaaatggtggcacatattatatcttgtcagacataacagcatttggtggaataagagcagccccaacgggaaatgaaagatgccctctcactgtggtgcaatctcgcaatgagctcgacaaagggattggaacaatcatctcgtcnccacatcgaatccgttttatcgccgaaggccatcctttgagccttaagttcgattcatttgcagttataatgctgtgtgttggaattcctaccgagtggtctgttgtggagga

SEQ ID NO: 255096 - DNA, 179 bp, Glycine max
ggggaaattaaataaatgatgtatgtacctcttgcctatgtaggtttgtgtgttttgttttgttgtctagctttggttattaagtagtagggacgttcgttcgtgtctcaaaaaaaggggtactaccactctgtagtgtatatggatgctggaaatcaatgtgttttgtatttgttcac

SEQ ID NO: 255097 - DNA, 405 bp, Glycine max; identical to SEQ ID NO: 255028

SEQ ID NO: 255098 - DNA, 411 bp, Glycine max
gattcacacaactaactaagaaagtcttccatagccccccaaaaatgaagagcaccatcttctttgctctctttctcttttgtgccttcaccacctcatacctaccttcagccatcgctgatttcgtgctcgataatgaaggtaaccctcttgaaaatggtggcacatattatatcttgtcagacataacagcatttggtggaataagagcagccccaacgggaaatgaaagatgccctctcactgtggtgcaatctcgcaatgagctcgacaaagggattggaacaatcatctcgtccccatatcgaatccgttttatcgccgaaggccatcctttgagccttaagttcgattcatttgcagttataatgctgtgtgttggaattcctaccgagtggtctgttgtggagg

SEQ ID NO: 255099 - DNA, 392 bp, Glycine max
caacgccaaaaacaacaaatatgaaagccttgtgtcaaatatattaccaaggatgcaaaaggaaataacccatgaatttagcaaccgtcaaactgatgcaatctagcatgaggtatgtctcaaacagaaaaaaacaaaatttcacttcagcggtgcaacaatactacataaattataaccagtacatctaggtgtttgtcgctctagtgtaaatctgctgactagcatgggcagacaccatccttattgaacctctggccatcaattccctaatagccttccttgcaagtgatccattaatcctcaaacggtcagagagaatggaaggagtaatgagtttgtatttgggtgcctcggagaggagcttgtcataggtagcctgattgaacagc

SEQ ID NO: 255100 - DNA, 362 bp, Glycine max
  unsure (1)..(362): unsure at all n locations
gacaggtgtttgcaatactagcgatagctgataagagagataccaacaagaaaagaaaaaaagaagagttgagattccctttgaagaaaagatggcatcccataggcaaagctatgaagctggtcaaactaagggccgaactgaggaaaagacgaaccagacgatgggcaatattggagagaaggctcaagctgcaaaggagaagacccaggaaatggcccaagctgcaaaggagaagacccaacaaacagcccgagctgccaaggacaagacttgcgacacttcccaagcggcaaaggagaagacccaacagaatacaggagctgctcaacanaagacctcagagatgggccagtccacga

SEQ ID NO: 255101 - DNA, 377 bp, Glycine max
  unsure (1)..(377): unsure at all n locations
ggtggcatcagaaaatgaacagtttatcaatggcacttctccacccaaatcttcttcccactttcaattccaacactcttacctttccttccatcgaactcaaaccctcactctcgcacgtgccttctccaacccccacacgcttcagtctctctgtttccgcggcggaaaccaccgcttttgccgcccctcccactccccaacctgagaagcttggagttgtagttaagccaacggagaagccgagacttgtgttgaagttcatatggatggagaagaacattggaattgcgcttgaccagatggtaccgggccatggcaccattcctctgagcccatattacttttggccccgaaaagatgcctgngaagagctc

SEQ ID NO: 255102 - DNA, 276 bp, Glycine max
gacagcacacacaattaataaagatgagtttgaagaacaacatggtggtgctaaacgtgtgtttgttgcttcttttccttgtgggggttacagctgcacgcatggaactgagcttcttcaaaagtgataagtcatcaagttatgatgatgatgagtattcaaaacaatgctgtgatctctgcatgtgcaaacgctcaatgcctcctcaatgcagctgtgaacatattaggctgaattcatgccactcagattgtaaaagctgtatgtgcacacgct

SEQ ID NO: 255103 - DNA, 372 bp, Glycine max
gacagcaaaaacaattaataaagatgagtttgaagaacaacatggtggtgctaaaggtgtgtttgttgcttcttttccttgtgggggttacagctgcacgcatggaactgagcttcttcaaaagtgatcagtcagcaagttatgatgatgatgagtattcaaaaccatgctgtgatctctgcatgtgcacacgctcaatgcctcctcaatgcagctgtgaagatattaggctgaattcatgccactcagattgtaagagctgtatgtgcacacgctcacagccaggacagtgtcgttgtcttgacaccaacgacttctgctacaaaccttgcaagtccagagatgactagaaaaactaatagctctctcaaa

SEQ ID NO: 255104 - DNA, 395 bp, Glycine max
cactcactctttgactcttcttcgtctcaaatctcttcgttccttcgattcgttccatttcttccaaaatggccaaagacccagttcgcgttctcgtcactggagctgcagggcaaattgggtatgctcttgtccctatgattgctaggggagtgatgttgggtcctgaccagcccgtgatcctccacatgcttgacattcctccggcagcagagtcattgaatggggttaaaatggaattggtggatgctgcattccctcttcttaaaggtattgttgccacaactgatgtggttgaggcatgcactggggtcaatattgccgtgatggttggtggattcccaagaaaagaaggtatggagaggaaggatgtgatgactaagaacgtctccatt

SEQ ID NO: 255105 - DNA, 63 bp, Glycine max
tgaggacgaacacacccaaaataaatgcctaacacgaataaaaaaaaaaccggccgccctaaa

SEQ ID NO: 255106 - DNA, 318 bp, Glycine max
tgggacatcaatcacaattaacacacacgcaattccataacatcatggcggtgctaaacgcgtgcttgttgcttcttttcattgtgggggttacacctgcacccatagaactgaacatcttcacaagtgatcagtcatcaatcatacaattactatcattcaccatcatcatgctatgatctcagcatgtgcacacgcgcaatgtttcctcaatccacatgctcacatattatgatgaattcattccaatcagatcgtacgaactcttcgtgaatacactcacagccaagacagtatcttttacccgagatcaacaaa

SEQ ID NO: 255107 - DNA, 325 bp, Glycine max
aatagcagaaacaattaacattgatgactttgacgaacatcatgatagtgcaaatagtatgtttattgcatctgttccctgtggaggtgacagctgacaacacagatctcagcttcatcaaaactcataattcatcacgataagatgacaatcattaatcacaatcatgctcagatctctgcaagtgcacatcctcaataccactgcaatacacctgtaaaaatattatgctgcattcaagctactcatagtgtaagatctgaatgtacacactctcacactcattacagtgtcgctggcgtgaacaaaacgtcttctgctacaa

SEQ ID NO: 255108 - DNA, 277 bp, Glycine max
gctctttagtctttctctttttctctctctccattccgtgttttcagctccggtaacctctccttctccgccgccgttgctatctccgccgtgaccttccatccctcaacgccccacagatcttcaatttgattgcttgggtcaacaatttctgtcattctcaatcatggcaactagacttcagtttgaaaataattgtgaagttggagtcttctctaaactcaccaatgcttactgtttggttgcgactggaggttctgaaagcttctacagtgta

SEQ ID NO: 255109 - DNA, 405 bp, Glycine max; identical to SEQ ID NO: 254914

SEQ ID NO: 255110 - DNA, 395 bp, Glycine max
gattcacacaactaactaagaaagtcttccatagccccccaaaaatgaagagcaccatcttctttgctccctttctcttttgtgccttcaccacctcatacctaccttcagccatcgctgatttcgtgctcgataatgaaggtaaccctcttgaaaatggtggcacatattatatcttgtcagacataacagcatttggtggaataagagcagccccaacgggaaatgaaagatgccctctcactgtggtgcaatctcgcaatgagctcgacaaagggattggaacaatcatctcgtccccatatcgaatccgttttatcgccgaagggcatcctttgagccttaagttcgattcatttgcagttataatgctgtgtgttggaattcctaccgag

SEQ ID NO: 255111 - DNA, 409 bp, Glycine max
gcacacaactaactaagaaagtcttccatagccccccaaaaatgaagagcaccatcttctttgctctctttctcttttgtgccttcaccacctcatacctaccttcagccatcgctgatttcgtgctcgataatgaaggtaaccctcttgaaaatggtggcacatattatatcttgtcagacataacagcatttggtggaataagagcagccccaacgggaaatgaaagatgccctctcactgtggtgcaatctcgcaatgagctcgacaaagggattggaacaatcatctcgtccccatatcgaatccgttttatcgccgaaggccatcctttgagccttaagttcgattcatttgcagttataatgctgtgtgttggaattcctaccgagtggtctgttgtggagga

SEQ ID NO: 255112 - DNA, 394 bp, Glycine max
gatccaatccaattgaattctccagagagaagaagaaacttaatcgatcatcacttcacttcactaatacatcatggcagacgggacccagaacaagtatgagagctctgaggttgaggtccaggatcgtggtgtttttgactttctcggtaagaaaaaggatgaagaagacaagcctcatcctcaggaggaggtcatcgccaccgagtttcaaaaagtcactgtctcagaccaaggagagaacaagcacagcctcttagaaaagcttcaccgatttgacagcagctctagctctgtaagcttcttttcctttattttctttgcatgcataaacattatatatataacttgttcatcctgaaaggaataactttatattaacttgtcttttttt

SEQ ID NO: 255113 - DNA, 404 bp, Glycine max
gacagcaaaaacaattaataaagatgagtttgaagaacaacatggtggtgctaaaggtgtgtttgttgcttcttttccttgtgggggttacagctgcacgcatggaactgagcttcttcaaaagtgatcagtcatcaagttatgatgatgatgagtattcaaaaccatgctgtgatctctgcatgtgcacacgctcaatgcctcctcaatgcagctgtgaagatattaggctgaattcatgccactcagattgtaagagctgtatgtgcacacgctcacagccaggacagtgtcgtcgtcttgacaccaacgacttctgctacaaaccttgcaagtccagagatgactggaaaaactaatagctctctcaaatggacgaagccctttaagctttgtttgttatg

SEQ ID NO: 255114 - DNA, 317 bp, Glycine max
gattcacacaactaactaagaaagtcttccatagccccccaaaaatgaagagcaccatcttctttgctctctttctcttttgtgccgtcaccagctcatacctaccttcagccatcgctgatttcgtgctcgataatgaaggtaaccctcttgacaatggtgggacatattatatcttgtcagacataacagcatttggtggaataagagcagccccaacgggaaatgaaagatgccctctcactgtggtgcaatctcgcaatgagctcgacaaagggattggaacaatcatctcgtccccatatcgaatccgtttt

SEQ ID NO: 255115 - DNA, 376 bp, Glycine max
gattcacacaactaactaagaaagtcttccatagccccccaaaaatgaagagcaccatcttctttgctctctttctcttttgtgcggtcaccacctcatacctaccttcagccatcgctgatttcgtgctcgataatgaaggtaaccctcttgaaaatggtggcacatattatatcttgtcagacataacagcatttggtggaataagagcagccccagcgggaaatgaaagatgccctcccactgtggtgcaatctcgcaatgagcctcgacaaagggattggtacaatcatctcgtcgccatatcgaatccgttttatctccgaatggcatcctttgagccttaagttcgattcatttgcacttacaatgctgt

SEQ ID NO: 255116 - DNA, 401 bp, Glycine max
gacacaactaactaagaaagtcttccatagccccccaaaaatgaagagcaccatcttctttgctctctttctcttttgtgccttcaccacctcatacctaccttcagccatcgctgatttcgtgctcgataatgaaggtaaccctcttgaaaatggtggtacatattatatcttgtcagacataacagcatttggtggaataagagcagccccaacgggaaatgaaagatgccctctcactgtggtgcaatctcgcaatgagctcgacaaagggattggaacaatcatctcgtccccatatcgaatccgttttatcgccgaaggccatcctttgagccttaagttcgattcatttgcagttataatgctgtgtgttggaattcctaccgagtggtctgttg

SEQ ID NO: 255117 - DNA, 400 bp, Glycine max
  unsure (1)..(400): unsure at all n locations
caagcacatgtggcctcttctaaaagtaggaggcggccacgggactggaagaagtgctgcagtggtggctagtttgagtgcaagggttgcatctattggggacaatcgtcttgggggctggtactcatatcgatcttcaaaggctgctcttaatcaattatcaaagactgtctccctggaatttgcaagaaagaaggatccaattgtatgcattttactgcatcctggtacagttgacacaaatctctctaagccatttcaaagaaatgttcccccagacaagctcttcaccaaagagttctcagttcagaagctactaagcatcattaacaatgtcaagatccatgacaatggcaagttctttgcctgngatggaaaagaaattccttggtaaccctgt

SEQ ID NO: 255118 - DNA, 405 bp, Glycine max
gacagcaaaaacaattaataaagatgagtttgaagaacaacatggtggtgctaaaggtgtgtttgttgcttcttttccttgtgggggttacagctgcacgcatggaactgagcttcttcaaaagtgatcagtcatcaagttatgatgatgatgagtattcaaaaccacgctgtgatctctgcatgtgcacacgctcaatgcctcctcaatgcagctgtgaagatattaggctgaattcatgccactcagattgtaagagctgtatgtgcacacgctcacagccaggacagtgtcgttgtcttgacaccaacgacttctgctacaaaccttgcaagtccagagatgactagaaaaactaatagctctctcaaatggacgaagcccctttaagctttgtttgttatg

SEQ ID NO: 255119 - DNA, 405 bp, Glycine max
gacagcaaaaacaattaataaggatgagtttgaagaacaacatggtggtgctaaaggtgtgtttgttgcttcttttccttgtgggggttacagctgcacgcatggaactgagcttcttcaaaagtgatcagtcatcaagttatgatgatgatgagtattcaaaaccatgctgtgatctctgcatgtgcacacgctcaatgcctcctcaatgcagctgtgaagatattaggctgaattcatgccactcagattgtaagagctgtatgtgcacacgctcacagccaggacagtgtcgttgtcttgacaccaacgacttctgctacaaaccttgcaagtccagagatgactagaaaaactaatagctctctcaaatggacgaagcccctttaggctttgtttgttatg

SEQ ID NO: 255120 - DNA, 415 bp, Glycine max
  unsure (1)..(415): unsure at all n locations
ggaagcatttgagactaactcttagagagaaaaaaaaatggctgatacaggtggaggagatgcagtgagaccagtggtaatatgtgataacaagtgtggctgcacacttccatgcactggtggttccacttgcaggtgcacaagtgctggcattgccacaggagggggtgatcacgtgacatgctcgtgcggagagcactgtggttgcaatccatgctcatgtcccaagattgcggctgctggaagtggttgcagatgtggcacagattgtgcatgtgcctcctgccgcacttagtatcacaccttaaggcttaaacttcacgttttattttatgtcttcaaatcttgaatacgttttctatatattagtcttgtttaaagttcanagtgtggacgtggtttctacttagtactc

SEQ ID NO: 255121 - DNA, 406 bp, Glycine max
ggttctagcgtgtgattgtttgttgttgtaactcgttcttcttcttttgttgttctgtgtttgtgtttgttttttctctcacctgaaaatgtcttgctgcggtggtaactgtggttgcggaagctcctgcaagtgcggcaacggctgcggaggctgcaagatgtacccagacttgagctacactgagtcaaccaccaccgagaccttggtcatgggagtggcacctgttaaggctcaatttgagggtgctgaaatgggtgtgcccgctgagaacgatggctgcaaatgtggaccaaactgctcctgcaacccctgcacttgcaagtgacgtgttgggagagcaagcttcaagcagagatagcccttaattatgaaaaatgataactattaatgtgtagctaaaaac

SEQ ID NO: 255122 - DNA, 388 bp, Glycine max
gggttcaagtggttgaattgttgttgttgtaactcgttcttcttcttttgttgttctgtgtttgtgtttgttttttctctcacctgaaaatgtcttgctgcggtggtaactgtggttgcggaagctcctgcaagtgcggcaacggctgcggaggctgcaagatgtacccagacttgagctacactgagtcaaccaccaccgagaccttggtcatgggagtggcacctgttaaggctcaatttgagggtgctgaaatgggtgtgcccgctgagaacgatggctgcaaatgtggaccaaactgctcctgcaacccctgcacttgcaagtgacgtgttgggagagcaagcttcaagcagagataaccccttagtaagaataatgaataact

SEQ ID NO: 255123 - DNA, 381 bp, Glycine max
  unsure (1)..(381): unsure at all n locations
gactgcaactttgctctctgtgaggtttcaatttctaattagggtttcgcttagagtaaccaataaccatgggagtcttcacctttgtcgtccgcaaatccggcagcgaatggagcgccaagcaacattccggcgacatcgaggcctccgccgattccaccttcgatctccaacggaagctcgtgcaagccgctctcgccgttgattcctccggtggagttcagtcctccttctctcccgtgtctcctacctccgctgtgttccaggtgatagtgggtggtgcagtattcgttggaggtggtggtggtgctgttgcagctgcacctgcangtggtgctgccgcagctgatgctgccccagctgctgagaaaaaggaagaaa

SEQ ID NO: 255124 - DNA, 426 bp, Glycine max
ggcagtgcaaaactcacaacacgtctaaacaaaaaatcaagaacaatggcttatgctaggcttgctcctatggctgtcttcttgcttgccacttccaccataatgttcccaacgaagatagaagcagcagattgtaatggtgcatgttcacctttcgagatgccaccgtgccgctcacgtgattgtcgttgtgtccctataggactagttgctggtttctgcatacatccaactggactttcatctgttgcgaagatgatcgacgaacatcccaacttatgtcaatctgatgatgaatgcatgaagaaaggaagtggcaatttttgcgctcgttaccctaataattatatcgattatggatggtgttttgattctgattctgaagcactgaaaggcttcttggccatgcctaaggcaaaccacaag

SEQ ID NO: 255125 - DNA, 408 bp, Glycine max
gattcacacaactaactaagaaagtcttccatagccccccaaaaatgaagagcaccatcttctttgctctctttctcttttgtgccttcaccacctcatacctaccttcagccatcgctgatttcgtgctcgataatgaaggtaaccctcttgaaaatggtggcacatattatatcttgtcagacataacagcatttggtggaataagagcagccccaacgggaaatgaaagatgccctctcactgtggtgcaatctcgcaatgagctcgacaaagggattggaacaatcatctcgtccccatatcgaatccgttttatcgccgaaggccatcctttgagccttaagttcgattcatttgcagttataatgctgtgtgttggaattcctaccgagtggtctgttgtgg

SEQ ID NO: 255126 - DNA, 406 bp, Glycine max
gtgagtaaattgatcaatttactcacgtgaaataggctttattacttcatcaaatggtaggttcattggattttctgagatacaaccaataaattcttttttgattaaaaggtaagtaattcaattatatataataattatatataataatgtataacatagtagataaagaggtggtataccatttttttttagaaattttttttttgttttatctgttcatttgtatgttgagaatcaattcgacttcaacattttgagtttttctatttttttgaatgtctgatattttattagacaattcaatcttttcattttattgtttttattgcgattggatatatacacccacgttattttctaaattgtattggggttgctaactcaatggtagagtactcggctt

SEQ ID NO: 255127 - DNA, 405 bp, Glycine max
gacagcaaaaacaattaataaagatgagtttgaagaacaacatggtggtgctaaaggtgtgtttgttgcttcttttccttgtgggggttacagctgcacgcatggaactgagcttcttcaaaagtgatcagtcatcaagttatgatgatgatgagtattcaaaaccatgctgtgatctctgcatgtgcacacgctcaatgcctcctcaatgcagctgtgaagatattatgctgaattcatgccactcagattgtaagagctgtatgtgcacacgctcacagccaggacagtgtcgttgtcttgacactaacgacttctgctacaaaccttgcaagtccagagatgactacaacaactaatagctctctcaaatggacgaagcccctttaggctttgtttgttatg

SEQ ID NO: 255128 - DNA, 230 bp, Glycine max
ggcacaagtgagtttgttgatcgagataactagaaacagtgtgatgaaaatgaaggtccttgttttcttcgttgctacaattttggtagcatggcaatgccatgcgtacgatatgttccctcggcgaatgaacactggctatggtgcccgtactccggaggtgaaatgcccaagttggaggcttcctgtggaagcacacagcatctttggctttgagaccagtcctgaag

SEQ ID NO: 255129 - DNA, 254 bp, Glycine max
gattcacacaactaactaagaaagtcttccatagccccccaaaaatgaagagcaccatcttctttgctctctttctctttggtggggtgaccacctcatacctaccttcagccggcgctgatttcgtgctcgataatgaaggtaaccctcttgaaaatggtggcacatattatatcttgtcagacataacagcatttggtggaataagagcagccccaacgggaaatgaaagatgccctctcactgtggtgcac

SEQ ID NO: 255130 - DNA, 340 bp, Glycine max
cgtccggaaaaaagacgacagaaggggacacttactagtagtaagcatggagtcctcaaagatctatgcttacctcttcctctgcatgatctttctctcttccgccactcccattctcggttgtggcggacggtggcaaaccccccaaaaaacacaagcctggtaaaacaccaaagacacccaaaacacccgttgttaagccaccagtcaccatccctcccattaatgttcctcccgttgttcttccaccaatagtgaagcccccaggtattctccctccaattccaattattaactcaccaaccacaccagggaacggagggaacactccatgcccacc

SEQ ID NO: 255131 - DNA, 143 bp, Glycine max
  unsure (1)..(143): unsure at all n locations
gagtgcaatttagctgaagcacaccaatggctacttcaaagttgaaactccanaatctggttctatctctctcccggggcgggggcttggcactgctcctactcacccgcaccgtaaactcatcttaccctgtctctttccac

SEQ ID NO: 255132 - DNA, 89 bp, Glycine max
gacagcaaaaacaattaataaagatgagtttgaagaacaacatggtggtgctaaaggtgtgtttgttacctcttttccttgtgggggtg

SEQ ID NO: 255133 - DNA, 501 bp, Glycine max
gtccctaccgcttccaccttactactgcctgtccacttcttctcctcttcttccccacccttctttccccctctcctcttctcttcctttcccctcccctttcccctgggcgggggtgctttctttcctttcccacttttcttgttcccctctctcctctccctctctttccccttctctccccttcctctcctcttcctttttcctccctcttcctcctccttcttcctctctctttcccccctttttcttccccgcgcttcctctcctctttctctctctctctctcttttcctccttctctctccctctttcttcctccctccccccttcctcttctctccattcttatccatcttctcctgtccttcttatctctctcatccctctcgctctctcttgtcttctcgccttttctcctctctccctctttctctttctctctccctctctctcctcccttcctttcacctcttgcttctcaccttctctgctctcttc

SEQ ID NO: 255134 - DNA, 209 bp, Glycine max
ggcagttcaattccaatatattccattctctctgtgtatttccctacctctcccttcaagatgcacatcttcgtcaagaccctcaccggcgggagggagggccgttgacgttgacacctctgacaccatccacaacctcaaggccaagatccacgataacgaacgaaccccccccgaccccacattctcatttttcccggacacgaact

SEQ ID NO: 255135 - DNA, 286 bp, Glycine max
gaatgtaccctgatatacacacacacagctagcagatattacatacacgtgaatcactaattaagccatggagaagaaatcagtagcggggttgtgcttcctcttccttgttctctttgttgctcaagaagttgtggtgcaaactgaggcaaagacttgcgagaacctggctgatacatacaggggtccatgcttcaccactggcagctgcgatgatgagtgcgagactacagaccacttgctcagaggcagatcccgggacgattttcgctgttggtgcaccaaa

SEQ ID NO: 255136 - DNA, 250 bp, Glycine max
gactcttaatcttttttctcttcctttcacctcctcagcagtcgtcagaaagactccataacccaaaaatgcctttcaggaggtaggttgagattggaagggttgctcagatgaactatggcaaagagtacgggcggctcgtgatcattgtcgatgtcattgaccagaatagggctcttgttgatgctcccgacatggtgaggtcccaagtgaagttcgaagaagctctcgctcactgacatcaagattg

SEQ ID NO: 255137 - DNA, 223 bp, Glycine max
gccgcaagatcattatcgatacttatggaggatggggtgctcatggtggtggtgctttctccgggaaggaccctaccaaggttgatacgagtggggggtggggtgtgagacaggctgctaatagcactttggcacgtgcatttgccagaacgtgcactgtgccagtgtcttatcccattcatctgcctgagcctttatctgtttttgttgaccactatagccc

SEQ ID NO: 255138 - DNA, 306 bp, Glycine max
ggagactaactcggagagaaagagagagagagagagaaaaatggctgatacaagtggaggagatgcagtgagaccggtggtaatatgtgataacaagtgtggctgcacagttccatgcactggtggttccacttgcaggtgcacaagtgtcggcatgacaactggaggcggtgatcacgtgacatgctcgtgcggagagtactgtgggtgcaatccatgctcatgtcccaggacggcggcttctggaactggttgcagatgtggcacagattgctcatgtgcctcttgccgcacttaacatcatcc

SEQ ID NO: 255139 - DNA, 329 bp, Glycine max
gttttcttctaattaaaacaaaaattataaaaaattttctcgtatcccctcctatatcacccacaaaatcctccactctccctctctagaggatggaggcttacttatccctccatacaacctcactatcctcttcacactctctccaaacttcacttcactacccgtccttttacatcctccttactacccaaattcctccctttctccacccctattacccttgcccacacccctcccctcttcatcaccccctactttccctaaccccccccccccacttcccctcaccttcctccatcttcttctcttctcacctcttctccctc

SEQ ID NO: 255140 - DNA, 308 bp, Glycine max
ggcgtacacagcctcaacaaccctaacgcgtgcagagcagagagagacgcagccatggggcgaagacccgcgaggtgttataggcaagggaggagggaaccataccccaagtcacggttttgccgtggtgttcctgatcccaagatcaggatttacgatgttggtatgaagaagaagggtgttgatgagtttcctttctgtgtccatctggttagttgggagaaggaaaacgtttctagtgaggccctggaagctgctcgtattgcttgcaacaactacatggcccaccttgctggatacggagcttt

SEQ ID NO: 255141 - DNA, 272 bp, Glycine max
cggtcgaaatccggggcgaccaagcctccggccaaacctccgttacggtgcgaaaagaccacaaaaagggaaaatttggaccaactccgggaaaaagagaaaaagagaaaaaaaaattggtgatacaagttggggggaatcattagaccgtgggaaaatgtgaccagcaatgcaaatgcacagttccatgcaccggtgggtccacattcatgtgcacaaatgtccgcaatacaactggacgcgggggttaccttacatgccccctccggaaa

SEQ ID NO: 255142 - DNA, 337 bp, Glycine max
gatgcaactgaataattaagaaaagccatttccatagcagcctaagaaaatgaagagcactagcttgttcgctatctttctactttgcgccttcacctcatacctaccttccggcaccgcccaggacgtgctcgacgtggatggcgatccgattcggaacggtttcatatactacgttttgccggcaataagaggaaacggtggcggcatagaacgagccgcactcgggaaagacacttgccctatcactgtagtgcaatctcccaatccaaactctaaagggtttagaattaagtttgaatctgcattacccgcctattacattaacgatacccta

SEQ ID NO: 255143 - DNA, 351 bp, Glycine max
  unsure (1)..(351): unsure at all n locations
aagagagagctgtggagggtgcagtacgcgctcagccgcatccgcaacaacgcgcggaacctcctcaccctcgacgagaagaacccgcgccggatcttcgagggagaggcgctgctccgaaggatgttccgttacggtctcctcgatgagacacagaacaagcttgattacgtcctcgccctcaccgtcgagaactttctcgagcgccgcctccagacccttgttttcaagtccggcatggccaagtccatccaccatgctagggttcttatcaagcagagacatatcaaggttggtangcaagtggtgaacatcccatctttcttggtaagggttgactcacagaagcac

SEQ ID NO: 255144 - DNA, 374 bp, Glycine max
gagtgcaatttagctgaagcaaagcaatggctacttcaaagttgaaaacccagaatgtggttgtatctctctccctaaccttaaccttggtactggtgctactgaccagcaaggcaaactcagcggaaactgtttctttcagctggaacaagttcgtgccgaagcaaccaaacatgatcctccaaggagacgctattgtgacctcctcgggaaagttacaactcaataaggttgacgaaaacggcaccccaaaaccctcgtctcttggtcgcgccctctactccacccccatccacatttgggacaaagaaaccggtagcgttgccagcttcgccgcttccttcaacttcaccttctatgcccctgacacaaaa

SEQ ID NO: 255145 - DNA, 377 bp, Glycine max
gacaagttacaactcatcaattcggcagataaaggtagtagtagtgttacgttcgaattcgaattgttccatttgcttcgcaaaagttgcaactacttccacagaaagaaaaaaagtttctaagttaaggaaatccagagtgaaaaaaaaaaaaatggccggtgacggtgcagctacatgcatagacatccttcttgccattattctccctcctcttggtgtctttctcaaatatggttgccaggtggagttctggatttgtttggtgctgaccctttttggttatatacctggaattatctatgctgtctattctatcaccaagtgatcgtcaccctttaacttttgtggacaataaacaaatgtcatgggcgttt

SEQ ID NO: 255146 - DNA, 288 bp, Glycine max
gacgacaacagggggtggcactgaataattcatagaaggcgtttctataggaggctaatgagatgaagagcactagcttgtgcgccatctttctagtttgcgccgtgacctcatacctaccttccggcaccgtccaggacgtgcgcgacgtggatggcgatccgattcgggacgggttcatagactacgttttgccggcgataagaggaaacggtggcggcatagaaggagccgcactctggaaagacacttgccctatcactgtagtgcaatctcccaggccaaact

SEQ ID NO: 255147 - DNA, 436 bp, Glycine max
  unsure (1)..(436): unsure at all n locations
gaatctaaagataaataaaattcaggaaaaaaaaaaaaaaacatggtggtgaaggtgtatggtccaacctatggatcccccaagagggtcctggtgtgtctgattgagaaggaaattgagtttgaaacagtgcatgttgatctcttcaagggagagaataaggaacctgagttccttaagctgcagccatttggatcccttcctgttattcaagacggtgattatactctctatgaatctcgtgcaataatcagatacttagctgagaagtataaagaccaagggactgacttattgggaaagacaatagaagaaaagggtctagtggaacaatggcttgaagcggaagctcataactttcaccaccactctacaacttggttattaatgttctgtttgcgccattaancggggctccttcggaccanaaagtgat

SEQ ID NO: 255148 - DNA, 348 bp, Glycine max
gactcgcagttgtattgttgaacaagggtttctctgtctgcttcttcactttctctcgtttcaatcgaaaccaaaacaaaaacatgggcagaaaattcttcgtcggtggcaactggaaatgcaatgggaccactgaggaggtaaagaagattgttactactttgaatgaggctaaagtccctggagaagatgtcgtagaagttgttgtgagccctccttttgtgttccttcctgttgtaaaaagtttgctgcgccctgatttccgtgtttcagcacaaaactgttgggttcgcaaaggtggtgcctataacgggtgaggttactgctgaaatgcttgttaatttgggg

SEQ ID NO: 255149 - DNA, 261 bp, Glycine max
ggcagtgagaagaagagggggtcagagtgagaaagagaaagagagaattcgtaaaccctaatttcggaagatcggcgatgactgcctccaaggatcgcgagaacttcgtctacatcgccaaactcgccgagcaggccgagcgttacgaagagatggtggaatcaatgaagaacgttgcgaatctcgacgttgaactgacggtggaggagcggaatttgctttctgttgggtacaagaatgtgattggtgctcgcagagcgt

SEQ ID NO: 255150 - DNA, 385 bp, Glycine max
gatgcaactgaataattaagaaaagccatttccatagcagcctaagaaaatgaagagcactagcttgttcgctatctttctactttgcgccttcacctcatacctaccttccgccaccgcccaggacgtgctcgacgtggatggcgatccgattcggaacggtttcatatactacgttttgccggcaataagaggaaacggtggcggaatagaacgagccgcactcgggaaagacacttgccctatcactgtagtgcaatctcccaatccaaactctagggggttagaaattaagtttgaatctgcataccccgcctattacataaacgaaaccctaattttgcaaataaagttcagttacccacagcagtgtgaaagaaagaat

SEQ ID NO: 255151 - DNA, 307 bp, Glycine max
gagggaccaaactcagaacatgccacatgacacagagaagataggtcacagacactgtcagggatcactcacacgattgaggagacacttcatgtgggatgccataagacagaggaggattacaacggtgagcagcaccatggtggcgaatacaaaggggagcatcatggtgaacacactactgtatacacatgtgagcatcatgttggtgagcacaagccggatcaccattgacgacaaaatcacatacaggggttcctatacactatcaagggcattatccacagtcatcgacggtggcaccacc

SEQ ID NO: 255152 - DNA, 310 bp, Glycine max
ggtagcgcagagaaagaactagaactagggtttcatctttgccatcagtaaacgacaatgatttacgacgttaactctcctcttttccgatccttcctcagccagaagggaggctcctctgataagaggaaatcggacgaacagaagccaaaagagcagaaacccaaagccagcgagaacaaacctataatgactgagtgataacagctgagctgcattcagttgtagaatgaaaataggtggtaggtattgtatttggtgctaaactaagatctttttggctgtgttctgaagtatatgccggcgatgt

SEQ ID NO: 255153 - DNA, 377 bp, Glycine max
gagggttttgtgctgttgtcgctgctcatcctccataacctccgagctctacaccgaagaacggagccatggggaagacacatggaatgggagctgctcgcaagctcaagtctcaccgcaggaggcaaaggtgggctgataagtcatacaagaaatcccatcttgggaatgaatggaagaaaccttttgccggttcatcccatgccaagggaattgtccttgaaaagataggtattgaagctaagcagcccgactctgctattcgtaagtgtgccagagttcaacttatcaagaatgggaagaaaattgcagcttttgtccctaatgatggttgcttgaactacattgaagagaatgacgaagtcttgattgctgga

SEQ ID NO: 255154 - DNA, 320 bp, Glycine max
gactgtttattcaacattcaaagaaataaactcacgcactaatcactactacacaaatcacacacacacacacagagttgcaagagaaagagagcgagattccgatggcgactctggattccgacgtgcctatggttcccgccggcgagccctcaagcagcgccggtccttcttccaagaagcccaagcgcttcgagatcaagaagtggaacgccgtcgctctctgggcttgggacatcgttgtcgataactgtgctatctgccggaaccacatcatggatctctgcatcgagtgccaagccaaccatgctagcgccact

SEQ ID NO: 255155 - DNA, 388 bp, Glycine max
gacagcaaaaacaattaataaagatgagtttgaagaacaacatggtggtgctaaaggtgtgtttgttgcttcttttccttgtgggggttacagctgcacgcatggaactgagcttcttcaaaagtgatcagtcatcaagttatgatgatgatgagtatccaaaaccatgctgtgatctctgcatgtgcacacgctcaatgcctcctcaatgcagctgtgaagatattaggctgaattcatgccactcagattgtaagagctgtatgtgcacacgctcacagccaggacagtgtcgttgtcttgacaccaacgacttctgctacaaaccttgcaagtccagagatgactagaaatactaatagctctctcaaatgggagaagccccttt

SEQ ID NO: 255156 - DNA, 408 bp, Glycine max
ggaaccgaaacgaacctcaacaacgctgatcgtagaacggggaaaaggggattaaggtttatgaagcaccgccacccctggatttcacattggctacgaacgaatcagagaacaatccccaaaatgctcaaccaacaacgttggattcatcatctcaattggcatccgcacttgattccaacaacatacacatccacgaacgacaagctcgtgaactcaaagccggacttcaccccctaaagcacaagtttgtcgtctggtacactcgtccacaacctcgaattcgaaatcatgcatcagacgaggacaccataacgtctactgttgaacttactactgttgaaagaatttgggtctgctactgccatcttgctcctccagcttccttacctactccaacagatttgc

SEQ ID NO: 255157 - DNA, 389 bp, Glycine max
gatcacaatctcattcgttaacatcaatttctatctctcttatactctcactactctctttgctctttcttttctccactatggctgcacaagaaaacaacttccaagactacttgcctgtgatggccaacaagcttggtggggatggcctaattgatgaactgtgcaatgggttcgatcttttgaaggattctgataaaggggtcatcacttttgagagcctcaagaggaattcttacttgcttggtcttcagggtctcagtgatgaggatcttcgctccatggttttggaaggtgactttgatggtgacggtgcactcaaccaggtggagttctgtgtcttgatgttcagactcagccctgaattgatggagggctcaaagatgtgg

SEQ ID NO: 255158 - DNA, 353 bp, Glycine max
ggctgcaaactaaaccaattttcttcgtctgtgtaacaaacacttcaacaatctactctatacccgatttacaagatgagttcatttagccaaaatccctatgttttagttctgttcctcgttctcactgtgtggatatcccgtgtagtgtctcgcgggctcattacatctgagagacatgagaaatggatggcacaatatggtaaggtttacaaagatgctgcagagaacgagaaacgtttccaagtattcaaaaacaatgtgcagttcattgagtcattcaatgctgctggggacaaacctttcaaccttagcattaaccaatttgcggaccttcatgatgaagaatttaa

SEQ ID NO: 255159 - DNA, 368 bp, Glycine max
gaccaaacgttccagaagctgcttcttagtttctccaaacccaaactttcaccacagggacctgtcagatttagttaacgtttttacatcatcactgtgtgaagataatatagatatggaaatctcccatgacatcaagatcaaggatgacaagctaggtggtgtgaaggaagagaagattaaggtagaagttgaactgaagaataaatcagttgagaaagagcatacaataagtaaagaagagaagaaacataaagatgaagataaatcaaagaaaaaaaagaaagagaaaggggaagaggaagatgaagaaggagagaagaaagaaaaagatgttaaagataaaggggatgatggtgaagagaaag

SEQ ID NO: 255160 - DNA, 336 bp, Glycine max
gagagtggtggagtgtgcagaagagcgtcgcagtcgcaaccctaatcagaagaagcgcagcttcaagcgagtgacagccaccagccatgggtcgtatgcacagccgcggtaagggtatatcctcttctgctttgccctacaaaaggacacctcctagctggctcaagatctcttcgcaagatgtcgaagaaaatatctgcaagtttgcgaagaaaggtttgaccccgtctcagattggtgtcattctcagagattctcacggtattgctcaggtcaatagcgtcactggcagcaaaatccttcgcatcctcaaagctcacggacttgcgcctgaaa

SEQ ID NO: 255161 - DNA, 399 bp, Glycine max
ggtagactcgaatcctaaaaaattaaaccctagctagagagagagagagagggtttaaagcttctttctggcgcaacgcaattcatagcaaaaacagagagtgagagagggagatggggagcgacagcgaggcagagaagtcggtgcagaaagagaaggagaagaagaagatgttggccctggctcccattgctaaacctcttgctgggaagaagctttgcaagcgaaccctaaaacttgttcgtagagctgccgaacacaaatgcttgaaaagaggagtgaaggaggtcgttaaaagtataaggagaggtcataaaggattgtgtgtgattgctgggaacatatcaccgattgatgtcgtcactcatgttcctattctttgtgaagagtctgacattc

SEQ ID NO: 255162 - DNA, 391 bp, Glycine max
gactctcatcacattattctatatcaattttggttaagagtcttgaaaaagcaagagaaaaaaaataccaaccatggcaaccatttctgatcaacctagagggtcctactcctatggaacctcatatggagcaccctatggaaccacgtatgagaccaacaccagcattaacaacccaccttcacgccaaacagtgaagttcataactgctgccactattggcatcacactcttgctcctgtctgggttgaccctcacaggcactgtcataggtttgatcattgcaacccctcatcttgttatcttcagccccatccttgtccctgctgcgtttgtgctgttcctaattgcctctggctttttgttctctgggggctgttgtgtggctgcc

SEQ ID NO: 255163 - DNA, 401 bp, Glycine max
gacagcaaaaacaattaataaagatgagtttgaagaacaacatggtggtgcaaaaggtgtgtttgttgcttcttttccttgtgggggttacagctgcacgcatggaactgagcttcttcaaaagtgatcagtcatcaagttatgatgatgatgagtattcaaaaccatgctgtgatctctgcatgtgcacacgctcaatgcctcctcaatgcagctgtgaagatattaggctgaattcatgccactcagattgtaagggctgtatgtgcacacgctcacagccaggacagtgtcgttgtcttgacaccaacgacttctgctacaaaccttgcaagtccagagatggctagaaaaactaatagctctctcaaatggacgaagcccctttaggctttgtttgt

SEQ ID NO: 255164 - DNA, 134 bp, Glycine max
tggggcacaccaccattgacgttgcgcaggatattcacagcaaggcacatgatactctggatgtagctgcactgcatgcacgggatgcaactccactggatgccatggaacctgctgcatcggatgcatatgtc

SEQ ID NO: 255165 - DNA, 335 bp, Glycine max
  unsure (1)..(335): unsure at all n locations
gacagacagacacacactcggttctgccttcacaaaaaaattatcgagatcccctttttctcctaagaaaagccatggctaagggtcccggtctctactctgacatcggcaagaaagccaggggtactctctctctaattatgttgaaattctattaaattgtggtttttttggggggtagaatttttccttactgttaaaaattggtgctttttgatgaatcctaaatgggtttttgtttgtttggtgtagatctgctgttcaaggactaccacagtgaccagaagttcaccatcaccacctactcacccactggagttgtgagtgtntttttt

SEQ ID NO: 255166 - DNA, 337 bp, Glycine max
gagggtttggttattagggttttcgctgaccggtgcgcagtcgagcctccagaagacgaatcgaaaatgccgtcgcacaagacattcagaatcaagaagaagttggcgaagaagatgaggcagaacaggcccattccctactggatccgcatgaggaccgataacaccatcaggtacaacgcgaagcgccgtcactggcgtcgcaccaagcttggattctgaggtgtatgctctgcctaggttcaatttatccaattaattagtgttttattttcttgaggcaaaaacaatgttttgagtttttaatattttccatttgttcgaagactatattgtg

SEQ ID NO: 255167 - DNA, 419 bp, Glycine max
  unsure (1)..(419): unsure at all n locations
gacagcanaaacaattaataaagatgagtttgaagaacaacatggtggtgctaaaggtgtgtttgttgcttcttttccttgtgggggttacagctgcacgcatggagctgagcttcttcaaaagtgatcagtcatcaagttatgatgatgatgagtattcaaaaccatgctgtgatctctgcatgtgcacacgctcaatgcctcctcaatgcagctgtgaagatattaggctgaattcatgccactcagattgtaagagctgtatgtgcacacgcccacagccaggacagtgtcgttgtcttgacaccaacgacttctgctacaaaccttgcaagtccagagatgactagaaaaactaatagctctctcaaatggacgaagcccctttgggctttgtttgttaagttaagggagacaaa

SEQ ID NO: 255168 - DNA, 408 bp, Glycine max
gactcactcatacaatagagaccagcttttgcttctttgtgaacatggagatgaggaaatcatgtggcttcttcttcttgctcctcctccttgtctttgcttcccaggtggtggtgcagacggagggaagagtgtgtgagtcacaaagccacgggttccatggtttgtgtaatagagaccacaactgtgctttggtctgcaggaacgaaggtttctccggtggcaggtgcaaaggcttccgccgccgctgcttttgcaccaggatttgttgagatctcatcaaacactactcttgccatgcaaattaataaatcatagctaggccaaataaattgcatctactctttatccatttgggagctagctaccacaaccaactcatacttggtcatcggattgcttcccttt

SEQ ID NO: 255169 - DNA, 390 bp, Glycine max
gattcatgcaactgaataattaagaaaagccatttccatagcagcctaagaaaatgaagagcactagcttgttcgctatctttctactttgcgccttcacctcatacctaccttccgccaccgcccaggacgtgctcgacgtggatggcgatccgattcggaacggtttcatatactacgttttgccggcaataagaggaaacggtggcggaatagaacgagccgcactcgggaaagacacttgccctatcactgtagtgcaatctcccaatccaaactctaaggggttagaaattaagtttgaatctgcataccccgcctattacataaacgaaaccctaattttgcaaataaagttcagttacccacagcagtgtgaaagaaagaatc

SEQ ID NO: 255170 - DNA, 228 bp, Glycine max
taccgatgcgcatggtggagctaaaggtgctgttgttacatcatttccatgggtacggttgagatgcacgcatcgaacggtacttcttcaaaaataatacttcatgatattgctgatgatgatcgatattcagagccatgcttttatctctgcatttgcacacgctcaatgcctcctcaatgcacctgtcaggatactacgctgaattcacgccacttagattcttac

SEQ ID NO: 255171 - DNA, 406 bp, Glycine max
acgtcagtacagaaggggacaacaacagcagggaataaagatgagcttgaagaacaacatggtggtgcgaacggtgtgtttgatgcttcctttccttgtgggggttacaggtgcgaccatggaactgagcttcttcaaaagtgatcagtcatcaagttatgatgatcatgagtagtcaaaaccatgctgtgatctctgcatgtgcatacgctcaatgcctcctcaatgcatctgtgaagatattaggctgaattcatgccactcagattgtaagagctgtatgtgcacacgctcacatccaggacagtgtcgttgtcttgacaccaaccacttctgctacaaagcttgcaagtccagagatgactagaacaactaagagctctctcaaatggacgagaccccttta

SEQ ID NO: 255172 - DNA, 379 bp, Glycine max
gacgaacattattcctaatccttatcctgtttgcttccatggaagtgatttccgcttcgagcttgaatcccaacgctccgatgttcgtgcctctcgcctatcggacggtggaggatttctccgaccaatggtgggacctcgtccactcctccccctggttccgcgactactggctccgcgagtgcttccaagatccccagtaccaatacgacgacgttttcgacttcgactttgacctagatctccaagataaagatgaaaatgaagggaaggaagggaaagaggtggtgtcgttgggggtgctcaaatggcgaagctgtggaggaggatgggccgaagcgccgaggtatgtggaaaaggcccctaagtttgtgaagcc

SEQ ID NO: 255173 - DNA, 411 bp, Glycine max
gaagacgacagaaggggacaggtgtttgcaatactagcgatagctgataagagagataccaacaagaaaagaaaaaaagaagagttgagattccctttgaagaaaagatggcatcccataggcaaagctatgaagctggtcaaactaagggccgaactgaggaaaagacgaaccagacgatgggcaatattggagagaaggctcaagctgcaaaggagaagacccaggaaatggcccaagctgcaaaggagaagacccaacaaacagcccaagctgccaaggacaagacttgcgacacttcccaagcggcaaaggagaagacccaacagaatacaggagctgctcaacaaaagacctcagagatgggccagtccacgaaggaatcggcccagtcagggaaggacaacaccc

SEQ ID NO: 255174 - DNA, 406 bp, Glycine max; identical to SEQ ID NO: 243347

SEQ ID NO: 255175 - DNA, 411 bp, Glycine max
ggttctcctacagattcttcagcaactgcgattttggatcggaacctcttctgcggcgtagcaatgggacactccaacgtttggaattctcacccaaaaaactacggtcctggttctcgcacttgcccaatgtgttggaaaccacaatggatgattaaggaattatggccttatttgctgaaggcattgcttccttaccaatgcaaaggaaattggcttcatcaagtatcgctaaaagagctgttgtcacctacggaccaatattatgttctggcactaggatgttttgaagatgttatgtttgaagaaacttgagacttgtttttttcatcaattttattatcagacataatgtgtggaacgaagaaaacttttataaaaattgttttgcacaaaaaaaaggttcaaggg

SEQ ID NO: 255176 - DNA, 290 bp, Glycine max
taggggcacatgtgagtttgttgatcgagatagctacagacagtgtgatgccaatgaaggtccttgttatcggcgttgctacaattttggtactcatggcaatgccatgcctataagatgattccctctccgaatgaaaactggctatggtgcgcgttctccggaggtgaaatgcgcaagttggaggcttgctgtggaagcacacatcatctttggctttggtaccattcctgaatagtgccttgaaacgtcaaatgaatacatccatggcgaacaatatagatcagact

SEQ ID NO: 255177 - DNA, 307 bp, Glycine max
tgcttcatttccttgtgggggttacagctgcacgcatggatctgagcttcttcaaaagtgatcagtcatcaagttatgatgatgatgagtattcaaaatcatgctgtgatctctgcatgtgcacacgctcaatgcctcctcaatgcagctgtgacaatattaggctgaattcaagccactcagattgtaagagctgtatgtgcacacgctcacaggcagtacagtgtcgttgtcctgacaccaaacacttcagctacaaaccttgcaaatccaaagatgactaaaaaaacttataactctctcaaat

SEQ ID NO: 255178 - DNA, 386 bp, Glycine max
gatgcaactgaataattaagaaaagccatttccatagcagcctaagaaaatgaagagcactagcttgttcgctatctttctactttgcgccttcacctcatacctaccttccgccaccgcccaggacgtgctcgacgtggatggcgatccgattcggaacggtttcatatactacgttttgccggcaataagaggaaacggtggcggaatagaacgagccgcactcgggaaagacacttgccctatcactgtagtgcaatctcccaatccaaactctaaggggttagaaattaagtttgaatctgcataccccgcctattacataaacgaaaccctaattttgcaaataaagttcagttacccacagcagtgtgaaagaaagaatc

SEQ ID NO: 255179 - DNA, 111 bp, Glycine max
gtattcggccttagcggaaggcatatataagctttgattattttatttagtgtaatgatttcgtacaaccagggcatttatttagtactctcacacttgtgtctcactcat

SEQ ID NO: 255180 - DNA, 406 bp, Glycine max
caagaaaaacgttgtaacctctcactagtctatctaaggattggggtgtgaaaaaaaaaaaaagccggttcaatcgaattagtttatttttataaaatcaatagtttaaaaattagtttgaaaactaaattaaaaatgacttcaatcttaaaataagttaaaaactaattcaatttagaattggttttttaaaatcagtttgatttcaaactaatttttaaattaatttaattatttagatataaaactaaatgaaacaaattcaatttagttttttacctcacacccctacctatcgtaatggcacatacacgtgtgattatttaattaccagttagtatctactagtgcttatttttggctcttaatttgtttggggcttgttaagaaagaagaaaagaaagct

SEQ ID NO: 255181 - DNA, 329 bp, Glycine max
gacagcaaaaacaattaataaagatgagtttgaagaacaacatggtggtgctaaaggtgtgtttgttgcttcatttccttgtgggggttacagctgcacgcatggaactgagcttcttcaaaagtgatcagtcatcaagttatgatgatgatgagtattcaaaaccatgctgtgatctctgcatgtgcacacgctcaatgcctcctcaatgcagctgtgaagatattacgctgaattcatgccactcacattgtaagtactgtatgtgcacacgcgcacagccagaacagtgtcgttgtcttgacactaatcacttctgctacaaacct

SEQ ID NO: 255182 - DNA, 324 bp, Glycine max
ccacgcgtccgtcagggcgtccgtcgggtgctaggtatcgacaaaaaggtaaggctgctaatagaccatattaaggtactgatgctataatatgatgagagggttctgctgattaaagtcgactggtatggtttgtcctgaaaacactatctatcggtattggtactacttaatgatattaggggaccgtctgtcataagaatatactccgaggttgcaatatctataaagtatcccactatcaataggtattgccattcacttcgctggctccttatcgtacaactcttcaatgatttctcataatgtcaatttcctcgactt

SEQ ID NO: 255183 - DNA, 374 bp, Glycine max
gcttcacagcaaaaacgattaataaagatgagtttgaagaacaacatggtggtgctaaaggtgtgtttgttgcttcttttccttgtgggggttacagctgcacgcatggaactgagcttcttcaaaagtgatcagtcatcaagttatgatgatgatgagtattcaaaaccatgctgtgatctctgcatgtgcacacgctcaatgcctcctcaatgcagctgtgaagatattaggctgaattcatgccactcagattgtaagagctgtatgtgcacacgctcacagccaggacagtgtcgttgtcttgacaccaacgacttctgctacaaaccttgcaagtccagagatgactagaaaaactaatagctctctca

SEQ ID NO: 255184 - DNA, 382 bp, Glycine max
ggatggagcagaagaaggcaaagatagtggcagagctccaagctgtgaagcacaacagtggcaagtcctacaatcagttagcggaggagactggactcaccaacgtctatgttgctcagcttctcaggagacaggctcagctcaatccccaaactgcccctctacttcgggcagcgctgcccgacctgccccaagaccttgtttctgagatgatgagaccccctttgaggtcttatgaccctaatctcatccaagaccccactgtctataggttgaatgaagctgttatgcattttggggagagcatcaaagaaataatcaatgacgagtttggtgatgggatcatgtcagcaatagatttctactgctcggttgataaaat

SEQ ID NO: 255185 - DNA, 375 bp, Glycine max
ggaagcatatttgagactaactcggagagaaagagagagagagagagaaaaatggctgatacaagtggaggagatgcagtgagaccggtggtaatatgtgataacaagtgtggctgcacagttccatgcactggtggttccacttgcaggtgcacaagtgtcggcatgacaactggaggcggtgatcacgtgacatgctcgtgcggagagtactgtgggtgcaatccatgctcatgccccaagactgcggcttctggaactggttgcagatgtggcacagattgctcatgtgcctcttgccgcacttaacatcataccttaattaagtctcaaacttcacaaatcttgaatgtgccttaaatctaactatgtact

SEQ ID NO: 255186 - DNA, 453 bp, Glycine max
gatcaagaaccagttcaatatcctagtacaccgtattaaagaatttaagatatactatgatgagagcgcggttcccattactgttgctgggagttgttttcctggcatcagtttctgtctcatttggcattgcgtattgggaaaagcagaaccccagtcacaacaagtgcctccgaagttgcaatagcgagaaagactcctacaggaaccaagcatgccacgctcgttgcaacctccttaaggtggaggaagaagaagaatgcgaagaaggtcaaattccacgaccacgaccacaacacccggagagggaacgtcagcaacacggtgagaatgaggaagacgaacgtgagcagccacgtccattcccattcgcacgcccacgccaacctcatcaagaggaagagcacgagcagaaggacgaacacgaatggcatcgcaaagaggaaaaacacg

SEQ ID NO: 255187 - DNA, 290 bp, Glycine max
  unsure (1)..(290): unsure at all n locations
caacagaaggggacagcacaaccaattaataaagatgagtttgaagaacaacatggtggtgctaaacgtgtgtttgttgcttcttttccttgtgggggttacagctgcacgcatggaactgagcttcttcanaagtgatcagtcatcaagttatgatgatgatgagtattcagaaccatgctgtgatctctgcatgtgcacacgctcaatgcctcctcaatgcagctgtgaagatattaggctgaattcatgccactcaaattgttagagctgtatgtgcacacgctcac

SEQ ID NO: 255188 - DNA, 364 bp, Glycine max
ggccgaggaaaagaaagaaatagatgaagaagataaatgcacagcgtcctagatttcctcttctctgcttcggaagaaagagaaaacagacactacaatggcgttcgcctcattcctcggtagagtcctcttcgcttctgtcttcatactctctgcttatcaacaatttaatgaatatggagttgatgggggacctgctacaaaagcactcagacctaagtttgatgcctttacacatcgggtgcattctcaagtgggctttcaaattccagagattaatctgaaatttttaattgctggggctaatgctctgaagggtcttggaagggttcttttcatatttgggagctcttttggagctttg

SEQ ID NO: 255189 - DNA, 319 bp, Glycine max
ggtcgtacacacgagtatcacaaacctctctctataaatctttctagaacgtttcttcactccccgaacctgatctcttgctggttgccacactacaccgatatttccaccaaacccgtttgcgttgttgtttgcgaataaatggcaactaagaggagcgtgggaacgttgaaggagggtgatttgaaggggaagagggtattcgtgagggtcgatctgaacgtgcctttggatgacaaccttaacatcaccgatgacactagagtccgtgctgctgttcccaccatcaagtacttgactggttatggtgctaaagtga

SEQ ID NO: 255190 - DNA, 437 bp, Glycine max
cgcgtccataaagctgtcagacgacagcaggggattcacacaacgaggtaagaaggtcgtccatagccccccaaaaatgaagagcaccatcgtctttgctctcgttctcttttgtgccttcaccacctcatacctaccttcagccatcgctgatttcgtgctcgataatgaaggtaatcctcttgaaaatggtggcacatattatatcttgtcagacataacagcatttggtggaataagagcagccccaacgggaaatgagagatgccctctcactgtggtgcaatctcgcaatgagctcgataaacggattggaacaatcatctcgtccccatatcgaatccgttttatcgccgaaggccatcctttgagccttaagttcgattcatttgcagttaaaatgccgtgtgttgggactcctaacgagtggtccgttg

SEQ ID NO: 255191 - DNA, 424 bp, Glycine max
gacagcaaaaacaattaataaagatgagtttgaagaacaacatggtggtgctaaaggtgtgtttgttgcttcttttccttgtgggggttacagctgcacgcatggaaccgagcttcttcaaaagtgatcagtcatcaagttatgatgatgatgagtattcaaaaccatgctgtgatctctgcatgtgcacacgctcaatgcctcctcaatgcagctgtgaagatattaggctgaattcatgccactcagattgtaagagctgtatgtgcacacgctcacagccaggacagtgtcgttgtcttgacaccaacgacttctgctacaaaccttgcaagtccagagatgactagaaaaactaatagctctctcaaatggacgaagcccctttaggctttgtttgttatgttaagggagaacaaataaa

SEQ ID NO: 255192 - DNA, 98 bp, Glycine max
atcaaaaaaaaaaaaaaaaaaaaaaaaaaaaaaaaaaaaaaaaaaaaaaaaacaaaaaaaaacaaaattaaaaaaaaatatacataaaaccccaaaac

SEQ ID NO: 255193 - DNA, 388 bp, Glycine max
  unsure (1)..(388): unsure at all n locations
gggaatctagcaactaccaaaaccaatctctttcaataatcaacaacaatgacaaacttgaagcctctaattctcttcttttatctcctagccattgttgttatgatttcaataccatcaagccactgcagcagaaccttgcttccagaaaacgaaaagctgatagagaacacttgcaagaaaactcccaactacaacgtttgccttgagtctctgaaggcaagccctgggagctccagtgctgacgtcacagggctggctcaaatcatggtcaaagagatgaaggccaaagcaaacgatgcattgaaaagaatccaagagttgcagagggtgggagcatcggggcctaagcanagaagagccttgagttcntgtgctgatanataca

SEQ ID NO: 255194 - DNA, 369 bp, Glycine max
  unsure (1)..(369): unsure at all n locations
gacagcagaaacaattaataaagatgagtttgaagaacaacatggtggtgctaaaggtgtgtttgttgcttcttttccttgtgggggttacagctgcacgcatggaactgagcttcttcaaaagtgatcagtcatcaagttatgatgatgatgagtattcaaaaccatgctgtgatctctgcatgtgcacacgctcaatgcctcctcaatgcagctgtgaagatattatgctgaattcatgccactcagattgtaagatctgtatgtgcacacgctcacagccaagacagtgtcgttgtcatgacaccaacgacttctgctacaaaccttgcaactcganagattactagaacaactaataactctctc

SEQ ID NO: 255195 - DNA, 368 bp, Glycine max
  unsure (1)..(368): unsure at all n locations
gacagcanaaacaattaataaagatgagtttgaagaacaacatggtggtgctaaaggtgtgtttgttgcttcttttccttgtgggggttacagctgcacgcatggaactgagcttcttcaaaagtgatcagtcatcaagttatgatgatgatgagtattcaaaaccatgctgtgatctctgcatgtgcacacgctcaatgcctcctcaatgcagctgtgaagatattaggctgaattcatgccactcagattgtaagagctgtatgtgcacacgctcacagccaggacagtgtcgttgtcttgacaccaacgacttctgctacaaaccttgcaagtccagagatgactagaaaaactaatagctctct

SEQ ID NO: 255196 - DNA, 404 bp, Glycine max
  unsure (1)..(404): unsure at all n locations
gacagcaaaaacaattaataaagatgagtttgaagaacaacatggtggtgctaaaggtgtgtttgttgcttcttttccttgtgggggttacagctgcacgcatggaactgagcttcttcaaaagtgatcagccatcaagttatgatgatgatgagtattcaaaaccatgctgtgatctctgcatgtgcacacgctcaatgcctcctcaatgcagctgtgaagatattaggctgaattcatgccactcagattgtaagagctgtatgtgcacacgctcacagccaggacagtgtcgttgtcttgacaccaacgacttctgctacaaaccttgcaagtccagagatgactagaaaaactaatagctctctcaaatggacgaagcncctttaggctttgtttgttat

SEQ ID NO: 255197 - DNA, 399 bp, Glycine max
gaggttttagtctattctctaatctctcgcttcacaattcacatggctctggaagcttacgcagcagcaaaccctgacaaaatccacacagatgtcctcaccaaagctagggattcttgttacaaggctcgtgatgcgttctatgcctgcctggagaaggaatcggacaagaagcccacagagattgcatctgtgggtttgttatacccattagaatgcaaagagtgcaggaatgaatatgtcaaacagtgccgatcttcttgggtgaaacatttcgataggcaatactgccagaacaagagggttcagagacttttggatgacaaagggtcccggagaagtccgttgacgctcccacagccttacactttcaaacccattgcttgaattttatcaata

SEQ ID NO: 255198 - DNA, 384 bp, Glycine max
gatagctgagagagaaaggaaaggttaactaagaagcaatacttcaatggccacccttgttgttcataaccaaacttcttctgctcaagatgctgaggctctccaacaggctttcaaaggatggggggctgatgacaaggccattatagcaatactgggtcacagaaatgttcatcagaggcaagaaatcagaaaagcttatgaggagatttaccaagagaatctcatcaaacgccttgagtccgagatctctggtgactttgagagagctatgtaccggtggatgttgcagcctgcggatcgtgatgctgttttggtgaatgtggcaatcaagaatggcaccaaagactaccatgtgattgcagagattgcttgtgtcctatc

SEQ ID NO: 255199 - DNA, 456 bp, Glycine max
taccggtccgacattcacgggtgcccccacgcgtccgaaacgacagaaggggactcactcatacaatagagaccagcttttgcttctttgtgaacatggagatgaggaaatcatgtggcttcttcttcttgctcctcctccttgtctttgcttcccaggtggtggtgcagacggagggaagagtgtgtgagtcacaaagccacgggttccatggtttgtgtaatagagaccacaactgtgctttggtctgcaggaacgaaggtttctccggtggcaggtgcaaaggcttccgccgccgctgcttttgcaccaggatttgttgagatctcatcaaacactactcttgccatgcaaattaataaatcatagctaggccaaataaattgcatctactctttatccatttgggagcttagctacacaaccaactcatacttggtcattggaatgcttccc

SEQ ID NO: 255200 - DNA, 377 bp, Glycine max
  unsure (1)..(377): unsure at all n locations
gctcgccgctttgtgctgctgctgctgcaaaacctaaggttgagccttttgctcaggttttcagcgcttctttcttacaatggttctacagaacgatattgatttgctgaatcctccagctgagttggagaagagaaagcacaagctcaagcgtcttgtgcagtcaccaaactctttcttcatggacgttaagtgccagggctgcttcaacataacaactgtgtttagccactctcagactgttgtggtttgcggaaactgccagactgtgttgcgccaaccaacaagcggacgggcaaggttaaccgaagggtgctcttttangaagaagggagattgaatggtttgttaaccagacttttctttgtcaatgattg

SEQ ID NO: 255201 - DNA, 392 bp, Glycine max
gacagcaaaaacaattaataaagatgagtttgaagaacaacatggtggtgctaaaggtgtgtttgttgcttcttttccttgtgggggttacagctgcacgcatggaactgagcttcttcaaaagtgatcagtcatcaagttatgatgatgagtattcaaaaccatgctgtgatctctgcatgtgcacacgctcaatgcctcctcaatgcagctgtgaagatattaggctgaattcatgccactcagattgtaagagctgtatgtgcacacgctcacagccaggacagtgtcgttgtcttgacaccaacgacttctgctacaaaccttgcaagtccagagatgactagaaaaactaatagctctctcaaatggacgaagccctttaagctttg

SEQ ID NO: 255202 - DNA, 334 bp, Glycine max
cagatgactgcgatggaattgcttgaacagtacatgcaattcaaacacgaggcagaaaaagatggcaagaagaacaagaaagacaaggatccattgataccaaagcaccccatgtcagcttatttcttgttcactaatgataggcgagcagctcttgctgccgagaacaagaatttcttggaggttccaaaaatcacatccgaagagtggaaaagcatgacagaagaacagaatagaccctatgaagagatggcatagaaaaataaggagcaatatgccctagaaatggacgcttataaacagaacaaagatgatgatgctgcccatttcatga

SEQ ID NO: 255203 - DNA, 420 bp, Glycine max
gacagcaaaaacaattaataaagatgagtttgaagaacaacatggtggtgctaaaggtgtgtttgttgcttcttttccttgtgggggttacagctgcacgcatggaactgagcttcttcaaaagtgatcagtcatcaagttatgatgatgatgagtattcaaaaccatgctgtgatctctgcatgtgcacacgctcaatgcctcctcaatgcagctgtgaagatattacgctgaattcatgccactcagattgtaagagctgtatgtgcacacgctcacagccaggacagtgtcgttgtcttgacaccaacgacttctgctacaaaccttgcaagtccagagatgactagaaaaactaatagctctctcaaatggacgaagccccttaagccttgtttgttatgttaggggagacaaata

SEQ ID NO: 255204 - DNA, 406 bp, Glycine max
  unsure (1)..(406): unsure at all n locations
gattcacacaactaactaagaaagtcttccatagccccccaaaaatgaagagcaccatcttctttgctctctttctcttttgtgccttcaccacctcatacctaccttcagccatcgctgatttcgtgctcgataatgaaggtaaccctcttgaaaatggtggcacatattatatcttgtcagacataacagcatttggtggaataagagcagccccaacgggaaatgaaagatgccctctcactgtggtgcaatctcgcaatgagctcgacaaagggattggaacaatcatctcgtcnccatatcgaatccgttttatcgccgaaggccatcctttgagccttaagttcgattcatttgcagttataatgctgtgtgttggaattcctaccgagtggtctgttgt

SEQ ID NO: 255205 - DNA, 343 bp, Glycine max
cttccagaacgacagaagggggcaatgggaaggatagggggtcagagtgagaaagagaaagagagaattcgtaaaccctaagttcgggacatcggcgatcactgcctcgggggatcgccagaacttcgtctacatcgccaaactcgccgaacacgccgagcgttacgaagagatggtggaatcaatgaagaaccgttgcgaatctcgacgttgaactgaccgtggaggagcggaatttgccttctgttgggtacaagaatgtaattggtgctcgcagaccgtcctggaggatcctgtcttccattgagcagaacgcataaacaccagggaacgacttgaatgc

SEQ ID NO: 255206 - DNA, 324 bp, Glycine max
gattcacacaactaactaagaaagtcttccatagccccccaaaaatgaagagcaccatcttctttgctctctttctcttttgtgccttcacgacctcatacctaccttcagccatcgctgatttcgtgctcgataatgaaggtaaccctcttgaaaatggcggcacatattatatcttgtcagacataacagcatttggtggaataagagcagccccaacgggaaatgaaagatgccctctcactgtggtgcaatctcgcaatgagctcgacaaagggattggaacaatcatctcgtccccatatcgaatccgttttatcgccg

SEQ ID NO: 255207 - DNA, 322 bp, Glycine max
cgcgtcagtaaggcactagacgacagcaggggggagcacgctagacatttggaaattcctcctctgcgtaacatcatggtggtgcacaccgtatgtttgttgcttcatttccttcaagcgatcagtgttgcactcatcgcacgtacctccttcacgtctgatctcatcatcatcttattatgatgatgtactctcttagctatgccatgatgtcttcacatgcacacgcccactccctcctctttgctcctgtgataatattacgccgagcttcaagctaatcacatcgtcccagctgtcagtgctcacgctcatgtccagg

SEQ ID NO: 255208 - DNA, 418 bp, Glycine max
  unsure (1)..(418): unsure at all n locations
gggagcaagctagaagttgggaagttcctcctccgctaacgtagtaggaaggaacacgacaggtagaacacagaatggtgctcatgcgaactgtgtacccaaccatcgctgttcctcttcctcttcctctttcaaaccttcccgttaggaccaatttcgccgttcgatgtgccaacgttcactcgcaaacgcaactcgactcgcgcaagttggttcttgccgtgaaggaaaagcttgaaaaagaacaccataacctccctgttggcagaaatggaagagatgatgaagatatgatactgtggtttctcaaagatcgcaagttttctattgatgatgctatttacaagttgactaaagccattaaatggcgtcgagattttgaggtgtctaaattaactgaagaagtcgttanagatgc

SEQ ID NO: 255209 - DNA, 416 bp, Glycine max
gacagcaaaaacaattaataaagatgagtttgaagaacaacatggtggtgctaaaggtgtgtttgttgcttcttttccttgtgggggttacagctgcacgcatgggactgagcttcttcaaaagtgatcagtcatcaagttatgatgatgatgagtattcaaaaccatgctgtgatctctgcatgtgcacacgctcaatgcctcctcaatgcagctgtgaagatattaggctgaattcatgccactcagattgtaagagctgtatgtgcacacgctcacagccaggacagtgtcgttgtcttgacaccaacgacttctgctacaaaccttgcaagtccagagatgactagaaaaactaatagctctctcaaatggacgaagcccctttaggctttgtttgttacgttaagggagac

SEQ ID NO: 255210 - DNA, 420 bp, Glycine max
gggtggagagaggggcactgactcacacccacaatagtcgggggcagcttcaaagtacctccacattgtctcctactcttactgttctcttctcttctcatcatttttattttttccaatcaaaccaaacataacataagcaccgctcttttctctccgaaatccccatctcccttcacttctgagctctggacgagatcccagatctcaccatctttcacgcactcttccatcagattcaccctttcgtttaacgcaaactcataacttgaaggttaatggctgctccaccggcaagggctcgtgccgattacgattatctcataaagcttctcttgatccgtgacagcggtgttgggaaaagttgcctccttctgcgtttctcccatggttcttttcacactagtttcatcacaacta

SEQ ID NO: 255211 - DNA, 351 bp, Glycine max
gacagcaaaaacaattaataaagatgagtttgaagaacaacatggtggtgctaaaggtgtgtttgttgcttcttttccttgtgggggttacagctgcacgcatggaactgagcttcttcaaaagtgatcagtcatcaagttatgatgatgatgagtattcaaaaccatgctgtgatctctgcatgtgcacacgctcaatgcctcctcaatgcagctgtgaagatattaggctgaattcatgccactcagattgtaagagctgtatgtgcacacgctcacagccaggacagtgtcgttgtcttgacaccaacgacttctgctacaaaccttgcaagtcgggggatgactaga

SEQ ID NO: 255212 - DNA, 391 bp, Glycine max
ggagagaaggggcatatcaaaatcaattttttttctttcttcttttccctgaagagcaaatgggggcgtatagagctgatgaggattacgattatttgttcaaggtggtactgattggggactctggtgtgggaaaatcgaaccttttgtcgaggttcaccaagaacgaattcagccttgaatcaaagtccaccattggggttgagtttgccaccagaagcattagggttgatgataaagttctcaaggctcagatttgggacgctgctggccaagaaaggtatcgagcaatcactagtgcatattatcgcggagctgttggtgctttattagtctatgatgttacccgccatgttacatttgaaaatgtggagagatggttgaaggagct

SEQ ID NO: 255213 - DNA, 372 bp, Glycine max
  unsure (1)..(372): unsure at all n locations
gacagcanaaacaattaataaagatgagtttgaagaacaacatggtggtgctaaaggtgtgtttgttgcttcttttccttgtgggggttacagctgcacgcatggaactgagcttcttcaaaagtgaccagtcatcaagttatgatgatgatgagtattcaaaaccatgctgtgatctctgcatgtgcacacgctcaatgcctcctcaatgcagctgtgaagatattaggctgaattcatgccactcagattgtaagagctgtatgtgcacacgttcacagccaggacagtgtcgttgtcttgacaccaacgacttctgctacaaaccttgcaagtccagagatgactagaanaactaatagctctctcaaa

SEQ ID NO: 255214 - DNA, 407 bp, Glycine max
gattcacacaactaactaagaaagtcttccatagccccccaaaaatgaagagcaccatcttctttgctctctttctcttttgtaccttcaccacctcatacctaccttcagccatcgctgatttcgtgctcgataatgaaggtaaccctcttgaaaatggtggcacatattatatcttgtcagacataacagcatttggtggaataagagcagccccaacgggaaatgaaagatgccctctcactgtggtgcaatctcgcaatgagctcgacaaagggattggaacaatcacctcgtccccatatcgaatccgttttatcgccgaaggccatcctttgaggcttaagttcgattcatttgcagttataatgctgtgtgttggattccctacgagtggtctgttgtgg

SEQ ID NO: 255215 - DNA, 377 bp, Glycine max
gacagcaaaaacaattaataaagatgagtttgaagaacaacatggtggtgctaaaggtgtgtttgttgcttcttttccttgtgggggttacagctgcacgcatggaactgagcttcttcaaaagtgatcagtcatcaagttatgatgatgatgagtattcaaaaccatgctgtgatctctgcatgtgcacacgctcaatgcctcctcaatgcagctgtgaagatattaggctgaattcatgccacccagattgtaagagctgtatgtgcacacgctcacagccaggacagtgtcgttgtcctgacaccaacgacttctgctacaaaccttgcaagtccagagatgactagaaaaactaatagctctctcaaatggac

SEQ ID NO: 255216 - DNA, 379 bp, Glycine max
gattcacacaactaactaagaaagtcttccatagccccccaaaaatgaagagcaccatcttctttgctctctttctcttttgtgccttcaccacctcatacctaccttcagccatcgctgatttcgtgctcgataatgaaggtaaccctcttgaaaatggtggcacatattatatcttgtcagacataacagcatttggtggaataagagcagccccaacgggaaatgaaagatgccctctcactgtggtgcaatctcgcaatgagctcgacaaagggattggaacaatcatctcgtccccatatcgaatccgttttatcgccgaaggccatcctttgagccttaagttcgattcatttgcagttataatgctgtgtgt

SEQ ID NO: 255217 - DNA, 404 bp, Glycine max; identical to SEQ ID NO: 254877

SEQ ID NO: 255218 - DNA, 436 bp, Glycine max
gattcatgcaactgaataattaagaaaagccatttccatagcagcctaagaaaatgaagagcactagcttgttcgctatctttctactttgcgccttcacctcatacctaccttccgccaccgcccaggacgtgctcgacgtggatggcgatccgattcggaacggtttcatatactacgttttgccggcaataagaggaaacggtggcggaatagaacgagccgcactcgggaaagacacttgccctatcactgtagtgcaatctcccaatccaaactctaaggggttagaaattaagtttgaatctgcataccccgcctattacataaacgaaaccctaattttgcaaataaagttcagttacccacagcagtgtgaaagaaagaatccttggtgggccatttctaaggatatatctgaaggaccacctgctat

SEQ ID NO: 255219 - DNA, 200 bp, Glycine max
gactcactcatacaatagagaccagcttttgcttctttgtgaacatggagatgaggaaatcatgtggcttcttcttcttgctcctcctccttgtctttgcttcccaggtggtggtgcagacggagggaagagtgtgtgagtcacaaagccacgggttccatggtttgtgtaatagagaccacaactgtgctttggtctgc

SEQ ID NO: 255220 - DNA, 436 bp, Glycine max
ggcacaagtgagtttgttgatcgagataactagaaacagtgtgatgaaaatgaaggtccttgttttcttcgttgctacaattttggtagcatggcaatgccatgcgtacgatatgttccctctccgaatgaacactggctatggtgcccgtactccggaggtgaaatgcgcaagttggaggcttgctgtggaagcacacaacatctttggctttgagaccattcctgaagagtgcgttgaagcaacaaaggaatacatccatggcgaacaatatagatcagactccaaaacagttaaccaacaagcttacttttatgccagagacctcgaagtccatcccaaggacacatttgtgttcagtatagatggcaccgtactctctaatattccatactacataaaacatggataatggggtggagaaatttaactcgac

SEQ ID NO: 255221 - DNA, 418 bp, Glycine max
ggaataattaagaaaagccatttccatagcagcctaagaaaatgaagagcactagcttgttcgctatctttctactttgcgccttcacctcatacctaccttccgccaccgcccaggacgtgctcgacgtggatggcgatccgattcggaacggtttcatatactacgttttgccggcaataagaggaaacggtggcggaatagaacgagccgcactcgggaaagacacttgccctatcactgtagtgcaatctcccaatccaaactctaaggggttagaaattaagtttgaatctgcataccccgcctattacataaacgaaaccctaattttgcaaataaagttcagttacccacagcagtgtgaaggaaagaatccttggtgggccatttctaaagatatatctgaaggaccacc

SEQ ID NO: 255222 - DNA, 406 bp, Glycine max
  unsure (1)..(406): unsure at all n locations
gacagcanaaacaattaataaagatgagtttgaagaacaacatggtggtgctaaaggtgtgtttgttgcttcttttccttgtgggggttacagctgcacgcatggaactgagcttcttcaaaagtgatcagtcatcaatttataataatgatgattattcaaaacaatgcggtgttccctgcatttgcacacgctcaatgcttcctcaatgcacctgtaaaaatattaggctgaattcatgccactcaaattgtaaaacctgtatttgcaaacgctcacagccagaacattgtcgttgtcttgacaccaacgacttctgctacaaaccttgcaattccagagatgactagaaaacctaatacccctctcaaatggacgaagccccttttaggctttgtttgttaag

SEQ ID NO: 255223 - DNA, 358 bp, Glycine max
gacagcaaaaacaattaataaagatgagcttgaagaacaacatggtggtgctaaaggtgtgtttgttgcttcttttccttgtgggggttacagctgcacgcatggaactgagcttcttcaaaagtgatcagtcatcaagttatgatgatgatgagtattcaaaaccatgctgtgatctctgcatgtgcacacgctcaatgcctcctcaatgcagctgtgaagatattaggctgaattcatgccactcagattgtaagagctgtatgtgcacacgctcacagccaggacagtgtcgttgtcttgacaccaacgacttctgctacaaaccttgcaagtccagagatgactagaaaaacta

SEQ ID NO: 255224 - DNA, 418 bp, Glycine max
gacaggtgtttgcaatactagcgatagctgataagagagataccaacaagaaaagaaaaaaagaagagttgagattccctttgaagaaaagatggcatcccataggcaaagctatgaagctggtcaaactaagggccgaactgaggaaaagacgaaccagacgatgggcaatattggagagaaggctcaagctgcaaaggagaagacccaggaaatggcccaagctgcaaaggagaagacccaacaaacagcccaagctgccaaggacaagacttgcgacacttcccaagcggcaaaggagaagacccaacagaatacaggagctgctcaacaaaagacctcagagatgggccagtccacgaaggaatcggcccagtcagggaatgacaaacaccaagggttcctgcagcagaccggg

SEQ ID NO: 255225 - DNA, 434 bp, Glycine max
gacaacgcatcctaaataagcatcttaattcatagtctcttggtccttccttccttcttctgctcaataagtgtgtgccactctaattaattaccacccccttctagacatagttcttctccctctgttctccattctctacactgtgaaaccaagatgaaggtagcatttgcagctgttctacttatataccttgtcctcagctcctccttgttcgaggtgtcaatggctggttctgctttctgttcctccaagtgctcgaagaggtgttctagagctgggatgaaggacaggtgcatgaagttctgcgggatttgctgcagcaagtgcaactgtgtgccatctgggacttatgggaacaagcatgagtgcccttgctacagagacatgaagaactccaagggcaaggccaaatgcccttgaataattttttt

SEQ ID NO: 255226 - DNA, 213 bp, Glycine max
gacagcacaaacaattaataaagatgagtttgaagaacaacatggtggtgctaaaggtgtgtttgttgcttcttttccttgtgggggttacagttgcacgcatggaactgagcttcttcaaaagtgatcagtcatcaagttatgatgatgatgagtattcaaaaccatgctgtgatctccgcatgtgcacacgctcaatgactctttaatgca

SEQ ID NO: 255227 - DNA, 394 bp, Glycine max
ggcacaagtgagtttgttgatcgagataactagaaacagtgtgatgaaaatgaaggtccttgttttcttcgttgctacaattttggtagcatggcaatgccatgcgtacgatatgttccctctccgaatgaacactggctatggtgcccgtactccggaggtgaaatgcgcaagttggaggcttgctgtggaagcacacaacatctttggctttgagaccattcctgaagagtgcgttgaagcaacaaaggaatacatccatggcgaacaatatagatcagactccaaaacagttaaccaacaagcttacttttatgccagagacctcgaagtccatcccaaggacatatttgtgttcagtatagatggcaccgtactctctaatatccatact

SEQ ID NO: 255228 - DNA, 378 bp, Glycine max
  unsure (1)..(378): unsure at all n locations
gacagcanaaacaattaataaagatgagtttgaagaacaacatggtggtgctaaaggtgtgtttgttgcttcttttccttgtgggggttacagctgcacgcatggaactgagcttcttcaaaagtgatcagtcatcaagttatgatgatgatgagtattcaaaaccatgctgtgatctctgcatgtgcacacgctcaatgcctcctcaatgcagctgtgaagatattaggctgaattcatgccactcagattgtaagagctgtatgtgcacacgctcacagccaggacagtgtcgttgtcttgacnacaacgacttctgctacaaaccttgcaagtccagagatgactagaaaaactaatagctctctcaaatggacg

SEQ ID NO: 255229 - DNA, 286 bp, Glycine max
catccgtcaggaaggcagtaggctaccgacggggagaccactggcaatttataaagttgcgtttgacgatcaacatgttggtgctaaaggtgtgtttgttgcttcttttctctgtgggggttacatctgcacgcatggaactgagcttcttcactagtgcttagtcatccaattatgatgatgatgacttttctaaatcatgctgtgatctctgcatgtgcacacgctcaatgcctcctcaatgcaactgtgaatatattaggctgaattcatgccactcagattg

SEQ ID NO: 255230 - DNA, 384 bp, Glycine max
ggttgattctgctattgatgaagatgcacaagagccttctgttgctgataaaaagaaagaaaagaaggacaagaagaaaaagaaggacaaaaaggaagaggatgcaactgtgcaagctgatggtgaggaaccagaacctgtagtagtgaaaaaagataagaagaagaaaaggaaggaaactgagagtgctgagttgcagaatgggaatgacgataatgcacgagagaagaagaaaaagagaaagaagcatggatagcaggaagaatctcctgaaatgccaagcaagaagaaaggcaaaaaaagaaaagtgaggactaaagtgaagtcatctactaatcaatcctgtggtgaatgacaaccatttttgtatactcctggcagctc

SEQ ID NO: 255231 - DNA, 424 bp, Glycine max
gacagcaaaaacaattaataaagatgagtttgaagaacaacatggtggtgctaaaggtgtgtttgttgcttcttttccttgtgggggttacagctgcacgcatggaactgagcttcttcaaaagtgatcagtcatcaagttatgatgatgatgagtattcaaaaccatgctgtgatctctgcatgtgcacacgctcaatgcctcctcaatgcagctgtgaagatattaggctgaattcatgccactcagattgtaagagctgtatgtgcacacgctcacagccaggacagtgtcgttgtcttgacaccaacgacttctgctacaaaccttgcaagtccagagatgactagaacaactaatagctctctcaaatggacgaagcccctttaggctttggttgttaagttacggagacatataaaac

SEQ ID NO: 255232 - DNA, 239 bp, Glycine max
gatctcaatttcttttctctttgtcgcaaagagaagagatctgcctcctttttatcaaatctatctcttcttcaagaatagttgaaagtggggctgtctttcaccaagttgttcagccgactgtttgccaagaaagagatgcgtatactgatggtgggtcccgatgctgcgggtaagaccaccattctgttcaaactcaaacttggagagattgtcacaacatttccaccaatgggttt

SEQ ID NO: 255233 - DNA, 438 bp, Glycine max
  unsure (1)..(438): unsure at all n locations
ggtccgatatatccgggtgccgccacgcgtccgtaaagaagacgacagaagggggctgcagcttatcatcaccatcgcgcccaagagagagagagagggaggcgcgaaaatgagcggagcgaaggggaagaagaagggagcgagctttgtgatcgattgcgcgaagccggtggaggataaaattatggacattgcttctctggagaagttccttcaggagaggattaaggttggcggcaaggccggtgcactcggcgattccattactgtcactanggacaagagcaagatcaccgtcacctccgacagcaacttctctaaacggtatctgaaatatttgaccaagaagtacttgaaaaagcacaatgcgaaggattggcttcgcgtgattgcatccaacaaggagcggagtgtctatgaattgagatacttcaacat

SEQ ID NO: 255234 - DNA, 419 bp, Glycine max
gacagcaaaaacaattaataaagatgagtttgaagaacaacatggtggtgctaaaggtgtgtttgttgcttcttttccttgtgggggttacagctgcacgcatggaactgagcttcttcaaaagtgatcagtcatcaagttatgatgatgatgagtattcaaaaccatgctgtgatctctgcatgtgcacacgctcaatgcctcctcaatgcagctgtgaagatattaggctgaattcatgccactcagattgtaagagctgtatgtgcacacgctcacagccaggacagtgtcgttgtcttgacaccaacgacttctgctacaaaccttgcaagtccagagatgactagaaaaactaatagctctctcaaatggacgaagcccctttaagctttgtttgttatgttaagggagacaaa

SEQ ID NO: 255235 - DNA, 408 bp, Glycine max
gctccaattatgagttactacaaccagcagcagccacccgtcggtgttcctcctccccaaggttacccaccgccggaatcttacggaaaggacgcgtaccctccgccagggtaccctccacagggaggataccctccgcaggcgtatccagcacaggggtaccctccaccctacgcgcctcctcagtacgctcagcctccgccgcaacaacaccagaattcatctggcccgggttgcttagaaggatgtttggctactctctgctgctgttgcctgttggatgcctgcttctgagaaagaaaagagaggttgctttgcacaaattggatttgaaactgtgttttgactttgaacatgaccattatcgctcttagtttttattattttctatgttgatttacatttcgt

SEQ ID NO: 255236 - DNA, 363 bp, Glycine max
gactttgagttcgaactaaacaattcaattcaatctgcctcgatcatggagaggaaaacatttgggtttttgttcttgctcctccttgtcttaacttctgatgtgacggtgaatagagcagaggcgaaagattgcttgacaaggaggcacaggttccagggtatatgcttattcgacaggcaatgtgcacatgtgtgcatgagcgatggtttcatcggtggtcagtgccgatgccctcttcgcaaatgcctttgcagcatgccatgttgatcgaaattactactgccaaagatgccatgaaatatacatacaatcagataaattaatatctctaaccgacacatatgtacgtaatgtccgggt

SEQ ID NO: 255237 - DNA, 234 bp, Glycine max
gacattacaaacattctctccattgtctttgaacactcatcaccatggtcaaccttgttcgttctctttgtttccttcttttcggtggttggctcgctctgagtgagcaggcttaccatagtgagtggcatatcgtattgctcaatgccctcaaaccggctaatcgtatacagtcggcatgcgggtgcattgagacttgggtcccttacagtacactattccactctttcggtg

SEQ ID NO: 255238 - DNA, 411 bp, Glycine max
gacagcaaaaacaattaataaagatgagtttgaaccacaacatggtggtgctaaaggtgtgtttgttgcttcttttccttgtgggggttacagctgcacgcatggaactgagcttcttcaaaagtgatcagtcatcaagttatgatgatgatgagtattcaaaaccatgctgtgatctctgcatgtgcacacgctcaatgcctcctcaatgcagctgtgaagatattaggctgaattcatgccactcacattgtaagagctgtatgtgcacacgctcacagccaggacagtgtcgttgtcttgacaccaacgacttctgctacaaaccttgcaagtccatagatgactaaaaaaactaatagctccctcagatggaccaaccccctttaggctttgtttgttaagttaagg

SEQ ID NO: 255239 - DNA, 389 bp, Glycine max
ggacggaagttgaaaattttggttgagcaagagccttctctttgttccgttccgcgaccatgtctcatgagacatgcccttccgtaaagaacttccttcttttggattctgatgggaaacgtgtcgcagtcaaatacttctctgaagactgggcaacgaatagtgccaaggaaaattttgagaaagttgtcttcaacaagactcagaagaccaatgcccgcacagaagcggaaatagcaatgtttgagaataacattgttgtttacaagtttgtccaagatcttcacttctttgttaccggtggtgattatgaaaatgagcttatcttagccacagttctgcaggcattttttgattctgtgggccttctgctcagaggcaatgtggac

SEQ ID NO: 255240 - DNA, 420 bp, Glycine max
gattcacacaactaactaagaaagtcttccatagccccccaaaaatgaagagcaccatcttctttgctctctttctcttttgtgccttcaccacctcatacctaccttcagccatcgctgatttcgtgctcgataatgaaggtaaccctcttgaaaatggtggcacatattatatcttgtcagacataacagcatttggtggaataagagcagccccaacgggaaatgaaagatgccctctcactgtggtgcaatctcgcaatgagctcgacaaagggattggaacaatcatctcgtccccatatcgaatccgttttatcgccgaaggccatcctttgagccttaagttcgattcatttgcagttataatgctgtgtgttggaattcctaccgagtggtctgttgtggaggatctaccag

SEQ ID NO: 255241 - DNA, 437 bp, Glycine max
gattcacacaactaactaagaaagtcttccatagccccccaaaaatgaagagcaccatcttctttgctctctttctcttttgtgccttcaccacctcatacctaccttcagccatcgctgatttcgtgctcgataatgaaggtaaccctcttgaaaatggtggcacatattatatcttgtcagacataacagcatttggtggaataagagcagccccaacgggaaatgaaagatgccctctcactgtggtgcaatctcgcaatgagctcgacaaagggattggaacaatcatctcgtccccatatcgaatccgttttatcgccgaaggccatcctttgagccttaagttcgattcatttgcagttataatgctgtgtgttggaattcctaccgagtggcctgttgtggaagatttaccagaaggacctgctgttaaa

SEQ ID NO: 255242 - DNA, 372 bp, Glycine max
tgctaaggatacgacaaaacggcagattcgaagatataaacaaagttctgtttactacataggaatggcagcagcaacgggaacataggctgcaagagaccgtgattgtggaaatctcgaacgaacagattcaggcactgatcaaacctgccgaatctacttcaaggaaaaccatttcttctgaagataaaccttttaacttgagaagccgcgacccatctactccaacaagcttggcaagttctttgagatcaccccagagaaaaacccccaacttcgggacttggatatcttcctcagtattgtggatattaacgagggagctcttcttctaccacacttcaattcagaggcgatagtgatactggtaat

SEQ ID NO: 255243 - DNA, 183 bp, Glycine max
tgctagaatacgacaaaaggcatattcgaagatatgaacatagttctgtttactccataggaatggcagccccaacgggaacataggctgcttgagacctctcttgtgcaaatctccaccgaacagtttcagtcactgatcatatcttccgcttctacttcaccgaaaactatttcttctgaa

SEQ ID NO: 255244 - DNA, 327 bp, Glycine max
gacagcacaaacagttaataaagatgagtttgaagaacaacatggtggtgctaaaggtgtgtttgttgcttcttttccttgtgggggttacagctgcacgcatggaactgagcttcttcaaaagtgatcagtcatcaaattatgatgatgatgggtattcaaaactatgctgtgatctctgcatgtgcacacgctcaatgcctcctcaatgcatctgtgaagatattaggctgaattcatgccactcatattgtaagaactgtatgtgcacacgctcacagccaggacagtgtcattgtcttgacatcaacgacttctgctacaaac

SEQ ID NO: 255245 - DNA, 347 bp, Glycine max
aacagcggagattactctacagatgttttccgatcaacatggtggagtcaagggtgtgtttgttgcactcttttccttgtacaggtaagtgcttcacgtctgtaactagggtatcgatcacacctcataattcatcattttatcacaaaggtggtgattcaacaccatgtggtcatatctacaagtacacacgctcaatccgtcatatctgcatctacaaatatattctgcagacttcatgcaactcagatcatgctagctgtatgtccattagctcacagcctgtagtatgtccttgcaataacaccaacaacttccgctacagttcttgtggatccattcaagtc

SEQ ID NO: 255246 - DNA, 113 bp, Glycine max
tgggacagcaaaaacaattaataaagatgagtttgaagaacaacatggtggtgctaaaggtgtgtttgttgcttcttttccttgtgggggttacagctgcacgcatggaactg

SEQ ID NO: 255247 - DNA, 250 bp, Glycine max
acaacagagacaattactctagataagttttacgatcaacatggtggagctaagggtgtgtttgttgattcttttccttgtggaggtaagagctgcacttctgaaactaaggtatcgtcacaactgataattcatcattttatgacaaagatgattattcaacaccatgctgtgatctctacaagtacacacgctcaatccctcatatctgcatctataaatatattaagcatagttcatgcaactcaga

SEQ ID NO: 255248 - DNA, 357 bp, Glycine max
gattcacacaactaactaacaaagtcttccatagccccccaaaaatgaagagcaccatcttctttgctctctttctcttttgtgccttcaccacctcatacctaccttcagccatcgctgatttcgtgctcgataatgaaggtaaccctcttgaaaatggtggcacatattatatcttgtcagacataacagcatttggtggaataagagcagccccaacgggaaatgaaagatgccctctcactgtggtgcaatctcgcaatgagctcgacaaagggattgggacaatcatctcgtccccatatcgaatccgttttatcgccgaaggccatcccttgagccttaagttcgaatcat

SEQ ID NO: 255249 - DNA, 238 bp, Glycine max
ggaagaagctagcgaaaatatcaggtcatggtacgtggaggcaaaggtttgggaaagggaagaaccactatgcacatgtatgcgtctcgtgtcattatccagtggatcaccaaacccccaattcggggtttggctctcaaaggtagtgataattgaatctgttgtctcatcgacaatgaggaacgtctcatcctcaatatcttcttctataccatatttctcgacgctgttacattca

SEQ ID NO: 255250 - DNA, 246 bp, Glycine max
gtggctagtacagttaaccagctccacgctgccctataagattgctttgtacgtggccgctctatgggatgtcatcttacttccccgtcgatgcgatgtcacacctcatcggcagtcttatcaaaacttagttcatgggaagtccctttaaaattccattctagggacatcgctgtagatccccatttcaggcgccgtgctgcacatccccctgtcgccagctgtggtacttaccaacagttccgc

SEQ ID NO: 255251 - DNA, 358 bp, Glycine max
gagagcaaaaacaattaataaagatgagtttgaagaacaacatggtggcgctaaaggtgtgtttgttgcttcttttccttgtgggggttacagctgcacgcatggaactgagcttcctcaaaagtgatcagtcatcaagttatgatgatgatgagtattcaaaaccatgctgtgatctctgcatgtgcacacgctcaatgcctcctcaatgcagctgtgaagatattaggctgaattcatgccactcagattgtaagagctgtatgtgcacacgctcacagccaggacagtgtcgttgtcttgacaccaaccacttctgctacaaaccttgcaagtccatagatgactagaaaaacta

SEQ ID NO: 255252 - DNA, 266 bp, Glycine max
gaggggagaaagagttaataaagatcagtttggtgcacaacagagtggcccttaaggtgtgtttgttgcttccatcacttgtaggggttcgatgtgttgtcatggatatgagcttcctcataaatgatgaatcagcaacttatgatgatgatgaatacataatcaatgcagtgatttctgtctgtacaaacgcacaatgaatactgaatgcacctgtcacaatattaggctgaattcatgcgacgcacatagttgtaactgtttat

SEQ ID NO: 255253 - DNA, 283 bp, Glycine max
gacagcagaaacaattagtaacgatgagtttgaagaacaacatggtggtgctaaaggtgtgtttgttgcttcttttccttgtgggggttacagctgcacgcatggaactgaccttcttcaaaagtgatcagtcaccaagttatgatgatgatgactattcaaaaccatgctgtgatctctgcatgtgcacacactcaatgcctcctcaatgcagctgtgaagatattaagctgaattcatgccactcagattgtaatagctgtatgtgcacacgctcacagcc

SEQ ID NO: 255254 - DNA, 324 bp, Glycine max
ggataggacacagctaactaatttcggtcttcgataccttcccaattgtggagagcaccagtcttctttgctcgctttctcttttgtgccgtcagcatctcatgcctaccttcagccatcgctgatttcgtgcacttaaatgattgtaaccctcttgaacatggtggcacatattatatcttgtccgacatgataccatctggtggaataagagcagccccaacgggaactggaagatgttctctcactgtggtgtaatcgcgcgttgttctccaaaatcggattggaaaaatcatctcgtctccatatcgtaaccgttttatc

SEQ ID NO: 255255 - DNA, 288 bp, Glycine max
gacagcaaaaacaattaataaagatgagtttgaagaacaacatggtggtgctaaaggtgtgtttgttgcttcttttccttgtgggggttacagctgcacgcatggaactgagcttcttcaaaagtgatcagtcatcaagttatgatgatgatgagtattcaaaaccatgctgtgatctctgcatgtgcacacgctcaatgcctcctcaatgcagctgtgaagatattaggctgaattcatgccactcagattgtaagagctgtatgtgcacacgctcacagccaggac

SEQ ID NO: 255256 - DNA, 277 bp, Glycine max
gacagcaaacacaattaataaagatgagtttgaagaacaacatggtggtgctaaaggtgtgtttgttgcttcttttccttgtgggggttacagctgcacacatggaactgagcttcttcaaaagtgatcagtcatcaagttatgatgatgatgattagtcaaaaccatgctgtgatctctgcatgtgcacacgcgcaatgcctcctcaatgcagctgtgaagatattacgctgaactcatgccactcagattgtaagagctgtatgtgcacacgctc

SEQ ID NO: 255257 - DNA, 344 bp, Glycine max
ggcgaaactgaggtcgtagaaagaatggcgaaaacgacgtcgttgttgctctttacactgctcctcttcggaaccttagctctcatccaggcgaagaaatcgaaggaggatttgaaggaagtgacccacaaggtttactttgatgttgagattaatggaaaagaagcaggtcgtattgtgatgggtctttttggaaaggctgttccaaaaactgcagaaaactttcgagctctttgcactggggaaaagggaactggtaaaagtggcaagcctctccattacaaaggtagctcattccatagaattattcctagctttatgctccaaggaggtgattttacaca

SEQ ID NO: 255258 - DNA, 365 bp, Glycine max
gcagagaaaggggcaaaactggggacataaaactaatgttgactacgacgtcgttgttgctctttacactgctccacttcggtaccttaactctcatctaggcgaagggatcaagggaggatttgaaggaaataacccacaaggtttactttgatgttgagattactgaaaaaaaatcaggtcatattgtgataggtctttttggaaaggctgttccaaaaactgcataaaacattggagctctttgcactggggaaaatggaactggtaaaagtggcaggcctctccattaaaacggtagctcattccatagaattattcccagctttatggtccaatgaggtgactttacaaatcgcaattgt

SEQ ID NO: 255259 - DNA, 292 bp, Glycine max
gacaaggtactgatgtaataaatctacatttgggtaccgatatgataatacgacaggtgtgtttggtgcctcatttccttataggggttacggcgccacacatcgacctgaggcgcttgcaatgtgttcagtcatcacggtttggatttttcgtagtagtcaataccatgctgtgatcactgcatgtgcgctctcgcagatgccacctcacctcagctgtgatgatattacgctcatctcctacgatgctaattatattcaattctatggcacacgctcaacaacatcataa

SEQ ID NO: 255260 - DNA, 294 bp, Glycine max
gatagcacactcaattactaaatatgagtttgaataacaacatggtggtgctaaaggtgtgtttgttgcatcttttccttgtgggggttacagctgcacacatggaactgagcttcttcaaaagtgatcagtcatcaagttatgatgatgatgattagtcaaaaccatgctgtgatctctgcatgtgcacacgcgcaatgcctcctcaatgcagctgtgaagatattaagctgaattcatgccactcagattgtaagagctgtatgtgcacacgctcacagccaggacagtgtc

SEQ ID NO: 255261 - DNA, 287 bp, Glycine max
ggtacggcagcgcggcgacaacacaacggtagggtaccgctgcgacaacacgacggtacggtagcgctgcgacaacacgacagggcgcggcacagttgattttgctgatcgagataactcaatacaatgtgattagagttcatgtccttcttctcttcgatgctacaggtttcatagcattgcaatgccatgcatacgatctctcccctctccgactcagcactggctacgcttcccctacaccggaggtgcactgctcagattcgtggcgtgctgtcacaccacac

SEQ ID NO: 255262 - DNA, 402 bp, Glycine max
agggacagcataaacaattaataaagatgagtttgaagaacaacatggtggtgctaaaggtgtgtatgttgcttcttttccttgtgggggttacagctgcacacatggaactgagcttcttcaaaagtgatcagtcatcaagttatgatgatgatgagtattcaaaaccatgctgtgatctctgcatgtgcacacgctcaatgcctcctcaatgcatctgtgaagatattatgctgaattcatgccactcagattgtaagagctgtatgtgcacacgctcacagccaggacagtgtcgttgtcttgacaccaacgacttctgctgcaaaccttgcaagtccagagatgactagaaaaactaatatctctctcaaatggatcaagccctttaggctttgtttg

SEQ ID NO: 255263 - DNA, 327 bp, Glycine max
gagggggacagcaaaaacaattaataaagatgagtttgaataacaacatggtggtgctaaaggtgtgtttgttgcttcttttccttgtgggggttacagctgcacgcatgggactgagcttcttcaaaagtgatcagtcatcacgttatgattatgatgactattcaaaaccatgctgtgatctctgcatgtgcacacgctcaatgcctcctcaatgcagctgtgaatatattatgctgaattcatgccactcagattgttacagctgtatgtgcacacgctcacagccagtacagtgtcgttgtcttgacaccaacgacttctgct

SEQ ID NO: 255264 - DNA, 349 bp, Glycine max
gacagcaaaaacaattaataaatatgagtttgaagaacaacatggtggtgctaaaggtgtgtttgttgcttcttttccttgtgggggttacagctgcacgcatggcactgagcttcttcataagtgatcagtcatcaagttatgatgatgatgagtattcaaaaccatgctgtgatctctgcatgtgtacatgctcaatgcctcctcaatgcaactgtgaagatattaggctgaattcatgccactcagattgtaagagctgtatgtgcacacgctcacagacaggacagtgtcgttgtcttgacaccaacgacttctgctataaaccttgcaagtccagagatgacta

SEQ ID NO: 255265 - DNA, 353 bp, Glycine max
ggggcctgagaggcggtggtttaccctgtggcggatgtcagcggttcgagtccgcttatctccaactcgtgaacttagtcgatacaaagctatatgatagcacttccatttttccgattcggcagtttgatctatgctatgatttatcattcatggacgttgataagatccttccatctagcagcaccttaggatggcatagccttaaagttaagggcgaggttcaaacaaagaaaggcttatggtggatacctaggcgcccagagacgaagaagggcgtagtaagcgacgaagtgcttcggggagttgaaaataagcgtagatccggggattcccgatataggtcaaccttt

SEQ ID NO: 255266 - DNA, 377 bp, Glycine max
ggacagtgtttgtgtgtgtctaagagagagagagatggcatcgttttgtgctgcaaggactttcaacattccggcgatgaacgccggcgttcttcgccgccgggcatcgtgggccgccggaatagtcggagcctcggtggccggcgctgcacttttgcgctcttgttcgtctaagcgctctgcgccattcgcttgcatgagcctctctactgataccagtttaaaggaagctgttcaaactgaaaaggccccagcggcattggggccatactctcaagcaatcaaagccaacaaccttctgtttgtgtcaggtgttcttggccttattcctgagacagggaagttcatccccgataatgttgaagatcagacagagc

SEQ ID NO: 255267 - DNA, 207 bp, Glycine max
gacagcaaaaacaattaataaagatgagtttgaagaacaacatggtggtgctaaaggtgtgtttgctgcttcttttccttgtgggggttacagctgcacgcatggaactgagcttcttcaaaagtggtcagtcatcaagttatgatgatgaagagtattcaaaaccatgctgtgatctctgcatgtgcacacgctcaatgcctcctc

SEQ ID NO: 255268 - DNA, 370 bp, Glycine max
gacagcaaaaacaattaataaagatgagtttgaagaacaacatggtggtgctaaaggtgtgtttgttgcttcttttccttgtgggggttacagctgcacgcatggaactgagtttcttcaaaagtgatcagtcatcaagttatgatgatgatgagtattcaaaaccatgctgtgatctctgcatgtgcacacgctcaatgcctcctcaatgcagctgtgaagatattaagctgaattcatgccactcagattgtaagagctgtatgtgcacacgctcccagccaggacagtgtcgttgtcttgacaccaacgacttctgctacaaaccttgcaagtccagagatgactagaaaaactaatagctctctca

SEQ ID NO: 255269 - DNA, 379 bp, Glycine max
gattcacacaagggactaagaaagtcttccatagccccccattaatgaagagcaccatcttctttgctcgctttctcttttgtgccttcaccacctcagagctaccttcagccatcgctgatttcgtgctcgataatgaatgtaaccctcttgaaaatggtggcacatattacatcttgtcagacatatcagcatttggtggaataagagcagccccaacgggaaatgaaagatgccctctcactgtggtgcagtctcgcaatgagctcgacaaatggattgggacactcatctcgtccccatatctaatctgttttatcgccgaacgtcatcctttgagccttaagttcgattcatttgcagttataatgctgtgtgt

SEQ ID NO: 255270 - DNA, 363 bp, Glycine max
gattcacacaactaactaagaaagtcttccatagccccccaaaaatgaagagcaccatcttctttgctctccttctcttttgtgccttcaccacctcatacctaccttcagccatcgctgatttcgtgctcgataatgaaggtaaccctcttgaaaatggtggcacatattatatcttgtcagacataacagcatttggtggaataagagcagccccaacgggaaatgaaagatgccctctcactgtggtgcaatctcgcaatgagctcgacaaagggattggaacaatcatctcgtccccatatcgaatccgttttatcgccgaaggccatcctttgagccttaagttccattcatttgcag

SEQ ID NO: 255271 - DNA, 329 bp, Glycine max
tccgttaggatgcaacaacagaacgggaggggattcacaagtgtattcagtgagtgcttcgagatcacccgataactgaacagcaccatcttctttgctctccttctcttttgtcccttcaccacccgcagggcaagcttgagccagcgactcatttcgtcctctataatgatggttcgcctctttacaacgctggcatctattacatcttgtccggcataagatcatttggtgcatacaaaacacccccacagggaagtgctgcatgccctctcagtgtgatgtactctcccaatgacctcgactttgggattgtgaacaaccatctc

SEQ ID NO: 255272 - DNA, 232 bp, Glycine max
gattcacacagggacctaacaagtccttcgtgatcccccgattgctgaatagcacggtcttccttgcgctctttctcttttgtcctttcacggccgcgggattgcctgcagccatcgctcatttcgtcttcaaaaatgatggttcccctctttacaatggtggcacatattcaatcttgtccggcacacgctccttgggcgcacaaagactgcccccacagggaagtggtga

SEQ ID NO: 255273 - DNA, 357 bp, Glycine max
gctcacaagccagatagatctgcttcttgttgttggaaagaaaccctagcaagcggaacaatggcagacgttgaggtcgatgtggcggctgcagcagcagcagggcagccgaagaagagaacgttcaagaagttcagtttcaggggcgtggatctcgatgcgcttctggacatgtccaccgatgaactcgtgaagatgttcagtgctcgcgcacgtagaaggttccagagaggcctcaccagaaagcccatggccttgatcaagaagcttcgcaaagcgaaaagagaagctccaccaggtgagaagccagaacctgtccgcacccacctccgcaacatgattattgtgcctgagatg

SEQ ID NO: 255274 - DNA, 315 bp, Glycine max
ttggggtctgtgttacgacttacggctaaattctcaaagatttaaactttgtcgcacagtttcgaagttcacccaaccccagagacaaaatgtcgctaatcccaaatttcttcggtggcacaacgagcatcgttttctatcctttttccctcgacgtctgggacctacttcatggattttcctttcgcaaacactctttcctcaacttccattcctgaaatttctcgggaaaagtctgcattcgtgaacactcgtgtggattggtaagatatccgataagcacgagtacttaacgatgatattccaaggctgatc

SEQ ID NO: 255275 - DNA, 364 bp, Glycine max
gactgaggtcgttggcgagaatgggaagaaagaaggggtatgttgagttcgaggagtcgccgccggacgattttgatccggcgaatccgtacaaggacccggtggcgatgctggagatgagggagcacatcgtgagagagaagtggatccaaatcgagaaggccaagatcattagggagaagctccgctggtgctaccgcatcgaaggcgtcaaccacctccagaagtgccgccacctcgtcaaccagtatctcgagtccacccgcggcatcggttggggcaaggacggtcgccacccatctctccacgctcccaaggttgaccctgttgagtctgaatgaccttccctgtggacaattaatac

SEQ ID NO: 255276 - DNA, 376 bp, Glycine max
gcactcatacaatagagaccagcttttgcttctttgtgaacatggagatgaggaaatcatgtggcttcttcttcttgctcctcctccttgtctttgcttccccagaggtggtggtgcagacggagggaagagtgtgtgagtcacaaagccacgggttccatggtttgtgtaatatagaccacaactgtgctttggtctgcaggaacgaaggtttctccggtggcaggtgcaaaagcttccgccgccgctgcttttgcaccacgatctgttgagatctcatcaaacactactcttgccatgcaaattaataaatcatagctaggccaaataaattgcatctactctttatccattttggagctagctaccacaacca

SEQ ID NO: 255277 - DNA, 385 bp, Glycine max
gatgcaactgaataattaagaaaagccatttccatagcagcctaagaaaatgaagagcactagcttgttcgctatctttctactttgcgccttcacctcatacctaccttccgccaccgcccaggacgtgctcgacgtggatggcgatccgactcggaacggtttcatatactacgttttgccggcaataagaggaaacggtggcggaatagaacgagccgcactcgggaaagacacttgccctatcactgtagtgcaatctcccaatccaaactctaaggggttagaaattaagtttgaatctgcataccccgcctattacataaacgaaaccctaattttgcgaataaagttcagtttaccacagcagtgtgaaagaaagaat

SEQ ID NO: 255278 - DNA, 210 bp, Glycine max
taagtaaggatgcgaggggatgccagtgggggattcacacaactcagtttcatagtcttccatagacctgcagaactgaagcgcactaccctccttgctcactttcgcttttgaggcatcaccacctgatacgtaccttcaggaagcgctgatttcgtgctcgaatatgaacgggaaccgcttgataatggaggtatatgccatatcttg

SEQ ID NO: 255279 - DNA, 306 bp, Glycine max
gtccgacaagacgacagagggggacactatggctgagcttcactaccaacaacaacaccaataccctcaccgataccctaatgatccatatgaacaacaaactacctattccactcaggtcgtcaaggcggccaccgccgtcaccgcgggcggctccctcttgattctcgcctcgttgatccttatcggcaccatcatcgccctcaccatcgttacaccaccgctcgtcatcttcagtccggttctcgtccccgcggtgatcaccgtcgcgctgctgagcctggggtcccttgcctcttgctggtt

SEQ ID NO: 255280 - DNA, 308 bp, Glycine max
gacagcaaaaacaattaataaagatgagtttgaagaacaacatggtggtgctaaaggtgtgtttgttgcttcttttccgtggggggggtacagctgcacgcatggaactgagcttcttcaaaagtgatcagtcatcaagttatgacgatgatgagtattcaaaaccatgctgtgatctctgcatgtgcacacgctcaatgcctcctcaatgcagctgtgaagatattaggctgaattcatgccactcagattgtaagagctgtatatgcacacgctcacaacccaagacagtgtctttgtcttgacac

SEQ ID NO: 255281 - DNA, 372 bp, Glycine max
gacagcaaaaacaattaataaagatgagtttgaagaacaacatggtggtgctaaaggtgtgtttgttgcttcttttccttgtgggggttacagctgcacgcatggaactgagcttcttcaaaagtgatcagtcatcaagttatgatgatgatgagtattcaaaaccatgctgtgatctctgcatgtgcacacgctcaatgcctcctcaatgcagctgtgaagatattaggctgaattcatgccactcagattgtaagagctgtatgtgcacacgctcacagccaggacagtgtcgttgtcttgacaccaacgacttctgctacaaaccttgcaagttcagagatgactagaaaaactaatagctctctcaaa

SEQ ID NO: 255282 - DNA, 290 bp, Glycine max
ggacgggaagaaacgcatcgagcgtggagaaagagaaggatgatgaggttaaggtggagtgtactcgtaatggtcacgttcgcagtttctctgttttggcttggacccctgcaagtcaaagcctctaattctgtttccgccttcgttcaaaacgccatctactccaacagaatcgccgttttctccaaatcctattgcccctactgtttgcgcgccaaacgcttgcttgctgaactcaatgaaaaaccttttgtggtggagctcgatttgcgagatgatgggtttcaaat

SEQ ID NO: 255283 - DNA, 372 bp, Glycine max
gacagcaaaaacaattaataaagatgagtttgaagaacaacatggtggtgctaaaggtgtgtttgttgcttcttttccttgtgggggttacagctgcacgcatggaactgagcttcttcaaaagtgatcagtcatcaagttatgatgatgatgatgagtattcaaaaccatgctgtgatctctgcatgtgcacacgctcaatgcctcctcaatgcagctgtgaagatattaggctgaattcatgccactcagattgtaagagctgtatgtgcacacgctcacagccaggacagtgtcgttgtcttgacaccaacgacttctgctacaaaccttgcaagtccagagatgactagaaaaactaatagctctctc

SEQ ID NO: 255284 - DNA, 409 bp, Glycine max
gattcacacaactaactaagaaagtcttccatagccccccaaaaatgaagagcaccatcttctttgctctctttctcttttgtgccttcaccacctcatacctaccttcagccatcgctgatttcgtgctcgataatgaaggtaaccctcttgaaaatggtggcacatattatatcttgtcagacataacagcatttggtggaataagagcagccccaacgggaaatgaaagatgccctctcactgtggtgcaatctcgcaatgagctcgacaaagggattggaacaatcatctcgtccccatatcgaatccgttttatcgccgaaggccatcctttgagccttaagttcgattcatttgcagttataatgctgtgtgttggaattcctaccgagtggtctgttgtgga

SEQ ID NO: 255285 - DNA, 406 bp, Glycine max
ggcacatcaacaccaaaacaaacccactaagatggcttcctttgtatccttcctagtgctgcttcttgcagcccttatcctcatgcctcaagggcttgctacttactacaaaccaattaagaagccaccagtgtacaagcctccagtgtacaagccaccagtgtacaaaccaccggtttataagccaaaaccaccggtttacaagccgaaaccaccggtttacaagccaccatataagaagccaccatacaagaaaccaccttatggaaagtaccctccagtagaggacaacacccatgcctaaagcaagcaatgaggtctattatctacttaataaataaggggaactgctttgtgttttctagcattgtgatttacaacttcgtagcaatgcatattcttgact

SEQ ID NO: 255286 - DNA, 416 bp, Glycine max
gatgcaactgaataattaagaaaagccatttccatagcagcctaagaaaatgaagagcactagcttgttcgctatctttctactttgcgccttcagctcatacctaccttccgccaccgcccaggacgtgctcgacgtggatggcgatccgattcggaacggtttcatatactacgttttgccggcaataagaggaaacggtggcggaatagaacgagccgcactcgggaaagacacttgccctatcactgtagtgcaatctcccaatccaaactctaaggggttagaaattaagtttgaatctgcataccccgcctattacataaacgaaaccctaattttgcaaataaagttcagttacccacagcagtgtgaaagaaagaatccttggtggggcatttctaaggatatatctg

SEQ ID NO: 255287 - DNA, 221 bp, Glycine max
  unsure (1)..(221): unsure at all n locations
gaaaaaattgtcctccananaaaaaaaaaaaaaaaaaaaaaaaaagcgggcgctccaaaagatataaacctaagtaagcctgcaagccaagtcaaaactcctccaaaatggcacctaaaatcaattcaatggccgtccttttaaaaactcctgaatgggaaaaacctggcgttaaccaacttaaaccccttggaacacaaccccctttccccaactggggt

SEQ ID NO: 255288 - DNA, 414 bp, Glycine max
gacacaactaactaagaaagtcttcaatagccccccaaaattgaaaagcaccatcttctttgctctctttctcttttgtgccttcaccacctcagacctaccttcagccatcgctgatttcgtgctcgataatgaaggtaaccctcttgaaaatggtggcacatattatatcttgtcagacataacagcatttggtggaataagagcagccccaacgggaaatgaaagatgccctctcactgtggtgcaatctcgcaatgagctcgacaaagggattggaacaatcatctcgtccccatatcgaatccgttttatcgccgaaggccatcctttgagccttaagttcgattcatttgcagttataatgctgtgtgttggcattcctaccgagtggtctgttgtggaggatctacc

SEQ ID NO: 255289 - DNA, 345 bp, Glycine max
gacacaactaactaagaaagtcttccatagccccccaaaaatgaagagcaccatcttctttgctctctttctcttttgtgccttcaggacctcatacccaccttcagccgtcgctgatttcgtgctcgataatgaaggtaaccctcttgaaaatggtggcacatattatatcttgtcagacataacagcatttggtggaataagagcagccccaacgggaaatgaaagatgccctctcactgtggtgcaatctcgcaatgagctcgacaaagggattgggacaatcatctcgtccccatatcgaatccgttttatcgccgaaagccatcctttgagccttaagtt

SEQ ID NO: 255290 - DNA, 396 bp, Glycine max
gaccgtaatccttacgctctctcactcacaaacgcacactgaattcaaaaacatcgaaagagagaggcatggccgagcaaaccttcatcatgatcaagccagatggcgttcaaagaggccttattggcgagattattagcagatttgagaggaagggtttttacttgaaagggttgagactcgttactgtggaccgtccttttgctgagaagcactatgctgatttgtctgcaaagcctttctttagtggtttggtggattacattgtctctggccctgttgttgccatgatctgggagggtaagaatgttgttacaactggccgaaagattatcggagccacaaacccagctcaatctgagcctggaactattcgtggtgactttgctattgaca

SEQ ID NO: 255291 - DNA, 404 bp, Glycine max
gttcacagcaaaaacaattactaaagatgagtttgaagaacaacatggtggtgctaaaggtgtgtttgttgcttcttttccatgtgggggttacagctgcacacatggaactgatcttcttcacaagtgatcactcatcaagttatgatgatgatgagtattcaaaaccatgctgtgatctctgcatgtgcacacgctcaatgcctcctcaatgcagctgtgaagatattaggctgaattcatgccactcatattgtaacagctgtatgtgcacacgctcacagccaggacagtgtcgttgtcttgacaccaacgactttctgcacaaaccttgcaagtccagagatgcctataaaaactaataactctctcaaatggacgaagcccccttacgctttgtttgt

SEQ ID NO: 255292 - DNA, 378 bp, Glycine max; identical to SEQ ID NO: 239511

SEQ ID NO: 255293 - DNA, 389 bp, Glycine max
  unsure (1)..(389): unsure at all n locations
gaatctcttcacagaagaaaaaagagaagaagatgggtttgaagaacaacatggtggtgctaaaggtgtgtttggtgctacttttccttgtggggggtactactantgccagcttgaggctgagtgagcttggcctgctcatgaaaagtgatcatcatcaacactcaaatgatgatgactcttcaaaaccatgctgtgatcaatgcgcatgcacaaagtcaaaccctcctcaatgccgctgttcagatatgaggctgaattcgtgccattcagcttgcaaatcttgtatttgcgcattatcgtatcctgcacagtgtttttgtgttgacataacggatttctgctatgaaccttgcaagcccagtgaggatgacaaggaaaactactaa

SEQ ID NO: 255294 - DNA, 368 bp, Glycine max
ttgtgtatatattagaaaaaaaaaaaaaaaaaaaaaaaaaaaaaaaaaaaaaaaaaaaaaaaaaaaaaaaaaggaaaaaaaaaaaaaaaccaaaaaaaaaaaaaaaaaaaaaaaaaaaacgggggccgcccaaaaggatcaaacctaacgtacgggggaaggcaacgccaaacccctccaaaagggcccccaaaatccaatccaggggcggtcgtttaaaaaggccgggaggggaaaaccccgggggtaaccaaattaaaccccctggaaaaaaacccccttttcccaagggggggaaaaagcaaaagggcccgcaccattccccctcccaaaaatttgcccacccgaaagggcaaagggaacccccc

SEQ ID NO: 255295 - DNA, 338 bp, Glycine max
ggcagagtggagtaaaaaaaaagagcagtgtaagaaattagaaagggcgaaaggcgcactttatctgaaagcaaaaaccctacctagggtcaaccgtgacgccacaatcgccttcggcatctttgcaacgggatcaggtgctcctcgtccttcacgatggcgggaactgaagccaaaaaaaactgaatccaaaaaacctgccgctaagcaatccggtgcgaagaagaaggaggtgaagaaggaaactggcttaagtctcacgcatcggaaggcggagaacttcggagagtggtattccgaggtggttgttaatgcggaaatgattgagtactatgata

SEQ ID NO: 255296 - DNA, 378 bp, Glycine max; identical to SEQ ID NO: 239511

SEQ ID NO: 255297 - DNA, 418 bp, Glycine max
  unsure (1)..(418): unsure at all n locations
agaaggggacaactcaaacattctctccattggtccttaaacactcatcagtcatcaccatggccaagctagttttttccctttgttttctgcttttcagtggctgctgcttcgctttcagttccagagagcagcctcagcaaaacgagtgccagatccaaaaactcaatgccctcaaaccggataaccgtatagagtcagaaggagggctcattgagacatggaaccctaacaacaagtcattccagtgtgccggtgttgccctctctcgctgcaccctcaancgcaacgcccttcgtagaccttcctacaccaacggtccccaggaaatctacatccaacaaggtaagggtatttttggcatgatatacccgggttgtcctagcacatttggagagcctcaacaacctcaacaaag

SEQ ID NO: 255298 - DNA, 395 bp, Glycine max
ggagaacacaaacagcagcgtcttggtttgtgagagagacagaggcacagagagaaaatggtttcggggtcaggaatctgcgcgaagagggtagttgtggacgcgcggcaccacatgctggggaggctggcatcgatcgtggcgaaggaacttctgaatgggcagaaggtggtggtggtgcgctgcgaggagatttgtatctccggtgggctcgtcaggcagaagatgaagtacttgcgtttcctccgcaagcgcatgaacaccaagccctctcacggccccatccatttccgtgcacccggcaagatcttctggcgcaccgttcgtgggatgataccacacaagacaaagcgcggggaagctgctcttgcacgactgaaggtgtacgaaggcat

SEQ ID NO: 255299 - DNA, 401 bp, Glycine max
gacaacacaaacattctctccattgtctttgaacactcatcaccatggccaagcttgttcattccctttgtttccttcttttcagtggctgcttcgctctgagagagcaggcacagcaaaatgagtgccagatccaaaagctgaatgccctcaaaccggataaccgtatagagtcggaaggtgggttcattgagacctggaaccctaacaacaagccattccagtgtgccggtgttgccctctctcgctgcacccttaaccgcaatgcccttcgtagaccttcctacaccaacggtccccaggaaatctacatacaacaaggtaatggtatttttggcatgatattcccgggttgtcctagcacttatcaagagccgcaagaatctcagcaacgaggacga

SEQ ID NO: 255300 - DNA, 411 bp, Glycine max
ggaagtcttgaatttctgaacatagaacaactcttcacacaacacaactttttctagcattgtagcatcatgactggcaaagacatcctccatataatgaaggtgaaagcagggtttgcaccaccagacacagggaaaggaaaaggcaaaatatcaaaacacatcacacatggctttcacttgatgaagggcaaatcggcacatcctatggaagattatttagtttcggaatttaagcaagaaaaggatagagaattaggcttgtttgcaatatttgatggccacttaggccatgatgttgccagctatttgcagaaccaccttttccaaaacatcttgaaagagcatgacttttggactgagacagaaagcgcggtgaagagagcttaacttgaaacagatgagaaaata

SEQ ID NO: 255301 - DNA, 389 bp, Glycine max
gacagcaaaaacaattaataaagatgagtttgaagaacaacatggtggtgctaaaggtgtgtttgttgcttcttttccgtgtggggggtacagctgcactcctaaaactgagcttcttcaaaagtgatcagtcatcaagttatgatgatgatgactattcaaaaccatgctgtgatctctgcatgtgcacacgctcaatgcctcctcaatgcagctgtgaagatattaggctgaattcatgccactcagattgtaagagctgtatgtgcacacgctcacagccaggacagcgtcgttgtcttgacaccaaaccacttctgctacaaaccttgcaagtccagaaatgactacaaaaactaattaccctctccaatggaagaaaccccttt

SEQ ID NO: 255302 - DNA, 282 bp, Glycine max
gaacacaaatcattcacatcccaaaggagttcaggagtctcaacacttttcttaacaaattctcttctcaaatcaatacaacaatgggttttcgtttacctggtatcagaaaggcatcacatgcggtggatgcgccaaaaggctatcttgcagtctatgtcggggagaaaatgaagcggtttgtgattcccgtatcatacatgaaccaaccttcattccaggacttgttgactcaagctgaggaagagtttggatataatcatcccatgggtggcctcacaa

SEQ ID NO: 255303 - DNA, 358 bp, Glycine max
  unsure (1)..(358): unsure at all n locations
ggaagtaagggggttgtcgacgggtcgagatcgagcctcggaagagggaatcgcagcgaagtccactatgccgaagcanattcatgagattaaagacttcctcctcactgcaaggaggaaggatgcacgctctgtgaaaatcaagcggagcaaggatgtagtgaagttcaaggtccgttgctccaagtacctgtacactctgtgtgtgtttgattctgagaaggctgataagttgaagcaatcacttcctccaggtttaagcgtgcaggatgtgtgattcttactgctgttgatgaagatcaagttttgctttggattttggggattcatatttagtgaaatggttcacagatttttc

SEQ ID NO: 255304 - DNA, 400 bp, Glycine max
gacagcaaaaacaattaataaagatgagtttgaagaacaacatggtggtgctaaaggtgtgtttgttgcttcttttccttgtgggggttacagctgcacgcatggaactgagcttcttcaaaagtgatcagtcatcaagttatgatgatgatgagtattcaaaaccatgctgtgatctctgcatgtgcacacgctcaatgcctcctcaatgcagctgtgaagatattaggctgaattcatgccactcagattgtaagagctgtatgtgcacacgctcgcagccaggacagtgtcgttgtcttgacaccaacgacttctgctacaaaccttgcaagcccagagatgactagaaaaactaataaccctctcaaatggacgaaacccctttaagttttgtttg

SEQ ID NO: 255305 - DNA, 260 bp, Glycine max
gatttgtttgcagatcaacatggagcttctaaaagtgtatttgctgcttcttttccttgtcctggggacaggggggcgcgtggaaccttccttcttcaaaagtgatgaaatcacaacttatcatgaaaatcaatattcacaaccatgttgtgatctctacaggtccttaccctcaatacctcttcaatccatctgtgtatatatcagacaaagctcataccattcagaatttacttcctctatgtttacacgttcacaac

SEQ ID NO: 255306 - DNA, 407 bp, Glycine max
gacacaacacaatcttaagaccaacctctctctctctctctatatccagactccaccctctcagtactcttcctcatcatcttcttctctcgtgtcgcgttctctctatgagaattgagatactagaggaagaattcgaagaagaaggcatgagaaacagcatccggtgttgcatctcctgcattctcccatgcggggccctggacgtaatccgcatagtgcactccaacggccgcgtcgaggaaatcagcggcaccatcaaggccagcgaaatcatgaaggcccaccccaagcacgtgctcaagaagccttcctccccctccacccaagacggcgttgttcccaagatcgtcgtcgtccctcccgacgccgacctcaaacgcggcaagatttacttcctcatgccc

SEQ ID NO: 255307 - DNA, 419 bp, Glycine max
  unsure (1)..(419): unsure at all n locations
tggggcagaagaccaaggaggttgggcaggatattcagagcaaggcacaggatacaagggaggcagctgcaagggatgcaagggaggcagctgcaagggatgcaagggaagctgctgcaagggatgcaaaggtggaggcaagggatgtaaagagaacaacagtgacagcaacaaccgcaaccgcatgatgagtaattctgatattagagggagcattaatgtgttgttgtgatgtggtttatatggggaaattaaataaatgatgtatgtacctcttgcctatgtangtttgtgtgttttgttttgttgtctacctttggttattaagtagtanggacgttcgttcgtgtctcaaaaaaaggggtactaccactctgtagtgtatatggatgctggaaatcaatgtgttttgtatttgt

SEQ ID NO: 255308 - DNA, 330 bp, Glycine max
  unsure (1)..(330): unsure at all n locations
gaatctcttcacagaagaaaaaagagaagaagatgggtttgaagaacaacatggtggtgctaaaggtgtgtttggtgctacttttccttgtggggggtactactagtgccaacttgaggctgagtaagcttggcctgctcatgaaaagtgatcatcatcaacactcaaatgatgatgaggcttcaaaaccatgctgtgatcaatgcgcatgcacaaagtcaaaccctcctcaatgccgctgttcagatatgangctgaattcgtgccattcagcttgcaaatcttgtatttgcgcattatcgtatcctgcacagtgtttttgtgttgaca

SEQ ID NO: 255309 - DNA, 403 bp, Glycine max
  unsure (1)..(403): unsure at all n locations
ggggttattggacacattcttcagcgactgcgtttttggatcggaacctcttctgcggcgtancaatgggacactccaacgtttggaactctcacccaaaaaactacggtcctggttctcgcacttgccgtgtgtgtgggaatccacatggactgatcaggaagtatggccttatgtgctgcaggcagtgcttccgtagcaatgccaaggaaattggcttcatcaagtatcgctaaaagagcagttgtcaactacggaccaatattgtgttctggcactacgatgttttgaggatgttatgtttgaagaaacttgagactttcttttttcatctaattaattatcagacgtaatttgtgggactaagaatgcttttatataaattgttttgaaccatattaaa

SEQ ID NO: 255310 - DNA, 287 bp, Glycine max
gaggaaggaagggagggaagcatagactgggatctggaagtggaaaacacactggagagttcttcacgataatgcattcagggatgaggcgtccgcatctcaccaatcatctccgccacgccccccctggccttggcatcgccgtcctcgccttcggtatctacctcgtcggccaacaagtctacacgacgctctatgctcccgatgctcagtcgatttctcacgtgaaagccggggatgaccactatacttttggacggacgcactccattccatcatcccttaat

SEQ ID NO: 255311 - DNA, 392 bp, Glycine max
  unsure (1)..(392): unsure at all n locations
gagtgcaaaactcacaacacatctaaacaaaaaatcaagaacaatggcttatgctaggcttgctcctatggctgtcttcttgcttgccacttccaccataatgttcccaacgaagatagaagcagcagattgtaatggtgcatgttcacctttcgagatgccaccgtgccgctcacgtgattgtcgttgtgtccctatangactagttgctggtttctgcatacatccaactggactttcatctgttgcgaagatgatcgacgaacatcccaacttatgtcaatctgatgatgaatgcatgaagaaaggaagtggcaatttttgcgctcgttaccctaataattatatcgattatggatggtgttttgattctgattctgaagcactgaaaa

SEQ ID NO: 255312 - DNA, 339 bp, Glycine max
gatgcaactgaataattaagaaaagccatttccatagcagcctaagaaaatgaagagcactagcttgttcgctatctttctactttgcgccttcacctcatacctaccttccgccaccgcccaggacgtgctcgacgtggatggcgatccgattcggaacggtttcatatactacgttttgccggcaataagaggaaacggtggcggaatagaacgagccgcactcgggaaagacacttgccctatcactgtagtgcaatctcccaatccaaactctaaggggttagaaattaagtttgaatctgcataccccgcccattaaataaacgaaaacctaat

SEQ ID NO: 255313 - DNA, 412 bp, Glycine max
gattcacacaactaactaagaaagtcttccatagccccccaaaaatgaagagcaccatcttctttgctctctttctcttttgtgccttcaccacctcatacctaccttcagccatcgctgatttcgtgctcgataatgaaggtaaccctcttgaaaatggtggcacatattatatcttgtcagacataacagcatttggtggaataagagcagccccaacgggaaatgaaagatgccctctcactgtggtgcaatctcgcaatgagctcgacaaagggattggaacaatcatctcgtccccatatcgaatccgttttatcgccgaaggccatcctttgagccttaagttcgattcatttgcagttataatgctgtgtgttggaattcctaccgagtggtcggttgtggggga

SEQ ID NO: 255314 - DNA, 435 bp, Glycine max
cgggtccacccacgcgtccgaagcgagaagacgacaaaaggggattcacacaactaactaagaaagtcttccatagccccccaaaaatgaagagcaccatcttctttgctctctttctcttttgtgccttcaccagctcatacctaccttcagccatcgctgatttcgtgctcgataatgaaggtaaccctcttgaaaatggtggcacatattatatcttgtcagacataacagcatttggtggaataagagcagccccaacgggaaatgaaagatgccctctcactgtggtgcaatctcgcaatgagctcgacaaagggattggaacaatcatctcgtcgccatatcgaatccgttttatcgccgaaagccatcctttgagccttaagttcgatttatttgcagttaaaatgctgtgtgttggaatttccaccg

SEQ ID NO: 255315 - DNA, 278 bp, Glycine max
ggaaaaaaagagctaccggggcgtcacacagacatgacgtgacgattcctgcttacccgcagaacttccaggcattttagctccggtcattgccgtatcccttatccggtaaggagccggcggcctgcaaaacaccggtggcatacatcaccactcgatcgtattcgatagttaccattcgtgcttcctcggtaatgttggcatgatgtacttccataaccttcgcactcaattctactcgtcccatccgtcatcgctgaattcctatagtctctcct

SEQ ID NO: 255316 - DNA, 339 bp, Glycine max
ggagttcgaactaaacaattcaattcaatctgcctcgatcatggagaggaaaacatttgggtttttgttcttgctcctccttgtcttagcttctgatgtgacggtgaagagagcagaggcgaaagattgcttggcaaggaggcacgggttccagggtagatgcttattcgacaggcaatgtgcacatgtgtgcaggagcgatggtttcatcggtggtcagtgccgaggccctcttcgcaaatgcttttgcagcaggccatgttgatcgaaattactactgccaaagaggccatgaaataaacaaacaaacaaataaataaatagctctaaccgacacat

SEQ ID NO: 255317 - DNA, 398 bp, Glycine max
gacagcaaaaacaattaataaagatgagtttgaagaacaacatggtggtgctaaaggtgtgtttgttgcttcttttccttgtgggggttacagctgcacgcatggaactgagcttcttcaaaagtgatcagtcatcaagttatgatgatgatgagtattcaaaaccatgctgtgatctctgcatgtgcacacgctcaatgcctcctcaatgcagctgtgaagatattaggctgaattcatgccactcagattgtaagagctgtatgtgcacacgctcacagccaggacagtgtcgttgtcttgacaccaacgacttctgctacaaaccttgcaagtccagagatgactagaaaaactaatagctctctcaaatggacgaagcccctttaagctttgtt

SEQ ID NO: 255318 - DNA, 431 bp, Glycine max
  unsure (1)..(431): unsure at all n locations
gaagacgacagaagggggctgtgagtgagacaccgatagatagagagcgcggcataacctaaacctatctttcttctctctctgtgtgtgcgcttcaacggcaaccagaggcagccatggccactgcaaggactgtgaaggatgtttcacctcatgagttcgttaaggcgtactcctctcacctcaagcgatccggcaagatggagctgccagagtggactgatattgtgaaaactgcaagatttaaggagttggctccttatgatcctgactggtactatgtcagagctgcttccatggcaagaaagatctacttgagaggaggacttggtgttggtgcctttcaaangatttatggtgggagcaagaagaatggtagtcgccctcctcatttttgcaagagcagtggtgccattgctcgtcacattctt

SEQ ID NO: 255319 - DNA, 121 bp, Glycine max
gattacataaacaactactaaacatgagtttggggaacatcatggtggtgctaaacgtgtgtttgttgcttcttttccttgtgggggttacagctgcacgcatggtaactgaccttcttca

SEQ ID NO: 255320 - DNA, 334 bp, Glycine max
gacacaactaactaagaaagtcttccatagccccccaaaaatgaagagcaccatcttctttgctctctttctcttttgtgccttcaccacctcatacctaccttcagccatcgctgatttcgtgctcgataatgaaggtaaccctcttgaaaatggtggcacatattatatcgtgtcagagataacagcatttggtggaataagagcagccccaacgggaaatgagagatgccctctcacggtggtgcaatctcgcaatgagcgtcgcaacggggattggaacaatcatctcgtccccagagtcgaatccggttttatcgcccgaaacgccatc

SEQ ID NO: 255321 - DNA, 286 bp, Glycine max
ggcgcgcacccagagaggaagcttagagagagagagagagagagagagagagaggagagagtattggcgcgtcatcaagatgggtatttctagggattccatgcacaagaggcgtgccactggtggcaagaaaaaggcttggagaaagaagagaaagtatgagcttgggcgtcaggcatcagagaccatgttatcaagcaacacgacaatcaggaggattcgtgttataggtggcagtgttaaatggagggcattgacgctgggtactgggaattaaccatggggt

SEQ ID NO: 255322 - DNA, 100 bp, Glycine max
  unsure (1)..(100): unsure at all n locations
agncgtcagtagagctgcgaaaggtccagatgcggggaccaaattgattgatattgcttctatattccgacagaagggtaccgctgccatcatacgacat

SEQ ID NO: 255323 - DNA, 352 bp, Glycine max
gacgcacttagcaatcaatcaaaacattcccaataacaataatatacacatcttcaattaagctccttctcctatagccatggctctttctaagcttataattgcttcccttcttgcgtcgcttctccttcttcatttcgttgatgctgatcaatcggcacatgcacaaacgcaggggtctcttcttcagcagatagattgtaacggagcatgtgctgcgaggtgccgtttatcatctcgtccacgcctctgccaaagagcttgtggaacttgttgtaaacgctgtaactgcgttgcacctggcactgctggaaaacaagaagtgtgtccctgctatgcaagtttgactact

SEQ ID NO: 255324 - DNA, 418 bp, Glycine max
gaaacgaaataggagtagagtcgcctaagattcaaaaaggaagttggaacacaagagaggtctgattaatactagttttctgtaaaatcgcaaagaaacacacagttagcaccgtcaacctctgcaaccaccgattccaaccatgcttcccctttcccttctcaagactgcccaaggccaccccatgctggtggaactgaaaaatggggagacttataacgggcacttggttaattgtgatacatggatgaacatccatctccgagaagtcatttgtacctctaaagatggagatagattttggcgtatgcctgagtgctacattcgtggcaacaccattaagtaccttcgggttcctgatgaggttattgacaaagtccaagaagaaacaaagagccgtactgatcgcaaaccccct

SEQ ID NO: 255325 - DNA, 357 bp, Glycine max
gattcacacaactaactaagaaagtcttccatagccccccaaaaatgaagagcaccatcttctttgctctctttctcttttgtgccttcaccacctcatacctaccttcagccatcgctgatttcgtgctcgataatgaaggtaaccctcttgaaaatggtgggacatattatatcttgtcagacataacagcatttggtggaataagagcagccccaacgggaaatgaaagatgcccctctcactgtggtgcaatctcgcaatgagctcgacagagggattggcacaatcatctcgtccccatatcgaaatccgttttatcgccgacaggcatcctttgagccttaagttcgattc

SEQ ID NO: 255326 - DNA, 350 bp, Glycine max
accacgcgtcagtaccgatgaagacgacagaaggggaacaacatttgttctagacaagatctccatatctgttcccaaaagcttgtttgtaagaatggcttccggtgaacagaaattccctcctcaacaacaacagacacagcctgggaaggagcatgctatgactccagtaccccaattcactagccctgactacaagccttcacataaacttcaagggaagattgcattagtcactgggggtgattctgggattggacgagcggtgtgtaacttgtttgccttagaaagtgctaccgtggccttcacgtatgtgcaggggcaataggacaaggacacgacggacacat

SEQ ID NO: 255327 - DNA, 373 bp, Glycine max
ggaatgtttgagtgcagaaggtaaaaaagaaaatggtggtgaagattcgattggcaaggctcgggtgccggaaccacccattctatcgtgtggttgttacggatagcaaaacaacaagagatggcaagcaacttgaagttttaggtttctacaatcccgtcgcaggcaaggatgatgacaaaagaatgagcctcaaactggagagaatcaagtattggctttccgttggagctaagccttcagagcctgttgagcatcttcgatttagagcaggtttaggacaatctcatcaattccctgttgctgctctaaatggacatatcctcaaccaagaccaaccaaccaatgctgctgatcacaatggtatatctcc

SEQ ID NO: 255328 - DNA, 372 bp, Glycine max
gaacgcagccaagaaaagaaaatcctcacccattttcttcgtagccaaacactctgaaattctcagttatgtcgtggcaagcgtatgtggatgatcacctactgtgtgaaatcgaaggtaatcacctcactcacgccgctatcatcggccaagacggaagcgtttgggctcagagcaccaacttccctcagttcaaacctgaggaaataactgccatcaataatgactttaatgagcctggatcacttgctccaactggattgtatatcggtggcaccaaatacatggtcatccacggtgagcctggtgctgtcattcgagggaagaatggtcctggtggtgttactgttaagaagaccggtgcggccttga

SEQ ID NO: 255329 - DNA, 208 bp, Glycine max
gaacgcagccaagacaagaaaatcctcacccattttcgtcgtatccaaacactctgaaattctcagttatgtcgtggcaagcgtatgtggatgatcacctactgtgtgagatcgaaggtaaccacctcactcacgccgctatcatcggccaagacggaagcgtttgggctcagaggagcaacttccctcagttcaaagctgaggaaat

SEQ ID NO: 255330 - DNA, 416 bp, Glycine max
  unsure (1)..(416): unsure at all n locations
gacagcaaaaacaattaataaagatgagtttgaagaacaacatggtggtgctaaaggtgtgtttgttgcttcttttccttgtgggggttacagctgcacgcgtggaactgagcttcttcaaaagtgatcagtcatcaagttatgatgatgatgagtattcaaaaccatgctgtgatctctgcatgtgcacacgctcaatgcctcctcaatgcagctgtgaagatattaggctgaattcatgccactcagattgtaagagctgtatgtgcacacgctcacagccaggacagtgtcgttgtcttgacnacaacgacttctgctacaaaccttgcaagtccagagatgactagaaaaactaatagctctctcaaatggacgaacccccttaggctttgtttgtaagttagggggacaaa

SEQ ID NO: 255331 - DNA, 403 bp, Glycine max
gacagcaaaaacaattaataaagatgagtttgaagaacaacatggtggtgctaaaggtgtgtttgttgcttcttttccttgtgggggttacagctgcacgcatggaactgagcttcttcaaaagtgatcagtcatcaagttatgatgatgatgagtattcaaaaccatgctgtgatctctgcatgtgcacacgctcaatgcctcctcaatgcagctgtgaagatattaggctgaattcatgccactcagattgtaagagctgtatgtgcacacgctcacagccaggacagtgtcgttgtcttgacaccaacgacttctgctacaaaccttgcaagtccagagatgactagaaaaactaatagctctctcaaatggacgaagcccctttaagctttgtttgtta

SEQ ID NO: 255332 - DNA, 272 bp, Glycine max
acgcctccaaacgctgcgaaaacgacagaaggggacctacagcaatccattctcaattgcgaaagcaaaacgcatagaatcgaaagaggggaaacgacaacgaacagttacggttagggattttgagagatggcatcgactaagaagatcatcctgaagagttcggacggtgatgccttcgaggtggatgaagctgtggcgctggagtcgcacacgatcaagcacatgatcgatgacgactgcaccgacagtcgaatccctctcgccaatgt

SEQ ID NO: 255333 - DNA, 319 bp, Glycine max
gacgttccaatttgcgtgagaacgaaaaaagaaaaaaaaaaccctaacgcactcgagaccctgagatttttcatcttcgtttctcattctctttttgatcatggacgtcgaggtgcggcagatcttcaacaagttcgacaagaacggcgacggaaaaatctcggtaacggagctgaaggacatgctcgcggccctcggatccaaaacgacggacgaggagttgaaacgcatgatggaggagctcgaccagaacggcgacagtttcatcgacctcaaggagttcgcggattttcactgcaatggcggtgccggaaaggac

SEQ ID NO: 255334 - DNA, 289 bp, Glycine max
gacagcacaaacaattaataaagatgagtttgaagaacaacatggtggtgctaaaggtgtgtttgttgcttcttttccttgtgggggttacagctgcacgcatggaactgagcttcttcaaaagtgatcagtcatcaagttatgatgatgatgagtattcaaaaccatgctgtgatctctgcatgtgcagacgctcaatgcctcctcaatgcaactgtgaagatattatgctgaattcatgccactcagattgtaagagctgtatgtgcacacgctcacagccaggaca

SEQ ID NO: 255335 - DNA, 248 bp, Glycine max
gacagcaaaaacaattaataaagatgagtttgaagaacaacatggtggtgctaaaggtgtgtttgttgcttcttttccttgtgggggttacagctgcacgcatggaactgagcttcttcaaaagtgatcagtcatcaagttatgatgatgatgagtattcaaaaccatgctgtgatctctgcatgtgcagacgctcaatgcctcctcaatgcagctgtgaagatattacgctgaattcatgccactca

SEQ ID NO: 255336 - DNA, 436 bp, Glycine max
  unsure (1)..(436): unsure at all n locations
gacagtgcaatttagctgaagcaaagcaatggctacttcaaagttgaaaacccagaatgtggttgtatctctctccctaaccttaaccttggtactggtgctactgaccagcaaggcaaactcagcggaaactgtttctttcagctggaacaagttcgtgccgaagcaaccaaacatgatcctccaaggagacgctattgtgacctcctcgggaaagttacaactcaataaggttgacgaaaacggcaccccaaaaccctcgtctcttggtcgcgccctctactccacccccatccacatttgggacaaagaaaccggtagcgttgccagcttcgccgcttccttcaacttcaccttctantgccctgacacagaaaggcttgcagatgggcttgccttcttttctcgcacaattgacactaaagcacaaacacat

SEQ ID NO: 255337 - DNA, 310 bp, Glycine max
taggtatggctgcaagaaaactacagagagggacagcacaattaattaatatgcattagtttgacaaacaacatggtcgtgctgaatgtgtgtttcttccttcctttccgtgtgggggttatagctgcatgcatctgaccgaccttcttcatgattgatcagtcatcaacttatgatgatgatgagtattcacaaccattcattgatctctgtatatacacacactcaatgcctcctcaatgctatctgtaacatagcacgcttcattcaactcactcagattgtaacatctgtatatacacacactcac

SEQ ID NO: 255338 - DNA, 313 bp, Glycine max
taggtacggctgcgcgacacctacagagagggacaacacaattaattaatatcaatgagtttgatcaccaacatgctcgtgctgaacgtgtgtttgttgcttcctttccttgtgtgggatacacctgcatgcaactcaccttccttcttcatgattaactcagtcatcaagttatgagcatgatgagtattcccaaccatacatttctccctgcacatacacacatctcactccctcctccatgcttctgtgaccatagtaggcttaattcataccactcacattgtcctatctgtatgtacacacactcaca

SEQ ID NO: 255339 - DNA, 379 bp, Glycine max
gacagcaaaaacaattaataaagatgagtttgaagaacaacatggtggtgctaaaggtgtgtttgttgcttcttttccttgtgggggttacagctgcacgcatggaactgagcttcttcaaaagtgatcagtcatcaagttatgatgatgatgagtattcaaaaccatgctgtgatctctgcatgtgcacacgctcaatgcctcctcaatgcagctgtgaagatattaggctgaattcatgccactcagattgtaaaagctgtatgtgcaaacgctcacagccaggacagtgtcattgtcttgacaccaacgacttctgctaaaaaccttgcaagtccagacattactaaaagaactaagaactctctcaaatggagga

SEQ ID NO: 255340 - DNA, 404 bp, Glycine max
gattcacgcaactaaataagaaatgaagagtactatcttctttgctctctttctagtttgtgccttcaccatctcatacctgccttcagccaccgctcagttcgtgctcgacactgatgatgatcctcttcaaaacggtggcacatactatatgttgccagttatgagaggaaagggcggtggaatagaagtagattcaaccggaaaagaaatatgccctctcactgttgtgcaatcacccaatgagctcgataaggggattggactagtctttacatctccattacatgccctttttatcgccgaaggctatcctttgagcattaagtttggtccatttgcagttataacgctgtgtgccggcatgcctactgagttgggtattgtggagagagagggtctac

SEQ ID NO: 255341 - DNA, 410 bp, Glycine max
gattcacgcaactaaataagaaatgaagagtactatcttctttgctctctttctagtttgtgccttcaccatctcatacctgccttcagccaccgctcagttcgtgctcgacactgatgatgatcctcttcaaaacggtggcacatactatatgttgccagttatgagaggaaagggcggtggaatagaggtagattcaactggaaaagaaatatgccctctcactgttgtgcaatcacccaatgagctcgataaggggattggactagtctttacatctccattacatgccctttttatcgccgaaggctatcctttgagcattaagtttggttcatttgcagttataacgctgtgtgccggcatgcctactgagtgggctattgtggagagagagggtctacaagctg

SEQ ID NO: 255342 - DNA, 398 bp, Glycine max
gacccatcaatagcaaaatgaccaagttcacaatcctcctcatctctcttctcttctgcatcgcccagacttgcagcgcctccaaatggcagcaccagcaagatagctgccgcaagcagctccagggggtgaacctcacgtcctgcgagaagcacatcatggagaagatccaaggccgcggcgatgacgatgatgatgatgacgacgacaatcacattctcaggaccatgcggggaagaatcaactacataaggaggaacgaaggaaaagacgaagacgaagaagaagaaggacacatgcagaagtgctgcacagaaatgatcgagctgagaagccccaaatgccagtgcaaagcgctgcagaagataatggagaagcagaacgaagaactggaggag

SEQ ID NO: 255343 - DNA, 379 bp, Glycine max
ggtagctgtttggttataaaattgaaaaaaaaagacgggaaaatagaatggacgcagatagtgattgagaattgggaattgcgatggatgggagaaacggaagcggaagcaggaggagtggggaagcaggaggaatgggggaggcgataatcgcgttggtaattgggagtcttgtgtactatcactgtgcctaccgcaattctacccttgtctctcttttttccgatgtcttcatcgtccttctctgctccctcgccattctcggtcttctattccgacaaatgggcatccaggttcctgttgattcccttgagtggcaaatatctcaagagagtgcgaacgcgatcgtggcatggttgaccaatacgattggtggcgc

SEQ ID NO: 255344 - DNA, 338 bp, Glycine max
ggtagctgtttggttataaaattgaaaaaaaaagacgggaaaatagaatggacgcagatagtgattgagaattgggaattgcgatggatgggagaaacggaagcggaagcaggaggagtggggaagcaggaggaatgggggaggcgataatcgcgttggtaattgggagtcttgtgtactatcactgtgcctaccgcaattctacccttgtctctcttttttccgatgtcttcatcgtccttctctgctccctcgccattctcggtcttctattccgacaaatgggcatccacgttcctgttgatccccttgactggcaaatatcccaggagagtgcg

SEQ ID NO: 255345 - DNA, 332 bp, Glycine max
gattcacgcaactaaataagaaatgaagagtactatcttctttgctctctttctagtttgtgccttcaccatctcatacctgccttcagccaccgctcagttcgtgctcgacactgatgatgatcctcttcaaaacggtgggacatactatatgttgccagttatgagaggaaagggcggtggaatagaagtaaattcaactggaaaagaaatatgccctctcactgttgtgcaatcacccaatgagctcgataaggggattggactactctttaaatgctcattacatgccctttttatcgccgaaggctattctttgaacagtaagtttg

SEQ ID NO: 255346 - DNA, 396 bp, Glycine max
gattcacacaactaactaagaaagtcttccatagccccccaaaaatgaagagcaccatcttctttgctctctttctcttttgtgccttcaccacctcatacctaccttcagccatcgctgatttcgtgctcgataatgaaggtaaccctcttgaaaatggtggcacatattataccttgtcagacataacagcatttggtggaataagagcagccccaacgggaaatgaaagatgccctctcactgtggtgcaatctcgcaatgagctcgacaaagggattgggacaatcatctcgtccccatatcgaatccgttttatcgccgaaggccatcctttgagccttaagttcgattcatttgcagttataatgccgtgtgttgggattcctaccgagt

SEQ ID NO: 255347 - DNA, 216 bp, Glycine max
gacatcacaaaccattaatacagatgagtttggagaacaacatggtggtgctaaaggtgtgtctgttgcttcttttccttgtgggggttacagctgcacgcatggaactgagcttcttcacaagtgatcagtcatcaccttatgatgatcatgactattcaaaaccatgccgtgatctctacatgtgcacacgcccaatgcctcctcaatgcagct

SEQ ID NO: 255348 - DNA, 373 bp, Glycine max
ggccgaaaaccctaacaacacaggcgcagagcgtgatccattgacgaagatggtgcagcgtctcacctaccgcaagaggcacagctatgccaccaaatccaaccaacacagggtcgtcaaaacccctggtgggaagctcgtttatcagaccaccaagaagagggccagcgggcccaagtgccccgtcactggcaagaggattcaggggattccacacttgaggcctgcagagtacaagagatcaaggttacccagaaaccgtaggactgtcaaccgtgcatatggcggagttttgtctggaagtgctgtcagggagaggattatccgagctttcttagttgaagagcaaaagattgtgaagaaggtcttgaag

SEQ ID NO: 255349 - DNA, 375 bp, Glycine max
attcacacaactaactaagaaagtcttccatagccccccaaaaatgaagagcaccatcttctttgctctctttctcttttgtgccttcaccacctcatacctaccttcagccatcgctgatttcgtgctcgataatgaaggtaaccctcttgaaaatggtggcacatattatatcttgtcagacataacagcatttggtggaataagagcagccccaacgggaaatgaaagatgccctctcactgtggtgcaatctcgcaatgagctcgacaaagggattgggacaatcatctcgtccccatatcgaatccgttttatcgccgaaggccatcctttgagccttaagttcgattcatttgcagttataatgctgtg

SEQ ID NO: 255350 - DNA, 378 bp, Glycine max
gattcacacaactaactaagaaagtcttccatagccccccaaaaatgaagagcaccatcttctttgctctctttctcttttgtgccttcaccacctcatacctaccttcagccatcgctgatttcgtgctcgataatgaaggtaaccctcttgaaaatggtggcacatattatatcttgtcagacataacagcatttggtggaataagagcagccccaacgggaaatgaaagatgccctctcactgtggtgcaatctcgcaatgagctcgacaaagggattggaacaatcatctcgtccccatatcgaatccgttttatcgccgaaaggcatcctttgagccttaaattcgattcatttgcagttataatgctgtgtg

SEQ ID NO: 255351 - DNA, 125 bp, Glycine max
ttaataaagatgagtttgaagaacaacatggtggtgctaaaagtgtgtttgttgcttcctttccttgtgggggtgacagctgcacccatggaactgaacttcttcaagagtgatgagtcatcaaa

SEQ ID NO: 255352 - DNA, 412 bp, Glycine max
gacagcaaaaacaattaataaagatgagtttgaagaacaacatggtggtgctaaaggtgtgtttgttgcttcttttccttgtgggggttacagctgcacgcatggaaccgagcttcttcaaaagtgatcagtcatcaagttatgatgatgatgagtattcaaaaccatgctgtgatctctgcatgtgcacacgctcaatgcctcctcaatgcagctgtgaagatattaggctgaattcatgccactcagattgtaagagctgtatgtgcacacgctcacagccaggacagtgtcgttgtcttgacaccaacgacttctgctacaaaccttgcaagtccagagatgactagaaaaactaatagctctctcaaatgtgacaaacccccttatgctttgtttgttatgttaaggg

SEQ ID NO: 255353 - DNA, 348 bp, Glycine max
gacagcacaaacaattaataaagatgagtttgaagaacaacatggtggtgctaaaggtgtgtttgttgcttcttttccttgtgggggttacagctgcacgcatggaactgagcttcttcaaaagtgatcagtcatcaagttatgatgatgatgagtattcaaaaccatgctgtgatctctgcatgtgcacacgctcaatgcctcctcaatgcacctgttaagatattacgctgaattcatgccactcagattgtaagaactgtatgtgcacacgctcacagccaggacaatgtcgttgtcttgacaccaacgacatctgctacaaaccttgcaagtccagagatgact

SEQ ID NO: 255354 - DNA, 429 bp, Glycine max
agaaggggacagcaaaaacaattaataaagatgagtttgaagaacaacatggtggtgctaaaggtgtgtttgttgcttcttttccttgtgggggttacagctgcacgcatggaactgagcttcttcaaaagtgatcagtcatcaagttatgatgatgatgagtattcaaaaccatgctgtgatctctgcatgtgcacacgctcaatgcctcctcaatgcagctgtgaagatattaggctgaattcatgccactcagattgtaagagctgtatgtgcacacgctcacagccaggacagtgtcgttgtcttgacaccaacgacttctgctacaaaccttgcaagttcagagatgactagaaaaactaatagctctctcaaatggacgaaagcccttttaggcttgtttgttatgttaggggagacaataaa

SEQ ID NO: 255355 - DNA, 324 bp, Glycine max
gcgtccgaacacgagtccgaccgctgctacatgacacaacgagacaacaatagcaagtggtagagatgactttgaagaacagcatggtggtgcttaaagtgtgtatgatgcttcatttccttgtgggggttacaacggcacgcatggaactgagcttcttcaacagtggttagtcatcaagttaggatgaaaactagtattcaaaaccatgctgtgatcgctgacatgtgcacacgcgcaatgtcacctcaatgcagactcaagggatattacgactaattgactgcactcagattgtatgagcgctatgtacacacgctcaga

SEQ ID NO: 255356 - DNA, 407 bp, Glycine max
gacagcaaaaacaattaataaagatgagtttgaagaacaacatggtggtgctaaaggtgtgtttgttgcttcttttccttgtgggggttacagctgcacgcatggaactgaacttcttcaaaagtgatcagtcatcaagttatgatgatgatgagtattcaaaaccatgctgtgatctctgcatgtgcacacgctcaatgcctcctcaatgcagctgtgaagatattaggctgaattcatgccactcagattgtaagagctgtatgtgcacacgctcacagccaggatagtgtcgttgtcttgacaccgacgacttctgctacaaaccttgcaagtccagagatgactagaaaaactaatagctctctcaaatggacgaagcccctttaggctttgtttgttatgtt

SEQ ID NO: 255357 - DNA, 399 bp, Glycine max
acagcaaaaacaattaataaagatgagtttgaagaataacatggtggtgctaaaggtgtgtttgttgcttcttttccttgtgggggttacagctgcacgcatggaactgagcttcttcaaaagtgatcagtcatcaagttatgatgatgatgagtattcaaaaccatgctgtgatctctgcatgtgcacacgctcaatgcctcctcaatgcagctgtgaagatattaggctgaattcatgccactcagattgtaagagctgtatgtgcacacgctcacagccaggacagtgtcgttgtcttgacaccaacgacttctgctacaaaccttgcaagtccagagatgactagaaaaactaatagctctctcaaatggacgaagcccctttaggctttgtttg

SEQ ID NO: 255358 - DNA, 374 bp, Glycine max
gacagcacaaacaattaataaagatgagtttgaagaacaacatggtggtgctaaaggtgtgtttgttgcttcttttccttgtgggggttacagctgcacgcatggaactgagcttcttcaaaagtgatcagtcatcaagttatgatgatgatgagtattcaaaaccatgctgtgatctctgcatgtgcacacgctcaatgcctcctcaatgcagctgtgaagatattatgctgaattcatgccactcagattgtaacagctgtatgtgcacactctcatagccagtacagtgtcgttgtccttacaccaacgacttctgctacaaacctttcaagtccagagatgactacagaaactaataactctctcaaatg

SEQ ID NO: 255359 - DNA, 382 bp, Glycine max
ggagttcgaactaaacaattcaattcaatctgcctcgatcatggagaggaaaacatttgggtttttgttcttgctcctccttgtcttagcctctgatgtgacggtgaagatagcagaggcgaaagattgcttgacaaggaggcacgggttccagggtagatgcttattcgacaggcaatgtgcgcatgtgtgcaggagcgatggtttcatcggtggtcagtgccgatgccctcttcgcaaatgcttttgcatcaggccatgttgatcgaaattactagtgggaaaaaggccatgaaatagacaaacaaacaaatgagtaaatagctctaagcgagacatatgtacgtaatgtccgggttctagctaactaggtaggtacgtg

SEQ ID NO: 255360 - DNA, 305 bp, Glycine max
cgggacagcaaaaacaagtaatacagatgagtttgaacaacaccatggtggtgctaaaggtgtgtttgttgcgtcttttccttgcgggggttacatctgcacgcatggaactgagcttcttcagaagtgatcagtcatcacgttacgatgatcatgagtagttccacatcatgctgtgatctctgcatgtgcatgcgcgcaatgcctccccaatgcagctgtgaagatattacgctgaattcacgcgactcagaccgtaagagccgtatctgcacacgctcatcggcaggacactgtcgttgtct

SEQ ID NO: 255361 - DNA, 180 bp, Glycine max
gacagcacaaacaattaatacagatgagtttgaagaacaacatggtggtgctaaacgtgtgtttgatgcttcttttccttgtgggggttacagctgcacacatggaactgagcttcttcaagagtgatcagtcatcaagttatcatgataatgattattcaaaaccatgctgtgatctct

SEQ ID NO: 255362 - DNA, 379 bp, Glycine max
  unsure (1)..(379): unsure at all n locations
ctgcaaaaaaacaacagaaggggacagcaaaaacaattaataaagatgagtttgaagaacaacatggtggtgctaaaggtgtgtttgttgcttcttttccttgtgggggttacagctgcacgcatggaactgagcttcttcaaaagtgatcagtcatcaagttatgatgatgatgagtattcaaaaccatgctgtgatctctgcatgtgcacacgctcaatgcctcctcaatgcagctgtgaagatattaggctgaattcatgccactcagattgtaagagctgtatgtgcacacgctcacagccaggacagtgtcgttgtcttgacnacaacgacttctgctacaaaccttgcaagttcagagatgactagaaaaact

SEQ ID NO: 255363 - DNA, 333 bp, Glycine max
  unsure (1)..(333): unsure at all n locations
agggggatacaacatcatacaaagcattgaattcaaaaacttaagttcaatccttgtgttttgctttcctcctcaanaacaaacatgtcgaacacatgcggcaactgcgactgcgctgacaagactagctgcaccaagggaaacagctatggtgttattgtagagactgagaagagttacatcgagactgttgtcatggatgttccagcagctgagcatgatgggaagtgcaagtgtggcactaactgcacttgcacggactgcacctgtggccattaaagaatatgtattaaaatgtaattgccatgtgtttggcaatacaaatatccaaat

SEQ ID NO: 255364 - DNA, 284 bp, Glycine max
gacagcaaaaacaattaataaagatgagtttgaagaacaacatggtggtgctaaaggtgtgtttgttgcttcttttccttgtgggggttacagctgcacgcatggaactgagcttcttcaaaagtgatcagtcatcaagttatgatgatgatgagtattcaaaaccatgctgtgatttctgcatgtgcacacgctcagtgcctcctcaatgcagctgtgaagatattaggctgaattcatgccactcagattgtaagagctgtatgtgcacacgctcacagcca

SEQ ID NO: 255365 - DNA, 347 bp, Glycine max
gatgcaactgaataattaagaaaagccatttccatagcagcctaagaaaatgaagagcactagcttgttcgctatctttctactttgcgccttcacctcatacctaccttccgccaccgcccaggacgtgctcgacgtggatggcgatccgattcggaacggtttcatatactacgttttgccggcaataagaggaaacggtggcggaatagaacgagccgcactcgggaaagacacttgccctatcactgtagtgcaatctcccaatccaaactctaaggggttagaaattaagtttgaatctgcataccccgcctattacataaaccaaaccctaattttgcaaa

SEQ ID NO: 255366 - DNA, 377 bp, Glycine max
gcttcacagcaaaaacaattaataaagatgagtttgaagaacaacatggtggtgctaaaggtgtgtttgttgcttcttttccttgtgggggttacagctgcacgcatggaactgagcttcttcaaaagtgatcagtcatcaagttatgatgatgatgagtattcaaaaccatgctgtgatctctgcatgtgcacacgctcaatgcctcctcaatgcagctgtgaagatattaggctgaattcatgccactcagattgtaagagctgtatgtgcacacgctcacagccaggacagtgtcgttgtcttgacaccaacgacttctgctacaaaccttgcaagtccagagatgactagaaaaactaatagctctctcaaat

SEQ ID NO: 255367 - DNA, 217 bp, Glycine max
gacagcaaaaacaattaataaagatgagtttgaagaacaacatggtggtgctaaaggtgtgtttgttgcttcttttccttgtgggggttacagctgcacgcatggaactgagcttcttcaaaagtgatcagtcatcaagttatgatgatgatgagtattcaaaaccatgctgtgatctctgcatgtgcacacgctcaatgcctcctcaatgcagctg

SEQ ID NO: 255368 - DNA, 365 bp, Glycine max
cgagaagacgacaaaagggggcagccaagaaaagaaaatcctcacccattttcttcgtagccaaacactctgaaattctcagttatgtcgtggcaagcgtatgtggatgatcacctactgtgtgaaatcgaaggtaaccacctcactcacgccgctatcatcggccaagacggaagcgtttgggctcagagcaccaacttccctcagttcaaacctgaggaaataactgccatcaataatgactttaatgagcctggatcacttgctccaactggattgtatatcggtggcaccaaatacatggtcatccagggtgagcctggtgctgtcattcgagggaaagaaggtcctggtggtgttactgt

SEQ ID NO: 255369 - DNA, 165 bp, Glycine max
  unsure (1)..(165): unsure at all n locations
gacagcaaaaacaattaataaagatgagtttgaagaacaacatggtggtgctaaaggtgtgtttgttgcctcctttcccttgtggggtttnaagctgcacgcatggaactgagcttcttcaaaagtgatcagtcatcaagttatgatgatgatgagtattcaaaa

SEQ ID NO: 255370 - DNA, 421 bp, Glycine max
gacagaagaaaaaagagaagaagatgggtttgaagaacaacatggtggtgctaaaggtgtgtttggtgctacttttccttgtggggggtactactagtgccaacttgaggctgagtaagcttggcctgctcatgaaaagtgatcatcatcaacactcaaatgatgatgagtcttcaaaaccatgctgtgatcaatgcgcatgcacaaagtcaaaccctcctcaatgccgctgttcagatatgaggctgaattcgtgccattcagcttgcaaatcttgtatttgcgcattatcgtatcctgcacagtgtttttgtgttgacataaccgatttctgctatgaaccttgcaaacccagtgaggatgacaaggaaaactactaatgaacaagtgttatgcatgtaagctctctcccaacggacaa

SEQ ID NO: 255371 - DNA, 431 bp, Glycine max
ggcagccaaagaaaagaaaatcctcaattttctgagcagccaaacactctctctctgtctctcgaaaattctcagtttgcagagaaaatctgaatcatgtcgtggtaagcgtatgtcgacgatcaccttctgtgtgacatcgaaggtaaccacctcactcacgctgctatcatcggccaagacggcagcgtttgggctcagagtaccgacttccctcagttcaaacctgaggagataactgccatcatgaatgactttaatgagcctggatcacttgctccaactggattgtatctcggtggcaccaaatatatggtcatccagggtgaacccggtgctgtcattcgagggaagaagggtcctggtggtgttactgtgaagaagacggtgcggccttgatcattggcatttatgatgaaccaatgactcca

SEQ ID NO: 255372 - DNA, 390 bp, Glycine max
cgacagaaggggattcacacaactaactaagaaagtcttccatagccccccaaaaatgaagagcaccatcttctttgctctctttctcttttgtgccttcaccacctcatacctaccttcagccatcgctgatttcgtgctcgataatgaaggtaaccctcttgaaaatggtggcacatattatatcttgtcagacataacagcatttggtggaataagagcagccccaacgggaaatgaaagatgccctctcactgtggtgcaatctcgcaatgagctcgacaaagggattggaacaatcatctcgtccccatatcgaatccgttttatcgccgaagggcatcctttgagccttaagttcgattcatttgcagtttataagctgtgtgt

SEQ ID NO: 255373 - DNA, 396 bp, Glycine max
  unsure (1)..(396): unsure at all n locations
ggagagagaacaaagaatcaaagaaaggggtggtggctgcttcgaaagcttaataatttgtttatttccagaacatcatagttttcgcagcagcaaactaacaaattactcatatcatataataagatggcccgttctctctcgcaagccaaacgtattggtgtccttgttgctcaatctatctccctaattcccgttcatcggcgaggttacgcagtggcatccgatgtatcggtaagagttggattgggtaatattgggcgaaggaatggaatcgtgggaggtgtanaagagaagcctgatacaagagatggttcaaaagcctactcaactgattgggccccagacccagtaacaggttactataggcccattaaaccacaccctgaaattgac

SEQ ID NO: 255374 - DNA, 249 bp, Glycine max
gacagcaaaaacaattaataatgatgagtttgaagaacaacatggtggtgctaaaggtgtgtttgttgcttcttttccttgtgggggttacagctgcacgcatggaactgagcttcttcaaaagtgatcagtcatcaagttatgatgatgatgagtattcaaaaccatgctgtgatctctgcatgtgcacacgctcaatgcctcctcaatgcagctgtgaagatattaggctgaattcatgccactcag

SEQ ID NO: 255375 - DNA, 358 bp, Glycine max
ggaagcatttgagactaactcttagagagaaaaaaaaatggctgatacaggtggaggagatgcagtgagaccagtggtaatatgtgataacaagtgtggctgcacacttccatgcactggtggttccacttgcaggtgcacaagtgctggcactgccacaggagggggtgatcacgtgacatgctcgtgcggagagcactgtggttgcaatccatgctcatgtcccaagattgcggctgctggaagtggttgcagatgtggcacagattgtgcatgtgcctcctgccgcacttagtatcacaccttaaggcttaaacttcacgttttattttatgtcttcaaatcttgaatacgtttt

SEQ ID NO: 255376 - DNA, 375 bp, Glycine max
gccactttgagttcgaactaaacaattcaattcaatctgcctcgatcatggagaggaaaacatttgggtttttgttcttgctcctccttgtcttagcttctgatgtgacggtgaagagagcagaggcgaaagattgcttgacaaggaggcacgggttccagggtagatgcttattcgacaggcaatatgcacatgtgtgcaggagcgatggtttcatcggtggtcagtgccgaggccctcttcgcaaatgcttttgcagcaggccatgttgatcgaaattactactgccaaagaggccatgaaataaacaaacaaacaaataaataaatagctctaaccgacacatatgtacgtagtgtccgggttctagctagc

SEQ ID NO: 255377 - DNA, 267 bp, Glycine max
gaacgcagccaggaaaagaaaatccgcacccattttcttcgtagccaaacacgctgaaattcccagttatgtcgtggcaggcgtaggtggaagatcacctactgtgtgaaatccaatgtgagcacctcactcaggcagcgtatcaccggacaagacggaagcgtttgggctcagaccaccaacttcactcagtgcaggcctgaggaaataaccgccatcaggaatgacattaatgagcctggatcacgtgctccaactggattgtat

SEQ ID NO: 255378 - DNA, 327 bp, Glycine max
  unsure (1)..(327): unsure at all n locations
ggcttattcacgcaactaaataagaaatgaagagtactatcttctttgctctctttctagtttgtgccttcaccatctcatacctgccttcagccaccgctcagttcgtgctcgacactgatgatgatcctcttcaaaacggtggcacatactatatgttgccagttatgagaggaaagggcggtggaatagaagtagattcaactggaaaagaaatatgccctctcactgttgtgcanatcaccaatgagctcgataaggggattggactagtctttatatctccattacatgccctttttatcgcccaaggctatcctttgagca

SEQ ID NO: 255379 - DNA, 374 bp, Glycine max
gacacaactaactaagaaagtcttccatagccccccaaaaatgaagagcaccatcttctttgctctctttctcttttgtgccttcaccacctcatacctaccttcagccatcgctgatttcgtgctcgataatgaaggtaaccctcttgaaaatggtggcacatattatatcttgtcagacataacagcatttggtggaataagagcagccccaacgggaaatgaaagatgccctctcactgtggtgcaatctcgcaatgagctcgacaaagggattggaacaatcatctcgtccccatatcgaatccgttttatcgccgaaggccatcctttgagccttaagttcgattcatttgcagttataatgctgtgtg

SEQ ID NO: 255380 - DNA, 384 bp, Glycine max
gacagcaaaaacaattaataaagatgagtttgaagaacaacatggtggtgctaaaggtgtgtttgttgcttcttttccttgtgggggttacagctgcacgcatggaactgagcttcttcaaaagtgatcagtcatcaagttatgatgatgatgagtattcaaaaccatgctgtgatctctgcatgtgcacacgctcaatgcctcctcaatgcagctgtgaagatattaggctgaattcatgccactcagattgtaagagctgtatgtgcacacgctcacagccaggacagtgtcgttgtcttgacaccaacgacttctgctacaaaccttgcaagtccagaaatgactataaaaactaatagctctctcaaatggacgaacccc

SEQ ID NO: 255381 - DNA, 325 bp, Glycine max
agggattcacacaactaactaagaaagtcttccatagccccccaaaaatgaagagcaccatcttctttgctctctttctcttttgtgccttcagcacctcatacctaccttcagccatcgctgatttcgtgctcgataatgaaggtaaccctcttgaaaatggtggcacatattatatcttgtcagacataacagcatttggtggaataagagcagccccaacgggaaatgaaagatgccctctcactgtggtgcaatctcgcaatgagctcgacaaacggattggaacaatcatctcgtccccatatcgaatccgttttatcgc

SEQ ID NO: 255382 - DNA, 367 bp, Glycine max
gcaaaaaaacaacagaaggggataccaaaaccatttaaaaacaatgaccttgaaaaccaaaatgttggtgcaaaaggtgtgtttgttgcttctttcccttgtgggggtaacagctgcacccatggaactaacctccttcaaaattgttaattcatcaagtgataagcataataattatccaaaacaatgctgtaatttctgcatttgcaaaccctcattgctccttcaatgaacctgtaagaatattaggctaaatccatccaactcaaattgtaaaagctgtatttgcacacactcacagccaagacagtgtcgttgtcttgacacaacgacttctgctacaaaccttgcaagtccacacatgact

SEQ ID NO: 255383 - DNA, 411 bp, Glycine max
ggaacataaaggtgaataattttctttgtaataagataatataaattaaaaacggaaatgcgaagattcttaattttattgaggtgttgtgattcgaaatcaaactgaaggcaacgccactgcaatctgttctaattagaaatagaaggttcatcatctcaaaaaggcttttgcgattctcgatttgatttggatcgcacagaacgaaggcatgggtcaagcttttcggaagctcttcgacaccttcttcggcaacaccgaaatgccggttgtgatgcttggtctaaatgctgctggcaaaacaactatactgtacaagctccacattggaaaagttttatctactgttcctacaataagttttaatgtggagaacgttcagtataagaatgttgttttcaccgtttggga

SEQ ID NO: 255384 - DNA, 371 bp, Glycine max
gacagcaaaaacaattaataaagatgagtttgaagaacaacatggtggtgctaaaggtgtgtttgttgcttcttttccttgtgggggttacagctgcacgcatggaactgagcttcttcaaagtgatcagtcatcaagttatgatgatgatgagtattcaaaaccatgctgtgatctctgcatgtgcacacgctcaatgcctcctcaatgcagctgtgaagatattaggctgaattcatgccactcagattgtaagagctgtatgtgcacacgctcacagccaggacagtgtcgttgtcttgacaccaacgacttctgctacaaaccttgcaagtccagagatgactagaaaaactaatagctctctcaaa

SEQ ID NO: 255385 - DNA, 404 bp, Glycine max
gacagcaaaaacaattaataaagatgagtttgaagaacaacatggtggtgctaaaggtgtgtttgttgcttcttttccttgtgggggttacagctgcacgcatggaactgagcttcttcaaaagtgatcagtcatcaagttatgatgatgatgagtattcaaaaccatgctgtgatctctgcatgtgcacacgctcaatgcctcctcaatgcagctgtggagatattaggctgaattcatgccactcagattgtaagagctgtatgtgcacacgctcacagccaggacagtgtcgttgtcttgacaccaacgacttctgctacaaaccttgcaagtccagagatgactagaaaaactaatagctctctcaaatggacgaaacccctttaggctttgtttgttat

SEQ ID NO: 255386 - DNA, 231 bp, Glycine max
gaccctcatccagaaaacacctgcttctggcgtcttaaaaatacgtcacactccttctgaaggctaaaatcagtgttctttgtttttttgcagaaaagactacgagatggcgaagcgcttgattccctgcttcaatcgcattctcatcgagaaaatcgcccctccctccaataccagcgacggtattctattcgcggggaagaactcccagcttaattccggtaaggtgat

SEQ ID NO: 255387 - DNA, 360 bp, Glycine max
gacagcaaaaacaattaataaagatgagtttgaagaacaacatggtggtgctaaaggtgtgtttgttgcttcttttccttgtgggggttacagctgcacgcatggaactgagcttcttcaaaagtgatcagtcatcaagttatgatgatgatgagtattcaaaaccatgctgtgatctctgcatgtgcacacgctcaatgcctcctcaatgtagctgtgaagatattaggctgaattcatgccactcagattgtaagagctgtatgtgcacacgctcacagccaggacagtgtcgttgtcttgacaccaacgacttctgctacaaaccttgcaagtccagagatgactagaaaaactaat

SEQ ID NO: 255388 - DNA, 416 bp, Glycine max
gacacttactagtagtaagcatggagtcctcaaagatctatgcttacctcttcctctgcatgatctttctctcttccgccactcccattctcggttgtggctactgtggcaaaccccccaaaaagcacaagcctggtaaaacaccaaagacacccaaaacacccgttgttaagccaccagtcaccatccctcccattaatgttcctcccgttgttcttccaccaatagtgaagcccccaggtattctccctccaattccaattattaacccaccaaccacaccagggaagggagggaacactccatgcccaccaacaaagtctcctgcgcaggctacgtgccccattgacacgctcaaacttggtgcctgtgtggatcttcttggagggttggttcacattggtttgggtgaccct

SEQ ID NO: 255389 - DNA, 267 bp, Glycine max
gacacacaactaactaagacagtcttccataaccccccaaaaatgaagagcaccatcttctttgctctctttctcttttgtgccttcaccaccgcatagttaccttcagccatcgctgatttcgtgctcgataatgaagggaaccctcatgaagatggtggcacatattatatcttgtcacacataacagcatttggtggaataagaccagccgcatagggaaatgaaagatgccctctcaatgtggtgcaatctcgcaatgagctc

SEQ ID NO: 255390 - DNA, 327 bp, Glycine max
gacagcaaaaacaattaataaagatgattttgaaaaaaaacatggtggtgctaaaggtgtgtttgttgcttcttttccttgtgggggttacagctgcacgcatggaactgagcttcttcaaaagtgatcagtcatcaagttatgatgatgatgagtattcaaaaccatgctgtgatctctgcatgtgcacacgctcaatgcctcctcaatgcagctgtgaagatattaggctgaattcatgccactcagattgtaagagctgtatgtgcacacgctcacagccaggacagtgtcgttgtcttgacaccaacgacttctgctacaaac

SEQ ID NO: 255391 - DNA, 254 bp, Glycine max
gacagcaaaaacaattaataaagatgagtttgaagaacaacatggtggtgctaaaggtgtgtttgttgcttcttttccttgtgggggttacagctgcacgcatggaactgagcttcttcaaaagtgatcagtcatcaagttatgatgatgatgagtattcaaaaccatgctgtgatctctgcatgtgcacacgcccaatgcctcctcaatgcagctgtgaagatattatgctgaattcatgccactcagattgt

SEQ ID NO: 255392 - DNA, 314 bp, Glycine max
gactcactcatacaatagagaccagcttttgcttctttgtgaacatggagatgaggaaatcatgtggcttcttcttcttgctcctcctccttgtctttgcttcccaggtggtggtgcacacggagggaagagtgtgtgagtcacaaagccacgggttccatggtttgtgtaatatagaccacaactgtgctttggtctgcatgaacgaaggtttctccggtggcaggtgcaaaggcttccgccgccgctgcttttgcaccaagatttgttgagatctcatcaaacactaatcttgccatgcagattaataaatc

SEQ ID NO: 255393 - DNA, 271 bp, Glycine max
taatttgggaattattgctcccatcgccattggtttcattgtcggcgctaacattttgttgggtggggccttctctggagcggccatgaaccccgctgtgacatttgggcctgctgtcgtgagctggacctggaccaaccactggatctactgggccgggcctctcatcggtggtggaatcgctggccttgtttacgaggttgtctttatcagccacacccacgagcagcttcccaccactgactactagaggggaaaaacaactttctcg

SEQ ID NO: 255394 - DNA, 350 bp, Glycine max
aagaaggaagctgaagtcatagaggagaagaaggaagtggaagtgacggaagagaagaaggaaattgaagtaacagaagagaagaaggaagctgaagtcatagaagagaagaaggaagtggaagtgacggaagagaagaaggaaattgaagtaacagaagagaagaaggaagcagaagtgaaagaagagaagaaggaaggggaagtgacggaagagaagaaggaagttgaagtgacggaagagaagaaggaagcggcagtgatagtagaagagaagaatgaagttgaagtgaccgaaagagaacaatgaagtggaagtgaccgacggaaagaaagaagtggaagtgatcg

SEQ ID NO: 255395 - DNA, 424 bp, Glycine max
  unsure (1)..(424): unsure at all n locations
gacagcanaaacaattaataaagatgagtttgaagaacaacatggtggtgctaaaggtgtgtttgttgcttcttttccttgtgggggttacagctgcacgcatggaactgagcttcttcaaaagtgatcagtcatcaagttatgatgatgatgagtattcaaaaccatgctgtgatctctgcatgtgcacacgctcaatgcctcctcaatgcagctgtgaagatattaggctgaattcatgccactcagattgtaagagctgtatgtgcacacgctcacagccaggacagtgtcgttgtcttgacaccaacgacttctgctacaaaccttgcaagtccagagatgactagaanaactaatagctctctcaaatggacgaagcccctttaggctttgttttgtatgttaagggagacaaataaac

SEQ ID NO: 255396 - DNA, 360 bp, Glycine max
  unsure (1)..(360): unsure at all n locations
gacagcaaaaacaattaataaagatgagtttgaagaacaacatggtggtgctaaaggtgtgtttgttgcttcttttccttgtgggggttacagctgcacgcatggaactgagcttcttcaaaagtgatcagtcatcaagttatgatgatgatgagtattcaaaaccatgccgtgatctctgcacgtgcacacgctcaatgcctcctcaatgcagctgtgaagatattaggctgaattcatgccactcagattgtangagctgtatgtgcacacgctcacagccaggacagtgtcgttgtcttgacnacaacgacttctgctacaaaccttgcaagtccagagatgactagaanaactaat

SEQ ID NO: 255397 - DNA, 288 bp, Glycine max
gacagcaaaaacaattaatagagatgagtttgaacaacaacatggtggtgctaaaggtgtgtttgttgcttcttttccgtgtgggggttacagctgcacgcatggaactgagcttcttcaacagtgatcagtcatcaagttatcatgatgacgagtattcaaaaccatgccgtgatctctgcacgtgcacacgctcaacgcctcctcaatgcagctgtgaacataatacgctcaagtcatgccactcagattgtacgagctgtatgtgcacaccctcacagtcacgac

SEQ ID NO: 255398 - DNA, 266 bp, Glycine max
gggaccccacccatttgcagaaacaaaaaacaacaaagtttcacttcatccttatccggtttagggtttcggtttttgacccaacctttgaggtaccgaaaccttaagtttcggatcaagtctgagcaatctggttggtacaacctttggtcttagagagtcaagttttatgtctgaattacacgatgaaattcctactgccttcgatccttatgctgatgcaaatgctgatgactcgggtgctgggtcaaaggagtatgtgcata

SEQ ID NO: 255399 - DNA, 384 bp, Glycine max
gactcactcatacaatagagaccagcttttgcttctttgtgaacatggagatgaggaaatcatgtggcttcttcttcttgctcctcctccttgtctttgcttcccaggtgatggtgcagacggagggaagagtgtgtgagtcacaaagccacgggttccatggtttgtgtaatagagaccacaactgtgctttggtctgcaggaacgaaggtttctccggtggcaggtgcaaaggcttccgccgccgctgcttttgcaccaggatttgttgagatctcatcaaacactactcttgccatgcaaattaataaatcatagctaggccaaataaattgcatccactctttatccatttgggagctagctaccacaaccaactcatac

SEQ ID NO: 255400 - DNA, 340 bp, Glycine max
ggaagcccaaaattagtttagtggatatggggactgcatcatctattctaactcaatacgacatcgaggaagttcaggaacactgcactaatttattttcccagcaggaaattgtgtccttatatcaaaggttttgtcaacttgaccgcaacgccaagggatttatttccgcagatgagttcttgtccgttcacgaatttgccatgaatccactttctcagaggctgctcacgatggtcgacggtttgagatttacagactttgtggccttcgtatctgcattcaatgccaacgcgagcgcacaacaaaaaatagagcttattttcaaagtatatgactc

SEQ ID NO: 255401 - DNA, 391 bp, Glycine max
gacagcaaaaacaattaataaagatgagtttgaagaacaacatggtggtgctaaaggtgtgtttgttgcttcttttccttgtgggggttacagctgcacgcatggaactgagcttcttcaaaagtgatcagtcatcaagttatgatgatgatgagtattcaaaaccatgctgtgatctctgcatgtgcacacgctcaatgcctcctcaatgcagctgtgaagatattaggctgaattcatgccactcagattgtaagagctgtatgtgcacacgctcacagccaggacagtgtcgttgtcttgacaccaacgacctctgctacaaacctcccaagtccagagatgactataaaaactaatagctctctcaaatggacaagccccttaagct

SEQ ID NO: 255402 - DNA, 445 bp, Glycine max
  unsure (1)..(445): unsure at all n locations
agggggattgtaaaacgctgctgccgaaacccttccggaaccctaaggtaagtgagtaatcagtggttgagaatggtggagaaggcgaagggtanaaaggaggaggtggttacacgtgagcacaccattaacctccacaagcgcctccatggctgcacatttaagaagaaagctcctaaagctattaaggagataaggaaatttgcccaaaaggccatggggaccaatgatgtgagggtggatgtgaagttgaacaagtttgtctggagccagggaatcangagtgttccaaggaggattagagtaagaattgctcgcaagagaaatgattatgaagatgccaaggaagagctgtactctctttgttacgttgtttagatccctaaggacgagctcaaagggttaggcactaaagttattgatgacgacggatgatttatatctg

SEQ ID NO: 255403 - DNA, 328 bp, Glycine max
acacaagggggttgcaatgcattgagaaactacacaagttacaacagagaatgagaaaagatgcagtagaaaaactacaaaaaaaacacttaaattttcacagacagtttaatacaagaatcaagatggacgcccaaaatatgagctacaatgctggacaagccaagggccaaactcaggaaaaggctaacaccatgatggacaaggctagcaatgctgctcaatctgctgaagaatccttgcaagaggttggacagcatatgcaggctaaagcacaatgagctgctgatgctgttaacaatgccacacgatgaacaaatgaagctaa

SEQ ID NO: 255404 - DNA, 304 bp, Glycine max
cacaacggggtggaagtaattgcagaactttgtttcccaacctcaattgcctccgcttctaccccgctaccatgatcattcctgagaagaaccgcaaggagatctgcaaatacctcttccaagagggagtttgctttgcgaagaaagacttcaatttggcgaagcaccctgagattgacgtgccgaatctgcaggtgattaagctgatgcatagtttcaagtctcgcgagtatgtgagggagacttttgcttggatgcactattactggttcctcaccaacgatggaatcgagtttctcacaac

SEQ ID NO: 255405 - DNA, 209 bp, Glycine max
gacagcaaaaacaattaataaagatgagtttgaagaacaacatgatggtgctaaaggtgtgtttgttgcttcttttccttgtgggggttacagctgcacgcatggaactgagcttcttcaaaagtgatcagtcatcaagttatgatgatgatgagtattcaaaaccatgctgtgatctctgcatgtgcacacgctcaatgcctcctcaa

SEQ ID NO: 255406 - DNA, 272 bp, Glycine max
gacagcaaaaacaattaataaagatgagtttgaagaacaacatggtggtgctaaaggtgtgtttgttgcttcttttccttgtgggggttacagctgcacgcatggaactgagcttcttcaaaagtgatcagtcatcaagttatgatgatgatgagtattcaaaaccatgctgtgatctctgcatgtgcacacgctcaatgcctcctcaatgcaactgtgaagatattaggctgaattcatgccactcagattgtaagaactgtatgtgcaca

SEQ ID NO: 255407 - DNA, 386 bp, Glycine max
gagagatagagttatcgatccctttggggagataagaaaatgtggcttgtgcagctctcaaccccatctctgaacggccatggccatggctccagccttctctggaaacccagttcggcggtgactcaggcccactgggccccgccgagtttgctgcctcaaatcaatgcgatgaagacgatgcagggaaaagtggtgtgctccacgaacgacaagacggtggcagtggaggtggtgcggctggcccctcacccaaagtacaagaggcgcgtgaggaagaagaagaagtaccaagcccacgatcccgattaacaattcaatgtcggcgacatcgtccagctccagaagaccaggcccatcagcaagacaaaggctttctcgcactc

SEQ ID NO: 255408 - DNA, 378 bp, Glycine max
gacttattaattgtgttaagaaatttaagtgaggagctagagaatgatgatgaagtctgctatgtgtgcagtggtggttgtagcacttcttcttccggcggaggtggggcccatggctgaggctgtgacatgcaccccaacagagttgagtccgtgtcttccagcaatcacttccggtgctaaaccttccaatgcttgttgcacgaagctgaagcagcaaaaaccatgcttatgtggctacctcaaaaacgctagcttgaagcagtatgttaactctcctaatgcccgaaaaaccgttgcttcctgtgggattccctttccaacttgttaattaattaagccttcttataattaaagtgttggataaatatatatata

SEQ ID NO: 255409 - DNA, 382 bp, Glycine max
gagctgagagagaaaggaaaggttaactaagaagcaatacttcaatggccacccttgttgttcataaccaaacttcttctgctcaagatgctgaggctctccaacaggctttcaaaggatggggggctgatgacaaggccattatagcaatactgggtcacagaaatgttcatcagaggcaagaaatcagaaaagcttatgaggagatttaccaagaggatctcatcaaacgccttgagtccgagatctctggtggctttgagagagctatgtaccggtggatgttgcagcctgcggatcgtgatgctgttttggtgaatgtggcaatcaagaatggcaccaaagactaccatgtgattgcagaaattgcttgtgtcctatc

SEQ ID NO: 255410 - DNA, 365 bp, Glycine max
gaagggagggaagaatagaatgggatctggaagtggaaaacacactggagagttcttcaggagaagggatgcatggaggaagcatccgatgctcaccaatcagctccgccacgccacccctggccttggcatcgccgtcgtcgccttcggtatctacctcgtcggcgaacaagtctacaataggctctatgctcccgatcctcattcgatttctcacgtgaaagccggggatcaccactaaacgtttggacggacgcactccattccatcatcacttaataagcttgctagcatgttctcgcagcctttaatgtttaaatttcagaccgtgttcgcttctttgggactcactatgttgtcttgta

SEQ ID NO: 255411 - DNA, 357 bp, Glycine max
gacagcaaaaacaattaataaagatgagtttgaagaacaacatggtggtgctaaaggtgtgtttgttgcttcttttccttgtgggggttacagctgcacgcatggaactgagcttcttcaaaagtgatcagtcatcaagttatgatgatgatgagtattcaaaaccatgctgtgatctctgcatgtgcacacgctcaatgcctcctcaatgcagctgtgaagatattacgctgaattcatgccactcagattgtaagagctgtatgtgcacacgctcacagccagcacagtgtcgttgtcttgacaccaacgacttctgctacaaaccttgcaagtccaaagattactagaaaaact

SEQ ID NO: 255412 - DNA, 320 bp, Glycine max
aggcacaacacccggagagggaacgtcagcaacacggtgagaaggaggaagacgaaggtgagcagccacgtccattcccattcccacgcccacgccaacctcatcaagaggaagagcacgagcagaaggaggaacacgaatggcatcgcaaggaggaaaaacacggaggaaagggaagtgaagaggaacaagatgaacgtgaacacccacgcccacaccaacctcatcaaaaggaagaggaaaagcacgaatggcaacacaagcaggaaaagcacaatacagcggtaacgtaaaaaacaaaaaaccggcggccctaaagg

SEQ ID NO: 255413 - DNA, 421 bp, Glycine max
  unsure (1)..(421): unsure at all n locations
ggacgaagagcaccatttcgagtccaaggccgacgccggagcctccaaaacctaccctcagcaagccggtaccatccgcaagaacggctacatcgtcatcaaaggccgcccctgcaaggttgtggaagtttcgacttccaaaactggaaagcacggtcacgctaagtgtcactttgttggaattgatattttcactgccaagaaacttgaggatattgtgccctcttctcacaactgtgatgttcctcatgtgaatcgtactgattaccagctcattgatattgctgaggatggatttttgagtctgcttattgaaaatggtaacactaaggatgacctcaagcttcccactgatgagagtctgctcactcagataaatgatggatttgctganggcaacgatcttgttgtgtctgtcatg

SEQ ID NO: 255414 - DNA, 415 bp, Glycine max
  unsure (1)..(415): unsure at all n locations
cccacgcgtccgaattcgagcggccgctcgaaaagacgacagaaggggacagcaaaaacaattaataaagatgagtttgaagaacaacatggtggtgctaaaggtgtgtttgttgcttcttttccttgtgggggttacagctgcacgcatggaactgagcttcttcaaaagtgatcagtcatcaagttatgatgatgatgagtattcaaaaccatgctgtgatctctgcatgtgcacacgctcaatgcctcctcaatgcagctgtgaagatattaggctgaattcatgccactcagattgtaagagctgtatgtgcacacgctcacagccaggacagtgtcgttgtcttgacaccaacgacttctgctacaaaccttgcaagtccagagatgactagannaactaatagctctct

SEQ ID NO: 255415 - DNA, 385 bp, Glycine max
gatgcaactgaataattaagaaaagccatttccatagcagcctaagaaaatgaagagcactagcttgttcgctatctttctactttgcgccttcacctcatacctaccttccgccaccgcccaggacgtgctcgacgtggatggcgatccgattcggaacggtttcatatactacgttttgccggcaataagaggaaacggtggcggaatagaacgagccgcactcgggaaagacacttgccctatcactgtagtgcaatctcccaatccaaactctaaggggttagaaattaagtttgaatctgcataccccgcctattacataaacgaaaccctaattttgcaaataaagttcagtttaccacagcagtgtgaaagaaagaat

SEQ ID NO: 255416 - DNA, 347 bp, Glycine max
gactttgagttcgaactaaacaattcaattcaatctgcctcgatcatggagaggaaaacatttgggtttttgttcttgctcctccttgtcttagcttctgatgtgacggtgaagagagcagaggcgaaagattgcttgacaaggaggcacgggttccagggtagatgcttattcgacaggcaatgtgcacatgtgtgcaggagcgatggtttcatcggtggtcagtgccgaggccctcttcgcaaatgcttttgcagcaagccatgttgatcgaaattactactgccaaagaggccatgaaataaacaaacaaacaaataaataaatagctctaaccgacacatatg

SEQ ID NO: 255417 - DNA, 256 bp, Glycine max
agggacagcaaaaacaattaataaagatgagtttgcagaacaacgtggtggtgctaaatgtgtgtttgttgcttcatttccttgcgggggttacagctgcacgcatggcactgagcttcttcaaaagtgatcagtcatcaagttatgacgatgatgaatattcacaaccatgctgtgatctctgcatgtgcacacgctcaatgtctcctcaatgcagttgtgaatatattatgctgaattcataccactcagattg

SEQ ID NO: 255418 - DNA, 357 bp, Glycine max
gataagaaagaagatcaaaagaaaaaagagaaacaaatggcagcactgggtggctttaccgacatcaccggagcacagaacagcatcgatatcgaaaatctcgctcgctttgctgttgatgaacacaacaaaaaagagaatgcagttctggagtttgtgagggtgattagtgcaaagaaacaagtggtttctggcaccttgtactatatcactttggaggcaaatgatggtgtgacgaaaaaggtttatgaaactaaggtgttggagaaaccatggttgaacatcaaggaggttcaagaattcaagcccatcactgttgctgttaatcctctttcggtgacggtctatcacatagct

SEQ ID NO: 255419 - DNA, 370 bp, Glycine max
gacagcaaaaacaattaataaagatgagtttgaagaacaacatggtggtgctaaaggtgtgtttgttgcttcttttccttgtgggggttacagctgcacgcatggaactgagcttcttcaaaagtgatcagtcatcaagttatgatgatgatgagtattcaaaaccatgctgtgatctctgcatgtgcacacgctcaatgcctcctcaatgcagctgtgaagatattaggctgaattcatgccactcagattgtaagagctgtatgtgcacacgctcacagccaggacagtgtcgttgtcttgacaccaacgacttctgctacaaaccttgcaagtccagagatgactagaaaaactaatagctctctca

SEQ ID NO: 255420 - DNA, 403 bp, Glycine max
agacgacagaaggggagagtgagaaagagagagagagagagagaaactgagagaaattcgcaaaccctaatttcggaaagatcggcgatggctgcctccaaggatcgcgagaacttcgtctacatcgccaagctcgccgaacaggccgagcgatacgaagagatggtggaatcaatgaagaacgttgcgaatctcgacgttgaactgactgtggaggagcggaatttactttctgttgggtacaagaatgtgattggtgctcggagagcatcgtggaggatcctgtcttccattgagcaaaaggaagaaacaaaagggaacgagttgaatgcgaagcggattaaggagtacaggcagaaggttgaattggagctttcaaacatctgtaatgatgttatgacag

SEQ ID NO: 255421 - DNA, 368 bp, Glycine max
gacagcaaaaacaattaataaagatgagtttgaagaacaacatggtggtgctaaaggtgtgtttgttgcttcttttccttgtgggggttacagctgcacgcatggaactgagcttcttcaaaagtgatcagtcatcaagttatgatgatgatgagtattcaaaaccatgctgtgatctctgcatgtgcacacgctcaatgcctcctcaatgcagctgtgaagatattaggctgaattcatgccactcagattgtaagagctgtatgtgcacacgctcacagccaggacagtgtcgttgtcttgacaccaacgacttctgctacaaaccttgcaagtccagagatgactagaaaaactaatagctctct

SEQ ID NO: 255422 - DNA, 357 bp, Glycine max
gactttgagttcgaactaaacaattcaattcaatctgcctcgatcatggagaggaaaacatttgggtttttgttcttgctcctccttgtcttagcttctgatgtgacggtgaagagagcagaggcggaagattgcttgacaaggaggcacgggttccagggtagatgcttattcgacaggcaatgtgcacatgtgtgcaggagcgatggtttcatcggtggtcagtgccgaggccctcttcgcaaatgcttttgcagcaagccatgttgatcgaaattactactgccaaagaggccatgaaataaacaaacaaacaaataaataaatagctctaaccgacacgtatgtacgtagtgt

SEQ ID NO: 255423 - DNA, 394 bp, Glycine max
ggttctagtgtgtgattgtttgttgttgtaactcgttcttcttctttcgttgttctgtgtttgtgtttgttttttctctcacctgaaaatgtcttgctgcggtggtaactgtggttgcggaagctcctgcaagtgcggcaacggctgcggaggctgcaagatgtacccagacttgagctacactgagtcaaccaccaccgagaccttggtcatgggagtggcacctgttaaggctcaatttgagggtgctgaaatgggtgtgcccgctgagaacgatggctgcaaatgtggaccaaactgctcccgcaacccctgcacttgcaagtgaggtgttgggagagcaagcttcaagcagagatagcccttaattaggaataatgataaactattaatg

SEQ ID NO: 255424 - DNA, 367 bp, Glycine max
ggcaagtgtgagtgatatttgagcttaaaccctagccgctcttctcttcattcttcactttggaaacaatcataatggcgttctgtaataaggttggaaatgtcttgaggcagggtgctgctcgcagcacacatgcccctgttgcgtccatgcttaattacatccgctgcatgtcttcaagcaagcttttcattggaggcctttcatatggagttgatgaccagtctcttaaggatgcattttctggctttggagatgtggttgatgcaaaagttataactgatagagacagtggaagatcaacgggatttggatttgtcaacttctccaatgatgagtctgcaagttcggcactctctgcaatgga

SEQ ID NO: 255425 - DNA, 333 bp, Glycine max
gacagcaaaaacaattaataaagatgagtttgaagaacaacatggtggtgctaaaggtgtgtttgttgcttcttttccttgtgggggttacagctgcacgcatggaactgagcttcttcaaaagtgatcagtcatcaagttatgatgatgatgagtattcaaaaccatgctgtgatctctgcatgtgcacacgctcaatgcctcctcaatgcagctgtgaagatattatgctgaattcatgccactcagattgtaagagctgtatgtgcacacgctcacagccaggacagtgtcgttgtcttgacaccaacgacttctgctaacaaacttgca

SEQ ID NO: 255426 - DNA, 393 bp, Glycine max
cgtccgaacgcgaaaagacgacagaagggggaaattggacaataacaaataccgattccaccaaacacaacacagaaaatgcaaacaccaaactgcgaagccgagaggcgaatccagaggctaaccctacacctaaaccccacggcgttggtcgcggcgaagcagttggagatggcaacgtgcgctcgcgggaagctgagcgtgaacacgccgtccttgtctagttacatgcgagggaaacacgtggacattcacgagaaggtgttcgattacttcaacgcgaacccgcgccttcaaactcccgttgagatctccaaggacgagcatcgcgacctctgcatgaagcagttaacgggactcgtcagagaagccgggattcgactcctccgttac

SEQ ID NO: 255427 - DNA, 418 bp, Glycine max
  unsure (1)..(418): unsure at all n locations
ggagttcgaactaaacaattcaattcaatctgcctcgatcatggagaggaaaacatttgggtttttgttcttgctcctccttgtcttagcttctgatgtgacggtgaagagagcagaggcgaaagattgcttgacaaggaggcacgggttccagggtagatgcttattcgacaggcaatgtgcacatgtgtgcaggagcgatggtttcatcggtggtcagtgccgaggccctcttcgcaaatgcttttgcagcaggccatgttgatcgaaattactactgccaaagaggccatgaaataaacaaacaaacaaataaataaatagctctaaccgacacatatgtacgtagtgtcggggttctagctagctaggtangtacgtgtgtcntttgttatcgatcctagtttggtggagcaag

SEQ ID NO: 255428 - DNA, 325 bp, Glycine max
gaatctcttcacagacgattcaattcaatcagatgggtttgtagaacagcatggtggtgctaaatgtgtgtttggtcgccacttttccttgtggggggtactactattgccaacttgaggctgagtaagcctgtactgctcatgaaaagtgctcatcatcaatactcaattgatgatcaatcttcaaatccatgctgtgatcaatgcgcatgcactaattcataccctcgtcaatgtcgctgttcagatatcacgctgacttcttgctattcagcatgcctgtcatgtatgtgcgcattatcctatcctgcacagtgtttttgtg

SEQ ID NO: 255429 - DNA, 279 bp, Glycine max
gattgtatatcatttacaatttcaatctctctctctctctgtctctctctctctatacttagattttgtgaatgggtgaagtggaaaagggatatgtcatcggcgtccataccgttgatgagtggaagctgcacctcgagaatgcgcaatactcgaacacactgattgtggtggattttactgcttcctggtgtggtccatgccgttttattgacccagttctatgcagacagtgcattagtaactcctgatattgattctcctcaaattggatgtgga

SEQ ID NO: 255430 - DNA, 368 bp, Glycine max; identical to SEQ ID NO: 255421

SEQ ID NO: 255431 - DNA, 349 bp, Glycine max
gactcactcatacaatagagaccagcttttgcttctttgtgaacatggagatgaggaaatcatgtggcttcttctccttgctcctcctccttgtctttgcttcccaggtggtggtgcagacggagggaagagtgtgtgagtcacaaagccacgggttccatggtttgtgtaatagagaccacgactgtgctttggtctgcaggaacgaaggtttctccggtggcaggtgcaaaggcttccgccgccgctgcttttgcaccaggatttgttgagatctcatcaaacactactcttgccatgcaaattaataaatcatagctaggccaaataaattgcatctactctttat

SEQ ID NO: 255432 - DNA, 330 bp, Glycine max
gagggttattggacacattcttcagcgactgcgtttttggatcggaacctcttctgcggcgtagcaatgggacactccaacgtttggaactctcacccaaaaaactacggtcctggttctcgcacttgccgtgtgtgtgggaatccacatggactgatcaggaagtatggccttatgtgctgcaggcagtgcttccgtagcaatgccaaggaaattggcttcatcaagtatcgctaaaagagcagttgtcaactacggaccaatattgtgttctggcactaagatgttttgaggaatgtatgtttgaagaaacttgagactttctttttc

SEQ ID NO: 255433 - DNA, 306 bp, Glycine max
gagggttattggacacattcttcatcgactgcgtttttggatcggaacctcttctgcggtgtaccattgcgacactccaacgtttggaactcacacccaaaaaactacggtcctggttctcgcacttgccgtgtgtgtgggaatccacatggactgatcaggaagtatggccttatgtgctgcacgcagtgcttccgtagcaatgccaatgaaattggcttcatcaagtatcgctaaaagagcacttgtcaactacggaccattattgtgttctggcacaaggatgttttgacggatttatgtttg

SEQ ID NO: 255434 - DNA, 166 bp, Glycine max
gcacacaactaactaagaaagtcttccatagccccccaaaaatgaagagcaccatcttctttgctctctttctcttttgtgccttcaccacctcatacctaccttcagccatcgctgatttcgtgctcgataatgaacgtaaccctcttgaaaatgggggcacata

SEQ ID NO: 255435 - DNA, 338 bp, Glycine max
  unsure (1)..(338): unsure at all n locations
gatcacactaatcactcactcttcactcaaaactcttctctttcattttcataattcccacacattatggctgagcttcactaccaaccacaacaccaataccccctccgctaccctaacgatccacaccaacaaacccgttcctccacccaccaggtcgtcaaggccgccaccgccgtcacagcgggcggctccctcttgatcctcacctcgttgatcctcgccgccaccgtcattgccctcaccatcgtcaccccgctgttcgtcattttcagtccggttctcgtcnccgccgtaatcaccgttgcgctcctgagcctgnggttcctcgcctcgag

SEQ ID NO: 255436 - DNA, 340 bp, Glycine max
gacagcaaaaacaattaataaagatgagtttgaagaacaacatggtggtgctaaaggtgtgtttgttgcttcttttccttgtgggggttacagctgcacgcatggaactgagcttcttcaaaagtgatcagtcatcaagttatgatgatgagtattcaaaaccatgctgtgatctctgcatgtgcacacgctcaatgcctcctcaatgcagctgtgaagatattaggctgaattcatgccactcagattgtaagagctgtatgtgcacacgctcacagccaggacagtgtcgttgtcttgacaccaacgacttctgctacaaaccttgcaagtccagaga

SEQ ID NO: 255437 - DNA, 353 bp, Glycine max
  unsure (1)..(353): unsure at all n locations
ggaacgaacgaacgaagacagcgaaggagctacactacgctgcgagatttggaaattgaatccctaatctaatttcgaggtccaactcctgtggagtgtgtgtggtgctttcaatctgcatgatcatatagcgaatttgtgtttagcgaatcatatttgcagagtaaggatggggaaaaaccaagcctacaaagctatgcagagagccaggctcggcggcgcctccgccggccccgacgaggttgaagacggcatggtggatggttcatttcattcaccagaatggcatgcagctcgtttggctagccttaacacctctcacaccattacctgggaagagtacaanaagaagc

SEQ ID NO: 255438 - DNA, 391 bp, Glycine max
gacagatttcgcgaaaaataaaaaaatatcacgcgctggtaccacctttccccaaaccatcaattccaatcctcccaatttccacaatcttcaaccttcaaattctgcttcacctttcttcatttcacttcagagagagagaacaaaacagaatgggcgtcgtggtgatcgacggcagcaccgtgcgcgacttcgtgaacgacgaaaccgccttcaccaagagcgtggacgagcagttctcggcgctggacctcaacaacgacggcgtcctctcgcgctcggagctccgcacggccttcgagtccatgcgcctcatcgagacgcacttcggcatcgacgtttccacgccgccggagcagctcgcgaagctctgcgactccatcttcgacaa

SEQ ID NO: 255439 - DNA, 405 bp, Glycine max
  unsure (1)..(405): unsure at all n locations
gacagcanaaacaattaataaagatgagtttgaagaacaacatggtggtgctaaaggtgtgtttgttgcttcttttccttgtgggggttacagctgcacgcatggaactgagcttcttcaaaagtgatcagtcatcaagttatgatgatgatgagtattcaaaaccatgctgtgatctctgcatgtgcacacgctcaatgcctcctcaatgcagctgtgaagatattaggctgaattcatgccactcagattgtaagagctgtatgtgcacacgctcacagccaggacagtgtcgttgtcttgacaccaacgacttctgctacaaaccttgcaagtccagagatgactagaaaaactaatagctctctcaaatggacgaagcccctttaagctttgtttgttatg

SEQ ID NO: 255440 - DNA, 379 bp, Glycine max
gattcacacaactaactaagaaagtcttccatagccccccaaaaatgaagagcaccatcttctttgctctctttctcttttgtgccttcaccacctcatacctaccttcagccatcgctgatttcgtgctcgataatgaaggtaaccctcttgaaaatggtggcacatattatatcttgtcagacataacagcatttggtggaataagagcagccccaacgggaaatgaaagatgccctctcactgtggtgcaatctcgcaatgagctcgacaaaggggttggaacaatcatctcgtccccatatcgaatccgttttatcgccgaaggccatcctttgagccttaagttcgattcatttgcagttataatgctgtgtgt

SEQ ID NO: 255441 - DNA, 386 bp, Glycine max
gacagcaaaaacaattaataaagatgagtttgaagaacaacatggtggtgctaaaggtgtgtttgttgcttcttttccttgtgggggttacagctgcacgcatggaactgagcttcttcaaaagtgatcagtcatcaagttatgatgatgatgagtattcaaaaccatgctgtgatctctgcatgtgcacacgctcaatgcctcctcaatgcagctgtgaagatattatgctgaattcatgccactcagattgtaagagctgtatgtgcacacgctcacagccaggacagtgtcgttgtcttgacatcaacgacttctgctacaaaccttgcaagtccagagatgactagaaaaactaatagctctctcaaatggacgaagcccct

SEQ ID NO: 255442 - DNA, 375 bp, Glycine max
gattcacgcaactaaataagaaatgaagagtactatcttctttgctctctttctagtttgtgccttcaccatctcatacctgccttcagccaccgctcagttcgtgctcgacactgatgatgatcctcttcaaaacggtggcacatactatatgttgccagttatgagaggaaagggcggtggaatagaagtagattcaactggaaaagaaatatgccctctcactgttgtgcaatcacccaatgagctcgataaggggattggactagtctttacatctccattacatgccctttttatcgccgaaggctatcctttgagcattaagtttggttcatttgcagttataacgctgtgtgccggcatgcctactga

SEQ ID NO: 255443 - DNA, 262 bp, Glycine max
aggcgtcagtacaggtgagaaagagaacagaacgggattcacataaataactaataaagtcttccatagcccctcataaatgaggagattatcatctgtgctctcgtactcattatgtgacttcataagcacacaagaatgttcagccaacgctgaatgcgtgcgccataatgatggtggtactcatgataacggggtaagacagtagatcttgtgtggcataacagcatttggtggaataagagcaactgagctggaaatg

SEQ ID NO: 255444 - DNA, 440 bp, Glycine max
actgcgagacgacgaggggggatgcacaagtgaatttggtgatgcagataacgagtaacactgtgatcaagatgatggtccttgctttcttcgttgctacaattttggtagcatggcaatgcgatgcgtgcgatatgttccctctccgaatgaacactggctagtggtgcccgtacgccggaggtgaaatgcgcaagttggaggcttgctgtggaagcacacaagatctttggctttgagatcattcctgaagagtgcgttgaggcaccaaaggaatacatccatggcgagcaatatagatcagactccaagacagttaaccaacaagcttacttttatgccagagacctcgaagtccatcccaatgacacatttgtgttcagtatagatggcaccgtactctctaatattccatactacagaaaacatggatatggggt

SEQ ID NO: 255445 - DNA, 281 bp, Glycine max
gggttccattgtctgattgtttgttgttgtgacacattcttcttcttttgttgttctgtgtttgtctatgttttttctctcacctggggatatcctgctgcggtgctaactgtggttgcggaagctcccgcaagtgccgcaaccgctgccgaggctgcaacatatacccacacttgagccacactgagtcaaccaccaccgacaacttgcgtattctagtcggaccttttaaagctcaatttgatggtgcttaaatcggtgttctcgctcagaaccatggc

SEQ ID NO: 255446 - DNA, 263 bp, Glycine max
gatagcagcatcatacaaagcattgaattcaaaaacttaagttcattccttgtgttttgctttcttcctcaaaaccaaacatgtcgaacacatgcggcaactgcgactgcgctgacaagactagctgcaccaagggaaacagctatggtgttattgtagagactgagaagagttacatcgagactgttgtcatggatgttccagcagctgagcatgatgggaagtgcacgtgtggcactaactgcacttgcacggactgcacc

SEQ ID NO: 255447 - DNA, 364 bp, Glycine max
gacagcaaaaacaattaataaagatgagtttgaagaacaacatggtggtgctaaaggtgtgtttgttgcttcttttccttgtgggggttacagctgcacgcatggaactgagcttcttcaaaagtgatcagtcatcaagttatgatgatgatgagtattcaaaaccatgctgtgatctctgcatgtgcacacgctcaatgcctcctcaatgcagctgtgaagatattaggctgaattcatgccactcagattgtaagagctgtatgtgcacacgctcacagccaggacagtgtcgttgtcttgacaccaacgacttctgctacaaaccttgcaagtccagagatgactagaaaaactaatagct

SEQ ID NO: 255448 - DNA, 376 bp, Glycine max
gattcacacaactaactaagaaagtcttccatagccccccaaaaatgaagagcaccatcttctttgctctctttctcttttgtgccttcaccacctcatacctaccttcagccatcgctgatttcgtgctcgataatgaaggtaaccctcttgaaaatggtggtacatattatatcttgtcagacataacagcatttggtggaataagagcagccccaacgggaaatgaaagatgccctctcactgtggtgcaatctcgcaatgagctcgacaaagggattggaacaatcatctcgtccccatatcgaatccgttttatcgccgaaaggcatcctttgagccttaagttcgattcatttgcagttaaaatgctgtg

SEQ ID NO: 255449 - DNA, 378 bp, Glycine max
gattcacacaactaactaagaaagtcttccatagccccccaaaaatgaagagcaccatcttctttgctctctttctcttttgtgccttcaccacctcatacctaccttcagccatcgctgatttcgtgctcgataatgaaggtaaccctcttgaaaatggtggcacatattatatcttgtcagacataacagcatttggtggaataagagcagccccgacgggaaatgaaagatgccctctcactgtggtgcaatctcgcaatgagctcgacaaagggattggaacaatcatctcgtccccatatcgaatccgttttatcgccgaaggccatcctttgagccttaagttcgattcatttgcagttataatgctgtgtg

SEQ ID NO: 255450 - DNA, 389 bp, Glycine max
gattcacacaactaactaagaaagtcttccatagccccccaaaaatgaagagcaccatcttctttgctctctttctcttttgtgccttcaccacctcatacctaccttcagccatcgctgatttcgtgctcgataatgaaggtaaccctcttgaaaatggtggcacatattatatcttgtcagacataacagcatttggtggaataagagcagccccaacgggaaatgaaagatgccctctcactgtggcgcaatctcgcaatgagctcgacaaagggattggaacaatcatctcgtccccatatcgaatccgttttatcgccgaaagccatcctttgagccttaagttcgattcatttgcagtttaaatgctgtgtgttgggattcct

SEQ ID NO: 255451 - DNA, 345 bp, Glycine max
gcacacaactaactaagaaagtcttccatagccccccaaaaatgaagagcaccatcttctttgctctctttctcttttgtgccttcaccacctcatacctaccttcagccatcgctgatttcgtgctcgataatgaaggtaaccctcttgaaaatggtggcacatattatatcttgtcagacataacagcatttggtggaataagagcagccccaacgggaaatgaaagatgccctctcactgtggtgcaatctcgcaatgagctcgacaaagggattggaacaatcatctcgtccccatatcgaatccgttttatcgccgaacgtcatcctttgagccttaagt

SEQ ID NO: 255452 - DNA, 253 bp, Glycine max
ggatcgggacaactcatacattcgccctattggtccttaaacactcatcagtcatcatcatcgttacgctagttcttttcccgttgttttctgcctttcagtggccgctgcttcgctttcagttccatgcaccatcctcagcgtaacgcacgtgagattcgtggcctcaatgacctcatgtcggacatccgtacattttcaggaagaaggctcactccgacagggaatgctagcatcactcccatcgagtgtg

SEQ ID NO: 255453 - DNA, 384 bp, Glycine max
gctgccagaagacgggaaaaggggaggcgcggcgggatcaggacacggttgccaagtggagttcagcattgcacagcccaccactgggtgccagaaggtgctggtgctcgatgacgacctgaagcttcgggcattttgggacaacaggatgtcacaggaggttcatggtgatgctctgggtgaggagtttaaatgatatgttttcataatcaccgctgggtgtgacaaacactgattccctatgaagcaaggagtgatgacccctggtcgtgttcgacgtttgctccatagaggaactccttgtttccgtggatatggaaagcgcaatggacaacgtataacgaagtctgttcgtgggtgcattgtcagcccacatctctctgt

SEQ ID NO: 255454 - DNA, 372 bp, Glycine max
gacagcaaaaacaattaataaagatgagtttgaagaacaacatggtggtgctaaaggtgtgtttgttgcttcttttccttgtgggggttacagctgcacgcatggaactgagcttcttcaaaagtggtcagtcatcaagttatgatgatgatgagtattcaaaaccatgctgtgatctctgcatgtgcacacgctcaatgcctcctcaatgcagctgtgaagatattaggctgaattcatgccactcagattgtaagagctgtatgtgcacacgctcacagccaggacagtgtcctttgtcttgacacaacgacctctgctacaaaccttcaagtccagagatgactagaaaaactaatacctctctcaaat

SEQ ID NO: 255455 - DNA, 407 bp, Glycine max
cggggacacagctaactaagaaagtcttccatagccccccataattgaggagcatcatcttctttgctctctttcgcttttgggccgtcagcagctcatacctaccgtcagggatcgctgagttcgtgctcgataatgaaggtaaccctcttgaaaatggtggcacatattagatcttgtcagacataacagcatttggtggaataagagcagccccaacgggaaatgaaagatgcgctctcactgtggtgcaatctcgcaatgagctcgaccaagggattggaacaatcatctcgtccccatatcgaatccgttttatcgccgaatggcatcctttgagccttaagttcgattcattttgcacttataatgctgtgtgttggaattcctaccagtggtccgttgtg

SEQ ID NO: 255456 - DNA, 344 bp, Glycine max
ggacacaactaactaagaaagtcttccatagccccccaaaaatgaagagcaccatcttctttgctctctttctcttttgtgccttcaccacctcatacctaccttcagccatcgctgatttcgtgctcgataatgaaggtaaccctcttgaaaatggtggcacatattatatcttgtcagacataacagcatttggtggaataagagcagccccaacgggaaatgaaagatgccctctcactgtggtgcaatctcgcaatgagctcgacaaagggattggaacaatcatctcgtccccatatcgaatccgttttatcgccgaaggccatcctttgagccttaag

SEQ ID NO: 255457 - DNA, 343 bp, Glycine max
gttaatgataagattgccttacacaaggttttactggttggcactgatacatcttgctacattgggaaaccaattgtaacaaatgctgtagtatatgcaacagtggaagagcatggtctagaccccaaactaattgtcttcacatataacaagaagaaacactatcgcagaaacattgggcacagacagccaaatacacgtatacggataaatagcattatgggctatgagaactacccacaagttactatggacgacatcaaatcagacgaacccggatcatgaacaccttgtttaccgtggccatactgtagcttcctcctccttcaatatgaaattattt

SEQ ID NO: 255458 - DNA, 317 bp, Glycine max
  unsure (1)..(317): unsure at all n locations
gattcacacaactaactaagaaagtcttccatagccccccaaaaatgaagagcaccatcttctttgctctctttctcttttgtgccttcaccacctcatacctaccttcagccatcgctgatttcgtgctcgataatgaaggtaaccctcttgaaaatggtggcacatattatatcttgtcagacataacagcatttggtggaataagagcagccccaacgggaaatgaaagatgccctctcactgtggtgcaatctcgcaatgagctcgacaaagggattggnacaatcatctcgtccccatatcgaatccgtttt

SEQ ID NO: 255459 - DNA, 369 bp, Glycine max
gacagcacaaacaattaataaagatgagtttgaagaacaacatggtggtgctaaaggtgtgtttgttgcttcttttccttgtgggggttacagctgcacgcatggaactgagcttcttcaaaagtgatcagtcatcaagttatgatgatgatgagtattcaaaaccatgctgtgatctctgcatgtgcacacgctcaatgcctcctcaatgcagctgtgaagatattaggctgaattcatgccactcagattgtaagagctgtatgtgcacacgctcacagccaggacagtgtcgttgtcttgacaccaacgacttctgctacaaaccttgcaagtccagagatgactagaacaactaatagctctctc

SEQ ID NO: 255460 - DNA, 363 bp, Glycine max
ggtacgcagcttcatccctaacgcgtgcatagcagagtcagagacagagacgcagccatggggcggagacctgcgaggtgttataggcaaattaagaacaagccataccccaagtcacgtttctgccgtggtgttcctgatcccaagatcaggatttatgatgttggtatgaagaagaagggtgttgatgagtctcctttctgtgtccatctggttagttgggagaaggaaaatgtttcaagtgaggccctggaagctgctcgcattgcttgcaacaagtacatggccaaatttgctggaaaggatgctttccacttgagagtcacggtggcaccattccatgttcttatgatcaacaagatg

SEQ ID NO: 255461 - DNA, 395 bp, Glycine max
ggcgaggaagccacatagagacacaatacagagtgagttgttgctccttcgccacaactctctgccaacatgggtatctccagagattctatgcacaagaggcgtgccactggtggcaagaagaaggcctggaggaaaaagagaaagtatgagcttggtcgccagcctgctaacactaagctgtcaagcaacaagacagtcaggaggatccgtgttagaggtggagatgtgaaatggagggcattgagattggatactggaaattactcctggggaagtgaagctgtaactcgcaagactcgtgtactagatgtggtttacaatgcctcaaacaatgagcttgtgcgtactcagactcttgtcaaaagtgctatcgttcaggttgatgctgctcc

SEQ ID NO: 255462 - DNA, 379 bp, Glycine max
  unsure (1)..(379): unsure at all n locations
gattcacacaactaactaagaaagtcttccatagccccccaaaaatgaagagcaccatcttctttgctctctttctcttttgtgccttcaccacctcatacctaccttcaaccatcgctgatttcgtgctcgataatgaaggtaaccctcttgaaaatggtggcacatattatatcttgtcagacataacagcatttggtggaataagagcagccccaacgggaaatgaaagatgccctctcactgtggtgcaatctcgcaatgagctcgacaaagggattggaacaatcatctcgtcnccatatcgaatccgttttatcgccgaaggccatcctttgagccttaagttcgattcatttgcagttataatgctgtgtgt

SEQ ID NO: 255463 - DNA, 292 bp, Glycine max
gagtctaatatttgcagtgctgaaaatgtcgcagttgttggaaaaggccaaaaactatgttgcggagaaagtcaccaacatgcccaagccagaggcgagtgtcaccgacgtggacttcaagcgcgtgagccgcgacagcgtcgagtacttggccaaggtctccgttcagaacccttattccacttccattcccatttgtgagatcaagtactccctcaaaagtgctggcagggagatagcagcaggaacaatacctgacccacggtcattgaaggcaagtgacacaacaatg

SEQ ID NO: 255464 - DNA, 376 bp, Glycine max
  unsure (1)..(376): unsure at all n locations
gacagcaaaaacaattaataaagatgagtttgaagaacaacatggtggtgctaaaggtgtgtttgttgcttcttttccttgtgggggttacagctgcacgcatggaactgagcttcttcaaaagtgatcagtcatcaagttatgatgatgatgagtattcaaaaccatgctgtgatctctgcatgtacacacgctcaatgcctcctcaatgcagctgtgaagatattaggctgaattcatgccactcagattgtaagagctgtatgtgcacacgctcacagccaggacagtgtcgttgtcttgacnacaacgacttctgctacaaaccttgcaagtccagagatgactagaanaactaatagctctctcaaatgga

SEQ ID NO: 255465 - DNA, 381 bp, Glycine max
gattcacacaactaactaagaaagtcttccatagccccccaaaaatgaagagcaccatcttctttgctctctttctcttttgtgccttcaccacctcatacctaccttcagccatcgctgatttcgtgctcgataatgaaggtaaccctcttgaaaatggtggcacatattatatcttgtcagacataacagcatttggtggaataagagcagccccaacgggaaatgaaagatgccctctcactgtggtgcaatctcgcaatgagctcgacaaagggattggaacaatcatctcgtccccatatcgaatccgttttatcgccgaaggccatcctttgagccttaagtttcgatcattttgcagtataatgctgtgtgttg

SEQ ID NO: 255466 - DNA, 390 bp, Glycine max
gcgcgaccacagaaggggacttgcaagtggaactctgagactattatttatggggaatcatgaccagttttcaggaacagtcccaaatgggactaacctgcaggcttttgtgtttgaattcataatgacctttttcctcatgttcgtcatatgcggggttgccaccgataacagagcggttggtgagttggctgggattgcaattgggtcgacattactgctgaatgtgattattggagggccagtgacgggagcatcaatgaacccagctagaagcctaggacctgcttttgtacacggtgaatactaaggaatatggatatatttgttggcacctgttgtgggggccatagcttgagcatgggtataaaacatcgtaaggtaacagac

SEQ ID NO: 255467 - DNA, 410 bp, Glycine max
ggttctagtgtgtgattgtttgttgttgtaactcgttcttcttcttttgttgttctgtgtttgtgtttgttttttctctcacctgaaaatgtcttgctgcggtggtaactgtggttgcggaagctcctgcaagtgcggcaacggctgcggaggctgcaagatgtacccagacttgagctacactgagtcaaccaccaccgagaccttggtcacgggagtggcacctgttaaggctcaatttgagggtgctgaaatgggtgtgcccgctgagaacgatggctgcaaatgtggaccaaactgctcctgcaacccctgcacttgcaagtgaggtgttgggagagcaagcttcaagcagagatagcccttaattaggaataatgataaactattaatgtgtagctaaaacttat

SEQ ID NO: 255468 - DNA, 276 bp, Glycine max
ggagctggtgttcaaggaggacgggcaggagtacgcgcaggtgctccggatgctggggaacgggcggtgcgaggcgatgtgcatcgacgggacgaacaggctctgccacatccgcgggaagatgcacaagaaggtgtggatcgccgccggagacatcatcctggttggactcacggactaccaggacgacaaggctgacgtcatcctcaagtacatgtccgacgagggcatgctccccaaggcctacggcgagctccccgataccacccgcctcaa

SEQ ID NO: 255469 - DNA, 368 bp, Glycine max
gacagcaaaaacaattaataaagatgagtttgaagaacaacatggtggtgctaaaggtgtgtttgttgcttcttttccttgtgggggttacagctgcacgcatggaactgagcttcttcaaaagtgatcagtcatcaagttatgatgatgatgagtattcaaaaccatgctgtgatctctgcatgtgcacacgctcaatgcctcctcaatgcagctgtgaagatattaggctgaattcatgccactcagattgtaagagctgtatgtgcacacgctcacagccaggacagtgtcgttgtcttgacaccgacgacttctgctacaaaccttgcaagtccagagatgactagaaaaactaatagctctct

SEQ ID NO: 255470 - DNA, 266 bp, Glycine max
gattcacacaactaactaagaaagtcttccatagccccccaaaaatgaagagcaccatcttctttgctctctttctcttttgtgccttcaccacctcatacctaccttcagccatcgctgatttcgtgctcgataatgaaggtaacccttttgaaaatggtggcacatattatatcttgtcagacataacagcatttggtggaataagagcagccccaacgggaaatgaaagatgccctctcactgtggtgcaatctcgcaatgag

SEQ ID NO: 255471 - DNA, 380 bp, Glycine max
gatgtaactgaataattaagaaaagccatttccatagcagcctaagaaaatgaagagcactagcttgttcgctatctttctactttgcgccttcacctcatacctaccttccgccaccgcccaggacgtgctcgacgtggatggcgatccgattcggaacggtttcatatactacgttttgccggcaataagaggaaacggtggcggaatagaacgagccgcactcgggaaagacacttgccctatcactgtagtgcaatctcccaatccaaactctaaggggttagaaattaagtttgaatctgcataccccgcctattacataaacgaaaccctaattttgcaaataaagttcagttacccacagcagtgtgaaagaa

SEQ ID NO: 255472 - DNA, 408 bp, Glycine max
acagaaggggacacaactaactaagaaagtcctccatagccccccaaaaatgaagagcaccatcttctttgctctctttctcttttgtgccttcaccacctcatacctaccttcagccatcgctgatttcgtgctcgataatgaaggtaaccctcttgaaaatggtggcacatattatatcttgtcagacataacagcatttggtggaataagagcagccccaacgggaaatgaaagatgccctctcactgtggtgcaatctcgcaatgagttcgacaaagggattggaacaatcatctcgtccccatatcgaatccgttttatcgccgaaggccatcctttgagccttaagttcgattcatttgcagttataatgctgtgtgttggaattcctaccgagtggtctgt

SEQ ID NO: 255473 - DNA, 416 bp, Glycine max
gacagcaaaaacaattaataaagatgagtttgaagaacaacatggtggtgctaaaggtgtgtttgttgcttcttttccttgtgggggttacagctgcacgcatggaactgagcttcttcaaaagtgatcagtcatcaagttatgatgatgatgagtattcaaaaccatgctgtgatctctgcatgtgcacacgctcaatgcctcctcaatgcagctgtgaagatattaggctgaattcatgccactcagatcgtaagagctgtatgtgcacacgctcacagccaggacagtgtcgttgtcttgacaccaacgacttctgctacaaaccttgcaagtccagagatgactagaaaaactaatagctctctcaaatggacgaagcccctttaggctttgtttgttatgttaagggagac

SEQ ID NO: 255474 - DNA, 382 bp, Glycine max
gattcacacaactaactaagaaagtcttccatagccccccaaaaatgaagagcaccatcttctttgctctctttctcttttgtgccttcaccacctcatacctaccttcagccatcgctgatttcgtgctcgataatgaatgtaaccctcttgaaaatggtggcacatattatatcttgtcagacataacagcatttggtggaataagagcagccccaacgggaaatgaaagatgccctctcgctgtggtgcaatctcgcaatgagctcgacaaagggattggaacaatcatctcgttcccatatcgaattcgttttacctccgagggccatcccttgagccttaagttccattcatttgcagttataaatccggtgtgttt

SEQ ID NO: 255475 - DNA, 203 bp, Glycine max
ggtccaccaccaatccgtatggctgcgaacacacacaaggggatcaagaaccagttcaatatcctagtacaccgtattaaagaatttaagatatactatgatgacagcgcggttcccattactgttgccgggagttgttttcctggcatcaatttctgtctcatttggcattgcgtattgggaaaagcagaaccccagtcaca

SEQ ID NO: 255476 - DNA, 369 bp, Glycine max
gacagcaaaaacaattaataaagatgagtttgaagaacaacatggtggtgctaaaggtgtgtttgttgcttcttttccttgtgggggttacagctgcacgcatggaactgagcttcttcaaaagtgatcagtcatcaagttatgatgatgatgagtattcaaaaccatgctgtgatctctgcatgtgcacacgctcaatgcctcctcaatgcagctgtgaagatattaggctgaattcatgccactcagattgtaagagctgtatgtgcacacgctcacagccaggacagtgtcgttgtcttgacaccaacgacttctgctacaaaccttgcaagtccagagatgactagaaaaactaatagctctctc

SEQ ID NO: 255477 - DNA, 191 bp, Glycine max
gacagcaaaaacaattaataaagatgagtttgaagaacaacatggtggtgctaaaggtgtgtttgttgcttcttttccttgtgggggttacagctgcacgcatggaactgagcttcttcaaaagtgatcagtcatcaagttatgatgatggtgagtattcaaaaccatgctgtgatctctgcatgtgcaca

SEQ ID NO: 255478 - DNA, 359 bp, Glycine max
  unsure (1)..(359): unsure at all n locations
gaaagcaaaaacaattaataaagatgagtttgaagaacaacatggtggtgctaaaggtgtgtttgttgcttcttttccttgtgggggttacagctgcacgcatggaactgagcttcttcaaaagtgatcagtcatcaagttatgatgatgatgagtattcaaaaccatgctgtgatctctgcatgtgcacacgctcaatgcctcctcaatgcagctgtgaagatattaggctgaattcatgccactcagattgtaagagctgtatgtgcacacgctcacagccaggacagtgtcgttgtcttgacaccaacgacttctgctacaaancttgcangtccagagatgactagaaaaactaa

SEQ ID NO: 255479 - DNA, 300 bp, Glycine max
aggacacaactaactaagaaagtcttccatagtcccccaaaaatgaagagcaccatcttctttgctctctttctcttttgtgccttcaccacctcatacctaccttcagccatcgctgatttcgtgctcgataatgaaggtaaccctcttgaaaatggtggcacatattaaatcttgtcagacataacaacatttggtggaataaaaacgggcccaacgggaaatgaaagatgccctctcaatgtggtgcaatcccccaattagctccaacaaagggattggaaaattcaccccgtcccc

SEQ ID NO: 255480 - DNA, 342 bp, Glycine max
gattcacacaactaactaagaaagtcttccatagccccccaaaaatgaagagcaccatcttctttgctctctttctcgtttgtgccgttgaccacctcatacctaccttcagccatcgctgatttcgtgctcgataatgaaggtaaccctcttgcaaatggtggcacatattatatcttgtcagacataccagcatttggtggaataagaccagccccagggggaaatgacacattccctctcactgtggtgcaatctcgcaatgagctctacggagggattggatcaatcatctcgtccccatatctaatccgttttatcgccgaaagccatcctttgagc

SEQ ID NO: 255481 - DNA, 374 bp, Glycine max
gagcgccaatgtttttttcagaggagtttcatcgtgtaatcaaaagagtttatcttatagtaagaaatcgatgtcttactccattttaatgaagaaaacaagagaacaatagcctgacaaagggtttagccataaaatcgaatccatcattgatttgagatattgataaggtgaatactcatttctcgtcaatgctaagcataatgcgggtatatggacctaaaaaagattatcttttcttcctatcttatgaactttaaggtgtatgaagtgtcatttcctagcatagattttaattttagtaagtagataaagagtccatttaacttaagttgatctaggccagaagcaggcctacgtcaagataatccttc

SEQ ID NO: 255482 - DNA, 247 bp, Glycine max
  unsure (1)..(247): unsure at all n locations
agggggagcgcttgagaacaagccccaatcaancaacaaaacaatctctctggtcttcctctaactttcaagtttttaaagtaataagatgggagagacattcctatttaactcaaagtcagtgaacgaaggaaaccctgacaagctctgcgaacaaatctccgatgctgtcctcgacgcttgccttgaacaggaaccaaacagcaaggttgcctgcgaaacatgcaccaagaacaacttggtcatg

SEQ ID NO: 255483 - DNA, 400 bp, Glycine max; identical to SEQ ID NO: 254894

SEQ ID NO: 255484 - DNA, 370 bp, Glycine max
agcaaaaacaattaataaagatgagtttgaagaacaacatggtggtgctaaaggtgtgtttgttgcttcttttccttgtgggggttacagctgcacgcatggaactgagcttcttcaaaagtgatcagtcatcaagttatgatgatgatgagtattcaaaaccatgctgtgatctctgcatgtgcacacgctcaatgcctcctcaatgcagctgtgaagatattaggctgaattcatgccactcagattgtaagagctgtatgtgcacacgctcacagccaggacagtgtcgttgtcttgacaccaacgacttctgctacaaaccttgcaagtccagagatgactagaaaaactaatagctctctcaaat

SEQ ID NO: 255485 - DNA, 242 bp, Glycine max
tgggacagcaaaaacaattaataaagatgagtttgaagaacaacatggtggtgccaaaggtgtgtttgttgcatcttttccttgtgggggttagagctgcacgcatggaactgagcgtcttcaaccgtgatcagtcatcgacttacgatcatgatcagtattcaaagccatcctgtgatttctccatgtccagacgcccaatcccctcttcattgcatctatgaacacactaggcttacttc

SEQ ID NO: 255486 - DNA, 336 bp, Glycine max
gagagtggtggagtgtgcaaaaaagcgtcgtagtcgcaaccctaatcagaagaagcgcagcttcaagcgagtgacagccaccagccatgggtcgtatgcacagccgcggtaagggtatatcctcttctgctttgccctacaaaaggacgcctcctagctggctcaagatctcttcgcaagatgtcgaagaaaatatctgcaagtttgcgaagaaaggtttgaccccgtctcagattggtgtcattctcagagattctcacggtattgctcacgtcaatagcgtcactggcagcaaaatccttcgcatcctcaaagctcacggacttgcgcctgaaa

SEQ ID NO: 255487 - DNA, 277 bp, Glycine max
  unsure (1)..(277): unsure at all n locations
gaaattaaacanagcaaaaggccatataatttttttttatttgaaataatgtccgggatcatccacaagattgaggagaccctccatgtgggagggcacaagaaagaggagcacaaaggagaacaccatggtgagcacaaaggtgaacacaaaggagaacaccatggtgagcacaaaggtgaacacaaaggagaacaacaccatggggagcacaaggagggacttgtggataagatcaaggacaagatccatggtgatggccatgacaagggtgaga

SEQ ID NO: 255488 - DNA, 364 bp, Glycine max
gattcacacaactaactaagagagtcttccatagccccccaaaaatgaagagcaccatcttctttgctctctttctcttttgtgccttcaccacctcatacctaccttcagccatcgctgatttcgtgctcgataatgaaggtgaccctcttgaaaatggtggcacatattatatcttgtcagacataacagcatttggtggaataagagcagccccaacgggaaatgaaagatgtcctctcactgtggtgcaatctcgcaatgagctcgacaaagggattggaacaatcatctcgtccccatatcgaatccgttttatcgccgaagggcatcctttgagccttaagttcgattcatttgcagt

SEQ ID NO: 255489 - DNA, 407 bp, Glycine max
gacagcaaaaacaattaataaagatgagtttgaagaacaacatggtggtgctaaaggtgtgtttgttgcttcttttccttgtgggggttacagctgcacgcatggaactgagtttcttcaaaagtgatcagtcatcaagttatgatgatgatgagtattcaaaaccatgctgtgatctctgcatgtgcacacgctcaatgcctcctcaatgcagctgtgaagatattaggctgaattcatgccactcagattgtaagagctgtatgtgcacacgctcacagccaggacagtgtcgttgtcttgacaccaacgacttctgctacaaaccttgcaagttcagagatgactagaaaaactaatagctctctcaaatggacgaagcccctttaggctttgtttgttatgtt

SEQ ID NO: 255490 - DNA, 381 bp, Glycine max
gattcacacaactaactaagaaagtcttccatagccccccaaaaatgaagagcaccatcttctttgctctctttctcttttgtgccttcaccacctcatacctaccttcagccatcgctgatttcgtgctcgataatgaaggtaaccctcttgaaaatggtggcacatattatatcttgtcagacataacagcatttggtggaataagagcagccccaacgggaaatgaaagatgccctctcactgtggtgcaatctcgcaatgagctcgacaaagggattggaacaatcatctcgtccccatatcgaatccgttttatcgccgaaggccatcctttgagccttaagttcgattcatttgcagttataatgctgtgtgttg

SEQ ID NO: 255491 - DNA, 384 bp, Glycine max
gacaactcaaacattctctccattggtccttaaacactcatcagtcatcaccatggccaagctagttttttccctttgttttctgcttttcagtggctgctgcttcgctttcagttccagagagcagcctcagcaaaacgagtgccagatccaaaaactcaatgccctcaaaccggataaccgtatagagtcagaaggagggctcattgagacatggaaccctaacaacaagccattccagtgtgccggtgttgccctctctcgctgcaccctcaaccgcaacgcccttcgtagaccttcctacaccaaaggtccccaggaaatctacattcaacaaggtaagggtatttctggcatgatatacccgggttgtcctagcacatt

SEQ ID NO: 255492 - DNA, 351 bp, Glycine max
gatgcaactgaataattaagaaaagccatttccatagcagcctaagaaaatgaagagcactagcttgttcgctatctttctactttgcgccttcacctcatacctaccttccgccaccgcccaggacgtgctcgacgtggatggcggtccgattcggaacggtttcatatactacgttttgccggcaataaaaggaaacggtggcggaataaaacgagccgcactcgggaaagacacttgccctatcactgtagtgcaatctcccaatccaaactctaaggggttagaaattaagtttgaatctgcattacccgcctattacataaacgaaaccctaattttgcaaataaa

SEQ ID NO: 255493 - DNA, 217 bp, Glycine max
gacagcaaaaacaattaataaagatgagtttgaagaacaacatggtggtgctaaaggtgtgtttgttgcctcctttccttgtgggggttacagctgcacgcatggaactgagcttcttcaaaagtgatcagtcatcaagttatgatgatgatgagtattcaaaaccatgctgtgatctctgcatgtgcacacgctcaatgcctcctcaatgcagctg

SEQ ID NO: 255494 - DNA, 387 bp, Glycine max
gacagcaaaaacaattaataaagatgagtttgaagaacaacatagtggtgctaaaggtgtgtttgttgcttcttttccttgtgggggttacagctgcacgcatggaactgagcttcttcaaaagtgatcagtcatcaagttatgatgatgatgagtattcaaaaccatgctgtgatctctgcatgtgcacacgctcaatgcctcctcaatgcagctgtgaagatattaggctgaattcatgccactcagattgtaagagctgtatgtgcacacgctcacagccaggacagtgtcgttgtcttgacaccaacgacttctgctacaaaccttgcaagtccagagatgactagaaaaactaaatactccctcaaatggacgaagcccttt

SEQ ID NO: 255495 - DNA, 330 bp, Glycine max
  unsure (1)..(330): unsure at all n locations
agggaaaagtgtttgcaatactagcgatagctgataagagagatacaacaagaaaagaaaaaaagaagagttgagattccctttgaagaaaagatggcatcccataggcaaagctatgaagctggtcaaactaagggccgaactgaggaaaagacgaaccagacgatgggcaatattggagagaagctcaagctgcaaaggagaagaccaagaaatgggccaagctgcaaaggaganagaccaacaaacagcccaagctgccaaagacaagacttgcgacactttccaagcggcanaggagaagacccaacagaatacaggagctgctca

SEQ ID NO: 255496 - DNA, 292 bp, Glycine max
aaacaaaaaaaggggctcaaaacaaaacattataaagatgatttgaaaacaacaatggggggcaaaagggtgtttgtttgcttcttttcccttgtgggggttacagctgcacgcatggaactgagcttcttcaaaagtgatcagtcatcaagttatgatgatgatgagtattcaaaaccatgctgtgatctctgcatgtgcacacgctcaatgcctcctcaatgcagctgtgaagatattaggctgaattcatgccactcagattgttagagctgtatgtgcacacgctcac

SEQ ID NO: 255497 - DNA, 374 bp, Glycine max
gacacaactaactaagaaagtcttccatagccccccaaaaatgaagagcaccatcttctttgctctctttctcttttgtgccttcaccacctcatacctaccttcagccatcgctgatttcgtgctcgataatgaaggtaaccctcttgaaaatggtggcacatattatatcttgtcagacatagcagcatttggtggaataagagcagccccaacgggaaatgaaagatgccctctcactgtggtgcaatctcgcaatgagctcgacaaagggattggaacaatcatctcgtccccatatcgaatccgttttatcgccgaagggcatcctttgagccttaagttcgattcatttgcagttataatgttgtgtg

SEQ ID NO: 255498 - DNA, 217 bp, Glycine max
gacagcaaaaacaattaataaagatgagtttgaagaacaacatggtggtgctaaaggcgtgtttgttgcttcttttccttgtgggggttacagctgcacgcatggaactgagcttcttcaaaagtgatcagtcatcaagttatgatgatgatgagtattcaaaaccatgctgtgatctctgcatgtgcacacgctcaatgcctccccaatgcagctg

SEQ ID NO: 255499 - DNA, 331 bp, Glycine max
gacagcaaaaacaattaataaagatgagtttgaagaacaacatggtggtgctaaaggtgtgtttgttgcttcttttccttgtgggggttacagctgcacgcatggaactgagcttcttcaaaagtgatcagtcatcaagttatgatgatgatgagtattcaaaaccatgctgtgatctctgcatgtgcacacgctcaatgcctcctcaatgcagctgtgaagatattacgctgaattcatgccactcaaattgtaagagctgtatgtgcacacgctcacagccaggacagtgtcgttgtcttgacaacaacgacgtctgctacaaaccttg

SEQ ID NO: 255500 - DNA, 348 bp, Glycine max
gacagcaaaaacaattaataaagatgagtttgaagaacaacatggtggtgctaaaggtgtgtttgttgcttcttttccttgtgggggttacagctgcacgcatggaactgagcttcttcaaaagtgatcagtcatcaagttatgatgatgatgagtattcagaaccatgctgtgatctctgcatgtgcacacgcccaatgcctcctcaatgcagctgtgaagatattaggctgaattcatgccactcagattgtaagagctgtatgtgcacacgctcacagccaggacagtgtcgttgtcttgacaccaacgacttctgctacaaaacttgcaagtccagagatgact

SEQ ID NO: 255501 - DNA, 289 bp, Glycine max
gacagcaaaaacaattaataaagatgagtttgaagaacaacatggtggtgctaaaggtgtgtttgttgcttcttttccttgtgggggttacagctgcacgcatggaactgagcttcttcaaaagtgatcagtcatcaagttatgatgatgatgagtattcaaaaccatgctgtgatctctgcatgtgcacacgctcaatgcctcctcaatgcagctgtgaagatattaggctgaattcatgccactcagattgtaagagctgtatgtgcacacgctcacaaccaggaca

SEQ ID NO: 255502 - DNA, 373 bp, Glycine max
  unsure (1)..(373): unsure at all n locations
gatgcaactgaataattaagaaaagcatttccatagcagcctaagaaaatgaagagcactagcttgttcgctatctttctactttgcgccttcacctcatacctaccttccgccaccgcccaggacgtgctcgacgtggatggcgatccgattcggaacggtttcatatactacgttttgccggcaataagaggaaacggtggcggaatagaacgagccgcactcgggaaagacacttgccctatcactgtagtgcaatctcccaatccaaactctaaggggttagaaattaagtttgaatctgcatnacccgcctattacataaacgagaccctaattttgcaaataaagttcagtttaccacagcagtgtg

SEQ ID NO: 255503 - DNA, 339 bp, Glycine max
  unsure (1)..(339): unsure at all n locations
gaaagaacaaaaaaaggggaaacaaaaactaaactaanagaaagttccttccaataagcnncccccacaaaaatgaaagagcaacatcctccttgccccccttcccctttgtgccttcacaactcatacctaccttcagccatcgctgatttcgtgctcgataatgaaggtaacctcttggaaatggtggcacatattatatcttgtcagacataacagcatttggtggaataagagcagccccaacgggaaatgaaagatgccctctcactgtggtgcaatctcgcaatgagctcgacaaagggattggaacaatcatctcggtcccatatcgaatcc

SEQ ID NO: 255504 - DNA, 358 bp, Glycine max
gacagcaaaaacaattaataaagatgagtttgaagaacaacatggtggtgctaaaggtgtgtttgttgcttcttttccttgtgggggttacagctgcacgcatggaactgagcttcttcaaaagtgatcagtcatcaagttatgatgatgatgagtattcaaaaccatgctgtgatctctgcatgtgcacacgctcaatgcctcctcaatgcagctgtgaagatattaggctgaattcatgccactcagattgtaagagctgtatgtgcacacgctcacagccaggacagtgtcgttgtcttgacaccaacgacttctgctacaaaccttgcaagtccagagatgactagaaaaacta

SEQ ID NO: 255505 - DNA, 368 bp, Glycine max
gacagcaaaaacaattaataaagatgagtttgaagaacaacatggtggtgctaaaggtgtgtttgttgcttcttttccttgtgggggttacagctgcacgcatggaactgagcttcttcaaaagtgatcagtcatcaagttatgatgatgatgagtattcaaaaccatgctgtgatctctgcatgtgcacacgctcaatgccacctcaatgcagctgtgaagatattaggctgaattcatgccactcagattgtaagagctgtatgtgcacacgctcacagccaggacagtgtcgttgtcttgacaccaacgacttctgctacaaaccttggcaatccagagatgactagaaaaactaatagctctct

SEQ ID NO: 255506 - DNA, 344 bp, Glycine max
gaagtgtgagtgatatttgagcttaaaccctagccgctcttctcttcattcttcactttggaaacaatcataatggcgttctgtaataaggttggaaatgtcttgaggcagggtgctgctcgcagcacacatgcccctgttgcgtccatgcttaattacatccgctgcatgtcttcaagcaagcttttcattggaggcctttcatatggagttgatgaccagtctcttaaggatgcattttctggctttggagatgtggttgatgcaaaagttataactgatagagacagtggaagatcaaggcgatttggatttgtcaacttctccaatgatgagtctgcaag

SEQ ID NO: 255507 - DNA, 318 bp, Glycine max
gattcatgcaactgaataattaagagaagccatttccatagcagcctaagaaaatgaagagcactagcttgttcgctatcgttctactttgcgccttcacctcatacctaccttccgccaccgcccaggacgtgctcgacgtggatggcgatccgattcggaacggtttcatatactacgttttgccggcaatacgaggaaacggtggcggcatagaacgaggccgcactcgggaaagacacttgccctatcactgtagtgcaatctcccaatccaaaccctaaggggttagaaattaagtttgaatctgcatacccc

SEQ ID NO: 255508 - DNA, 301 bp, Glycine max
tggaggagctgagcgcggcggcgagccacgccaaatacaagcaaaaggaaaaggactccgacccgctcgagacctattgcaaggacaatccggagaccattgagtgcaaaactttcgaagactgagaaagcgcttcttacgtgcatgatgatctccacatgtctgtctgtcaactaaaacactattgcgtttcatgatatatcaaattgtgaacatgcctatgtgttaatgtttctttaaaacataatccatagccccttatgtttaatcaaaccacaatttagccctagttttttttttt

SEQ ID NO: 255509 - DNA, 316 bp, Glycine max
gattcacacaactaactaagaaagtcttccatagccccccaaaaatgaagagcaccatcttctttgctctctttctcttttgtgccttcaccacctcatacctaccttcagccatcgctgatttcgtgctcgataatgaaggtaaccctcttgaaattggtgcacatattatatcttgtcagacataaaagcatttggtggaataagagcagccccaccgggaattgaaaaatgccctctcactgtggtgcaatctcgcaatgagctcgacaaagggattggaacaatcatctcgtcccaatatcgaatccttttt

SEQ ID NO: 255510 - DNA, 252 bp, Glycine max
ggtcagcacgcgtccgtatagacgacgacagaatgggacagcagaaacaattaataaagatgagtttgaataacaacatggtggcgctaaaggtgtgtttgttgcatcgtttccttgtgggggttacagctgcaggcatggaactgagcttcctcaaaagtgattactcatcacgttatgattatgattagtattcacaaccatacggtgatctccgccactacagacgcacattgactcctcaatgcagct

SEQ ID NO: 255511 - DNA, 367 bp, Glycine max
gattcacacaactaactaagaaagtcttccatagccccccaaaaatgaagagcaccatcttctttgctctctttctcttttgtgccttcaccacctcatacctaccttcagccatcgctgatttcgtgctcgataatgaaggtaaccctcttgaaaatggtggcacatattatatcttgtcagacataacagcatttggtggaataagagcagccccaacgggaaatgaaagatgccctctcactgtggtgcaatctcgcaatgagctcgacaaagggattggaacaatcatctcgtccccatatcgaatccgttttatcgccgaaggccatcctttgagccttaagttcgattcatttgcagttat

SEQ ID NO: 255512 - DNA, 373 bp, Glycine max
gacagcaaaaacaattaataaagatgagtttgaagaacaacatggtggtgctaaaggtgtgtttgttgcttcttttccttgtgggggttacagctgcacgcatggaactgagcttcttcaaaagtgatcagtcatcaagttatgatgatgatgagtattcaaaaccatgctgtgatctctgcatgtgcacacgctcaatgcctcctcaatgcagctgtgaagatattaggctgaattcatgccactcagattgtaagagctgtatgtgcacacgctcacagccaggacagtgtcgttgtcttgacaccaacgacttctgctacaaaccttgcaagtccagagatgactagaaaaacaaaaacctctctcaaat

SEQ ID NO: 255513 - DNA, 276 bp, Glycine max
cacgtcagtacagctggggaatcacaccactagggggaagcatcttccactacctcttaaagataaacacgcatggtcgtcattggtcgcggtcacgttttgacattcgtggtcacatgtgttactatcatgcatctgtagatttccagcgcacaggtggttcgtcactgctcgtgaacatgttctggcacagtaacacgtgggggtgatcacatgacttggtcgtatagcgaccaccgtagttgtaattcatggacacgctcccactgtgctgca

SEQ ID NO: 255514 - DNA, 402 bp, Glycine max
gacacaactaactaagaaagtcttccatagccccccaaaaatgaagagcaccatcttctttgctctctttctcttttgtgccttcaccacctcatacctaccttcagccatcgctgatttcgtgctcgataatgaaggtaaccctcttgaaaatggtggcacatattatatcttgtcagacataacagcatttggtggaataagagcagccccaacgggaaatgaaagatgccctctcactgtggtgcaatctcgcaatgagctcgacaaagggattggaacaatcatctcgtccccatatcgaatccgttttatcgccgaaggccatcctttgagccttaagttcgattcatttgcagttataatgctgtgtgttggaattcctaccgagtggtctgttgt

SEQ ID NO: 255515 - DNA, 140 bp, Glycine max
acagtatgggattcagacaactaacttaggaagtcttgcataaccccccaaaagtgaagaggaagatcttctctgctctctttctcttttggggcctcagcagcctcaggacctagcttcagccatcgctgatttcgtgg

SEQ ID NO: 255516 - DNA, 365 bp, Glycine max
gacagcaaaaacaattaataaagatgagtttgaagaacaacatggtggtgctaaaggtgtgtttgttgcttcttttccttgtgggggttacagctgcacgcatggaactgagcttcttcaaaagtgatcagtcatcaagttatgatgatgatgagtattcaaaaccatgctgtgatctctgcatgtgcacacgctcaatgcctcctcaatgcagctgtgaagatattaggctgaattcatgccactcagattgtaagagctgtatgtgcacacgctcacagccaggacagtgtcgttgtcttgacaccaacgacttctgctacaaaccttgcaagtccagagatgactagaaaaactaatagctc

SEQ ID NO: 255517 - DNA, 164 bp, Glycine max
  unsure (1)..(164): unsure at all n locations
gacagcanaaacaattaataaagatgagtttgaagaacaacatggtggtgccaaacgtgtgtttgttgcctcttttccttgtgggggttacagctgcacgcatggaactgagcctcttcaaaattgatcagtcaccaagttatgataatgatgagtattcaaaa

SEQ ID NO: 255518 - DNA, 370 bp, Glycine max
gacagcaaaaacaattaataaagatgagtttggagaacaacatggtggtgctaaaggtgtgtttgttgcttcttttccttgtgggggttacagctgcacgcatggaactgagcttcttcaaaagtgatcagtcatcaagttatgatgatgatgagtattcaaaaccatgctgtgatctctgcatgtgcacacgctcaatgcctcctcaatgcagctgtgaagatattaggctgaattcatgccactcagattgtaagagctgtatgtgcacacgctcgcagccaggacagtgtcgttgtcttgacaccaacgacttctgctacaaaccttgcaagtccagagatgactagaaaaactaatagctctctca

SEQ ID NO: 255519 - DNA, 345 bp, Glycine max
ggagaacgagaggaggggttcgggtgtgagagcgagaatcagaagatgaagaaggaagacacagtgaagctgatcagtgccgaaggttttgaatttgtggtcgacaaagaagctgcaatggtttcacagaccatacataacatgcttacttctccagggagtttcgctgagaggcagcacggcgaagttacctttcctgagatcagcaccaccattttcgagaagatttgccagtacctttattggcatctccaattccccagtgggaaacgagacggaatttccccaatgagcctgaaataaatcctggagccaaatgatgggccgccaaattaccccccatac

SEQ ID NO: 255520 - DNA, 298 bp, Glycine max
gattcacgcaactaaataagaaatgaagagtactatcttctttgctctctttctagtttgtgccttcaccatctcatacctgccttcagccaccgctcagttcgtgctcgacactgatgatgatcctcttcaaaacggtggcgcatactatatgttgccagttatgagaggaaagggcggtggaatacaagtagattcaactggaaaagaaatatgccctctcactgttgtgcaatcacccaatgagctcgataaggggattggactagtccttacatctccattaaattgccttttt

SEQ ID NO: 255521 - DNA, 390 bp, Glycine max
gacttgagacacaaactcacacactttgtactctccgtccttccttcttcgatccagatctctctccttctccctcaaatggcttcccttctgcaatgttccatgcccctcgtctctctttccaatcgagctctggtacccggtaccaggatctccaacccaagttcagtttccctttcaattaagggaagaagtttcccatccgttacattgcagcccagagggcgtcggtttcagcttagatgtgcggcaaaaccagagacagtgaagaaggtgtgtgacatagtcaagaagcaattggcactgccagatgaatcagctgttactggagagtctaaatttgctgcgcttggagctgattctcttgacacggttgagattgtgatggga

SEQ ID NO: 255522 - DNA, 420 bp, Glycine max
gacagcaaaaacaattaataaagatgagtttgaagaacaacatggtggtgctaaaggtgtgtttgttgcttcttttccttgtgggggttacagctgcacgcatggaactgagcttcttcaaaagtgatcagtcatcaagttatgatgatgatgagtattcaaaaccatgctgtgatctctgcatgtgcacacgctcaatgcctcctcaatgcagctgtgaagatattaggctgaattcatgccactcagattgtaagagctgtatgtgcacacgctcacagccaggacagtgtcgttgtcttgacaccaacgacttctgccacaaaccttgcaagtccagagatgactagaataactaatagctctctcaaatggaacaaacccccttacgctttgtttgttatgttagggggaacaaat

SEQ ID NO: 255523 - DNA, 356 bp, Glycine max
gactttgagttcgaactaaacaattcaattcaatctgcctcgatcatggagaggaaaacatttgggtttttgctcttgctcctccttgtcttagcttctgatgtgacggtgaagagagcagaggcgaaagattgcttgacaaggaggcacgggttccagggtagatgcttattcgacaggcaatgtgcacatgtgtgcaggagcgatggtttcatcggtggtcagtgccgaggccctcttcgcaaatgcttttgcagcaggccgtgttgatcgaaattactactgccaaagaggccatgaaataagcaaacaaacaaataaataaatagctctaaccgacacatatgtacgtagtg

SEQ ID NO: 255524 - DNA, 327 bp, Glycine max
gactccatcttatacaggatagattaactatcacaaactaaactacacacacaagatccggggtttgatcaaccatcatgtctgacgaagtcaacagcgttttcaagaaatatctcaaccagcttcagcttcatcctctcagaaccaaggcgattactgcggcatttttggctggttttagtgatgcagtggcacagaagttatctggggccaagaaacttcagttgagaagggtacttcatttcatgctctatggtttcgcctactctgggccctttggacattttctccacaaattgatggataaaatatttaacggggagaaag

SEQ ID NO: 255525 - DNA, 318 bp, Glycine max
gatgcaactgaataattaagaaaagccatttccatagcagcctaagaaaatgaagagcactagcttgttcgctatctttctactttgcgccttcacctcatacctaccttccgccaccgcccaggacgtgctcgacgtggatggcgatccgattcggaacggtttcatatactacgttttgccggcaataagaggaaacggtggcggaatagaacgagccgcactcgggaaagacacttgccctatcactgtagtgcaatctcccaatccaaactctaaggggttagaaattaagtttgaatctgcataccccgccta

SEQ ID NO: 255526 - DNA, 332 bp, Glycine max
  unsure (1)..(332): unsure at all n locations
gacacaactaactaagaaagtcttccatagccccccaaaaatgaagagcaccatcttctttgctctctttctcttttgtgccttcaccacctcatacctaccttcagccatcgctgatttcgtgctcgataatgaaggtaaccctcttgaaaatggtggcacatattatatcttgtcagacataacagcatttggtggaataagagcagccccaacgggaaatgaaagatgccctctcactgtggtgcaatctcgcaatgagctcgacaaagggattggaacaatcatctcgtcnccatatcgaatccgttttatcgccgaaggccatcctt

SEQ ID NO: 255527 - DNA, 404 bp, Glycine max
  unsure (1)..(404): unsure at all n locations
gacagcanaaacaattaataaagatgagtttgaagaacaacatggtggtactaaaggtgtgtttgttacttcttttccttgtgggggttacagctgcacgcatggaactgagcttcttcaaaagtgatcagtcatcaagttatgatgatgatgagtattcaaaaccatgctgtgatctctgcatgtgcacacgctcaatgcctcctcaatgcagctgtgaagatattaggctgaattcatgccactcagattgtaagagctgtatgtgcacacgctcacagccaggacagtgtcgttgtcttgacaccaacgacttctgctacaaaccttgcaagtccagagatgactagaaaaactaatagctctctcaaatggacgaagcccctttaagctttgtttgttat

SEQ ID NO: 255528 - DNA, 410 bp, Glycine max
  unsure (1)..(410): unsure at all n locations
caatgggacagcaaaaacaattaataaagataagtttgaaaaacaacatggtggtgctaaaggtgtgtttgttgcttcttttccttgtgggggttacatctgcacgcatggaactgagcttcttcaaaagtgatcagtcatcaagttatgatgatgatgagtattcanaaccatgctgtgatctctgcatgtgcacacgctcaatgcctcctcaatgcagctgtgaagatattaggctgaattcatgccactcagattgtaagagctgtatgtgcacacgctcacagccaggacagtgtcgttgtcttgacaccaacgacttctgctacaaaccttgcaagtccacagatgactagaagaactcatagctctcctcaatggacgaaacccctttaggctttgtttgttat

SEQ ID NO: 255529 - DNA, 208 bp, Glycine max
tgggacaggtgtttgcagtactatcgatagctgataaaagagatatcaacatgattagtagataagaggagttgagattccctttgaggggaagatggcatcccatatgcaaagctattaagctggtcaaactaagggccgaactgaggaaaagatgaaccagatgatgggcactattggtgataacgctcaagctgcataggagaag

SEQ ID NO: 255530 - DNA, 275 bp, Glycine max
ggcacaagtgagtttgttgatcgagataactagaaacagtgtgatgaaaatgaaggtccttgttttcttcgttgctacaattttggtagcatggcaatgccatgcgtacgatatgttccctctccgaatgaacactggctatggtgcccgtactcccgaggtgaaatgcgcaagttggaggcttgctgtggaagcacacaacatctttggctttgagaccattcctgaagagtgcgtttaagcaacacaggagtatatccatagggaaaaatata

SEQ ID NO: 255531 - DNA, 380 bp, Glycine max
ggtctgtgttacaacttacggctaaattctcaaagatttaaactttgcctcagagtttccaaattcacccaaccccagagagaaaatgtctctaatcccaaatttcttcggtggcagaaggagcaacgttttcgatcctttttccctcgacgtctgggaccccttcaaggattttcctttcccaaacactctttcttcagcttcctttcctgaattttctcgggaaaattctgcattcgtgagcactcgtgtggattggaaggagaccccagaagcacacgtattcaaggctgatattccagggctgaagaaggaggaagtgaaggttcagattgaagatgataaggttcttcagataagccgagagaggaacgttgaga

SEQ ID NO: 255532 - DNA, 368 bp, Glycine max
  unsure (1)..(368): unsure at all n locations
gacagcaaaaacaattaataaagatgagtttgaagaacaacatggtggtgctaaaggtgtgtttgttgcttcttttccttgtgggggttacagctgcacgcatggaactgagcttcttcaaaagtgatcagtcatcaagttatgatgatgatgagtattcaaaaccatgctgtgatctctgcatgtgcacacgctcaatgcctcctcaatgcagctgtgaagatattaggctgaattcatgccactcagattgtaagagctgtatgtgcacacgctcacagccaggacagtgtcgttgtcttgacaccaacgacttctgctacaaaccttgcaagtccagagatgactagaanaactaatagctctct

SEQ ID NO: 255533 - DNA, 315 bp, Glycine max
gattcacacaactaactaagaaagtcttccatagccccccaaaaatgaagagcaccatcttctttgctctctttctcttttgtgccttcaccacctcatacctaccttcagccatcgctgatttcgtgctcgataatgaaggtaaccctcttgaaaatggtggcacatattatatcctgtcagacataacagcatttggtggaataagagcatccccaacgggaaatgaaagatgccctctcactgtggtgcaatctcgcaatgagctcgacaaacggattggaagaatcatctcgtccccatatcgaatccgtt

SEQ ID NO: 255534 - DNA, 225 bp, Glycine max
gacagcaacaacaattaatagagatgagtttgaagaacaacatggtggtgctaaaggtgtgtttgttgcttcttttccttgtgggggttacagctgcacgcatggaactgagcttcttcaaaagtgatcagtcatcatgttatgatgatgatgagtattcaaaaccatgctgtgatctctgcacgtgcacacgctcaatgcctcctcaatgcaactgtcaagata

SEQ ID NO: 255535 - DNA, 375 bp, Glycine max
gacacaactaactaagacagtcttccatagccccccaaaaatgaagagcaccatcttctttgctctctttctcttttgtgccttcaccacggcatagctaccttcagccatcgctgatttcgtgctcgataatgaaggtaaccctcttgaaaatggtggcacatattatatcttgtcagacataacagcatttggtggaataagagcagccccaacgggaaatgaaagatgccctctcactgtggtgcaatctcgcaatgggctcgacaaagggattggtacaatcatctcgtccccatatcgaatccgttttatcgccgaagggcatcctttgagccttaagttcgattcatttgcagttaaaatgctgtgtgt

SEQ ID NO: 255536 - DNA, 340 bp, Glycine max
ggagttttcaagttggaattatttttgccagaagaatatccaatggctgctccaaaggttaggtttctgacaaaaatatatcatccaaacattgataagcttggcaggatatgtcttgacattctgaaagataagtggagtcctgcccttcagattcgcactgtacttttgagctttccagtatcaacctgtgtttcacttctataagatgtaatgatacacgcagagaaatagagatatgcatgcatgcagattaccagtattcaagctcttctaagtgcaccaaacccaagatgattcgctttctgagaacattgccaagcattgggaatctaatgag

SEQ ID NO: 255537 - DNA, 314 bp, Glycine max
gactttgagttcgaactaaacaattcagttcaatctgcctcgatcatggagaggaaaacatttgggtttttgttcatgctcctccttgtcttagcttctgatgtgatggtgaaaatagcagaggcgagtgattgcttgacaatgaggcacgggttccacggtagatgcttattcgacaggcaatgtgcacatgtgtgcaagatcgatggtttcatccgtggtcagtgccgaggtcctcttcgcaaatacatatgcatcatgccatgttgattgaaattactactgccaaataggccattaaataaacttacaaa

SEQ ID NO: 255538 - DNA, 390 bp, Glycine max
ggttctagtgtgtgattgtttgttgttgtaactcgttcttcttcttttgttgttctgtgtttgtgtttgttttttctctcacctgaaaatgtcttgctgcggtggtaactgtggttgcggaagctcctgcaagtgcggcaacggctgcggatgctgcaagatgtacccagacttgagctacactgagtcaaccaccatcgagaccttggtcatgggagtggcacctgttaaggctcaatttgagggtgctgaaatgggtgtgcccgctgagaacgatggctgcaaatgtggaccaaactgctcctgcaacctctgcacttgcaattgatgttttgggagaacaagcttcaatcagagatagcccttaattatgaataatgattaactatt

SEQ ID NO: 255539 - DNA, 164 bp, Glycine max
gatcgagaactagttcaatatcctagtataccttaataaataatttaagatactatgatgagagcacggttcccattactgttgctgggacttgttttcctggcttcagtttctgtctcatttggcattgcttactgggaaaaagagaacccaaacacaacaag

SEQ ID NO: 255540 - DNA, 247 bp, Glycine max
gacagcaaaaacaattaataaagatgagtttgaagaacaacatggtggtgctaaaggtgtgtttgttgcttcttttccttgtgggggttacaactgcacgcatggaactgagcttcttcaaaagtgatcagtcatcaagttatgatgatgatgagtattcaaaaccatgctgtgatctctgcatgtgcacacgctcaatgcctcctcaatgcagttgtgaagatattaagctgaattcatgccactc

SEQ ID NO: 255541 - DNA, 362 bp, Glycine max
gataataacacgcaattttcatttttctctctcccttagtcaaagggattcatcgttcttcttcccaggttatttagaaaagcaaaatggtgaagatttgctgcattggtgctggatatgtggggggtcctactatggcagtcattgcacttaagtgcccatccattgaagtcgctgttgttgatatctctaaatcccgcattgcagcctggaacagcgaccagcttcctatctatgaacctggccttgatggtgttgtgaagcaatgccgtggcaagaacctcttcttcagcactgatgttgaaaagcatgtctttgaggctgacatagtgtttgtctctgtcaaaacccaaacaaaactc

SEQ ID NO: 255542 - DNA, 277 bp, Glycine max
gacagcaaaaacaattaataaagatgagtttgaagaacaacatggtggtgctaaaggtgtgtttgttgcttcttttccttgtgggggttacagctgcacgcatggaactgagcttcttcaaaagtgatcagtcatcaagttatgatgatgatgagtattcacaaccatgctgtgatctctgcatgtgcacacgctcaatgcctcctcaatgcagctgtgaagatattaggctgaattcatgccactcagattgtaagagctgtatgtgcacacgctc

SEQ ID NO: 255543 - DNA, 349 bp, Glycine max
ggacagcaaaaacaattaataaagatgagtttgaagaacaacatggtggtgctaaaggtgtgtttgttgcttcttttccttgtgggggttacagctgcacgcatggaactgagcttcttcaaaagtgatcagtcatcaagttatgatgatgatgagtattcaaaaccatgctgtgatctctgcatgtgcacacgctcaatgcctcctcaatgtagctgtgaagatattaggctgaattcatgccactcagattgtaagagctgtatgtgcacacgctcacagccaggacagtgtcgttgtcttgacaccaacgacttctgctacaaaccttgcaagtccagagatgact

SEQ ID NO: 255544 - DNA, 353 bp, Glycine max
gataagggcacccaattttcaattttcactctcccttaatcaaagggattcatcgttcctcctcccacgttacttacaaaagcaaaatggggaagatttgctgcattggtgctggatatatggggggtcccacgatggcagtcattggacttaagctgcccatccattgaaatccctgttgttgagatctccaaatcccgcattgcagcctggaaaagcgaccagcttcctatctatgaaccctgccttgatggtgttgtgaagcaatgccgtggcaagaacctcttcttcaacactgatgttgaaaagcatgtccttgaagctgacataatggttgtccccgtcaacacccc

SEQ ID NO: 255545 - DNA, 418 bp, Glycine max
gaagtaaaaaaactaccctcgatccatgcctcaaaagggttgataataagtaaaaaaaaatcaatgaattcatgataaaacccttctgcgtttttttattataaatttttttgtcaataaagggatcaaggggttgggggatcaaatggtaaagttcttttgttggtaaattggaggattagaaacatgactattgctttccaattagctgtttttgcattaattgctatttcatttattttaatgattagtgtacctgttgtatttgcttctcctgaaggttggtcgaataacaaaaatgttgtattttccggtacatcattatggattggattagtgtttctcgtgggtaatcttaattctctcatttcctgaagccctatttagtctagatcaaaaacgaaatgaaccctccccc

SEQ ID NO: 255546 - DNA, 341 bp, Glycine max
gatgcaactgaataattaagaaaagccatttccatagcagcctaagaaaatgaagagcactagcttgttcgctatctttctactttgcgccttcacctcatacctaccttccgccaccgcccaggacgtgctcgacgtggatggcgatccgattcggaacggtttcatatactacgttttgccggcaataagaggaaacggtggcggaatagaacgagccgcactcgggaaagacacttgccctatcactgtagtgcaatctcccaatccaaactctaaggggttagaaaataagtttgaatctgcataccccgcctattacataaacgaaaccctaattt

SEQ ID NO: 255547 - DNA, 338 bp, Glycine max
agaaggggggagttgagttgagaaggaaaggctgaagaacacatagagagagagagagaagtgcagaaaaaatgagactgttcgatccatggcctgttttcttcaagagagaatggaagcggaattggcccttcttggttggattcgccatcaccggaactctcatcaccaaactttcccttggtctctctgaggaggaagccaaaaagtcgaaattcgtccaggcacacaagaggtgactttagaatggaagatttgcagtggctttgcacattgtattagatgtgtgaagagagcttttgtttgtaataaatgaagagagatgttgtatacactcc

SEQ ID NO: 255548 - DNA, 321 bp, Glycine max
gattcacacaactaactaagaaagtcttccatagccccccaaaaatgaagagcaccatcttctttgctctctttctcttttgtgccttcaccacctcatacctaccttcagccatcgctgatttcgtgctcgataatgaaggtaaccctcttgaaaatggtggcacatattatatcttgtcagacataacagcatttggtggaataagagcagccccaacgggaaatgaaagatgccctctcactgtggtgcaatctcgcaatgagctccacaaagggattggaacaatcatctcgtccccatatcgaatccgtgttatcg

SEQ ID NO: 255549 - DNA, 312 bp, Glycine max
  unsure (1)..(312): unsure at all n locations
gacagcanaaacaattaataaagatgagtttgaagaacaacatggtggtgctaaaggtgtgtttgttgcttcttttccttgtgggggttacagctgcacgcatggaactgagcttcttcaaaagtgatcagtcatcaagttatgatgatgatgagtattcaaaaccatgctgtgatctctgcatgtgcacacgctcaatgcctcctcaatgcagctgtgaagatattaggctgaattcatgccactcagattgttagagctgtatgtgcacacgctcacagccaggacagtgtccttgtcntgacaccaacg

SEQ ID NO: 255550 - DNA, 318 bp, Glycine max
attcacacaactaactaagaaagtcttccatagccccccaaaaatgaagagcagcatcttctttgctctctttctcttttgtgccttcaccacctcatacctaccttcagccatcgctgatttcgtgctcgataatgaaggtaaccctcttgaaaatggtggcacatattatatcttgtcagacataacagcatttggtggaataagagcatccccaacgggaaatgaaagatgccctctcactgtggtgcaatctcgcactgagctcgacaaaaggattggtataatcatctcgtcgccatattcaatccgttttat

SEQ ID NO: 255551 - DNA, 407 bp, Glycine max
gattcacacaactaactaagaaagtcttccatagccccccaaaaatgaagagcaccatcttctttgctctctttctcttttgtgccttcaccacctcatacctaccttcagccatcgctgatttcgtgctcgataatgaaggtaaccctcttgaaaatggtggcacatattatatcttgtcagacataacagcatttggtggaataagagcatgcccaacgggaaatgaaagatgccctctcactgtggtgcaatctcgcaatgagctcgacaaagggattggaacaatcatctcgtcaccatatcgaatccgttttatcgccgaacgccatcgtttgagccttaagttcgattcatttgcagttataatgctgtgtgttgggattcctacggagtggtccgttgtg

SEQ ID NO: 255552 - DNA, 425 bp, Glycine max
gatagacataaattaagaaatcaaagagacagaaagttgagagagaagtgttcacgtctttgagaaatgggtgcttcggcatcggtcacagaaaaatccatccatgaattcatggtcaaggatgctaagggcagagacgtgaacctcagcacctacaaagggaaggttcttcttgtagttaacgtcgcttcaaaatgtggatttacaaattccaattacacccagttaactgagctttacagcaaatataaagacagaggtcttgagatactggcatttccatgcaaccagtttctgaaacaagagcccgggagtagccatgaggcagaggaatttgcctgtacaaggtacaacgctgagtatcccatttttggaaaggtacgtgtcaatggacctgatacagcacctgtccacaaattccttaa

SEQ ID NO: 255553 - DNA, 307 bp, Glycine max
  unsure (1)..(307): unsure at all n locations
ggctgccgctctctgagaaaaacagatagtgtgggagagagaagagcggaagagaaaatgacgaccaggttcaagaagaacaggaagaagagaggtcacgtcagcgccggacacggccgtatcggaaagcaccgcaagcatcccggaggtcgcggtaacgccggtggcatgcatcaccaccgtatcctcttcgacaagtaccatcctggtttcttcgggaaggtangcatgcgctactttcacaaacttcgcaacaaattctacaatccgatcatcaacatcgaacagctgtgggcccccctccccc

SEQ ID NO: 255554 - DNA, 290 bp, Glycine max
ccggggcgatactgacactggcaattactgaaggacatgcattcattgaacttgttggcctaaagtaacaacatcaggaccaggaacagggggaacaacctttggaactgcggcaatatagacccgaactgtctgaacaagatatatttgtaaacccaccacgttacccacttgtgctcagcgctatctcaaatctgaacttctttgctactgctatccaatgcccaccacaatcacacgcacttcctcctcacgttcgcaatacactctgctcaaccatatactttcct

SEQ ID NO: 255555 - DNA, 169 bp, Glycine max
acataaagggacagcaaatacacttactaaagatgagtttgacgaacaacatggtggtgctaaacgtgtgtttgttgcttcttttccttgtgggggttacagctgcacgcatggaactgagcttcttcaaaagtgatcagtcatcatcttatgatgatgatgactattc

SEQ ID NO: 255556 - DNA, 294 bp, Glycine max
gattcacacaactaactaagaaagtcttccatagccccccatgaaatgaagagcaccatcttctttgctctctttcacttttgtgccttcagcatctcatacctaccttcagccagcgctgatttcgtgctccataatgagcgtagccctcttgataatggtggtacatattatatcttgtcagacacaatacgatttggcggactaagagcagctccatgggtaaatgaaagatgccctcgcactgtggtgcactcgcgcactgacctcgatcaacggattggattaatcatt

SEQ ID NO: 255557 - DNA, 412 bp, Glycine max
  unsure (1)..(412): unsure at all n locations
gattcacacaactaactaagaaagtcttccatagccccccaaaaatgaagagcaccatcttctttgctctctttctcttttgtgccttcaccacctcatacctaccttcagccatcgctgatttcgtgctcgataatgaaggtaaccctcttgaaaatggtggcacatattatatcttgtcagacataacagcatttggtggaataagagcagccccaacgggaaatgaaagatgccctctcactgtggtgcaatctcgcaatgagctcgacaaagggattggaacaatcatctcgtcnccatatcgaatccgttttatcgccgaaggccatcctttgagccttaagttcgattcatttgcagttataatgctgtgtgttggaattcctaccgagtggtctgttgtggagga

SEQ ID NO: 255558 - DNA, 323 bp, Glycine max
ggaagaagcagagggagtagcggcattaaaaatgcagatcttcgtgaaaactctgacagggaagactataaccctcgaggtcgagagcagcgacaccatcgacaatgtcaaggccaagattcaagacaaggaaggcattcctccggatcagcagcgtttgattttcgccggaaagcagcttgaagatggaaggatcctggccgattacaacatccagaaggaatcaacccttcatctcgtcctcaggcttcgtggtggcgtcattgagccttccctcatggctttggctcgcaaatacaaccaggacaagatgatttgccgca

SEQ ID NO: 255559 - DNA, 328 bp, Glycine max
gacagcaaaaacaattaataaagatgagtttgaagaacaacatggtggtgctaaaggtgtgtttgttgcttcttttccttgtgggggttacagctgcacgcatggaactgagcttcttcaaaagtgatcagtcatcaagttatgatgatgatgagtattcaaaaccatgctgtgatctctgcatgtgcacacgctcaatgcctcctcaatgcagctgtgaagatattacgctgaattcatgccactcaaattgtaagagctgtaagtgcacacgctcacagccaggacagtgtcgttgtcttgacgacaacaacttcggctacaaacc

SEQ ID NO: 255560 - DNA, 325 bp, Glycine max
gattcacacaactaactaagaaagtcttccataggcggccaaaaatgaagagcaccatcttctttgctctctttctcttttgtgccttcaccacctcagacctaccttcagccatcgctgatttcgtgctcgataatgaaggtaaccctcttgaaaatggttgcacatattatatcttgtcagacataatatcatttggtggaataagaacatccccagcgggaaatgatagatgccctctcactgtggtgcaatctcgcaatgagctgcgaaaatggattgggccaatcatcttgtccccatcatcgagttcgtttttatccgc

SEQ ID NO: 255561 - DNA, 253 bp, Glycine max
cgggacaagaaataaagataacacgatgggtttgaagaacaacatggtggtgctaaaggtgtgtttggtgctacttttccttgtggggggtactaccagtgccaactttaggctgaataaccttggcctgctcatgaaaagcgatcatcatcaacactcaaatgatcatgagtcttcacaaccatgccgtgatcaatgcgcatgcacaaagtcaaaccctcctcaatgccgctgttcacatatgacgctgaac

SEQ ID NO: 255562 - DNA, 320 bp, Glycine max
cagggagagcagcaacaattaataaagatgagtttgcagaacaacatggtggtgctaaaagtgtgtttgttgcctcatttccttgtgggggttacagctgcacgcatggaactgagcttcttcaaaagtgatcagtcatcaagttatgatgactgatgagtattcaaaaccatgctgtgatctctgcatgtgcacacgctcaatgccacctcaatgcaactgtgaagatattatgctgaacatcatgccactcacatatgtacagctgtatgtgcacactcacacagccataacagtgtctctgtcttgacatcaacgac

SEQ ID NO: 255563 - DNA, 309 bp, Glycine max
gatgaacggtgaaccgaatcccccttcgaagtgaattatattgcagcgaatcacacacactctgaacaacgcccaccatgcacgccagtgataggtttaacatcaattcccagcttgagcatctccaagccaaatatgttggaactggccatgccgatttgaacagatttgagtgggcagtgaacattcaacgagataactatgcatcatatattggacactaccctttactgtgattctttgctattgctgaaaatgaatctatttggaagagaacgctacagccttatgcagaaaaatgctccctgc

SEQ ID NO: 255564 - DNA, 308 bp, Glycine max
gacacttactagtactaagcatggagtcctcaaagatctatgcttacctcttcctctgcatgatctttctctcttccgccactcccattcacggttgtggctactgtggcaaaccccccaaaaagcacaagcctggtaaaacaccagagacacccaaaatacccgttgttaagccagcagtcaccatccctcccaataatgttcctcccgttgttcgtccatcaatagtgaagcccaccaggtagtctccctccaattccaattattaacccaacaaccacaccacggaatggagggaacactccatg

SEQ ID NO: 255565 - DNA, 327 bp, Glycine max
gacagcagaaacaattaatacagatgagtttgaagaacaacatggtggtgctaaaggtgtgtttgttgcttcttttccttgtgggggttacagctgcacgcatggaactgagcttcttcaaaagtgatcagtcatcaagttatgatgatgatgagtattcaaaaccatgctgtgatctctgcatgtgcaaacgctcaatgccttcccaatgcagctgttaagatattaggctgaattcatgccactcagattgtaacagctgtatgtgcacacgctcatagccaggacagtgtcattgtcgtgacaccaaccacttctgccacaaac

SEQ ID NO: 255566 - DNA, 400 bp, Glycine max
ggtagactcgaatcctaaaaaattaaaccctagctagagagagagagagagagggtttaaagcttctttctggcgcaacgcaattcatagcaaaaacagagagtgagagagggagatggggagcgacagcgaggcagagaagtcggtgcagaaagagaaggagaagaagaagatgttggccctggctcccattgctaaacctcttgctgggaagaagctttgcaagcgaaccctaaaacttgttcgtagagctgccgaacacaaatgcttgaaaagaggagtgaaggaggtcgttaaaagtataaggagaggtcataaaggattgtgtgtgattgctgggaacatatcaccgattgatgtcatcactcatgttcctaatctttgtgaagagtctgacatt

SEQ ID NO: 255567 - DNA, 404 bp, Glycine max
  unsure (1)..(404): unsure at all n locations
gccactttgagttcgaactaaacaattcaattcaatctgcctcgatcatggagaggaaaacatttgggtttttgttcttgctcctccttgtcttagcttctgatgtgacggtgaagagagcagaggcgaaagattgcttgacaaggaggcacgggttccagggtagatgcttattcgacaggcaatgtgcacatgtgtgcaggagcgatggtttcatcggtggtcagtgccgaggccctcttcgcaaatgcttttgcagcaggccatgttgatcgaaattactactgccaaagaggccatgaaataaacaaacaaacaaataaataaatagctctaaccgacacatatgtacgtagtgtcggggttctagctagctacgtangtacgtgtgtcntttgttatcg

SEQ ID NO: 255568 - DNA, 331 bp, Glycine max
gggagaaggggacagcaaaaacaattaatacagatgagtttgaagaacaacatggtggtgctaaaagtgtgtttgttgcttcttttccgtgtgggggttacagctgcacgcatggaactgagcttcttcaaaagtgatcagtcatcacgttatgactatgatgactattcataaccatgctagtgatcactgcatgtgcacacgctcaatgcctcctcaatgcagctgtgaagatattacgctgaattcatgccactcatattgttagagctgtatgtgcacacgctcacagccactacaatgtccttgtcttgacaccaaggacttctgc

SEQ ID NO: 255569 - DNA, 411 bp, Glycine max
gacacgcagttgtattgtagaactgaacaagggtttctctttctctttctctgtctgcttcttcactttctctcgtttcaatcgaaaaaaatcatgggcagaaaattcttcgtcggtggcaactggaaatgcaatgggaccactgaggaggtgaagaagattgttactactttaaatgaagctaaagtccctggagaagatgttgtagaagttgttgtgagccctccttttgtgttccttccttttgtaaaaagtttgctgcgccctgatttccatgtctcggcccaaaattgttgggttcgcaaaggtggtgcttatactggagaggttagtgctgaaatgcttgttaatttgggaattccttgggttattattggtcactctgaacggaggcagcttttaaatgaatca

SEQ ID NO: 255570 - DNA, 325 bp, Glycine max
gacagcaaaaacaattaataaagatgagtttgaagaacaacatggtggtgctaaaggtgtgtttgttgcttcttttccttgtgggggttacagctgcacgcatggaactgagcttcttcaaaagtgatcagtcatcaagttatgatgatgatgagtattcaaaaccatgctgtgatctctgcatgtgcacacgctcaatgcctcctcaatgcagctgtgaagatcttaggctgaactcatgccactcagattgttaaagctgtatgtgcacacactcatatccaggacaatgtcgttgtcttgataccaactacttctgctacaa

SEQ ID NO: 255571 - DNA, 202 bp, Glycine max
gattcacacaactaactaagaaagtcttccatagccccccaaaagtgaagagcaccatcttctttgcgcgctttctcttttgtgccttcacgacctcatacctatcttcagccatcgctgatttcgtgctcgatactgatcggagccctcttgatgatggtgggacatattagtatcttgtcagacataacagcatttggtg

SEQ ID NO: 255572 - DNA, 432 bp, Glycine max
gattcacacaactaactaagaaagtcttccatagccccccaaaaatgaagagcaccatcttctttgctctctttctcttttgtgccttcaccacctcatacctaccttcagccatcgctgatttcgtgctcgataatgaaggcaaccctcttgaaaatggtggcacatattatatcttgtcagacataacagcatttggtggaataagagcagccccaacgggaaatgaaagatgccctctcactgtggtgcaatctcgcaatgagctcgacaaagggattggaacaatcatctcgtccccatatcgaatccgttttatcgccgaaggccatcctttgagccttaaattcgattcatttgcagttataatgctgtgtgttgggattcctaccgagtggtccgttgtggaggatctaccagaaaggaactgct

SEQ ID NO: 255573 - DNA, 278 bp, Glycine max
gaagtacaaaacgcaataccctaatttgtttctctgtctctgtctctgtctctctctccattcgtgctttcagctccggcaatctctcttccggcgccgccgctatctcagccgcgcaccaatcttcaatttgattacttgggtcaacgatttctgtcaatctcaatcatggcaactagacttcagtttgaaaataaatgtgaacttggagtcttctctaaacttaccaatgcctactgtttggttgccactggtggttctgaaagcgtctacagtgt

SEQ ID NO: 255574 - DNA, 388 bp, Glycine max
aggacgaagaagagcgtggagacgtacaagatctacatcttcaaggtgctgaagcaggttcaccctgacatcgggatctccagcaaggccatggggatcatgaacagcttcatcaacgacatcttcgagaagctcgctcaagaatcttccagactcgcgcgctacaacaagaagcctaccatcacctctcgtgaaatccagactgcggttcgtcttgtgctccctggtgagctcgccaagcacgctgtctccgaaggcaccaaggctgtaaccaagttcactagctcttgaacgcgtttctgagaattttagggtttacgagatgtatattttgggagaattttaattttatatttatcctcttttataaaaaaaacatccttccctg

SEQ ID NO: 255575 - DNA, 370 bp, Glycine max
  unsure (1)..(370): unsure at all n locations
gacagcaaaaacaattaataaagatgagtttgaagaacaacatggtggtgctaaaggtgtgtttgttgcttcttttccctgtgggggttacagctgcacgcatggaactgagcttcttcaaaagtgatcagtcatcaagttatgatgatgatgagtattcaaaaccatgctgtgatctctgcatgtgcacacgctcaatgcctcctcaatgcagctgtgaagatattaggctgaattcatgccactcagattgtaagagctgtatgtgcacacgctcacagccaggacagtgtcgttgtcntgacaccaacgacttctgccacaaaccttgcaagtccagagatgactagaaaaaactaatagctctctc

SEQ ID NO: 255576 - DNA, 428 bp, Glycine max
gattcacacaactaactaagaaagtcttccatagccccccaaaaatgaagagcaccatcttctttgctctctttctcttttgtgccttcaccacctcatacctaccttcagccatcgctgatttcgtgctcgataatgaaggtaaccctcttgaaaatggtggcacatattatatcttgtcagacataacagcatttggtggaataagagcagccccaacgggaaatgaaagatgccctctcactgtggtgcaatctcgcaatgagctcgacaaagggattggaacaatcatctcgtccccatatcgaatccgttttatcgccgaaggccatcctttgagccttaagttcgattcatttgcagttataatgctgtgtgttggaattcccaccgagtggtctgttgtggaggatctacacaaagacctg

SEQ ID NO: 255577 - DNA, 389 bp, Glycine max
gactctcatcacattattctatatcaattttggttaagagtcttgaaaaagcaagagaaaaaaaaataccaaccatggcaaccatttctgatcaacctagagggtcctactcctatggaacctcatatggagcaccctatggaaccacgtatgagaccaacaccagcattaacaacccaccttcacgccaaacagtgaagttcataactgctgccactattggcatcacactcttgctcctgtctgggttgaccctcacaggcactgtcataggtttgatcattgcaacccctcttcttgttatcttcagccccaatccttgtcctgctgcgtttgtgctgttcctagttgcctctggctttttgtctctggggctgtggtgttgctgc

SEQ ID NO: 255578 - DNA, 152 bp, Glycine max
aagacgacagaaagggatagcacggggaattcagaaagatgagtttgaagaacaatatggtggtgctaaccgtgtgtttgttgcgtcctttccctgtcgcggtgacaactggacgcatggaactgaccttcttcaaacgtgatcagtcatca

SEQ ID NO: 255579 - DNA, 336 bp, Glycine max
gacagcaaaaacaattaataaagatgagtttgaagaacaacatggtggtgctaaaggtgtgtttgttgcttcttttccttgtgggggttacagctgcacgcatggaactgagcttcttcaaaagtgatcagtcatcaagttatgatgatgatgagtattcaaaaccatgctgtgatctctgcatgtgcacacgctcaatgcctcctcaatgccgctgtgaagatattaggctgaattcatgccactcatattgtaagagctgtatgtgcacacgctcacagccaggacagtgtcgttgtcttgacaccaacgacttctgctacaaaccttgcaact

SEQ ID NO: 255580 - DNA, 410 bp, Glycine max
gactctcattttttcagtttatcagtttctcaatcgttagatctcatcttatactcaccggcgagtccatctcgcgccagcgtcgacgccgctccggccaccgctccggccaccgcctttggttccctcactttctcgtccttcttcttctcagaaatatgccttctcagaaagttgaaacgggtcatcaagacacggtccatgatgttgcaatggattactatggtaagaggctggccacggcttcatcagatcacacaattaagataattggggtgagtaatacggcctctcagcatctcgcaacattgactggtcaccaaggacctgtttggcaagtggcgtgggctcaccctaagtttggtttcccacttgcatcgtgttcctatgatgggcgtgtcattgtttgg

SEQ ID NO: 255581 - DNA, 287 bp, Glycine max
gggcattggtacaagtggtgaattgcaatggtgagagagtgtttgatggagagctgcaagagggaggggtgctgatcgttccacaaaactttgcggtggctgcaaaatcccagagcgataactttgagtatgagtcattcaagaccaatgatagaccctcgatcggaaaccttgcaggggcaaactcattgttgaacgcattgccagaggaagtgattcagcacacttttaacctaaagagccagcaggccacgcaggtgaagaacaacaaccctttcagcttccct

SEQ ID NO: 255582 - DNA, 400 bp, Glycine max
aaaaaagagaagaagatgggtttgaagaacaacatggtggtgctaaaggtgtgtttggtgctacttttccttgtggggggcactactagtgccaacttgaggctgagtaagcttggcctgctcatgaaaagtgatcatcatcaacactcaaatgatgatgagtcttcaaaaccatgctgtggtcaatgcgcatgcacaaagtcaaaccctcctcaatgccgctgttcagatatgaggctgaattcgtgccattcagcttgcaaatcttgtatttgcgcattatcgtatcctgcacagtgtttttgtgttgacataaccgatttctgctatgaaacttgcaaacccagtgaggatgacaaggaaaactactaatgaacaagtgttatgcatgtaagctctc

SEQ ID NO: 255583 - DNA, 403 bp, Glycine max
cccacgcaaccgtacagctgtcagtagaggagagaatgggacacatcaagagcagaatgaccaagttcacaatcctcctcatctctcgtctcctctgcatcgcccagacttgcagcgcctccaaatggtaggaccagcaagatacctgccgcaggcagctccagggggtgaatctcacgctctgcgagaagcacatcatggataagatccaaggccgcggtcgatgatcgatgatgatgacgacgacaatcacattctcaggagcatgcggggaatattcagctatataacgaggaaccattgaatacacgatgacgaacaaaagattgcgacatgcagaactgctgcacagaaatgagcgagctgagaaacgccaaatgcgactgcatagcaccgcacaaga

SEQ ID NO: 255584 - DNA, 311 bp, Glycine max
gacagcaaaaacaattaataaagatgagtttgaagaacaacacggtggtgctaaaggtgtgtttgttgcctcttttccttgtgggggttacagctgcacgcatggaactgagcttcttcaaaagtgatcagtcatcaagttatgatgatgatgagtattcaaaaccatgctgtgatctctgcatgtgcacacgctcaatgcctcctcaatgcagctgtgaagatattacgctgaattcatgccactcacattgtaacagctgtatgtgcacacgctcacaggcacgacagtgtccttgtcttgacaccaac

SEQ ID NO: 255585 - DNA, 349 bp, Glycine max
ggcacaagtgagtttgttgatcgagataactagaaacagtgtgatgaaaatgaaggtccttgttttcttcgttgctacaattttggtagcatggcaatgccatgcgtacgatatgttccctctccgaatgaacactggctatggtgcccgtactccggaggtgaaatgcgcaagttggaggcttgctgtggaagcacacaacatctttggctttgagaccattcctgaagagtgcgttgaagcaacaaaggaatacatccatggcgaacaatgtagatcagacttcaaaacagttaaccaacaagcttacttttatgccagagacctcgaagtccatcccaaggacaca

SEQ ID NO: 255586 - DNA, 395 bp, Glycine max
gcaatgttcgtgccacactacaacctgaacgcgaacagcataatatacgcattgaatggacgggcattgatacaagtggtgaattgcaacggtgagagagtgtttgatggagagctgcaagagggacgggtgctgatcgtgccacaaaactttgtggtggctgcaagatcacagagtgacaacttcgagtatgtgtcattcaagaccaatgatacacccatgatcggcactcttgcaggggcaaactcattgttgaacgcattaccagaggaagtgattcagcacattttcaacctaaaaagccagcaggccaggcagataaagaacaacaaccctttcaagttcctggttccacctcaggagtctcagaagagagctgtggcttagagcccttt

SEQ ID NO: 255587 - DNA, 418 bp, Glycine max
gatagatagagagcgcggcataacctaaacttaccctccttctctctgtgtgtgtgcgcatcaaacgcaaccagaagcagccatggccactgcaagaactgtgaaggacgtttctcctcatgagttcgtcaaagcttactcttctcacctcaagcgatctggcaagatggagctgccagagtggactgatattgtgaaaactgcaagatttaaggagttggctccttatgatcctgactggtactatgtcagagctgcttccatggcaagaaagatctacttgagaggaggacttggtgttggtgcctttcagaggatttatggtgggagcaagaggaatggtagccgccctcctcatttctgcaagagcagtggtgctgttgctcgtcacattcttcaacagttgcagaacatgagc

SEQ ID NO: 255588 - DNA, 360 bp, Glycine max
ggaagcatttggtggagcttccaggtgcaaagaccaaattgtctctgtggaaggctgatcttgctcaagagggaagctttgatgaagccattaaaggctgcactggagttttccacgtggcaacccccatggattttgactccaaggaccctgagaatgaagtgataaagcctacaataaacggattgctagacatcatgaaagcatgcgtgaaggccacaactgtccgaaggcttgtactcacttcctcagcgggaactgtggatgttacggaatacccaaaccctgtcatcgatgagaactgttggagccatgttgacttctgcataaaggtcaaaatgaccgggttgatgtaatttg

SEQ ID NO: 255589 - DNA, 288 bp, Glycine max
gacagcaaaaacaattaataaagatgagtttgaagaacaacatggtggtgctaaaggtgtgtttgttgcttcttttccttgtgggggttacagctgcacgcatggaactgagcttcttcaaaagtgatcagtcatcaagttatgatgatgatgagtattcaaaaccatgctgtgatctctgcatgtgcacacgctcaatgcctcctcaatgcagctgtgaagatattaggctgaattcatgccactcagattgttagagctgtatgtgcacacgctcacagccaggac

SEQ ID NO: 255590 - DNA, 326 bp, Glycine max
gacagcaaaaacaattaataaagatgagtttgaagaacaacatggtggtgctaaaggtgtgtttgttgcttcttttccttgtgggggttacagctgcacgcatggaactgagcttcttcaaaagtgatcagtcatcaagttatgatgatgatgagtattcaaaaccatgctgtgatctctgcatgtgcacacgctcaatgcctcctcaatgcagctgtgaagatattaggctgaattcatgccactcagattgtaagagctgtatgtgcacacgctcacagccaggacagtgtctttgtctccgacacaacgactttctgcacaaa

SEQ ID NO: 255591 - DNA, 374 bp, Glycine max
gacagcaaaaacaattaataaagatgagtttgaagaacaacatggtggtgctaaaggtgtgtttgttgcttcttttccttgtggggttacagctgcacgcatggaactgagcttcttcaaaagtgatcagtcatcaagttatgatgatgatgagtattcaaaaccatgctgtgatctctgcatgtgcacacgctcaatgcctcctcaatgcagctgtgaagatattaggctgaattcatgccactcagattgtaagagctgtatgtgcacacgctcacagccaggacagtgtccttgtcttgacaccaacgacttctgctacaaaccttgcaagttcacaagatgactacaaaaactaatacctctctcaaaat

SEQ ID NO: 255592 - DNA, 321 bp, Glycine max
gacaacagaacagattaataatcctcaatcagcttgtggcaatcgtgggctaggggatgctttcaggtgcagtacctgcccttacaagggactgcctgccttcaaattgggcgagaaggtagcactgtccggtaacttccttgctgctgacatataaatggataaagttgtagtacgctttgtcatgggaatgatattattatagaatttaattatttagtatggaattgtcatcagttatgttaatgctagcagaaccattcatccaagttgtggttttgatacaattttacatatgagcatacgagagattcaagtttt

SEQ ID NO: 255593 - DNA, 350 bp, Glycine max
ggattgattccctcattcttcatccatagacatggccaccgtcacttctgcagccgttgctattccctcattcactggcctcaagggaagcgcaggcaaagtgagtgccgcagttaaagtctcagctccccaagccacaacgttgggcatcaacgcttcgctgaaagacgttggagtcgctgttgtggccactgtcgcgagtgcagtgctggctaacaacgccatgggcattgaagtgttgctgggtggtgatgacaggtcactggctttcgttcccaacaatttctccgtgggctctggggaaaagatcgtgttcaagaaaaacgcacgtttcccccacaacgttgtgt

SEQ ID NO: 255594 - DNA, 430 bp, Glycine max
gacagcaaaaacaattaataaagatgagtttgaagaacaacatggtggtgctaaaggtgtgtttgttgcttcttttccttgtgggggttacagctgcacgcatggaactgagcttcttcaaaagtgatcagtcatcaagttatgatgatgatgagtattcaaaaccatgctgtgatctctgcatgtgcacacgctcaatgcctcctcaatgcagctgtgaagatattacgctgaattcatgccactcagattgtaagagctgtatgtgcacacgctcacagccaggacagtgtcgttgtcttgacaccaacgacttctgctacaaaccttgcaagtccagagatgactagaaaaactaatagctctctcaaatggacgaagcccctttaggctttgtctgttatgttaggggagacaaattaaacaagaa

SEQ ID NO: 255595 - DNA, 264 bp, Glycine max
gattcacgcaactaaataagaaatgaagagtactatcttctttgctctctttctagtttgtgccttcaccatctcatacctgccttcagccaccgctcagttcgtgctcgacactgatgatgatcctcttcacaacggtggcacatactatatgttgccagttatgacatgaaagggcggtggaatacaagtagattcatctggaaaagaaatatgccctctcactgttgtgcaatcagccaatggagttcgatcaggggattg

SEQ ID NO: 255596 - DNA, 393 bp, Glycine max
gattcacacaactaactaagaaagtcttccatagccccccaaaaatgaagagcaccatcttctttgctctctttctcttttgtgccttcaccacctcatacctaccttcagccatcgctgatttcgtgctcgataatgaaggtaaccctcttgaaaatggtggcacatattatatcttgtcagacataacagcatttggtggaataagagcagccccaacgggaaatgaaagatgccctctcactgtggtgcaatctcgcaatgagctcgacaaagggattggaacgatcatctcgtccccatatccaatccgttttatcgccgaagggcatcctttgagccttaagttcgattcatttgcagttaaaatgctgtgtgttggaattcctaccg

SEQ ID NO: 255597 - DNA, 416 bp, Glycine max
gagagagtgtagtgttgttgaggttttttgtagcagaattcagtgcggtgtgttgtagcagcgattagaaggaaggaggaaagatgaacacagacatcactgcatcgacgaagccagagtacccagtcattgatcgcaaccctcctttcaccaaagtcgtcggcaacttcaacaccctcgactatctccgattcgtcacaatcaccggcgtttccgtcaccgtcggccacctctccgggattaagcctggaattaggggtccttcgatggtgacagggggtttgatcggtgtgatgggtgggttcatgtatgcttaccagaactccgctgggagactcatgggtttcttccccaacgatgattaggtagctccctacaacaaaaaataattcccttttttgtgctcatcagaaaac

SEQ ID NO: 255598 - DNA, 408 bp, Glycine max
gattcacacaactaactaagaaagtcttccatagccccccaaaaatgaagagcaccatcttctttgctctctttctcttttgtgccttcaccacctcatacctaccttcaaccatcgctgatttcgtgctcgataatgaaggtaacccccttgaaaatggtggcacatattatatcttgtcagacataacagcatttggtggaataagagcagccccaacgggaaatgaaaggtgccctctcactgtggtgcaatctcgcaatgagctcgacaaagggattggaacaatcatctcgtcgccatatcgaatccgttttatcgccgaaggtcatcctttgagccttaagctcgattcatttgcagttataatgctgtgtgttgggattcctaccgagtggtctgttgtgg

SEQ ID NO: 255599 - DNA, 415 bp, Glycine max
gattcatgcaactgaataattaagaaaagccatttccatagcagcctaagaaaatgaagagcactagcttgttcgctatctttctacttcgcgccttcacctcatacctaccttccgccaccgcccaggacgtgctcgacgtggatggcgatccgattcggaacggtttcatatactacgttttgccggcaataagaggaaacggtggcggaatagaacgagccgcactcgggaaagacacttgccctatcactgtagtgcaatctcccaatccaaactctaaggggttagaaattaagtttgaatctgcataccccgcctattacataaacgaaaccctaattttgcaaataaagttcagttacccacagcagtgtgaaagaaagaatccttggtgggccatttctaaggatat

SEQ ID NO: 255600 - DNA, 348 bp, Glycine max
gatatcagaagcgcagacctaggatttcggccgtttgctccccaaggaaagaagcagagtgtttcttttgaaatcagctagaaaagatgtcaggtgaagaggtagctgttgcagctgaggcacctgctgcttcaattccaggtgagccaatggacatcatgactgctctacagcttgtgctgagaaaatctctggcctatggtggtcttgcacgaggtcttcatgaaggtgctaaggtgatcgagaagcgtactgcacagctctgcgttctaccagaagattgtgaccaacctgattatgtgaaactggtgaaggctctttgtgcagagcacaatgttagccttttga

SEQ ID NO: 255601 - DNA, 324 bp, Glycine max
gattcacacaactaactaagaaagtcttccatagccccccaaaaatgaagagcaccatcttctttgctctctttctcttttgtgccttcaggacctcatacctaccttcagccatcgctgatttcgtgctcgataatgaaggtaaccctcttgaaaatggtggcgcatattatatcttgtcggacataagagcatttggtggaataagacgagcccgcaacgggaaatgaaagatgcgctctcactgtggtgcaatctcgcaatgagctcgacaaagggattggaacagtcatctcgtcgccatatcgaatccgttttatcgcc

SEQ ID NO: 255602 - DNA, 411 bp, Glycine max
gggtttttgtggatgtaggttttgaatggcaactgtgagaagtctgaagatcaagacaagtacctgcaaacgtatagtgaaggagctgcattcttatgagaaggaagttgagagagaagctgccaaaacagctgatatgacggaaaaaggagctgacccccatgatctcaagcaacaggaaaatgtgttggcagagtctaggatgatgattcctgactgccgcaagcgccttgaggccgctttggcagacttgaaaggaatattggctgagttggaggagtcagatgagaaggccagtcttgagattgatgaagctaagaacaccattgtagaagttgaaaaagtatttgaaacaacagaagattaacaacgttgtttgattagtgatcttgaaggaggatattggacctg

SEQ ID NO: 255603 - DNA, 404 bp, Glycine max
gggggcccggtggtgatcgcagtggtgctgttcgtgctgttaagcccggggcttctgtttcagatgccagccaggggaagggtagcagagtttgggaacatgcaaaccagtggggcctccattttggttcacgccatcatctactttggcctcatcactatcttcctcattgccattggcgttcacatctacactggctaactcctggatctggttcagtttcacccatctatgtttatctctgccttttaattagtctttttagctttacaataatttccttgtttgatctctatgtatcttatgtggggttgggtcatgggtgcccagaagacaacaatatattcagatcaggatgatgctgctgtgtgtgttcttttttttttttaccaagatagtatgga

SEQ ID NO: 255604 - DNA, 412 bp, Glycine max
gacagcaaaaacaattaataaagatgagtttgaagaacgacatggtggtgctaaaggtgtgtttgttgcttcttttccttgtgggggttacagctgcacgcatggaactgagcttcttcaaaagtgatcagtcatcaagttatgatgatgatgagtattcaaaaccatgctgtgatctctgcatgtgcacacgctcaatgcctcctcaatgcagctgtgaagatattaggctgaattcatgccactcaggttgtaagagctgtatgtgcacacgctcacagccaggacagtgtcgttgtcttgacaccaacgacttctgctacaaaccttgcaagtccagagatgactagaaaaactaatagctctctcaaatggacgaagccgctttaggctttgtttgttatgttacggg

SEQ ID NO: 255605 - DNA, 316 bp, Glycine max
gacagcaaaaacaattaataaagatgagtttgaagaacaacatggtggtgctaaaggtgtgtttgttgcttcttttccttgtgggggttacagctgcacgcatggaactgagcttcttcaaaagtgatcagtcatcaagttatgatgatgagtattcaaaaccatgctgtgatctctgcatgtgcacacgctcaatgcctcctcaatgcagctgtgaagatattaggctgaattcatgccactcagattgtaagagctgtatgtgcacacgctcacagccaggacagtgtcgttgtcttgacaccaacgacttctg

SEQ ID NO: 255606 - DNA, 414 bp, Glycine max
gagtcttcagctggacaaggatcattcatcttgaaagaagagtttgtgtgtgacaatctttatagttctaaggagggtgcaagagagaactgaatttgctgtgatggcaactcgtagatatgcttttggaagagctgatgaggccactcatccagactccatgagggccactttggctgaatttgtttctactttcatctttgcctttgctggagaaggctctggccttgctttggttaaaatttaccaggattcagctttctcagctggtgaattgttggcagttgcacttgcacatggatttgctctatttgctgctgtttctgcaagcatgcatgtatcaggtggccatgtcaacccagctgtgacatttggtgctctcattggaggcagaatttctgttctccgtgccgt

SEQ ID NO: 255607 - DNA, 376 bp, Glycine max
gctcacacttactactactaagcatggagtcctcaaagatctatgcttacctcttcctctgcatgatctttctctcttccgccactcccattctcggttgtggctactgtggtaaaccccccaaaaagcacgaagcctggtaaaacaccatagagacccacaacacccgttgttaagccaccattcatcatcgctcccattaatgttcctcccgttgttcctccaccaatagtgaagcccccatgtattctccctccaattccaattattaacccatcaaccataccatggaatggagggaacactccatgcccaccaccaaaatctcctgcgcaggctacctgccccattgacgcgctcaaacttggtgcctgtg

SEQ ID NO: 255608 - DNA, 404 bp, Glycine max
gatgcaactgaataattaagaaaagccatttccatagcagcctaagaaaatgaagagcactagcttgttcgctatctttctactttgcgccttcaccgcatacctaccttccgccaccgcccaggacgtgctcgacgtggatggcgatccgattcggaacggtttcatatactacgttttgccggcaataagaggaaacggtggcggaatagaacgagccgcactcgggaaagacacttgccctatcactgtagtgcaatctcccaatccaaactctaaggggttagaaattaagtttgaatctgcataccccgcctattacataaacggaaaccctaattttgcaaataaagttcagttacccacagcagtgtgaaagaaagaatccttggtggggcatttct

SEQ ID NO: 255609 - DNA, 396 bp, Glycine max
gactcactcatacaatagagaccagcttttgcttctttgtgaacatggagatgaggaaatcatgtggcttcttcttcttgctcctcctccttgtctttgcttcccaggtggtggtgcagacggagggaagagtgtgtgagtcacaaagccacgggttccatggtttgtgtaatagagaccacaactgtgctttggtctgcaggaacgaaggtttctccggtggcaggtgcaaaggcttccgccgccgctgcttttgcaccaggatttgttgagatctcatcaaacactactcttgccatgcaaattaataaatcatagctaggccaaataaattgcatctactctttatccatttgggagctagctaccacaaccaactcatacttggtcattgga

SEQ ID NO: 255610 - DNA, 477 bp, Glycine max
taccggtccagaattcccgggtcgactgcgagaagaaacagaagggggagttcgaactaaacaattcaattcaatctgcctcgatcatggagaggaagacatttgggtttttgttcttgctcctccttgtcttagcttctgatgtgacggtgaagagagcagaggcgaaagattgcttgacaaggaggcacgggttccagggtagatgcttattcgacaggcaatgtgcacatgtgtgcaggagcgatggtttcatcggtggtcagtgccgaggccctcttcgcaaatgcttttgctgcaggccatgttgatcgaaattactactgccaaagaggccatgaaataaacaaacaaacaaataaataaatagctctaaccgacacatatgtacgtagtgtcggggttctagctagctaggtaggtacgtgtgtcttttgttatcgatcctagcttggtggagcaagtgtggcatcatga

SEQ ID NO: 255611 - DNA, 372 bp, Glycine max
gattcacacagctaactaagaaagtcttccatagccccccaaaaatgaagagcaccatcttctttgctctctttctcttttgtgccttcaccacctcatacctaccttcagccatcgctgatttcgtgctcgataatgaaggtaaccctcttgaaaatggtggcacatattatatcttgtcagacatatcagcatttggtggaataagagcagccccaacgggaaatgaaagatgccctctcactgtggtgcaatctcgcaatgagctcgactaagggatttggacaatcttctcgtccccatatcgaatccgttttatcgcccaacggcatcctttgagccttaagttcgattcatttgcagttacaatgc

SEQ ID NO: 255612 - DNA, 415 bp, Glycine max
ggaaggtgagaagcgaagatgagcagcgacacaaaagccaacagcaacgttggagggggatccagatcgaggttaaatcactacctctatagcggtgacaagaaacatgtcttcgttggtttaactctcatcaccgctgtctttaccatcccatggttccttatgaacagagggaccaaacaccaatctcatcaagattacttggaaaaagctgataaagcaaggagccaaagactctcatccagttctgcttctgccaaatgagcttcatcaatattctgttgaagagcatactttttccggtaacacttaattaaaaggctttaaatatgtttgttggatgtccttttctctctagttttattctatggaatggagatccatcttcctttttctgttgtcccgtactgctaaa

SEQ ID NO: 255613 - DNA, 420 bp, Glycine max
gacagcaaaaacaattaataaagatgagtttgaagaacaacatggtggtgctaaaggtgtgtttgttgcttcttttccttgtgggggttacagctgcacgcatggaactgagcttcttcaaaagtgatcagtcatcaagttatgatgatgatgggtattcaaaaccatgctgtgatctctgcatgtgcgcacgctcaatgcctcctcaatgcagctgtgaagatattaggctgaattcatgccactcagattgtaagagctgtatgtgcacacgctcacagccaggacagtgtcgttgtcttgacaccaacgacttctgctacaaaccttgcaagtccagagatgactagaagaactaatagctctctcaaatggacgaagcccctttacgctttgtttgttatgttaggggagacaaat

SEQ ID NO: 255614 - DNA, 357 bp, Glycine max
ggcaacacaaacattctctccattgtctttgaacactcatcaccatggccaagcttgttctttccctttgtttccttcttttcagtggctgcttcgctctgagagagcaggcacagcaaaatgagtgccagatccaaaagctgaatgccctcaaaccggataaccgtatagagtcggaaggtgggttcattgagacctggaaccctaacaacaagccattccagtgtgccggtgttgccctctctcgctgcacccttaaccgcaatgcccttcgtagaccttcctacaccaacggtccccatgaaatctacatacaacaaggtaatggtatttttggcatgatattcccgggttgtc

SEQ ID NO: 255615 - DNA, 422 bp, Glycine max
gacagcaaaaacaattaataaagatgagtttgaagaacaacatggtggtgctaaaggtgtgtttgttgcttcttttccttgtgggggttacagctgcacgcatggaactgagcttcttcaaaagtgatcagtcatcaagttatgatgatgatgagtattcaaaaccatgctgtgatctctgcatgtgcacacgctcaatgcctcctcaatgcagctgtgaagatattaggctgaattcatgccactcagattgtaagagctgtatgtgcacacgctcacagccaggacagtgtcgttgtcttgacaccaacgacttctgctacaaaccttgcaagtccagagatgactagaaaaactaatagctctctcaaatggacgaagcccctttaggctttgtttgttatgttaagggagacaaataa

SEQ ID NO: 255616 - DNA, 387 bp, Glycine max
gacacacaactaactaagaaagtcttccatagccccccaataatgaagagcaccatcttctttgctcgctttctcttttgtgccttcacgatctcatacctaccgtcagcgatcgctgagttcgtgctcgataatgaacgtaaccctcttgaaaatggtggcacatattatatcttgtcagacataacagcatttggtggaataagagcagggccaacgggaaatgatagatgccctctcactgtggtgcaatcgcgcaatgagctcgacatggggattgggacaatcatctcgtcgccatatcaaatccgttttatcgccgaaagccatcctttgagccttaagttcgattcatttgcagttataatgctgtgtgttggaattcct

SEQ ID NO: 255617 - DNA, 388 bp, Glycine max
gacacacaactaactaagaaagtcttccatagccccccaaaaatgaagagcaccatcttctttgctcgcgttctcttttgtgccttcacgatctcatacctaccgtcagccatcgctgagttcgtgctcgataatgaaggtaaccctcttgaaaatggtggcacatattatatcttgtcagacataacagcatttggtggaataagagcagccccaacgggaaatgatagatgccctctcactgtggtgcaatctcgcaatgagctcgacaaagggattggaacaatcatctcgtccccatatcgaatccgttttatcgccgaaagccatcctttgagccttaagttcgattcatttgcagttataatgctgtgtgttggaattccta

SEQ ID NO: 255618 - DNA, 384 bp, Glycine max
gacaacacagaacaaaaacaaagaaaaaaaaaacccttagccaacacaaccatcatggccacctctgctattcagcaatcagcattcactggtcaaactgctctgaagcagctcaatgagttcgtccgcaagaccggtggcgccggcaaaggtcgcactaacatgcgccgcaccgtcaagagtgctcctcagagcatttggtatggccctgaccgtcccaagtacttgggtccattctcggagcagattccatcatacctgaccggagaattccctggtgactacggatgggacactgctggattatcagctgacccggaaaccttcgccaggaaccgggagctggaggtgattcacagcagatgggcaatgcttggtgccctg

SEQ ID NO: 255619 - DNA, 386 bp, Glycine max
cggggcagtgcaaaactcacaacacatctaaacaagcaatcaagaacaatggcttatgctaagcttgctcctatggctgtcttcttgcttgccacttccaccataatgttcccaacgaagatataagcagcagattgtaatggtgcatgttcacctttcgagatgccaccgtgccgctcacgtgattgtctttgtgtccctataggactagttgctggtttctgcatacatccaactggactttcatctgttgcgatgacgatcgacttacatcccaacttatgtcactcagatgatgaatgcatgaataaatgaaatgttaatttttgcgctcgttaccctattaattatatccatgattgatggtgtattgattctgactctga

SEQ ID NO: 255620 - DNA, 313 bp, Glycine max
gacatcacgacatcacatcgcagagaagaacagagagagatccatccatcaattccaatggccgatcagctcaccgacgaacagatctccgagttcaaggaagccttcagcctcttcgacaaggacggggatggttgtattaccaccaaggaacttgggaccgtgatgcggtcacttggccagaacccaactgaggcagagctgcaggatatgataaatgacgttgatgctgatgggaatggtaccattgatttcccagaattcctgaatctcatggctcgcaagatgaaagacactgattcagaggacgagc

SEQ ID NO: 255621 - DNA, 644 bp, Glycine max
gggggggtgggggggggaggggagggggggggggtggaggggggggggggggggggggggggggggggggggggggggggctccgtcggggggggtggggggagtgcgggggggcgggtagggggagggagggggggaggggagggaggggggggggaggggagggagggggggaggggggcgggggggagggggaggagaggaggggggggggggggggagggggggcggggggggagggggggggggggggggggggggaggggggggggggggggaggggggagggaggagggggggggagggggggggggggggaggagggagggagggggggggggggggggggggggggggggggggggggggggggggggggggggggggggggcggggggaggggggggggcgggggggaggtgggggggggggcggggggggggagggggggagggggggggagggggtggggggggggggggggtggggggggggggtggggggagggggaggggggggggggggggggggggggggggggtgggggggagggggaggggggggaggggggaggggggggggggggggggggggggggggggggggggggggggaggggtggggggaggtgggtgggggggggg

SEQ ID NO: 255622 - DNA, 415 bp, Glycine max
gctttttgtttggggttttctgattaactctttcttctcataactctgctgccgcaacagccccaaatccaatggcttcagagaagaaactttcgaacccaatgagggagataaaggtgcagaagctcgtcctcaatatctccgttggcgagagtggagatcgtcttaccagagccgctaaggtgttggaacagcttagtggccaagcccctgtgttttccaaagcaaggtacacggttcgttcctttgggattagaagaaatgagaagattgcatgctatgtcactgtcagaggtgacaaggcaatgcaacttttggagagtggtttgaaggtgaaggaatatgaacttctcagaaggaacttcagtgatactggttgctttggctttggcattcaagagcatatccatttggg

SEQ ID NO: 255623 - DNA, 416 bp, Glycine max
gatgcaactgaataattaagaaaagccatttccatagcagcctaagaaaatgaagagcactagcttgttcgctatctttctactttgcgccttcacctcatacctaccttccgccaccgcccaggacgtgctcgacgtggatggcgatccgattcggaacggtttcatatactacgttttgccggcaataagaggaaacggtggcggaatagaacgagccgcactcgggaaagacacttgccctatcactgtagtgcaatctcccaatccaaactctaaggggttagaaattaagtttgaatctgcataccccgcctattacataaacgaaaccctaattttgcaaataaagttcagttacccacagcagtgtgaaagaaagaatccttggcgggccatttctaaggatatatctg

SEQ ID NO: 255624 - DNA, 279 bp, Glycine max
cgggacagcaaaaacaattaatagagattagtttgaagaacaacatggtggtgcgaaaggtgtgtttgttgcttcctttccttgtgggggttacagctgcacgcatggaactgagcttcctcaaaagtgatcagtcatcaagttatgatgacgatgagtattcaaaaccatgctgtgatctctgcatgtgcacacgctcaatgcctcctcaatgcatctgtgaagatattaagctgaattcatgccactcagattgtaagagctgtatgtacacacact

SEQ ID NO: 255625 - DNA, 386 bp, Glycine max
gacagcaaaaacaattaataaagatgagtttgaagaacaacatggtggtgctaaaggtgtgtttgttgcttcttttccttgtgggggttacagctgcacgcatggaactgagcttcttcaaaagtgatcagtcatcaagttatgatgatgatgagtattcaaaaccatgctgtgatctctgcatgtgcacacgctcaatgcctcctcaatgcagctgtgaagatattaggctgaattcatgccactcagattgtaagagctgtatgtgcacacgctcacagccaggacagtgtcgttgtcttgacaccaacgacttctgctacaaaccttgcaagtccagagatgactagaaaaactaatagctctctcaaatggacgaagcccct

SEQ ID NO: 255626 - DNA, 426 bp, Glycine max
agaaggggattgtgtctcactcacatcacacacactctcatagctgtagcggcgacactaagatcggagaaagaatggcgaaaacgacgtcgttgctgctctttacactgctcctcttcggaaccctagctctcatccaggcgaagaaatcgaaggaggatttgaaggaggtgacccacaaggtttactttgatgtcgagattaatggaaaagaagcaggtcgtattgtaatgggtctttatgggaaggctgttccaaaaactgcagaaaacttccgagcactttgcacaggggaaaagggaactggtaaaagtggaaagcctctccattacaaaggtagctcattccatagaattattcctagctttatgcttcaaggaggtgattttacacaaggaaatggaatgggtggagaatcaatttgcg

SEQ ID NO: 255627 - DNA, 325 bp, Glycine max
gacagcaaagacaattaataaagatgagtttgaagaacaacatggtggtgctaaaggtgtgtttgttgcttcttttccttgtgggggttacagctgcacgcatggaactgagcttcttcaaaagtgatcagtcatcaagttatgatgatgatgagtattcaaaaccatgctgtgatctctgcatgtgcacacgctcaatgcctcctcaatgcagctgtgaagatattacgctgaattcatgccactcagattgtaagagctgtatgtgcacacgctcacatccaagacagtgtcgttgtcctgacatcaactacttctgctacaa

SEQ ID NO: 255628 - DNA, 279 bp, Glycine max
gacagcaaaaacaattaataaagatgagtttgaagaacaacatggtggtgctaaaggtgtgtttgttgcgtcttttccttgtgggggttacagctgcacgcatggaactgagcttcttcaaaagtgatcagtcatcaagttatgatgatgatgagtattcaaaaccatgctgtgatctctgcatgtgcagaggctgaatgcctcgtcaatgcagctgtgaggatagtacgctgaattcatgccactcagattgttagagcggtatgttgacacgctcac

SEQ ID NO: 255629 - DNA, 170 bp, Glycine max
ccaggtacacgtacgtatcggaacaggtacacgacaacgagggacagcgaatccaattaagcaagatgtgtttgaataacgacagtgtggtgctaaaggtgtgtttgttgcgtcttttccttgtgggggtgatcgctacgctcatggcactgatcttcttcaagagtgat

SEQ ID NO: 255630 - DNA, 329 bp, Glycine max
gagcgccaatgtttttttcagaggagtttcagcttgtgatcaaaagagtttatcttatagtaagaaatcgatgtcttactccattttaaggaacaaaacaagagaacaatagcctgacaaatggtttagccataaaatcgaatccatcattgatttgagatattgataatgtgaatactgcatttctcggcaatgctaggcataatgcgggtgtaaggagctaagaaagattatcttttcttcctatcttatgagcgttaaggggtatgaagtgtcagttcctatcttagattttaattttggtaggtatagtaggagtccatttaact

SEQ ID NO: 255631 - DNA, 303 bp, Glycine max
gacagcaaaaacaattaataaagatgagtttgaagaacaacatggtggtgctaagggtgggtttgttgcttcttttccttgtgcgggttacagctgcacgcatggaactgagcttcttcaaaagtgatcagtcatcaagttatgaggatgatgagtattcaaacccatgctgggatcgtcgcgcaggtgcacacgctcaatgcctcctcaatgcgtctgtgatgatattaggctgaattcatgccactcagattgcgggagcggtatgtgtgcacgctcacacgcaagacagtttcgttgtct

SEQ ID NO: 255632 - DNA, 232 bp, Glycine max
gacagcaaaaacaattaataaagatgagtttgacgaacaacatggtggtgctaaaggtgtgtttgttgcttcttttccttgtgggggttacagctgcacgcatggaactgagcttcttcaaaagtgctcagtcatcacgttatgatgatgatgagtactcaaaaccatgctgtgatctctgcatgtgcacacgctcaatgcctcctcaatgcagctgtgaagatattaggct

SEQ ID NO: 255633 - DNA, 259 bp, Glycine max
gaagggagggaagaatagaatgggatctggaagtggaaaacacactggagagttcttcaggagaagggatgcatggaggaagcatccgatgctcagcaatcagctccgccacgccagccctggccttggcatcgccgtcgtcgccttcggtatcgacctcgtcggcgaagaagtctacaataggctctatgctcccgatcctcagtcgatttctcacgtgaaaggcggggatcacgactaaacgtttggacggacgcac

SEQ ID NO: 255634 - DNA, 303 bp, Glycine max
gattcacacaactaactaagaaagtcttccatagccccccaaaaatgaagagcaccatcttctttgctctctttctcttttgtgccttcaccacctcatacctaccttcagccatcgctgatttcgtgctcgataatgaaggtaaccctcttgaaaatggtggcacatattatatggtgtcagacataacagcatttggtggagtaagagcagccgcaacgggaaatgaaagatgccctctcactgtggtggaatctcggaataggctcgactgagggattggaagaatcatctcgtccccat

SEQ ID NO: 255635 - DNA, 304 bp, Glycine max
acgcgtccggacagaagacgacagaaggggaggcagtgcaaaactcacaagagatctaaacagcaaatcaagaagaatggcttatgctaggcttgctcctatggctgtcttcttgcttgccacttccaccataatgttcccaacgaagatagaagcagcagattgtaatggtgcatgttcacctttcgagatgcgaccgtgccgcccacgtgattgtcgttgtgtcgctataggactagttgctggtttctgcatacatcgagctggactttcatctgttgcgaagatgatggacgaacatccc

SEQ ID NO: 255636 - DNA, 177 bp, Glycine max
tgggagtcacataacaatcgataaatgtctgctgtagcgccacaatggtggagatcaacatctggtttgcgctccttctcctttgtgccgtctacacctcataccatggattcagccattcctgaattcgtgctctcttctgattgtaaccgtcatgagtatggtggcacatactat

SEQ ID NO: 255637 - DNA, 283 bp, Glycine max
cgggacagcaaaaacaattaataaagatgagtttgaggaacaacatggtggtgctaaaggtgtgtttgtcgcttcttttccttgtgggggttacagctgcacgcatggaactgagcttcttcaaaagtgatcagtcatcaagttatgatgatgatgagtattcaaaaccatgctgtgatgtcggcgtgtgcacacgctcaatgcctcctcaatgcagccgtgaagatagtatgctgaattcatgccactcagatgtgttagagctgtaggtgcacacgctcac

SEQ ID NO: 255638 - DNA, 326 bp, Glycine max
gacagcaaagacaattaataaagatgagtttgaagaacaacatggtggtgctaaaggtgtggttgttgcttcttttccttgtgggggttacagctgcacgcatggaactgagcttcttcaaaagtgatcagtcatcaagttatgatgatgatgagtattcagaaccatgctgtgatctctcgatgtgcacacgcgcaatgcctgctcaatgcagcggtgaagatgttaggctgaattcatgccactcagagggtaaaggctgtgtgtgcacacgctcacatccatgacagtgtcgttgtcttgacgccaaggacttctgctacaaa

SEQ ID NO: 255639 - DNA, 240 bp, Glycine max
ggtgatttgagaggatcgtgagagggacggtagcagagattccgtgagttgcaaaaatgaaaacaattctttctgcagagaccatgaacatcccggacggcgtgagcgtcaaggttaatgccaaggtcatcgaagttgagggcccccgcggaaaattggtgcgagacgtcaggcacttgaatctcgatttgcacgtcatcagtgacgaaaacggtaaaaggaagctgaaagtggagggct

SEQ ID NO: 255640 - DNA, 326 bp, Glycine max
gacagcaaaaacaattaataaagatgagtttgaagaacaacatggtggtgctaaaggtgtgtttgttgcttcttttccttgtgggggttacagctgcacgcatggaactgagcttcttcaaaagtgatcagtcatcaagttatgatgatgatgagtattcaaaaccatgctgtgatctctgcatgtgcacacgctcaatgcctcctcaatgcatgtgtgaagatattaggctgaattcatgccactcagagtgtaagagctgtatgtgcacaggctcacagccaggacagtgtcattgtcttgacaccaacgacttctgctacaaa

SEQ ID NO: 255641 - DNA, 172 bp, Glycine max
gattcacacaactaactaataaagtcttccatagccgcccaaaaatgaagagcagcagcttcttggcgctctttctcttttgtggcgtcggcacctcgtacctaccttcagccatcgctgatttcgtgctcgataatgaatgtaatcctcttggaaatggtggcacacatta

SEQ ID NO: 255642 - DNA, 239 bp, Glycine max
gacagcactaacaattatgtagatgatgagtttgacgaacaacatggtgctgctaaaagtgttttagttccttctgttccttgtaggggtcacagctgcacgcctggaactgagcttcttcaaaagtgatcactcacgaagttatgatgcatgacgattagtcatggtcagcgtgtggttcctgcatgtgcagagactgaaggctgcctcaatgcgcctgtgaagatattacgctgcat

SEQ ID NO: 255643 - DNA, 575 bp, Glycine max
  unsure (1)..(575): unsure at all n locations
ggggggggagggagatgaggggggggaggggaggggggggggggaaggggggagggggaggggggtgactacgtcgtgggggtaaggnggggcggggagggggaggaggnagggggggggggggggggggggggggggaggggggagaggggggggggagggggggggggggggggggggggaggaggggggggggggaggagggggggggggggggggggggggggggggggggaggggggggaggggagggatgggggggggggggggggggggggggaggggggggggggaggggggggaggggggggggggggggggggggggaggagggggggggggggggagaggaggggggggaggggagaggggggggggggagggggagggggggggggggggggagggaggggggggggggaggagggggggggagggggaggggaggaggggggggggagggggggggagggggggaggggaggggggagggggggggggaggaggggggaggggagggaggggagagggggggggggggaggggggagggggggggggagggggggggggggg

SEQ ID NO: 255644 - DNA, 229 bp, Glycine max
gacaggtgtttgcaatactagcgatagctgatgaagagagataccaacaagaaaagacggtgagaagagttgagattccctttgaagaaaagatggcatcccataggcaaagctatgaagctggtcaaactaagggccgaactgaggaaaagacgaaccagacgatgggcaaaggtggggagggagggcaagctgcaaaggagaagacgcagcgaatggcccaagctgc

SEQ ID NO: 255645 - DNA, 168 bp, Glycine max
aatggagtagagacatgaggggacagcagagacaattaataaagatgagtttgatgaacaacatggtggtgctgaaggtgtgtttgagtgttcttttccttgtggtggttagagctgctggcatggaactgagcttcttcacaagtgatcagtcatcacgttatgatg

SEQ ID NO: 255646 - DNA, 164 bp, Glycine max
gacagcataaacaattaatacagatcactttgttgataaagatagtggtgcgaaaagtatgtttagttgttcttttcctatgattgcgttagatcatgacacatagaactcagcttcagcaaaagtgatcattcatcaatttataatgatgaggattattcaaa

SEQ ID NO: 255647 - DNA, 325 bp, Glycine max
gattcacgggtctagctaagaaagtcttcgatgggcccccagatatgaagagcaccagctggctgtgctctctttctcttttgtgcgttcacgacgtcatatctaccttcagcgatcgctgatttcgtgctcgatagtgaaggtagccgtcttgacaatggtggcacatagtattggttgggacggagggcagcatttcgggggataggtgcagcgcctacggggaatgcaagatgccctctcactgtggggcaatggggcagtgagctcgacgtatggattgggtcaatcatctcgtcggcatatcgtgtccgttttatcgccg

SEQ ID NO: 255648 - DNA, 246 bp, Glycine max
gacagcaaaaacagttaataaagatgagtttgaagaacaacatggtggtgctaaaggtgtgtttgttgcttcttttccttgtgggggttacagctgcacgcatggaactgagcttcttcaaaagtgatcagtcatcaagttatgatgatgatgagtagtcaaaaccatgctgtggtctggggagtgtcacacgctcaatgccgcctgaatgcagctgtcgatgtattaggctgaagtcatgccact

SEQ ID NO: 255649 - DNA, 313 bp, Glycine max
gacagaagaaaaaagagaagaagatgggtttgaagaacaacatggtggtgctaaaggtgtgtttggtgctacttttccttgtggggggtactactagtgccaacttgaggctgagtaagcttggcctgctcatgaaaagtgatcatcatcaacactcaaatgatgatgagtcgtcaaaagcgtgctgtgatcaatgcgcatgcacaaagtcaagccctcgtcaaggccgctgttcaaaatataagctgaattcctgccattcagctcgcagatcctgtatttgcgcattatcgtatcctgcacaatgtttttg

SEQ ID NO: 255650 - DNA, 157 bp, Glycine max
agaagacgacacgatggggaagcatttgagactaactcttagagagaaatggtgatggctgatacaggtggaggagatgcatgtcggaccagcggtaatatggtataggaagttgggctgcacacttccatgcactggtggttccacttgcaggtgc

SEQ ID NO: 255651 - DNA, 325 bp, Glycine max
gaatctcttcacagaagaaaaaagagaagaagatgggtttgaagaacaacatggtggtgctaaaggtgtgtttggtgctactttgccttgtggggggtactactagtgccaacttgaggctgagtaagcttggcctgctcatgaaaagtgatcatcatcaacacgcaaatgatgatgactcttgagaagcatgctgtgatcaatgcgcatgcacaaagtcaaagccgcctcaatgccgccgttcagatataaggctgaagtcgttgcattcagcgtgcaaatcttggatttgcgcattatcgtatcctgcagagtgttttggtgt

SEQ ID NO: 255652 - DNA, 263 bp, Glycine max
  unsure (1)..(263): unsure at all n locations
gacgacagatggggattcccaaaatgtctcattctccctttcctctgcgaagcctcgatcactctcacgcgctcctagagtcgctcctccaccgtctgtctctcgaacaaccacaacaccatcttcatcgcatggcaaacgcagcatctggtatggcagtccaggatgactgcaagtggaggtttttgggggtgagggcgcgttggacacaccgtttcagantgtgtaaggttgacgancggcagaagcaggtcattgtggag

SEQ ID NO: 255653 - DNA, 217 bp, Glycine max
gacagcaaaaacaattaataaagatgagtttgaggaacaacatggtggtgctaaaggtgtgtttggtgcttcttttccttgtgggggttacagctgcacgcgtggaactgagcttcttcaaaagtgatcagtcgtcaagttatgagggggaggagtagtcaaaaccatgctgtgatctctgcatgtgcacacgctgaatgcctcctcagtgcaactg

SEQ ID NO: 255654 - DNA, 314 bp, Glycine max
gacagcaaaaacaattaataaagatgactttgaagaacaacatggtggtgctaaaggtgtgtttgttgcttcttttccttgtgggggttacagctgcacgcatggaactgagcttcttcaaaagtgatcagtcatcaagttatgatgatgatgagtattcaaaaccatgctgtgatctgtgcatgtgcacacgctcaatgcctcctcaatgcggctgtgaagatattaggctgaattcatgccactaggattgtgagagcggtgtgtgtgcacgctcacaagcaggacagtgtcgttgtcttgaaagcaacgac

SEQ ID NO: 255655 - DNA, 146 bp, Glycine max
gacggcaaaaacaattaataaagatgagtttgaagaacaacatggtggtgctaaaggtgtgtttgttgcttcgtttccttgtggcggttacagctgcacgcatggaactgagcttcttcaaaagtgatcagtcatcatgttatgat

SEQ ID NO: 255656 - DNA, 305 bp, Glycine max
gattcacacaactaactaagaaagtcttccataagcccccaaaaatgaagagcaccatcttctttgctctctttctcttttgtgccttcagcacctcatacctaccttcagccatcgctgatttcgtgctcgataatgaaggtaaccctcttgaaaatggtggcacatattatatcttggtacgggtggcagcatttggtggaataggagcagccccgacgggaaatgaaagatgccctctcactgtggtgcggtctcggagtgagctcgacaaagggattgggacgatcatctcgtccccatat

SEQ ID NO: 255657 - DNA, 247 bp, Glycine max
gacagcaaaaacaattaataaagatgagtttgaagaacaacatggtggtgctaaaggtgtgtttagtgcctcttttccttgtgggggttacagctgcacgcatggaactgagcttcttcaaaagtgatcagtcatcaagttatgatgatggtgagtattcaagagcatgctgtgatgggggcgggggcgcgcgggcaatgcctcctgaatgcagcttggaagagattgagctgaattcatgccactc

SEQ ID NO: 255658 - DNA, 299 bp, Glycine max
gataccaaaaacaaaacacaagccaagtgaaagtgagaaaaaataaaaatcagggagcataaggtcagggatcattcacaggattggggagacccttcatgtgggagggcacaagaaggaggaggagcataagggtgagcaccatgctggagaatacaaaggggagcaccatggggaacagggtagtgactacaaaggagagcatcagggtgaagacaaagctggagagtaccatggggaggacaagccagggcacaaggaggggttcctaggcaaagtcaagggcaagattcatggtg

SEQ ID NO: 255659 - DNA, 459 bp, Glycine max
tggttggaacctttgggctgatttatgtgcttgcatggtcgtgagaagatgatagaaggggagagcgagaaagagagagagagagagagaaatcgagagaaacctgtaaatttcaaccctggaaagactggtgacggtcgttcttaaggactgtgagaatcctgctcatactgttaagtctgttgaataggttgagtgacatgaagagacggcggaactaacgaagaatgccgtgaactctgatgccgaatcgatcgcggaggagtggaacccatccctcgccgggcataagaacgcgaccggcgtctggagagtactgcggaggacttcgctccttaccgagtaaaaggaagaaataaaagggaatgagccgaacgtgaagtggaccaaagagcataggtagaaagccgaaccggagtccctaaatactcgcaacgacgccacgatagcgaacgacga

SEQ ID NO: 255660 - DNA, 367 bp, Glycine max
  unsure (1)..(367): unsure at all n locations
tggaantttgggctgatttatgtgcttgtttatctgcttgtttatctgcttgcatcgccgtcagaatgatagaagggcatggtcggcaggggatcatagaggggcagggtgcgtgacaagatcatagaagggcatcgtcgtcagaagatgatagaaggaataagaatcggtaaaaagagagtaagaaaggaggtgctcagaacaagcactcggaaagggagaagaggaggaacaatatgtacgaagagggtatgaaaggagaaaagaagaagaagaaatagtatcgagggaataagaatacgaataggtcgaaagatagtcaataaaagacagaaaagaggagataaaaggacgaataccgccaacg

SEQ ID NO: 255661 - DNA, 453 bp, Glycine max
tggttggaacctttgggctgatttatgtgcttgcatggtcgtgagaagatgatagaagggggaatcgagtcctcctaaaagcgactagctactgagccacgacgacgacgagcacctaaaattacgtcgcgactctcgtacgcgtatatgtctaacgttcttttaacgtagtcgcgaagacaccaggtcgaacctacgttatctagaccgcaagagtcgcacgcgtatatgtctatagttaggatagcgctgccgctccgatattaatgatcctcgtcataaattccgtaagcttagagacgatcagaaaaatcaacagtctctctaaacggatgaagttttcccaggtcccgcccggcacgccaggggagataaacaaaataagaaacaaaagtctagcggttagcaacccgtccccagtaaaaccgggttaccccaacaacttcaaccctt

SEQ ID NO: 255662 - DNA, 448 bp, Glycine max
gttggaactttggctgtttagtgctgttatgtgctgttattgctgctggtcgtgagaaaatgatagaagaggactaagaatgaggctaacacttcagcatattgcaccaaagaacccaagacacatcacgacgagagtgtggcctttaccatcgccgtcgggagccgccccttcggtactagccctcgctctacccggtaccgtgcaccgggaaaagtagaattttagctataataagcgttcttgaagccgtaacagtgagaaagatcttcataggaattaagtacgttatgtctgccgtaattcttccaaggcggaggaagaagaagaacgtgaagaaggctaaaacctatgattatgattataatatttggagagcgaatgctaggtatatggcgagaaaggagaagataaaggcgagtagttatgcttacctttaccttaatgt

SEQ ID NO: 255663 - DNA, 477 bp, Glycine max
  unsure (1)..(477): unsure at all n locations
ggaacctttgggctgattgatgtgcttgcgtgagaagatgatagaaggggatagtacccctaaccaacaaagacgagcccgaagaatagtacggcggcgtcaaaggcgcgcccgccgtcctccccttccgcgggggccacggtcgtatgtacggaatcgagtcctcctaaaagcgactagctactaagccacgacgacgagcacctaaaattacgtcgcgactctcgtacgcgtatatgtctaacgttcttctaacgtagtcgcgaagacaccaggtcgaacctacgttatctagaccgcaagagtcgcacgcgtatatgtctatagttaggatagcgctgccgctccgatattaatgatcctcgtcataaattccgtaagcttagagacgatcagaaaaatcaacagtctctctaaacggatgaagttttcccaggtcnncgccgccacgccaggggagataaacaaaataagaaa

SEQ ID NO: 255664 - DNA, 459 bp, Glycine max
  unsure (1)..(459): unsure at all n locations
ggaacctttgggctgatttatgtgcttgcatggtcgtgagaagatgatagaaggggacagaagaagtagaaggagaagtaccagtaaaagtaagaagaatcagctcaagtagaaacggttctcctagcgacggtactcgcggtttctaaattcgttttccctatcgccgagaagcttctagccagaggttcctttctttctctaaggaatcttctcctacctagagccgcggttagcggcggtaagaagactaagatcgataagttccacggaaccaacggcggtacggtcccgagggaaggagccgacgtactcggtaggaaaggaaagggaaagggtgcccattagcccgcagataaacatggcgtcaacgctgacggccatagcttcactcatgatattaaagatcggctcntaatttgcgacgctcatgtcggtggcatgatcggtccggtcact

SEQ ID NO: 255665 - DNA, 472 bp, Glycine max
  unsure (1)..(472): unsure at all n locations
ggaacctttgggctgatttatgtgcttgcatgggtcgtgagaagatgatagaaggggatagtaaaaataaccaacaaagacgagcccgagagaatgaatacggcggcgtcaaaggcgcgcccgccgtcctccccttccgcgggggccatagtcgtatgtacggaatcgagtcctcctaaaagcgactagctactaagccacgacgacgacgagcacctaaaattacgtcgcgactctcgtacgcgtatatgtctaacgttcttctaacgtagtcgcgaagacaccaggtcgaacctacgttatctagaccgcaagagtcgcacgcgtatatgtctatagttaggatagcgctgccgctccgatattaatgatcctcgtcataaattccgtaagcttagagacgatcagaaaaatcaacagtctctctaaacggatgaagttttcccaggtcccgnccgccacgccaggggag

SEQ ID NO: 255666 - DNA, 409 bp, Glycine max
ggctcggaacctttgggctgatttatgtgcttgtttatgtgcttgctggtcgtgagaagatcatagaagggcatggtcgtgagaagatgatagaagggcatggtcgtgagaagatgatagaagggcatggtcgtgagaagatgatagaagggcatggtcgtgagaagatgatagaagggcatggtcgtgagaagatgatagaagggcatggtcgtgagaagatgatagaagggcatggtcgtgagaagatgatagaagggcatggtcgtgagaagatgatagaagggggaagaaaaggcggcgtaaggcaaaattcccgcgttcccaaacttctaacgcttaagctccgtaaagggccggttacggagtcagctaagcgctctagcgaactcgaacggggccaaggcga

SEQ ID NO: 255667 - DNA, 470 bp, Glycine max
  unsure (1)..(470): unsure at all n locations
tggaacctttgggctgatgtatgtgcttgtttatgtgcttgtttatgtgcttgcatggtcgtgagaagatgatagaaggggacattacggaanaagtataaagagaagtaccagtatcaggagtagtaataatcagctctagtcgaaacggttctcctagcgacggtactcgcggtttctaaattcgttttccctatcgccgagaagcttctagcgagaggttcctttctctctctaaggaatctcctcctacctagagccgcggttagcggtaagaagactaagatcgataaattccacggaaccaacggcggtacggtcccgagggacggaatcgacgtactcggtaggaaaggaaagggaaagggcgcccattagcccgcagataaacatggcgtcaacgctgacggccatagcttcactcatgatattaaggatcggctcttaattggcgacgctcatgtcggtgg

SEQ ID NO: 255668 - DNA, 390 bp, Glycine max
  unsure (1)..(390): unsure at all n locations
ggaacctttgggctgatttatgtgcttgtttatgtgcttgcatggtcgtgagaagatcatagaagggcatggtcgtgagaagatgatggaagggcatggtcgtgagaagatgatagaagggcatggtcgtgagaagatgatagaagggcatggtcgtgagaagatgatagaagggcatggtcgtgagaagatgatagaagggcatggtcgtgagaagatgatagaagggcatggtcgtgagaagatgatagaagggcatggtcgtgagaagatgatagaagggcatggtcgtgagaagatgatagaagggcatggtcgtgagaagatgatagaaggggatagtanaaataaccaacaaagacgagcccgaagaataatacggcggcgtca

SEQ ID NO: 255669 - DNA, 458 bp, Glycine max
tttgggctgatttatgtgcttgcatggtcgtgagaagatgatagaaggggactctacgctctacttttatatcagagagaatgcagaaattacaaattaccttatattcctataaatatataaatctaaagaaatatatatatacagagcgagatagagagagaggtacggggaactataggcccaagccactagacacgaccttaaacgtccggccccataagtcgagggatacgggcaaaggaagagacctaagaaagtaaaatataatatttctcaggaaaaagaagtaaatcctatttttcctaattatatacctactaacatgaaattaattttattaataaaataataataattttagaaaacttcatcaccctataagagattctaaaactctatttccaaaatattttaaaatcacccttttcttcagaaaactaattaattaagaattt

SEQ ID NO: 255670 - DNA, 443 bp, Glycine max
aacctttgggctgatttatgtgcgtgcatggtcgtgagaagatcatagaagggcatcgtcgtgagaagatgatagaagggcatggtggtgaggggatgatagaaggggggaccggaggaaaaaaggcgctactatttaagcaaagcattaagggggtcgcggaagtggccgggtgcccctcgttatgggagttacagaagtagtatacgtaacagtaataggagattccgccagttccctcgaataagaatctgcagatcgcgcggaagaaagtgaaggccgccataacggacggtatcactaactgcctgaacgggccccagaatacggcgggaccgttatcgacgacgaccacttccatagagtcaaagaaggcagacgtaaagttaacaagacataagataaggccataaccgatggacacgaaatctcaacaacgctag

SEQ ID NO: 255671 - DNA, 491 bp, Glycine max
tggaacctttgggctgatttatgtgcttgcattgagaagatgatagaaggggatagtaaacataaccaacaaagacgagcccgaagaataatacggcggcgtcaaaggcgcgcccgccgtcctccccttccgcgggggccatagtcgtatgtacggaatcgagtcctcctaaaagcgactagctactaagccacgacgacgacgagcacctaaaattacgtcgcgactctcgtacgcgtatatgtctaacgttcttctaacgtagtcgcgaagacaccaggtcgaacctacgttatctagaccgcaagagtcgcacgcgtatatgtctatagttaggatagcgctgccgctccgatattaatgatcctcgtcataaattccgtaagcttagagacgatcagaaaaatcaacagtctctctaaacggatgaagttttcccaggtcccgcccgccacgccaggggagataaaccaaataggaaacaaaagtct

SEQ ID NO: 255672 - DNA, 474 bp, Glycine max
ggtttggaacctttgggctgatttatgtgcttgcatggtcgtgagatgatagaagggcatggtcgtgagaagatgatagaagggcatggtcgtgagaagatgatagaagggcatggtcgtgagaagatgatagaagggcatggtcgtgagaagatgatagaagggcatggtcgtgagaagatgatagaagggcatggtcgtgagaagatgatagaagggcatggtcgtgagaagatgatagaagggcatggtcgtgagaagatgatagaagggcatggtcgtgagaagatgatagaagggggataaaaaaaaaaaaaaaaaaaaaaaaaaaaaagtggttgtctcagaggacttaagtccatgcatgtgcgtacgtgatgctacagtctcctcacagcgctattcaaacctaacctatcggttgctgccccataatgctgcgatcgggaaaatttcggtgccatttaatccaac

SEQ ID NO: 255673 - DNA, 469 bp, Glycine max
tggcttggaacctttgggctgatttatgtgcttgcatggagatgatagaaggggataccaaaaataaccaacaaagacgagcccgaagagtaatacggcggcgtcaaaggcgcgcccgccgtcctccccttccgcgggggccatagtcgtatgtacggaatcgagtcctcctaaaagcgactagctactaagccacgacgacgacgagcacctaaaattacgtcgcgactctcatacgcgtatatgtctaacgttcttctaacgtagtcgcgaagacaccaggtcgaacctacgttatctagaccgcaagagtcgcacgcgtatatgtctatagttaggatagcgctgccgctccgatattaatgatcctcgtcataaattccgtaagcttagagacgatcagaaaaatcaacagtctctctaaacggatgaagttttcccaagtcccgcccgccacgccaagggagat

SEQ ID NO: 255674 - DNA, 485 bp, Glycine max
tgggctgatttatgtgcttgcatggtcgtgagaagatgatagaaggggatagtaaaaataaccaacaaagacgagcccgaagagtaatacggcggcgtcaaaggcgcgcccgccgtcctccccttccgcgggggccatagtcgtatgtacggaatcgagtcctcctaaaagcgactagctactaagccacgacgacgacgagcacctaaaattacgtcgcgactctcgtacgcgtatatgtctaacgttcttctaacgtagtcgcgaagacaccaggtcgaacctacgttatctagaccgcaagagtcgcacgcgtatatgtctatagttaggatagcgctgccgctccgatattaatgatcctcgtcataaattccgtaagcttagagacgatcagaaaaatcaacagtctctctaaacggatgaagttttcccaggtcccgcccgccacgccaggggagataaacaaaataagaaacaaaagt

SEQ ID NO: 255675 - DNA, 493 bp, Glycine max
tgcttcgaacctttgggctgatttatgtgcttgcatggtcgtgagaagatgatagaaggggatagtaaaaataaccaacaaagacgagcccgaagagtaatacggcggcgtcaaaggcgcgcccgccgtcctccccttccgcgggggccatagtcgtatgtacggaatcgagtcctcctaaaagcgactagctactaagccacgacgacgacgagcacctaaaattacgtcgcgactctcgtacgcgtatatgtctaacgttcttctaacgtagtcgcgaagacaccaggtcgaacctacgttatctagaccgcaagagtcgcacgcgtatatgtctatagttaggatagcgctgccgctccgatattaatgatcctcgtcataaattccgtaagcttagagacgatcagaaaaatcaacagtctctctaaacggatgaagttttcccaggtcccgcccgccacgccaggggagatatacaaaataagaaacc

SEQ ID NO: 255676 - DNA, 487 bp, Glycine max
ctttgggctgatttatgtgcttgattatgtgcttgcatggtcgtgagaagatgatcagaaggggatagtaaaaataaccaacaaaggcgagcccgaagagtaatacggcggcgtcaaaggcgcgcccgccgtcctccccttccgcgggggccatagccgtatgtacggaatcgagtcctcctaaaagcgactagctactaagccacgacgacgacgagcacctaaaattacgtcgcgactctcgtacgcgtatatgtctaacgttcttctaacgtagtcgcgaagacaccaggtcgaacctacgttatctagaccgcaagagtcgcacgcgtatatgtctatagttaggatagcgctgccgctccgatattaatgatcctcgtcataaattccgtaagcttagagacgatcagaaaaatcaacagtctctctaaacggatgaagttttcccaggtcccgcccgccacgccaggggagataaacaaaa

SEQ ID NO: 255677 - DNA, 338 bp, Glycine max
tgagaagatgatagaagggaatggtagtgagaagatgatagagtggggtagagagagggaaatgggtaaaaaaaaaaaagaaaaaaaaaaaaaaaaagtggtagaataagaggaattaagttaatgaatgtgagtaagttatgatagaatataagtaagagggatatttaaagataatatataggttgatgaagaataatgataaaatagggaaaatttagatgagatttaatgaaaaggttaagtaaaataatttataaaggatagaaggtataaaattaaaaaggtttgtattgaatgaataaagaaatggtagtataaatagaaaggtgaaagga

SEQ ID NO: 255678 - DNA, 474 bp, Glycine max
  unsure (1)..(474): unsure at all n locations
ggaacctttgggctgatttatgtgcttgcatggtcgtgagaagatgataaaaggggatagtaaaaataaccaacaaagacgagcccgaagaataatacggcggcgtcaaaggcgcgcccgccgtcctccccttccgcgggggccatagtcgtatgtacggaatcgagtcctcctaaaagcgactagctactaagccacgacgacgacgagcacctaaaattacgtcgcgactctcgtacgcgtatatgtctaacgttcntctaacgtagtcgcgaagacaccaggtcgaacctacgttatctagaccgcaagagtcgcacgcgtatatgtctatagttaggatagcgctgccgctccgatattaatgatcctcgtcataaattccgtaagcttagagacgatcagaaaaatcaacagtctctctaaacggatgaagttttcccaggtcccgnccgccacgccaggggagataaa

SEQ ID NO: 255679 - DNA, 483 bp, Glycine max
tggcttggaacctttgggctgatttatgtgcttgcatggtcgtgagaagatgatagaaggggatagtaaaaataaccaacaaagacgaggccgaagaataatacggcggcgtcaaaggcgcgcccgccgtcctccccttccgcgggggccatagtcgtatgtacggaatcgagtcctcctaaaagcgactagctactaagccacgacgacgacgagcacctaaaattacgtcgcgactctcgtacgcgtatatgtctaacgttcttctaacgtagtcgcgaagacaccaggtcgaacctacgttatctagaccgcaagagtcgcacgcgtatatgtctatagttaggatagcgctgccgctccgatattaatgatcctcgtcataaattccgtaagcttagagacgatcagaaaaatcaacagtctctctaaacgaatgaagttttcccaggtcccgcccgccacgccaggggagataaacaa

SEQ ID NO: 255680 - DNA, 492 bp, Glycine max
ggcttggaacctttgggctgatttatgtgcttgatggtcgtgagaagatgatagaagggggagacggagtaaacaaagtatagaatagccgaagcgaacggtacaaaaacgtacgccgtagagaaaggagagggcttagcggcgccgccttcgtatggtcctttcgagtctcggcatctacggtgttactagacctctctttctagtctttctggtcattgtgttgctgtctttgactcttgcggtcatggcgatattgaagtattattcctaactagtagtcataatcgtccttatacagcgggcgactctgccgtgtccaccgatctctcgggcgcttaataagcgccttccgcggtctacgatcggggagttactacaggccggcactcacgtacgccctgtttcgataaagccaaggttcacgctcgttctagcgctttctcttcttgtagagatttaaatactagaatggcggacggtacgtgcgtc

SEQ ID NO: 255681 - DNA, 499 bp, Glycine max
tggcttggaacctttgggctgatttatgtgcttgcatggtcgtgagaagatgatagaaggggagagcggcggagcgcgtagaagagtgctgtagctgtaatttcaactagaagaagtgtagtcctaagtgagcgatagttattagttacgggctgcacgtatagttgtggcaagggcacacttctcctcgtcccgtttcataaaaggatattcttcagtcggtctaagactctcctgtaagacgctgaagaaaacactcgtaagcccgtgaagaaaggcccgattttgctctagaccggcgctacctctagagacctctatggcaccgtctaggctaacagtgctatcggtagtaaaacttcctgtacttctaaagtctatggatccgtgttcgaaaccttagaggattcgcattacccgaccaagaaggtagccctaaccaggaagtactccgagaggaataggaaggataaggatcttaagcctaggccgacctccg

SEQ ID NO: 255682 - DNA, 483 bp, Glycine max
gcttcgaactttgggctgatttatgtgcttgcatggtcgtgagaagatgatagaaggggatagtaaatataaccaacaaagacgagcccgaaggataatacggcggcgtcaaaggcgcgcccgccgtcctccccttccgcgggggccatagtcgtatgtacggaatcgagtcctcctaaaagcgactagctactaagccacgacgacgacgagcacctaaaattacgtcgcgactctcgtacgcgtatatgtctaacgttcatctaacgtagtcgcgaagacaccaggtcgaacctacgttatctagaccgcaagagtcgcacgcgtatatgtctatagttaggatagcgctgccgctccgatattaatgatcctcgtcataaattccgtaagcttagagacgatcagaaaaatcaacagtctctctaaacggatgaagttctcccaggtcccgcctgccacgccaggggagataaacaaaat

SEQ ID NO: 255683 - DNA, 490 bp, Glycine max
gcttcgaactttgggctgatttatgtgcttgcatggtcgtgagaagatgatagaaggggatagtaaaaataaccaacaaagacgagcccgcagggtaatacggcggcgtcaaaggcgcgcccgccgtcctccccttccgcgggggccatagtcgtatgtacggaatcgagtcctcctaaaagcgactagctactaagccacgacgacgacgagcacctaaaattacgtcgcgactctcgtacgcgtatatgtctaacgttcttctaacgtagtcgcgaagacaccaggtcgaacctacgttatctagaccgcaagagtcgcacgcgtatatgtctatagttaggatagcgctgccgctccgatattaatgatcctcgtcataaattccgtaagcttagagacgatcagaaaaatcaacagtctctctaaacggatgaagttttcccaggtcccgcccgccacgccaggggagataaacccaataagacac

SEQ ID NO: 255684 - DNA, 476 bp, Glycine max
tggcttggaacctttgggctgatttatgtgcttgatggtcgtgagaagatgatagaaggcgatagtaaaaataaccaacaaagacgagcgggaagagtaatacggcggcgtcaaaggcgcgcccgccgtcctccccttccgcgggggccatagtcgtatgtacggaatcgagtcctcctaaaagcgactagctactaagccacgacgacgacgagcacctaaaattacgtcgcgactctcgtacgcgtatatgtctaacgttcttctaacgtagtcgcgaagacaccaggtcgaacctacgttatctagaccgcaagagtcgcacgcgtatatgtctatagttaggatagcgctgccgctccgatattaatgatcctcgtcataaattccgtaagcttagagacgatcagaaaaatcaacagtctctctaaacggatgaagttttcccaggtcccgcccgccacgccaggggagat

SEQ ID NO: 255685 - DNA, 498 bp, Glycine max
ttggcttggaacctttgggctgatttatgtgcttgtttatgtgcttgcatggtcgtgagaagatgatagaaggggatagtaaaaataacggacaaagacgagcccgaagaataatacggcggcgtcaaaggcgcgcccgccgtcctccccttccgcgggggccatagtcgtatgtacggaatcgagtcctcctaaaagcgactagctactaagccacgacgacgacgagcacccaaaattacgtcgcgactctcgtacgcgtatatctctaacgttcttctaacgtaatcgcgaagacaccaggtcgaacctacgttatctagaccgcaagagtcgcacgcgtatatctctatagttaggatagcgctgccgctccgatattaatgatcctcgtcataaattccgtacgcttagagacgatcagaaaaatcaacagtctctctaaacggatgaagttttcccaggtccagcccgccacgccaggggagataaacaaaa

SEQ ID NO: 255686 - DNA, 467 bp, Glycine max
tttgggctgagttatgtgcttgcatggtcgtgagaagataatagaaggggatcgtcaaaaataaccaacaaagacgagcccgaaggatatacggcggcgtcaaaggggcgcccgccgtcctccccttccgcgggggccatagtcgtatgtacggaatcgagtcctcctaaaagcgattagctactaagccacgacgacgacgagcacctaaaattacgtcgcgactctcgtacgcgtatatgtctaacgttcttctaacgtagtcgcgaagacaccaggtcgaacctacgttatctagaccgcaagagtcgcacgcgtatatgtctatagttaggatagcgctgccgctccgatattaatgatcctcgtcataaattccgtaagcttagagacgatcagaaaaatcaacagtctctctaaacgggtgaagttttcccaagtcccgcccgccacgccaggcgagatac

SEQ ID NO: 255687 - DNA, 478 bp, Glycine max
gcttggaaccttggctgatttagtgcatgctggacgtgagaagatgatagaccgggaaggagaagtaaataccgaatccgccggtaccgaggaataataatagaggtagtaataggaagagtaattcccggaagcgtggaaacacagagtcgaaccgctcgaataagacacacccgcaactttagtaggccacttagccgcggctaatgtcattctagactcgaaccctcccgtccccggcactaacgttgacaataattagaggaatccatccgtaggcctgaaagataacgcgacaagttagacattcagctaagcgtatgagtccgtgcctttcgggctcgtaaaagacaccgagaattcaacaaagagttaaagcgagcttcatctcgcggacgtctagttctactagaaagaggaggggaatacgggaagaaagggcttcccgctcctaaccacgaaggtcccacatcgaaca

SEQ ID NO: 255688 - DNA, 449 bp, Glycine max
ttgcacgtgagaagatgattgctggggatagtcacaactaataacaaagacgagcccgaagaatagtacggcccgtcaaaggcgcgcccgccgtcctccccttccgcgggggccatagtcgtatgtacggaatcgagtcctcctaaaagcgactagctactaagccacgacgacgacgagcacctaaaattacgtcgcgactctcgtacgcgtatatgtctaacgttcttctaacgtagtcgcgaagacaccaggtcgaacctacgttatctagaccgcaagagtcgcacgcgtatatgtctatagttaggatagcgctgccgctccgatattaatgatcctcgccataaattccgtaagcctagagacgatcagaaaaatcaacagtctctctaaacggatgaagttttcccaagtcccgaccgccacgccaggggagataaaccaac

SEQ ID NO: 255689 - DNA, 437 bp, Glycine max
tgcttgatgatagaaagggatagtaaaaataaccaaccaagacgagcccgaagaataatacggcggcgtcaaaggcgcgcccgccgtcctccccttccgcgggggccatagtcgtatgtacggaatcgagtcctcctaaaagcgactagctactaagccacgacgacgacgagcacctaaaattacgtcgcgactctcgtacgcgtatatgtctaacgttcttctaacgtagtcgcgaagacaccaggtcgaacctacgttatctagaccgcaagagtcgcacgcgtatatgtctatagttaggacagcgctgccgctccgatattaatgatcctcgtcataaattccgtaagcttagagacgatcagaaaaatcaacagtctctctaaacggatgaagttttcccaggtcccgcccgccacgccaggggagataaa

SEQ ID NO: 255690 - DNA, 437 bp, Glycine max
tgcttcgaacctttgggctgatttatgtgcttgcatggtcgtgagaagatgatagaagggcatcgtcgtgagaagatgatagaagggcatggtcgggagaagatgatagaagggcatggtcgtgagaagatgatagaagggcatggtcgtgagaagatgatagaagggcatggtcgtgagaagatgatagaagggcatggtcgtgagaagatgatagaagggcatggtcgtgagaagatgatagaaggggtactataaaaacaagaaaaaaaaaaaaaaaaaaaaaaaaaaaaaaagtggttgtctcagaggacttaagtccatgcatgtgcgtacgtgatgctacagtctcctcacagcgctattcaaacctaacctatcggttgctgccccataatgctgcgatcgggaaaatttccgtgccatttaatccaact

SEQ ID NO: 255691 - DNA, 481 bp, Glycine max
tgggctgatttaggtgcttgcatggtcgtgagaagatgatagcaggggatagtacaaataaccaacaaagacgagcccgaggcgatgatacggcggcgtcaaaggcgcgcccgccgtcctccccttccgcgggggccatagtcgtatgtacggaatcgagtcctcctaaaagcgactagctactaagccacgacgacgacgagcacctaaaattacgtcgcgactctcgtacgcgtatatgtctaacgttcttctaacgtagtcgcgaagacaccaggtcgaacccacgttatctagaccgcaagagtcgcacgcgtatatgtctatagttaggatagcgctgccgctccgatattaatgatcctcgtcataaattccgtaagcttagagacgatcagaaaaatcaacagtctctctaaacggatgaagttttccccagtctcgcccgccacgccaagggggatacacaaaataagaaaca

SEQ ID NO: 255692 - DNA, 478 bp, Glycine max
gcttggaacctttgggctgatttatgtgcttgcatggtcgtgagaagatgatagaaggggatagtaaaaataaccaacaaagacgagcccgaagaataatacggcggcgtcaaaggcgcgcccgccgtcctccccttccgcgggggccatagtcgtatgtacggaatcgagtcctcctaaaagcgactagctactaagccacgacgacgacgagcacctaaaattacgtcgcgactctcgtacgcgtatatgtctaacgttcttctaacgtagtcgcgaagacaccaggtcgaacctacgttatctagaccgcaagagtcgcacgcgtatatgtctgtagttaggatagcgctgccgctccgatattaatgatcctcgtcataaattccgtaagtttagagacgatcagaaaaatcaacagtttctctaaacggatgaagttttccccagccccgcccgccacgccaggggagataaa

SEQ ID NO: 255693 - DNA, 493 bp, Glycine max
  unsure (1)..(493): unsure at all n locations
gcttcgaacctttgggctgattatgtgcttgcatggtcgtgagaagatgatagaaggggatcctaaaaataaccaacaaagacgagcccgaggagataatacggcggcgtcaaaggcgcgcccgccgtcctcctcttccgcgggggccatagtcgtatgtacggaatcgagtcctcctaaaagcgactagctactaagccacgacgacgagcacctaaaattacgtcgcgactctcgtacgcgtatatgtctaacgttcttctaacgtagtcgcgaagacaccaggtcgaacctacgttatctagaccgcaagagtcgcacgcgtatatgtctatagttaggatagcgctgccgctccgatattaatgatcctcgtcataaattccgtaagcttagagacgatcagaaaaatcaacagtctctctaaacggatgaagttttcccaggtcccgnccgccacgccaggggagataaaccacataagaaacaaaag

SEQ ID NO: 255694 - DNA, 497 bp, Glycine max
  unsure (1)..(497): unsure at all n locations
gcttggaacctttgggctgatttatgtgcttgtttatgtgcttgcatggtcgtgaaaagatcatagaaggggatagtaaaaataaccaacaaagacgagcccgaagaataatacggcggcgtcaaaggcgcgcccgccgtcctccccttccgcgggggccatagtcgtatgtacggaatcgagtcctcctaaaagcgactagctactaagccacgacgacgacgagcacctaaaattacgtcgcgactctcgtacgcgtatatgtctaacgttcctctaacgtagtcgcgaagacaccaggtcgaacctacgttatctagaccgcaagagtcgcacgcgtatatgtctatagttaggatagcgctgccgctccgatattaatgatcctcgtcataaattccgtaagcttagagacgatcagaaaaatcaacagtctctctaaacggatgaagttttcccaggtcncgcccgccacgccaggggagataaacaaaata

SEQ ID NO: 255695 - DNA, 368 bp, Glycine max
tttgggctgatgtatgtgcttgcatggtcgtgagaagatgataaaagggcatggtcgtgagaagatgatagaagggcatgggggtgagaagatgatagaagggcgtggtcgtgagaagatgatagaagggcatggtcgtgagaagatgatagaagggcatggtcgtgagaagatgatagaaggcgctggtcgtgagaagatgatagaagggcatggtcgtgagaagatgatagaagggcatggtcgtgagaagatgatagaagggcatggtcgtgagaagatgatagaagggcatggtcgtgagaagatgatagaagggcatggtcgtgagaagatgatagaagggcatggtcgtgagaagatcatag

SEQ ID NO: 255696 - DNA, 464 bp, Glycine max
tggcttggaacctttgggctgatttatgtgcttgcatggtcgtgagaagatgatagaaggggacttaacttaaccgaacctcttagagagaagaagaaatccaactgactactatcctatcctatcaacatactacggtagatgagatttagaataagcacgagagtctcgaggccgaggcttaggactgcggcgcccccgatccctctggcaagaaaaaggacgaagaagataagttctacttctaggaggaggctactgttattgagccctaaaaagctatcgctctagattaaggagagaataagtatagttctccagaaaagtcctattgactcgatagtagtctcagtctcctaagcgaggaagaaggagaagacggagagaaaaggaagaagaagaagaaagaaaagaaagggtcgaaagagaagactgaggagaaaacagagggcgactactactac

SEQ ID NO: 255697 - DNA, 289 bp, Glycine max
acccactcacgacaaactcggcaaaggcacaccacgcaccagccctggaaaagcccatcccataactacccccaaaaaacacccaccaaacccctataccaacgaaaccgccaaacaccttaccaccctccaaccacaccacaccaccgaccaacccacctccaccaataaacacccccaacccacccaccacttaccaaacccactttcaaccacactacccctccaaaaccactcccaatataccccccaactccaccaccaccccacacccccacccaacaaccct

SEQ ID NO: 255698 - DNA, 239 bp, Glycine max
tagaagggcatggtcgtgagaaggtgatacacgggcatgggcgtgagaagatcataggagggcatggtcgtgagaagatgatagaagggcatggtcgtgagaagatgatagaagggcatggtcgtgagaagatgatagaagggcatggtcgtgagaagatgatagaagggcatggtcgtgagaagatgatagaagggcatggtcgtgagaagatgatagaagggcatggtcgtgagaag

SEQ ID NO: 255699 - DNA, 316 bp, Glycine max
gaacctttgggctgatttatgtgcttgcatggtcgtgagagatgatagaagggcatcgtcgtgagaagatgatagaagggcatggtcgggagaagatgatagaagggcatggtcgtcagaagatgatagaagggcatggtcgtgagaagatgatagaagggcatggtcgtgagaagatgatagaagggcatggtcgtgagaagatgatagaagggcatggtcgtgagaagatgatagaagggcatggtcgtgagaagatgatagaagggcatggtcgtgagaagatgatagaagggcatggtcgtgagaagatgat

SEQ ID NO: 255700 - DNA, 324 bp, Glycine max
  unsure (1)..(324): unsure at all n locations
gcatggtcgtgagaagatgatagaagggcatggtcgtgagaagatgatagaagggcatggtcgtgagaagatgatagaagggcatggtcgtgagaagatgatagaagggcatggtcgtgagaagatgatagaagggcatggtcgtgagaagatgatagaagggcatggtcgtgagaagatgatagaagggtcagcattattcaaaaacaccccctttcaccaaaccataataaaaacagcangggaaaaaaaaaaaaaaaaaaaaaaaaaaaaagtggttgtctcagaggacttaagtccatgcatgtgcgtacgtgatgctac

SEQ ID NO: 255701 - DNA, 463 bp, Glycine max
ttgggctgattttgtgcttgcatggtcgtgagaagatcatagaaggggatcagtaaacataaccaacaaagacgagcccgaggaatggtacggcggcgtcaaaggcgcgcccgccgtcctccccttccgcgggggccatagtcgtatgtacggaatcgagtcctcctaaaagcgactagctactaagccacgacgacgacgagcacctaaaattacgtcgcgactctcgtacgcgtatatgtctaacgttcttctaacgtagtcgcgaagacaccaggtcgaacctacgttatctagaccgcaagagtcgcacgcgtatatgtctatagttaggatagcgctgccgctccgatattaatgatcctcgtcataaattccgtaagcctagagacgatcagaaaaatcaacagtctctccaaacgggtgaagttttcccaggtcccgcccgccacgccaggggaga

SEQ ID NO: 255702 - DNA, 485 bp, Glycine max
gcttggaacctttgggctgatttatgtgcttgcatggtcgtgagaagatgatagaagggcatcgtcgtgagaagatgatagaagggcatggtcgtgagaagatgatagaagggcatggtcgtgagaagatgatagaagggcatggtcgtgagaagatgatagaagggcatggtcgtgagaagatgatagaaggacatggtcgtgagaagatgatagaaggacatggtcgtgagaagacgatagaagggcatggtcgtgagaagatgatagaagggcatggtcgtgagaagatgatagaagggcatggtcgtgagaagatgatagaagggcatggtcgtgagaagatgatagaagggcatggtcgtgagaagatgatagaagggcatggtcgtgagaagatgatagaagggcatggtcgtgagaagatgatagaagggcatggtcgtgagaagatgatagaagggcatggtcgtgagaagatgata

SEQ ID NO: 255703 - DNA, 486 bp, Glycine max
  unsure (1)..(486): unsure at all n locations
gcttcgacctttgggctgatttatgtgcttgtttatgtgcttgatggtcgtgagatgatagacggggatagtaaaaataaccaacaaagacgagcccgaagaataatacggcggcgtcaaaggcgcgcccgccgtcctccccttccgcgggggccatagtcgtatgtacggaatcgagtcctcctaaaagcgactagctactaagccacgacgacgacgagcacctaaaattacgttgcgactctcgtacgcgtatatgtctaacgttcntctaacgtagtcgcgaagacaccaggtcgaacctacgttatctagaccgcaagagtcgcacgcgtatatgtctatagttaggatagcgctgccgctccgatattaatgatcctcgtcataaattccgtaagcttagagacgatcagaaaaatcaacagtctctctaaacggatgaagttttcccaggtcccgnccgccacgccaggggagataaac

SEQ ID NO: 255704 - DNA, 459 bp, Glycine max
aacctttggtctgatttatgtgcttgcatggtcgtgagaagatcatagaaggggacttaacttaaccgaacctcttagagagaaggggaaatccaactgagtactatgctatcctatcaacatactacggtagatgagatttagaataagcacgagagtctcgaggccgaggcttaggactgcggcgcccccgatccctctggcaagaaaaaggacgaagaagataagttctacttctaggaggaggctactgttattgagccctaaaaagctatcgctctagattaaggagagaataagtatagttctccagaaaagtcctattgactcgatagtagtctcagtctcctaagcgaggaggaaggagaagacggagagaaaaggaagaagaagaagacggaaaagaaagggtcgaaagagaagactgaggagaaaacagaaggcgactactactactat

SEQ ID NO: 255705 - DNA, 484 bp, Glycine max
aacctttgggctgattgatgtgcttgcatggtcgtgagaagatcatagaaggggatcctaaaaataaccaacaaagacgagcccgaagaataatacggcggcgtcaaaggcgcgcccgccgtcctccccttccgcgggggccatagtcgtatgtacggaatcgagtcctcctaaaagcgactagctactaagccacgacgacgacgagcacctaaaattacgtcgcgactctcgtacgcgtatatgtctaacgttcttctaacgtagtcgcgaagacaccaggtcgaacctacgttatctagaccgcaagagtcgcacgcgtatatgtctatagttaggatggcgctgccgctccgatattaatgatcctcgtcataaattccgtaagcttagagacgatcagaaaaatcaacagtctctctaaacggatgaagttttcccaggtccccgccgccacgccaggggagataaacaaaataagaaa

SEQ ID NO: 255706 - DNA, 196 bp, Glycine max
aaatgataagcggaaatacaaggcgacggaaaaaaaaaaaaaaaaaaaaaaaaaaaaaaaaaaaaaaaaaaaaaaaaaaaaaaaaaaaacaaaaaaaaaaaaaaaaaaaaaaaataaacaaaaaaaaaaaaccaaaaaaaaaaacatccatccccaaaaaaaaaaaatccaacaaataacaacaccaacccaaaaa

SEQ ID NO: 255707 - DNA, 422 bp, Glycine max
ttggctgatgattgctgctggtcgtgagaatgatcagagggggtatcctaaccgtaactaaaccagcctacctctccggtgtagcctttcattctcttcgctaagacgtagactcctgctaagatttctattggaaagattactatttccgaggcggaaagtctcgatattactgataatgctaaggttaagacttaggataaggaaggaacctttttggactagtaatgctctactcctgttggaaagtagtctgaggatggttgcatttctgttgatcataatacttagaaggagctaatttcctattccgcttcctgctcttgcggcggtacgtagactcctgctaagatctctatcggtaaaattacaatttcagaagctgaaagtctcgatattaccgataatgctaaggttaagac

SEQ ID NO: 255708 - DNA, 446 bp, Glycine max
tgggctgagtgatgtgcttgcatggtcgtgagaaggatagaagggcatggccgtgagaagatgatagaagggcatggtcgtgagaagatgatagaggggcatggtcgtgagaagatgatagaagggcatggtcgtgagaagatgatagaagggcatggtcgtgagaagatgatagaagggcatggtcgtcagaagatgatagaagggcatggtcgtgagaagatgatagaagggcatggtcgtgagaagatgatagaagggcatggtcgtgagaagatgatagaagggcatggtcgtgagaagatgatagaagggcatggtcgtgagaagatgatagaagggcatggtcgtgagaagatgatagaagggcatggtcgtgagaagatgatagaagggcatggtcgtgagaagatgatagaagggcatggtcgtgagaagatgatagc

SEQ ID NO: 255709 - DNA, 451 bp, Glycine max
ggaacctttgggctgatttatgtgcttgcatggtcgtgagaagatgatagaagggggtgtatttagagaggaagtccagagagagagagagagagagagagagaggagagagcaccggtgtcctattaagacgggcaccctcagggaccttacgtataagaggtgcgttatcggcggtaagaaaaaggtccggagaaagaagagaaagcacgagtccgggtgctaggtagtaaatattaagccactaagtaataagataactaggaggacctgcgccagaggcggtaacgccaaacggagggtaccgaggtcggacatcggtaaccatctacggggcagcgaagtagccatctgtaagatctgcacctcagacgccgcccataacgttctaaataatgagtccgcgtgaatctagatttcggctaagagcgtcaccgcttaggccgacgtc

SEQ ID NO: 255710 - DNA, 371 bp, Glycine max
tttgggctgatttatgtgcttgtttatgtgcttgtttatgtgcttgcatggccgtgagaagatgatagaagggcatggtcgtgagaagatgatagaagggcatggtcgtgagaagatgatagaagggcatggtcgtgagaagatgatagaagggcatggtcgtgagaagatgatagaagggcatggtcgtgagaagatgatagaagggcatggtcgtgagaagatgatagaagggcatggtcgtgagaagatgatagaagggcatggtcgtgagaagatgatagaagggcatggtcgtgagaagatgatagaagggcatggtcgtgagaagatgatagcagggcatcgtcgtgagaagatgatagaagggc

SEQ ID NO: 255711 - DNA, 412 bp, Glycine max
aacctttgggctgatttatgtgcttgcatggtcgtgagaagatgatagaaggggacaatacagccgccgcgccccaccagacggagccgtcttcccttcgccagacgaacaactaaacggccgtagcccgcgcacgccagacggagccgtcttcccttcgccagacgaacaactaaacggccgtagcccgcgcacgatgaaaaaaaaaaaaaaaaaaaaaaaaaaaaaaaaaaaaaaaacaaaaaaaaaaaaaaaaaaaaaaaaaaaaaagtggttgcctcagaggacttaagtccatgcatgtgcgtacgtgatgctacagtctcctcacagcgctattcaaacctaacctatcggttgctgccccataatgctgcgatcgggaaaatttcggtgccatttaatccaactg

SEQ ID NO: 255712 - DNA, 367 bp, Glycine max
ctccgaacctttgggctgatttatgtgcttgcatggtcgtgagaatgatagaagagcatgccacaccgccgagtagagccggatcgtcgaccaaccactccggagttctcaccgtcgccaaaaggccgctaaaggactcgaccgaacaattacacaagcatccaaaagaataaccgcgccccgcaatttccgataacgcgcccgcctagatccacacgaacagacgtcttattccacgactctaaaaaaaaaaaaaaaaaaaaaaaaaaaaaacaaaacaaacaacacattaaacaaaaaaaaaaaaaaaaaaaaaaaaaagtggttgcctcagaggacttaagtccatccatgtgcgtacgtaatg

SEQ ID NO: 255713 - DNA, 265 bp, Glycine max
ttgtaagatgatagaagggaatagtagtgagaagattatagaagggaatggtagtgagaggatgatagaaggggatagggggaataaaaaaaaaagaagaggaagaagaataatatggaggtgttaaaggtgtgtaaggagtagtagagattatgagggggtaatagtagtatgtagggaatagaatgataataaaagagattagataataagataggatgatgaagagaaaataaaattaggttgtgaatgtggtaagagtata

SEQ ID NO: 255714 - DNA, 483 bp, Glycine max
ttgggctgagttatgtgcttgcatggtcgtgagagatgatacgaggggatagtcccaaataaccaacaaagacgagcccgaagaggtatacggcggcgtcaaaggcgcgcccgccgtcctccccttccgcgggggccatagtcgtatgtacggaatcgagtcctcctaaaagcgactagctactaagccacgacgacgacgagcacctaaaattacgtcgcgactctcgtacgcgtatatgtctaacgttcttctaacgtagtcgcgaagacaccaggtcgaacctacgttatctagaccgcaagagtcgcacgcgtatatgtctatagttaggatagcgctgccgctccgatattaatgatcctcgtcataaattccgtaagcttagagacgatcagaaaaatcaacagtctctctaaacggatgaagttttcccaggtcccgcccgccacgccaggggagataaaccaaatacgaaacaaa

SEQ ID NO: 255715 - DNA, 409 bp, Glycine max
tggttccaacctttgggctgggttaggtgcttgcatggtcgtgagaagatgatagacgggcatgcgccgtgagaagatgatagaagggcattgtccgaggaacctgatagaagggcggggtcgtgagaagatgatagaagggcatggtcgtgagaagatgatagaagggcatggtcgtgagaagatgatagaagggcatggtcgtcagaagatgatagaagggcatggtcgtgagaagatcatacaagggcatggtcgtgagaagatgatagaagggcatggtcgtgagaagatgatagaacggcatggtcgtgagaagattatagaagggcatggtcgtcagaagatgatagaagggcatggtcgtgagaagatcatagaacggcctcgtcgtcacaagatcatacaa

SEQ ID NO: 255716 - DNA, 478 bp, Glycine max
ttgggctgagttatgtgcttgaggatgtgcgggtggtcgtgagaagatgatagcagggggcatatagttctaataatttcaatgtgcgtacagcagagagagatgtgagttacggggtgaagatttgtgaggcgccacaggtaaaccaagaataaattacattttaagctatggccccgttgcggcgccttcgactttaagactaggacccatgacgccggcacgaagaagaagggcgccgacgagcccttccctcgcgcttactcggccagccgggagaaggaaaatgccctcagcgaggtttcggaagtcgtctgcaccgtccgtaataagcatacggttaaacccgtcggaaaggacgtcccttatccgagagctagggcgtatttaccttacgcctccaggactaataagacgtccctgcgcgtcggagtcgacaggtcttaaatcggaacgagaggcgtccccggaaagttat

SEQ ID NO: 255717 - DNA, 280 bp, Glycine max
  unsure (1)..(280): unsure at all n locations
ggtcgtaaagagatgattgatgggtatagtngtgggaagatggtagaggggagtggaagtgagaagattatagaagggaatggatgtgagaagatgatagaagggtatggtngtgagaagatgatagaagggcatggtngtgagaagatgatagaagggtatagtngtgagaagatgatagaagggnatggttgtgagaagatgatagaagggtataggngagagaaagtagtagaagagtatggtcgttgagaagatgatagatgggtatagtcgtgag

SEQ ID NO: 255718 - DNA, 404 bp, Glycine max
  unsure (1)..(404): unsure at all n locations
gacagttaanacaattaataaaggtgagtttgaagagcgacatggtggtgctaaaggtgtgtttgttgcttcttttccttgtgggggttacagctgcacgcatggaactgagcttcttcaaaagtgatcagtcatcaagttatgatgatgatgagtattcaaaaccatgctgtgatctctgcatgtgcacacgctcaatgcctnctcaatgcagctgtgaagatattaggctggattcatgccactcagattgtaagagctgtatgtgcacacgctcacagccaggacagtgtcgttgtcttgacaccaacgacttctgctacaaaccttgcaagtccagagatgactagaaaactaatagctctctcaaatggacgaagcccctttaggctttggttggtatg

SEQ ID NO: 255719 - DNA, 446 bp, Glycine max
tgggatgcaactgaataattaagaaaagccatttccatagcggcctagtaaaatttagagcactagcttggtcgctatctttctactttgcgccttcacctcatacctaccttccgccaccggccacgacgtgctcgacttggatggctatccgattcagaacggactcatatactacgttttgcccgcaataaaaggaaactgtggccgaatacaacgagcctcactcgggaaaaacactctccctatcactgtactgcaatctcccaatccaaactctaaagcgttagaaattaagttagaatctgcataccccgtctattacataaacgaaaccctaatttttcaaataaagatcagttacccacatcagcgtgaaagaaataatccttggtgggccatttctaaggatatatcttaaagaccacctgctattaaactctctg

SEQ ID NO: 255720 - DNA, 384 bp, Glycine max
  unsure (1)..(384): unsure at all n locations
aggacaactaactaagacagtcttccatagccccccaaaaatgaagagcgaccatcttctttgctctctgtctcttttgtgccttcaccacctcatacctaccttcagccatcgctgatttcgtgctcgataatgaatgtaaccctcttgaaaatggtggcacatattatatcttgtcagacataacagcatntggtggaataagatcatccccaacgggaaatgaaagatgccctcttactgtggtgcaatctctcaatgagctcgacaaaaggattggaacaatcatctcgtccccatatcgaatccgttttatcgccgaaggccatcctttgagccttaagttccattcatttgccagtataatgctgtgtgttggaattc

SEQ ID NO: 255721 - DNA, 413 bp, Glycine max
aatgccaaatggggccaaaaaactatggaggttgggcaggttattaaaaccacggagcaggtttcaaggaaggcacttgcaagggatgcaagggaggcacttgcaagggatgcaagggaagctgctgcaagggatgcaaaggtggaggcaagggatgtaaagagaacaacagtgacagcaacaaccgcaaccgcatgatgagtaattctgatattagagggagcattaatgtgttgttgtgatgtggtttatatggcgaaattaaataaatgatgtatgtacctcttgcctatgtaggtttgcgtgttatgatctgttgactagctttggctattaagtaatatggacgttcgttcgtgtctcacacaaaggggtactaccactctgtagtgtatatggatgctgcaaatcaa

SEQ ID NO: 255722 - DNA, 312 bp, Glycine max
  unsure (1)..(312): unsure at all n locations
gacagcaaaatcaattaataaagatgagtttgaagaacaacatggtggtgctaaaggtgtgtttgttgcttcttttccttgtggnggttacagctgcacgcatggaactgagcttcttcaaaagtgatcagtcatcaagttatgatgatgatgagtattcaaaaccatgctgtgatctctgcatgtgcacacgctcaatgcctnctcaatgcagctgtgaagatattaggctgaattcatgccactcagattgtaagagctgtatgtgcacacgctcacaaccaggacagtgtcgttgtcttgacaccaacg

SEQ ID NO: 255723 - DNA, 480 bp, Glycine max
ttgggctgatttatgtgcttgcatgcgtgagaagatgatagacccggatagcaaaaataaccaacaaagacgagggcgaagagtaatacggcggcgtcaaaggcgcgcccgccgtcctccccttccgcgggggccatagtcgtatgtacggaatcgagtcctcctaaaagcgactagctactaagccacgacgacgacgagcacctaaaattacgtcgcgactctcgtacgcgtatatgtctaacgttcttctaacgtagtcgcgaagacaccaggtcgaacctacgttatctagaccgcaagagtcgcacgcgtatatgtctatagttaggatagcgctgccgctccgatattaatgatcctcgtcataaattccgtaagcttagagacgatcagaaaaatcaacagtctctctaaacggatgaagttttcccaggtcccggccgccacgccagggcgagatacacaaaatacgaaaca

SEQ ID NO: 255724 - DNA, 293 bp, Glycine max
  unsure (1)..(293): unsure at all n locations
tgacagcaaaaacaattaataaagatgagtttgaggaacaacatggtggtgctaaaggtgtgtttgttgcttcttttccttgtgggggttacagctgcacgcatggagctgagcttcttcaaaagtgatcagtcatcaagttatgatgatgatgagtattcaaaaccatgctgtgatctctgcatgtgcacacgctcaatgcctnctcaatgcagctgtgaagatattaggctgaattcatgccactcagattgtaagagctgtatgtgcacacgcttacagtcaggacagtg

SEQ ID NO: 255725 - DNA, 380 bp, Glycine max
ttaagttgcagccaaagaaaagaaaatcctcaagtttctgagcagccaaacactctgtctctgtctctcgaaaattctcagtttgcagagaaaatctgaatcatgtcgtggcaagcgtatgtcgacgatcaccttctgtgtgacatcgaatgtaaccacctcactcacgctgctatcatcggccaagacggcagcgtttgggctcagagtaccgacttccctcagttcaaacctgaggagataacttgcatcatgaatgactttaatgagcctggatcacttgctccaactggattgtatctcggtggcaccaaatatatggtcatccaaggtgaacccggtgctttcattccaaggaaaaaaggtcctggtggtgttac

SEQ ID NO: 255726 - DNA, 227 bp, Glycine max
  unsure (1)..(227): unsure at all n locations
gacagcaaaatctattattaaagatgagtttgaagaccaccatagtggtgctaaaggtgtgtttgttgcttcttttccttgtgggggttacagctgcacgcatggaactgagcttcttcaaaagtgatcagtcatcaagttatgatgatgatgagtattcanaaccatgctgtgatctctgcatgtgcacacgctcaatgcctnctcaatgcagctgtgaagatatt

SEQ ID NO: 255727 - DNA, 236 bp, Glycine max
gttggtgagggtatggaagaaggagagttctctgaagctcgtgaggatcttgctgctcttgagaaggactatgaggaggttggggctgaaggagcggaagatgattaggaaggagaggactattcataaatgaaggttttattatcaatgtaattgtttcgagtaaatagggtatatgcttcgttacattaccctgaaccagtattgttcgttccctttttgttttactcctgggt

SEQ ID NO: 255728 - DNA, 365 bp, Glycine max
tgacagcaaaaacaattaataaagatgagtttggagaacaacatggtggtgctaaaggtgtgcttgttgcttcttttccttgtgggggttacagctgcacgcatggaactgagcttcttcaaaagtgatcagtcatcaagttatgatgatgatgagtattcaaaaccatgctgtgatctctgcatgtgcacacgctcaatgccttctcaatgcagctgtgaagatattatgctggattcatgccactcagattgtaagaactgtatgttcacacgcttacagtcaggacagtgtttttgactttacacccatcacttttgctacaaaccttgcaagttcagagattactagaaaaacttatactt

SEQ ID NO: 255729 - DNA, 264 bp, Glycine max
gacaaacattattcctaatccttatcctgtttgcttccatggaggtgatttccgcttcgagcttgaatcccaacgctccgatgttcgtgcctctcgcctatcggacggtggaggatttctccgaccaatggtgggacctcgtccactcctccccctggttccgcgactactggctccgcaagtgcttccaagatccccagtaccaatacgacaacgttttcaacttcaactttgacctagatctccaagataaagatgaaaatg

SEQ ID NO: 255730 - DNA, 300 bp, Glycine max
gacacaactatctaagaaagtcttccatagccccccaaaaatgaggagcaccatcttctttgccctctttctcttttgtgccttcaccacctcatacctaccttcagccatcgctgatttcgtgctcgataatgaaggtaaccctcttgaaaatggtggcacatattatatcttgtcagacataacagcatttggtggaataagagcagccccaacgggaaatgaaagatgccctctcacttgggtgcaatctcgcaatgagctcgacaaagggattggaacaatcaccttctccccata

SEQ ID NO: 255731 - DNA, 339 bp, Glycine max
tgtcagcaaaaactattaataaagattaattttgagaaccacgtggtggggcctaaaagtgttgttggtggttctttttcctggtgggggtacaagttgcacccttggacctgacctctttaaaaagtgtccagtcttaaagtattattgatattaagttttcaaacccatcctgggatctctgcatgtgcacaccctcaatgcttcctaaatgcacctgtgaagatattaggctgaattcatgccactcagattgtaagagctgtatgtgcacacgctcacagccaggacagtgtctttgtcttgacaccaacgacttttgctacaaaccttgcaagt

SEQ ID NO: 255732 - DNA, 493 bp, Glycine max
ggcttggaacctttgggctgatttatgtgcttgcatggtcgtgagaaatgatagacgggcatggtcgtgagaagatgatagaagggcatggtcgtgagaagatgatagaagggcatggtcgtgagaagatgatagaagggcatggtcgtgagaagatgatagaagggcatggtcgtgagaagatgatagaagggcatggtcgtgagaagatgatagaagggcatggtcgtgagaagatgatagaagggcatggtcgtgagaagatgatagaagggcatggtcgtgagaagatgatagaagggcatggtcgtgagaagatgataaacaaaaaaaaaaaaaaaaaaaaaaaaaagtggttgtctcagaggacttaagtccatgcatgtgcgtacgtgatgctacagtctcctcacagcgctattcaaacctaacctatcggttgctgccccataatgctgcgatcgggaaaatttcggtgccatttaatccaact

SEQ ID NO: 255733 - DNA, 315 bp, Glycine max
gacagcataaagaattggtaaagatgagtttgaagaacaacatggtggtgctaaaggtgtgtttgttgcttcttttccttgtgggggttacagctgcacgcatggaactgagcttcttcaaaagtgatcagtcatcaagttatgatgatgatgagtattcaaaaccatgctgtgatctctgcatgtgcacacgctcaatgccttctcaatgcagctgtgaagatattaggctgaattcatgccactcagattgtaagagctgtatgtgcacacgctcacagccaggacagtgtcgttgtcttgacaccaacgact

SEQ ID NO: 255734 - DNA, 164 bp, Glycine max
tgactgttacagcaaatacaattaataaacatgagtttggtgaacatcatggtggtgctaaaggtgcttgtgttgcttcttttccttgtcatggttgcaactgcactcatggaacttaacttcttcaaaagtgatcattcatcatgttatgatgcttactagta

SEQ ID NO: 255735 - DNA, 294 bp, Glycine max
cgaaggaagggagggaagaatagaatgatatcgggaagtggaaaacacactggagagttcttcatgagaatggatgcatggaggaagcatacgatgctcaccaatcagctccgccacgccacccctggccttggcatcgccgacgtcgccttcggtatctacctcgtcggcgaacaagtctacaataggctctatgctcccgatcctcattcgatttctcacgtgaaaaccggggatcaccactaaacgtttggacggacgcacttcattccatcatcacttaataagcttgct

SEQ ID NO: 255736 - DNA, 198 bp, Glycine max
gacagcaaattcaattaataaagatgagtttgaagaacaacatggtggtgctaaaggtgtgtttgttgcttcttttccttgtgggggttacagttgcacgcatggaactgagcttcttcaaaagtgatcagtcatcaagttatgatgatgatgagtattcaaaaccatgctgtgatctctgatgtgcacacgctcaat

SEQ ID NO: 255737 - DNA, 464 bp, Glycine max
aaccttggctgattgattgctgctcgtcgtcagagatcatacccgggtactaaaataaccaacaaagagagcccaggaatatacggcggggtcaaaggcgccccgcgtcctccccttccgcgggggccatagtcgtatgtacggaatcgagtcctcctaaaagcgactagctactaaccacgacgacgacgagcacctaaaattacgtcgcgactctcgtacgctaatctctaacgttcttctaacgtagtcgcgaagacaccaggtcgaacctacgttatctagaccgcaagagtcgcacgcgtatatctctatagttaggatagcgcctccgctccgatattaatcattctcctcataaattccgtaagcttacacacgatcacaaaaatcaacagtccctccacacggatgaactttctccaagtcccgcccggcacgccaggggagataaacaaaataaa

SEQ ID NO: 255738 - DNA, 318 bp, Glycine max
gattcacacaactaactaagaaagtcttccatagccccgcaaagatgaagagcaccatcttctttgctctctttctcttttgtgccttcaccacctcatacctaccttcagccatcgctgatttcgtgctcgataatgaaagtaaccctcttgaaaatggtggcacatattatatcttgtcagacataacagcatttggtggaataagagcagccccaacggggaatgaaagatgccctctcactgtggtgcaatctcgcaatgagctcgacaaagggattggaacaatcatctcgttcccatatcgaatccgtttta

SEQ ID NO: 255739 - DNA, 140 bp, Glycine max
ctctgcatagtgcacactgctcaattgccttctcaatgcatgctgtgtaagatatttaggctgaattcatgccacttcagattgtaagaagctgtatgtgcacacgctcacagtcaggacagcttcgttgtcttgacacc

SEQ ID NO: 255740 - DNA, 279 bp, Glycine max
gcagaatcttggagacaaagcagtgatgtgtcataggctaaattgcagaactgcagtattttactgcgatgaagtccgtgaaacaacagctttcatggttccattggtggctggtgatggaaccaaaactcaggcacttgctatttgccactcaaatacttctggaatgaatcatcaaatgcttcatcaacttatgggagttgatcctggaactaaccctgtttgccatttccttggaagcaaggccattttatgggtactcaatttatctgtggacac

SEQ ID NO: 255741 - DNA, 357 bp, Glycine max
gattcacacatctaactaagaaagtcttccatagccccccaaaagtgaagagcaccatcttctttgctctctttctcttttgtgccttcaccacctcatacctaccttcagccatcgctgatttcgtgctcgataatgaaggtaaccctcttgaaaatggtggcacatattatatcttgtcagacataacagcatttggtggaataagagcaaccccaacgggaaatgaaagatgccctctcactgtggtgcaatctcgcaatgagctcgacaaagggattggaacattcatctcgtccccatatcgaattcgttttatcgccgaaggccatccttgacccttaagttcgattcatt

SEQ ID NO: 255742 - DNA, 419 bp, Glycine max
agaggggatagtaaaaataagcaacaacgacgagcgcgaagaggaatacggcggcgtcaaaggcgcgcccgccgtcctccccttccgcgggggccatagtcgtatgtacggaatcgagtcctcctaaacgcgactagctactaagccacgacgacgacgagcacctaaaattacgtcgcgactctcgtacgcgtatatgtctaacgttcctctaacgtactcgcgaagacaccaggtcgaacctacgttatctagaccgcaagagtcgcacgcgtatatgtctatagttaggatagcgctgccgctccgatattaatgatcctcgtcataaattccgtaagcttagagacgatcagaaaaatcaacagtctctctaaacggatgaagttttcccaagtccccgcccgccacgccagggg

SEQ ID NO: 255743 - DNA, 238 bp, Glycine max
  unsure (1)..(238): unsure at all n locations
gaggttagagtgaggttggtgcatgcctaanggtgaatgtctatccaaagtgccctcaacctgacctcacttttggactctcccctcactcagatcctggtggcatgaccattcttctccctgatgattttgtgtctggccttcaagtaagaagaggagatgaatggattacagttaagcctgtcccaaatgccttcatcatcaacattggtgaccaaattcaggtgctgagcaatgc

SEQ ID NO: 255744 - DNA, 466 bp, Glycine max
tgggctgattttgtgcttgcatcgtcgtcagaagatcatagacggggatagtaaaaataaccaacaaagacgggcccgaagaataatacggcggcgtcaaaggcgcgcccgccgtcctcctcttccgcgggggccatagtcgtatgtacggaatcgagtcctcctaaaagcgactagctactaagccacgacgacgacgagcacctaaaattacgtcgcgactctcgtacgcgtatatgtctaacgttcttctaacgtagtcgcgaagacaccaggtcgaacctacgttatctagaccgcaagagtcgcacgcgtatatgtctatagttaggatagcgctgccgctccgatattaatgatcctcgtcataaattccgtaagcttagagacgatcagaaaaatcaacagtctctctaaacggatcaagttttcccaggtcccgcccgccacgccaggggagatacac

SEQ ID NO: 255745 - DNA, 245 bp, Glycine max
  unsure (1)..(245): unsure at all n locations
gattcacacaactaactaagaaagtcttccagagccccccaaaaatgaagagcaccatcttctttgctctctttctcttttgtgccttcaccacctcatacctacctccagccatcgctgatttcgtgctcgataatgaaggtaaccctcttgaaaatggtggcacatattatatctngtcagacataacagcattttgtggaataagagcagccccaacgggaaatgaaagatgccctctcact

SEQ ID NO: 255746 - DNA, 423 bp, Glycine max
tggcttggaacgttggggctgatttatgtgcttgcatggtcgtcagaagatgatagcagggatcataatacttagaaggaactaaggtcctattgtgcttcgtgctcttgcggcggtacgtagactcctgccaagatttctattggtaagatcacaatttcagaagctgagagtcttgatattactgataatgctaaggtcaagacttaggataaggagggcacttttttagattagtagaggtcgactcctgttggtaagtagtctgaggatggatgcatttccgtcgatcataatacttagaaggagctaatctcttatccggcgccgtgctcctgcggcggcacgtagactcctgctaagatttccatgggcaagatcaccatttctgaggcggagagtcttgatattaccgataacgcg

SEQ ID NO: 255747 - DNA, 476 bp, Glycine max
tggcttggaacctttgggctgatttatgtgcttgcatggtcgtgagaagatgatagaaggggatagtaaaaataaccaacaaagacgagcccgaagaagaatacggcggcgtcaaaggcgcgcccgccgtcctccccttccgcgggggccatagtcgtatgtacggaatcgagtcctcctaaaagcgactagctactaagccacgacgacgacgagcacctaaaattacgtcgcgactctcgtacgcgtatatgtctaacgttcttctaacgtagtcgcgaagacaccaggtcgaacctacgttatctagaccgcaagagtcgcacgcgtatatgtctatagttaggatagcgctgccgctccgatattaatgatcctcgtcataaattccgtaagcttagagacgatccgaaaaatcaacagtctctctaaacggatgaaattttcccaggtcccggccggcacgccagggggag

SEQ ID NO: 255748 - DNA, 445 bp, Glycine max
tggcttggaacctttgggctgattgatgtgcttgcatggtcgtgagaagatgatagaagggcatggtcgtgagaagatgatagaagggcatggtcgggagaagatgatagaagggcatggtcgtgagaagatgatagaagggcatggtcgtgagaagatgatagaagggcatggtcgtgagaagatgatagaagggcatggtcgtgagaagatgatagaagggcatggtcgtcagaagatgatagaagggcatggtctgagaagatgatagaagggcacgaaaacagacactaccattaaaaacgaaaagcgcaacaaaaaaaaaaaagtggttgtctcagaggacttaagtccatgcatgtgcgtacgtgatgctacagtctcctcacagcgctattcaaacctaacctatcggttgatgccccataaatgcacgatcgggaaa

SEQ ID NO: 255749 - DNA, 499 bp, Glycine max
  unsure (1)..(499): unsure at all n locations
ggcttggaacctttgggctgattgatgtgcttgtttatgtgcttgtttatgtgcttgcatggtcgtcagaagatgatagaaggggatagtagaggtaaccaacaaagacgagcccgaagaataatacggcggcgtcaaaggcgcgcccgccgtcctccccttccgcgggggccatagtcgtatgtacggaatcgagtcctcctaaaagcgactagctactaagccacgacgacgacgagcacctaaaattacgtcgcgactctcgtacgcgtatatgtctaacgttcttctaacgtagtcgcgaagacaccaggtcgaacctacgttatctagaccgcaagagtcgtacgcgtatatgtctatagttaggatagcgctgccgctccgatattaatgatcctcgtcataaattccgntagcttagagacgatcagacaaatcaacagtctctctaaacggatgaagttttcccaagtcccgcccgccacgccaggggaga

SEQ ID NO: 255750 - DNA, 474 bp, Glycine max
tggctccgaacctttgggctgattgatgtgcttgcatggtcgtgagaagatgatagaaggggatcgtaaaaataaccaacaaagacgagcccgaagagataatacggcggcgtcaaaggcgcgcccgccgtcctccccttccgcgggggccatagtcgtatgtacggaatcgagtcctcctaaaagcgactagctactaagccacgacgacgacgagcacctaaaattacgtcgcgactctcgtacgcgtatatgtctaacgttcttctaacgtagtcgcgaagacaccaggtcgaacctacgttatctagaccgcaagagtcgcacgcgtatatgtctatagttaggatagcgctgccgctccgatattaatgatcctcgtcataaattccgtaagcttagagacgatcagaaaaatcaacagtctctctaaacggatgaagtttttccaggtcccgcccgccacgccagggg

SEQ ID NO: 255751 - DNA, 278 bp, Glycine max
ggcttggaacctttgggctgattggagtgcttgcatggtcgtgagaagatgatagaagggcatggtcgtgagaagatgatagaagggcatggtcgggagaagatgatagaagggcatggtcgtgagaagatgatagaagggcatggtcgtgagaagatgatagaagggcatggtcgtgagaagatgatagaagggcatggtcgtgagaagatgatagaagggcatggtcgtgagaagatgatagacgggcatgggcgtgagaagatgatagaaaggca

SEQ ID NO: 255752 - DNA, 382 bp, Glycine max
gcttggaacctttgggctgattgatgtgcttgcatggtcgtgagaagatgatagaagggccatggtcgtgagaagatgatagaagggcatggtcgtgagaagatgatagaagggcatggtcgtgagaagatgatagaagggcatggtcgtgagaagatgatagaagggcatggtcgtgagaagatgatagaagggcatggtcgtgagaagatgatagaagggcatggtcgtgagaagatgatagaagggcatcgtcgtgagaagatgatagaagggcatggtcgtgagaagatgatagaaaggcatggtcgtgagaagatgatacaaggggtagtaaaaataaccaacaaagacgaagccgaagaataatacggcggcgtca

SEQ ID NO: 255753 - DNA, 398 bp, Glycine max
gaacctttgggctgatttatgtgcttgtttatgtgcttgcatggtcgtgacaagatgatagaagggcatggtcgtgagaagatgatggaagggcatggtcgtgagaagatgatagaagggcatggtcgtgagaagatgatagaagggcatggtcgtgagaagatgatagaagggcatggtcgtgagaagatgatagaagggcatggtcgtgagaagatgatagaagggcattgtcgtgagaagatgatagaacggcatggtcgtgagaagatgatagaagggcatggtcgtgagaagatgatagaagggcatggtcgtgagaagatgatagaagggcatggtcgtgagaagatgatagaagggcatggtcgtcagaagatgatcgcagggcatagtcg

SEQ ID NO: 255754 - DNA, 473 bp, Glycine max
aacctttgggctgatttatgtgcttgcatggtcgtgagaagatgatagaaggggatagtaaaaataaccaacaaagacgagcccgagagaataatacggcggcgtcaaaggcgcgcccgccgtcctccccttccgcgggggccatagtcgtatgtacggaatcgagtcctcctaaaagcgactagctactaagccacgacgacgacgagcacctaaaattacgtcgcgactctcgtacgcgtatatgtctaacgttcttctaacgtagtcgcgaagacaccaggtcgaacctacgttatctaggccgcaagagtcgcacgcgtatatgtctatagttaggatagcgctgccgctccgatattaatgatcctcgtcataaattccgtaagcttagagacgatcagaaaaatcaacagtctctctaaacggatgaagttttcccaggtcccgcccgccacgccaggggagataaa

SEQ ID NO: 255755 - DNA, 451 bp, Glycine max
  unsure (1)..(451): unsure at all n locations
ggaacctttgggctgatttatgtgcttgctgagaagatgatagaaggggatgtaatcaaacaagaaacgaagagcatcactcctctcggctctccctcagcccgcgttcctattactctacattcgttcctagttattgtctagcctgcgtctgatatcgacgacgacttctcctaaaatggcggtatacatcacacgccgttagccacgagaggaaagggtggcggaacagaagcagacctaatcggaaaagaaacacgtttctctatcgccgcgtaactatttaacgagtctgacaaggggaccggatcagctcccatactcttaccatacgtttcccccactgttgaaggtcacttcccgagtaccaagcccggcctacccgtagccacaatgtcgcgcgttggtacgttcatcgagcgggtcaccgncgagagagagggctcataag

SEQ ID NO: 255756 - DNA, 347 bp, Glycine max
tggaacctttgggctgatttatgtgcttgcatggtcgtgaaagatgatagaagggggcagtacacccgagatcaatctggagagaaagagagagagagagagaaaaacggtcgacataagcggaggagacgtagcgagattggcggcaacacgcgacaataagcgcggtcgtatagccttacgtatcggcggccttatccgtgggcgtataagcgctggtacgataatcggaggtggcgactatgcgatacgtctgcgtggagagcatcgcgggcgtaacttacgtctacgctttaagatcgtggtcctcggaatcggccgtagacgcggtatagaccgtctacgcg

SEQ ID NO: 255757 - DNA, 486 bp, Glycine max
ttggcccggaacctttgggctgatttagtgcttgcatggtcgtgagaagatgatagaaggggatcgtaaaaataaccaacaaagacgagcccggggaataatacggcggcgtcaaaggcgcgcccgccgtcctccccttccgcgggggccatagtcgtatgtacggaatcgagtcctcctaaaagcgactagctactaagccacgacgacgacgagcacctaaaattacgtcgcgactctcgtacgcgtatatgtctaacgttcttctaacgtagtcgcgaagacaccaggtcgaacctacgttatctagaccgcaagagtcgcacgcgtatatgtctatagctaggatagcgctgccgctccgatattaatgatcctcgtcataaattccgtaagcttagagacgatcagaaaaatcaacagtctctctaaacggatgaagttttcccaggtcccgcccgccacgccaggggagataaacaaaat

SEQ ID NO: 255758 - DNA, 479 bp, Glycine max
gaacccttgggctgatttatgtgcttgcatggtcgtgagaagatcatagaagggggtcctaaacataaccaacaaagacgagcccgaggaatagtacggcggcgtcaaaggcgcgcccgccgtcctccccttccgcgggggccatagtcgtatgtacggaatcgagtcctcctaaaagcgactagctactaagccacgacgacgacgagcacctaaaattacgtcgcgactctcgtacgcgtatatgtctaacgttcttctaacgtagtcgcgaagacaccaggtcgaacctacgttatctagaccgcaagagtcgcacgcgtatatgtctatagttaggatagcgctgccgctccgatattaatgatcctcgtcataaattccgtaagcttagagacgatcagaaaaatcaacagtctctctaaacggatgaagttttcccaggtcccgcccgccacgccaggggagataaacaaaat

SEQ ID NO: 255759 - DNA, 475 bp, Glycine max
tggcttggacctttgggctgatttatgtgcttgcatggtcgtgagaagatgatagaaggggatagtaaaaataaccaacaaagacgagcccgaggaataatacggcggcgtcaaaggcgcgcccgccgtcctccccttccgcgggggccatagtcgtatgtacggaatcgagtcctcctaaaagcgactagctactaagccacgacgacgacgagcacctaaaattacgtcgcgactctcgtacgcgtatatgtctaacgttcctctaacgtagtcgcgaagacaccacgtcgaacctacgttatctagaccgcaagagtcgcacgcgtatatgtctatagttaggatagcgctgccgctccgatattaatgatcctcgtcataaattccgtaagcttagagacgatcagaaaaatcaacagtctctctaaacggatcaagctttcccacgtcccgcccgccacgccaggggaga

SEQ ID NO: 255760 - DNA, 483 bp, Glycine max
  unsure (1)..(483): unsure at all n locations
tggaacctttgggctgatttatgtgcttgcatggtcgtgagaagatgatagaaggggatagtaaaaataaccaacaaagacgagcccgagagaatagatacggcggcgtcaaaggcgcgcccgccgtcctccccttccgcgggggccatagtcgtatgtacggaatcgagtcctcctaaaagcgactagctactaagccacgacgacgacgagcacctaaaattacgtcgcgactctcgtacgcgtatatgtctaacgttcttctaacgtagtcgcgaagacaccaggtcgaatctacgttatctagaccgcaagagtcgcacgcgtatatgtctatagttaggatagcgctgccgctccgatattaatgatcctcgtcataaattccgtaagcttagagacgatcagaaaaatcaacagtctctctaaacggatgaagttttcccaggtcccgcccgncacgccaggggagataaacaaaat

SEQ ID NO: 255761 - DNA, 415 bp, Glycine max
gactcactcatacaatagagaccagcttttgcttctttgtgaacatggagatgaggaaatcatgtggcttcttcttcttactcctcctccttgtctttgcttcccaggtggtggtgcagacggagggaagagtgtgtgagtcacaaagccacgggttccatggtttgtgtaatagagaccacaactgtgctttggtctgcaggaacgaaggtttctccggtggcaggtgcaaaggcttccgccgccgctgcttttgcaccaggatttgttgagatctcatcaaacactactcttgccatgcaaattaataaatcatagctaggccaaattaattgcatctactctttatccatttgggagctagctaccacaacccactcatacttggtcattggattgctttcctttggcttct

SEQ ID NO: 255762 - DNA, 413 bp, Glycine max
gacttattaattgtgttaagaaatttaggtgaggggctagagaatgatgatgaagtctgctatgtgtgcagtggtggttgtagcacttcttcttctggcggaggtggggcccatggctgaggctgtgacatgcaccccaacagagttgagtccgtgtcttccagcaatcacttccggtgctaaaccttccaatgcttgttgcacgaagctgaagcagcaaaaaccatgcttatgtggctacctcaaaaacgctagcttgaagcagtatgttaactctcctaatgcccgaaaaaccgttgcttcttgtgggattccctttccaacttgttaattaattaagccttcttataattaaagtgtgggatatatatatatatatatagataaacagtttaatttatgcacactttgat

SEQ ID NO: 255763 - DNA, 291 bp, Glycine max
  unsure (1)..(291): unsure at all n locations
gactttgagttcgaactaaacaattcaattcaaggtgcctcgatcatggagaggaaaacatttgggtttttgttcttgctcctccttgtcttagcttctgatgtgacggtgaagagagcagaggcgaaagattgcttgacaaggaggcacgggttccagggtagatgcttattcgacaggcaatgtgcacatgtgtgcaggagcgatggtttcatcggtggtcagtgccgaggccctcttcgcaaatgcttttgcagcangccatgttgatcgaaattactactgccaaag

SEQ ID NO: 255764 - DNA, 413 bp, Glycine max
gacttattaattgtgttaagaaatttaagtgaggagctagagaatgatgatgaagtctgctatgtgtgcagtggtggttgtagcacttcttcttctggcggaggtggggcccatggctgaggctgtgacatgcaccccaacagagttgagtccgtgtcttccagcaatcacttccggtgctaaaccttccaatgcttgttgcacgaagctgaagcagcaaaaaccatgcttatgtggctacctcaaaaacgctagcttgaagcagtatgttaactctcctaatgcccgaaaaaccgttgcttcttgtgggattccctttccaacttgttaattaattaagccttcttataattaaagtgtgggatatatatatatatatatagattaacaagttaatttatgcacactttgat

SEQ ID NO: 255765 - DNA, 376 bp, Glycine max
gacagcaaaaacaattaataaagatgagtttgaggaacaacatggtggtgctaaaggtgtgtttgttgcttcttttccttgtgggggttacagctgcacgcatggaactgagcttcttcaaaagtgatcagtcatcaagttatgatgatgatgagtattcaaaaccatgctgtgatctctgcatgtgcacacgctcaatgcctcctcaatgcagctgtgaagatattaggctgaattcatgccactcagattgtaagagctgcatgtgcacacgctcacagacaggacagtgtcgttgtcttgacaccaacgacttctgctacaaaccttgcatgtccagagatgactagaaaaactaatagctctctcaaatgga

SEQ ID NO: 255766 - DNA, 416 bp, Glycine max
gattcacacaactaactaagaaagtcttccatagccccccaaaaatgaagagcaccatcttctttgctctccttctcttttgtgccttcaccacctcatacctaccttcagccatcgctgatttcgtgctcgataatgaaggtaaccctcttgaaaatggtggcacatattatatcttgtcagacataacagcatttggtggaataagagcagccccaacgggaaatgaaagatgccctctcactgtggtgcaatctcgcagtgagctcgacaaagggattggaacaatcatctcgtccccatatcgaatccgttttatcgccgaaggccatcctttgagccttaagttcgattcatttgcagttataatgctgtgtgttggaattcctaccgagtggtctgttgtggaggatcta

SEQ ID NO: 255767 - DNA, 399 bp, Glycine max
cttgacaaaagcttcgaagggacaccaaaaattgctaaaccgtaaaaaaccggggaagagaaacctgcagcaaccaaagtctcaagtatgtttggtggaactagagataaatgtgccggttgtcaaaaaacagtgtatcccactgaaaaggttactgtgaatggaactccttatcacaagagttgtttcaaatgcactcatggagggtgtgttattagtccctccaactacattgcacacgagggcaaactctactgcaagcaccaccacgttcaactgatcaaggagaaaggtaatttaaacccacttgaaagggaccactaaaagaatgcataacaagagaaaatcaaccgggaagtaattgcaacttaaacatgaaatgaaatgaaatgaaatgct

SEQ ID NO: 255768 - DNA, 387 bp, Glycine max
gacttattaattgtgttaagaaatttaggtgaggggctagagaatgatgatgaagtctgctatgtgtgcagtggtggttgtagcacttcttcttctggcggaagtggggcccatggctgaagctgtgacatgcaccccaacagaattgagtccctgtctttcaacaatcactttccgtgcttaacctttcaattcttggtgcaccaaacttaagcaacaaaaaccatgcttatgtggctacctcaaaaacgctagcttgaagcagtatgttaactctcctaatgcccgaaaaaccgttgcttcttgtgggattccctttccaacttgttaattaattaagccttcttatgattcaaagagtgctatatcatatagacatgtatatat

SEQ ID NO: 255769 - DNA, 237 bp, Glycine max
cggcgattttctttttagaagaaaaaagagaagaatatgagtttgaagaacaacatggtggtgctaaacgtgtgtttggtgctactttttcttgtggtgggtactactagtgccaacttgaggctgattaatcttggtctgctcatgaaaagtgatcattatcaacactcaaatgatgatgagtcttcaaaaccatgctgtgatcaatgttcatgcacaaagtcaaaccctcctcaa

SEQ ID NO: 255770 - DNA, 411 bp, Glycine max
ggaaggagaaaagctcccacatcggaggagcgttctacttggcctaggaggattttgcggcgctgctgttatgtctctgaacaacaagaacataccttttgcctctgctgctcccacacccatgttccctctggtgttggattccgctgtgagcacggtggtgaagaggccaagcaagtcgaggagcaagaagcagaaggaagaggaggaggaggttctcgtgattgaagggatcgagtttgagggaaacacacatgccaagttcgatgtcatcattaacgccgatgattataacgaaatccgtcccgatcacaccgagtttgcaagaagctttgcgagtctgcctcacttaaataacaaaaagatcgttactttcatgagtctgggattgacggatttgttggaagattt

SEQ ID NO: 255771 - DNA, 389 bp, Glycine max
ggtgactctcgcgggtggacaacgaaatttctcagccaaaggacacggatcagaatcgcttaatcaagttgaggaagatggcactagtctccgcaggaagatcaacactgaaccctaacgcccctctttacattcccgccgcgttccgccaagtggacgatccttctccataatagtggtagctggtgacgacactgacatggtaccatgactactggctaagccagcagcacgatgatggagccttctatggcgaggatgggtttgatggcaatgatgtggttgatctgcttcctgattcgtttgattttgatgctggtgaagatctttttgaagagtttattcgatcttctgaatcccaagaagaaactggacccaaaggaactgca

SEQ ID NO: 255772 - DNA, 429 bp, Glycine max
ggcagttcaaagcgtagaaagattcgaaacgaagaaaggaagcgttgtgaagaatggcggaagagggacaagtgatcggtgtccacagcgtagaggagtggaaggaacatctcaagaagggagaagagtccaagaaattgattgtggtggattttactgcttcttggtgcggtccatgccgtttcattgccccaattcttgcagagtttgctaaaaagttgccgaatgtcaccttcctcaaggtggatgtggatgaattggagactgtttccaaggagtggggaattgaggctatgccaaccttcctgttcttgaaagaaggcaagctggtggacaaggttgtgggtgccaagaaagaggagctgcaattgacaatagccaaacatgccgcaattgctgctgcttgaagtgccatatgaatatgttaag

SEQ ID NO: 255773 - DNA, 373 bp, Glycine max
ggcagcttcaaagctttataaagattcgaaacgaataaaggaagcggtgtgaagaatggcggaagagggacaagtgatcggtgtccacagcgtagaggagtggaaggaacatctcaagaagggagaagagtccaagaaattgattgtggtggattttactgcttcttggtgcggtccatgccgtttcattgccccaattcttgcagagtttgctaaaaagttgccgaatgtcaccttcctcaaggtggatgtggatgaattggagactgtttccaaggagtggggaattgaggctatgccaaccttcctgttcttgaaagaaagcaagctggtggacaaggttgtgggtgccaagaaagatgaactgctattg

SEQ ID NO: 255774 - DNA, 352 bp, Glycine max
gatgcaactgaataattaagaagagccggttccatagcagcctaggaaaatgaagagcactagcttgctcgtatctttctactttgcgccttcacctcatacctaccttaccgccaccgaccaggacgtgctcgacgtggatggcgatccgattcggaacggcttcatatactacgttttgccggcaataagaggaaacggtggcggaatagaacgagccgcactcgggaaagacacttgccctatcacctgagtgcaatctcccaatccaaactctaaggggctagaaattaagtttgaatatgcataccccggctattacataaacgagaccctaattttgcaaataaag

SEQ ID NO: 255775 - DNA, 404 bp, Glycine max
gacagctaaaacaattaataaagatgagtttgaagaacaacatggtggtgctaaaggtgtgtttgttgcttcttttccttgtgggggttacagctgcacgcatggaactgagcttcttcaaaagtgatcagtcatcaagttatgatgatgatgagtattcaaaaccatgctgtgatctctgcatgtgcacacgctcaatgcctcctcaatgcagctgtgaagatattaggctgaattcatgccactcacattgtaagagctgtatgtgcacactctcacagccaggacagtgtcgttgtcttgacaccaacgacttctgctacaaaccttgcaagtccagagatgactagaaaaactaatagctctctcaaatggacgaagcccctttaggcttttgttgttat

SEQ ID NO: 255776 - DNA, 262 bp, Glycine max
tgggacaggacaggcaattaatatggatgagttcggagaacaacatggtggtgctaaaggtgtgtttgttgcttcttttccttgctggggttacagctgcacgcatggaactgatcttcttcaacagtgatcacgcatcaagttattatgatgattaattttcacatccatccttagatctttgcttgtgcacactctcaatgctttcctatttctatttgcccttatactactcttgaatttcatgccatcttatattcgt

SEQ ID NO: 255777 - DNA, 455 bp, Glycine max
  unsure (1)..(455): unsure at all n locations
gactttgagttcgaactaaacaattcaattcaatctgcctcgatcatggagaggaaaacatttgggtttttgttcttgctcctccttgtcttagcttctgatgtgacggtgaagagagcagaggcgaaagattgcttgacaaggaggcacgggttccagggtagatgcttattcgacaggcaatgtgcacatgtgtgcaggagcgatggtttcatcggtggtcagtgccgaggccctcttcgcaaatgcttttgcagcaagccatgttgatcgaaattactactgccaaagaagccatgaaataaacaaacaaacaaataaataaatagctctaaccgacacatatgtacgtagtgtcggggttctagctagctaagtaggtacgtgtgtcttttggtatcgatcctaanttggtggagcaagtgtggcatcatgatctagttatatatatatat

SEQ ID NO: 255778 - DNA, 385 bp, Glycine max
gacaacacaaacattctctccattgtctttgaacactcatcaccagtggccaagcttgttctttcccggggtttccttcttttcagtggctgcttcgctctgagagagcaggcacagcaaaatgagtgccagatccaaaagctgaatgccctcaaaccggataaccgtatagagtcggaaggtgggttcattgagacctggaaccctaacaacaagccattccagtgtgccggtgttgccctctctcgctgcacccttaaccgcaatgcccttcgtagaccttcctacaccaacggtccccaggaaatctacatacaacaaggtaatggtatttttggcatgatattcccgggttgtcctagcacttatcaagagccggcagaat

SEQ ID NO: 255779 - DNA, 425 bp, Glycine max
ggtgcctctttgctttttcccattgcttctaacgtgagatctcagattgcaattgcctcttgtcttctcccagaatcggtgtaggttacaggtttaagggttttgttttcatttaggtcactaatccgatatcatgaagctcgatacgactagtctcgaatcgtttcccacactgattgcacctcaaaacgacgtcgccggagaactctccgccgctccgttctttgaccttccgaattccaatgacttcgatgggttcttgaaagacgctattcagatggtgaagcccgcgaagggtactacaactcttgcttttatatttaaagagggtgttatggtagctgctgattctcgagctagcatgggaagatatatatcgtcgcagtctgtgaagaaaattatcgaaatcaatccgtatatgcttg

SEQ ID NO: 255780 - DNA, 417 bp, Glycine max
gacttcaaaaacaattaataaagatgagtttgaagaacaacatggtggtgctaaaggtgtgtttgttgcttcttttccttgtgggggttacagctgcacgcatggaactgagcttcttcaaaagtgatcagtcatcaagttatgatgatgatgagtattcaaaaccatgctgtgatctctgcatgtgcacacgctcaatgcctcctcaatgcagctgtgaagatattaggctgaattcatgccactcagattgtaagagctgtatgtgcacacgctcacagtcaggacagtgtcgttgtcttgacaccaacgacttctgctacaaaccttgcaagtccagagatgactagaaaaactaatagctctctcaaatggacgaagcccctttaggctttgtttgttatgttaggggagaca

SEQ ID NO: 255781 - DNA, 296 bp, Glycine max
caacgggatttacacgcctaacttagatacccttgcattgggaccgaatgatgagtagcgcggtgttatgtcatctctttatactttgtgccttcaccacctcatacctaccttaaaccattcctgatttcgcgctatataatgaactgtaaccatttttaaaacggaggcacatattatatcttggcagacataacaacgtatatcggactaaaaccagtctgaaccggaaatcaataacgccttgtcacttgtgatgcactttctcaatgagctctacaaatgtattggaacaa

SEQ ID NO: 255782 - DNA, 418 bp, Glycine max
gattcacacatctaactaagaaagtctttcatagccctccggatatgaagagcaccatgttctgagctctctttctcttttgagccttcaccacctcatacctaccttcagccatcgatgatttcgtgctcgataatgaacgtaaccctcttgaaaatggtggcacatattatatcttgtcagacataacagcatttggtggaatacgagcagtctcaacgggaaacgaaagatgccctctcactgtggtgcaatttcgcaatgagctcgacatacggattggaacaatcatctcgtgctcatatagaatccgttttatcgacgaaggccatcctttgagccttaagttcgaatcatttgcaggtataatgctgcgtgctggaattcctaccgagtggtctgttgtggaagatctacc

SEQ ID NO: 255783 - DNA, 314 bp, Glycine max
acacgtaccgaaagaactcttgcctgtttaggactctcaacttctcccacgagatcggctctctctggctatcgtgtaatctgtaagaaggagattgctacttcagaaacagccttaactctacttgcaaaagttcttcatctatcatactgcaatcgttatcgtccatggactagcagcaaaccctacactcctctactgctactactactcaattccataatctatttgactcgcactctactgactttactactgcagctgcttcttcctcaaatccctcactcttgaagtctccctacttaagcgcactc

SEQ ID NO: 255784 - DNA, 373 bp, Glycine max
ttgggactgctacaacaatttatgaagattagggcgatgaacaacatggtggtgctaaaagtgtgtctgctgcttcttttccttgtgggacgttacaagctgcacgcatggaactgagcttattcaaaagtgatcattcatcatcttctgatgatgatgagtattcaatatcatgctgctatctctgcatgtgcacacgcttaatgccttatcaatgctgctgcgaagatattatgctgaattcatgcctctcagattgtaagagctgtatgtgcacacgctcacagccaggacagtgtcgctgtctttacaccaactactactgctacaaaccttgcatgtccagatatgactacaaacactaatagctctc

SEQ ID NO: 255785 - DNA, 384 bp, Glycine max
gaattcattctgaattggggccgcggagagtttgcagctgcatcatcgatcatcgtcacctcatggacggacacgattcacaagacccgaagcagagccctgctgacatgactgcctttgtgcaaaatcttctccagcagatgcaaaataggttccagacaatgtccgactccattgttacaaagattgatgatatgggaagtcgcataaatgagttggaacaaagcatcaatgacctaagagcatagatgggagtggagtcctcttcatcacctgcgacccctgctaagccaacagaggaaatcaccaaagaagagggttcagcttaagtggcgtgttctgatttcagttgctcggtattaatgttttcatgtattggattgc

SEQ ID NO: 255786 - DNA, 332 bp, Glycine max
gacagcaaaaacaattaataaagatgagtttgaagaacaacatggtggtgctaaaggtgtgtttgttgcttcttttccttgtgggggttacagctgcacgcatggaactgagcttcttcaaaagtgatcagtcatcaagttatgatgatgatgagtattcaaaaccatgctgtgatctctgcatgtgcacacgctcaatgcctcctcaatgcagctgtgaagatattaggctgaattcatgccactcagattgtaagagctgtatgtgcacacgctcacagtcaggacagtgtcgttgtcttgacaccaacgacttctgctacaaaccttgc

SEQ ID NO: 255787 - DNA, 416 bp, Glycine max
gacagaatagaaaaaggaaaccctagctggataggtcaaacatcatcatgtcggacgaagagcaccatttcgagtccaaggcagacgccggtgcccccaaaacctaccctcagcaagccggtaccattcgcaagaacggctacatcgtcatcaaaggacgcccccgcaaggttgtggaagtttcgacttccaaaactggaaagcacggtcacgccaagtgccactttgttggaattgatattttcactgccaagaaacttgaggatattgtgccctcttctcacaactgtgatgttcctcatgtgaatcgtactgattaccagctcattgatattgctgaggatggatttttgagtctgcttactgaaaatgggaacaccaaggatgacctcaagctttccactgatgagagtttg

SEQ ID NO: 255788 - DNA, 402 bp, Glycine max
gacagcagaaacaattaataaagatgagtgtgaagaacaacatggtggtgctaaaggtgtgtttgttgcttcttttccttgtgggggttacagctgcacgcatggaactgagcttcttcaaaagtgatcagtcatcaagttatgatgatgatgagtattcaaaaccatgctgtgatctctgcatgtgcacacgctcaatgcctcctcaatgcatctgtgaagatattaggctgaattcatgccactcagattgtaagagctgtatgtgcacacgctcacagccaggacagtgtcgttgtcttgacaccaactacttctgctacaaaccttgcaagttcagagatgactagaaaaactaattagctctctcatatggacgaagccccctttaagctttgtttg

SEQ ID NO: 255789 - DNA, 423 bp, Glycine max
gaccgcattagcactcgtctttggttctggtttatagatctctgtgaagtcgctttataacactcaacctaagatgcagaacgaggaaggacagatcactgagctttacattcctaggaagtgctctgccacaaaccgattgattaccgctaaggaccatgcttcggttcaggttaacattgggcatgtggatgagaatggcgtctgcaatggccatttctccacttttgctctctgcggcttcatacgtgctcagggggatgctgacagtgccctagatcgcttgtggcagaagaagaaagttgaagttaagcaacagtagacacccatgatagtttgttactttgctatgtattaatttctacgcttgctagagatatttgagtactatgaatgtcgtcttgagcaaatactcattctaaa

SEQ ID NO: 255790 - DNA, 413 bp, Glycine max
ggggaattagggttattcgcgtggcgaagatgattgaggtggttttgaacgatcgattggggaagaaggtgcgcgtgaagtgcaacgacgatgataccatcggcgacctgaagaagcttgtggcggctcagactggcacaagagccgacaagatccgcatccagaagtggtacaccatctacaaggatcacatcactctcaaggattacgagatccatgacggcatgggtctcgaactctactacaactaaacacaacaaggtgtgttttatgcgtaatatactatgtgctgggaatgggataagcgcttaatgtaattctgacttgcgaaaagttccatgatttgaaataatgtacatcttcaaatgatattgggtattatataccggtgacaggttaaggtggtttggtat

SEQ ID NO: 255791 - DNA, 416 bp, Glycine max
ggacacacaactaactaagaaagtcttccatagccccccaaaaatgaagagcaccatcttctttgctctctttctcttttgtgccttcaccacctcatacctaccttcagccatcgctgatttcgtgctcgataatgaaggcaaccctcttgaaaatggtggcacgtattatatcttgtcagacataacagcatttggtggaataagagcagccccaacgggaaatgaaagatgccctctcactgtggtgcaatctcgcaatgagctcgacaaagggattggaacaatcatctcgtccccatatcgaatccgttttatcgccgaaggccatcctttgagccttaagttcgattcatttgcagttataatgctgtgtgttggaattcctaccgagtggtctgttgtggaagatctac

SEQ ID NO: 255792 - DNA, 364 bp, Glycine max
gattcacacatctaactaagaaagtcttccgtggcccgccaaaaatgaagagcaccatcttctatgctctgtttctcttttgtgccttcaccacctgatacctaccttcagccatcgctgatttcgagctcgataatgaaggtaaccctcttgaaaatggtggcacatattatatcttgtcagacataacagcatctggcggaataagagcagccccaacgggaaatgaaagatgccctctcactgaggtgcaatctcgcaatgagctcgacacagggattggaacaatcatctggtacgcatatcgaattccgcttatcgacgaaggccatcctctgagccttaagttcgattcatttgcagt

SEQ ID NO: 255793 - DNA, 425 bp, Glycine max
ggaaaactgaaaagttatggcgaaagactttaggtttggaattgggaatgagggttgttcgcgtcacgaagatgatcgaggtggtgttgaacgatcgattggggaagaaggtgcgcgtgaagtgcaacgacgatgacaccatcggcgacctgaagaagctggtggcggctcagacgggcacaagagccgacaagatccgcatccagaggtggtacaccatatacaaggatcacatcactctcaaggattacgagatccacgacggcatgggtctcgaactctactacaactaaacacaaagtgtgttttatgcatgatatattactatgatctgggaatgggatgaggcgccaaatgtaattttgacttgcgaaagtccctatgatttgaataatgtacattcccgaatgatattgggtattaca

SEQ ID NO: 255794 - DNA, 369 bp, Glycine max
ggcaggcaaagaaaagaaaatcctcaattatctgagcagccaaacactctctctctgtctctcgaaaattctcagtttgcagagaaaatctgaatcatgtcgtggcaagcgtatgtcgacgatcaccttctgtgtgacatcgaaggtaaccacctcactcacgctgctatcatcggccaagacggcagcgtttgggctcagagtaccgacttccctcagttcaaacctgaggagatcactgccatcatgaatgactttaatgagcctggatcacttgctccaactggattgtatctcggtggcaccaaatatatggtcatccagtgtgaacccggagactgcattcgacggaagaagggtcctggtggt

SEQ ID NO: 255795 - DNA, 495 bp, Glycine max
gattcacacaactaactaagaaagtcttccagagccccccaaaaatgaagagcaccatcttctttgctctctttctcttttgtgccttcaccacctcatacctaccttcagccatcgctgatttcgtgctcgataatgaaggtaaccctcttgaaaatggtggcacatattatatcttgtcagacataacagcatttggtggaataagagcagccccaacgggaaatgaaagatgccctctcactgtggtgcaatctcgcaatgagctcgacaaagggattggaacaatcatctcgtccccatatcgaatccgttttatcgccgaaggccatcctttgagccttaagttcgattcatttgcagttataatgctgtgtgttggaattcctaccgagtggtctgttgtggaggatctaccagaaggacctgcttgtaaaattggtgagaacaaagatgcaatggatggttggttaagactgagagagtttctgatga

SEQ ID NO: 255796 - DNA, 503 bp, Glycine max
gattcacacagctaactaagaaagtcttccatagccccccaaaggtgaagagcgccatcttctttgctctctttctcttttgtgccttcaccacctcatacctaccttcagccatcgctgatttcgtgctcgataatgaaggtaaccctcttgaaaatggtggcacatattatatcttgtcagacataacagcatttggtggaataagagcagccccaacgggaaatgaaagatgccctctcactgtggtgcaatctcgcaatgagctcgacaaagggattggaacaatcatctcgtccccatatcgaatcccgtttatcgccgaaggccatcctttgagccttaagttcgattcatttgcagttataatgctgtgtgttggaattcctaccgagtggtctggtgtggaggatctaccagaaggacctgctgttaaaattggtgagaacaaagatgcaatggatggttggtttagacttgagagagtttctgatgatgaattc

SEQ ID NO: 255797 - DNA, 491 bp, Glycine max
  unsure (1)..(491): unsure at all n locations
agaaggggacagcaaaaacaattaataaagatgggtttgaagaacaacatggtggtgctaaaggtgtgtttgttgcttcttttccttgtgggggttacagctgcacgcatggaactgagcttcttcaaaagtgatcagtcatcaagttatgatgatgatgagtattcaaaaccatgctgtgatctctgcatgtgcacacgctcaatgcctcctcaatgcagctgtgaagatattaggctgaattcatgccactcagattgtaagagctgtatgtgcacacgctcacagccaggacagtgtcgttgtcttgacaccaacgacttctgctacaaaccttgcaagtccagagacgactagaaaaactaatagctctctcaaatggacgaagcccctttaggctttgtttgttatgttaggggagacaaataaaacaagaaataaaagctcagtggccagtaatttgcttttagcanatttggtcattnttatca

SEQ ID NO: 255798 - DNA, 464 bp, Glycine max
gacagcacaaacaattgataaagatgagtttgaagaacagcatggtggtgctaaaggtgtgtttgttgcttattttccttgtgggggttacagctgcacgcatggaactgagcttcttcaaaagtgatcagtcatcaagttatgatgatgatgagtattcaaaaccatgctgtgatctctgcatgtgcacacgctcaatgcctactcaatgcagctgtgaagatattaggctgaattcatgccactcagattgtaagagctgtatgtgcacacgctcacagccaggacagtgtcgttgtcttgacaccaacgacttctgctacaaaccttgcaagtccagagatgactagaaaaactaatagctctctcaaatggacgaagcccctttaggctatgtttgttatgttaggggagacatataaaacacgatataaaagttcagtggccagtaatttgcttttagc

SEQ ID NO: 255799 - DNA, 477 bp, Glycine max
  unsure (1)..(477): unsure at all n locations
gatgcaactttatgactacgaaaagccatttccatagcnacctgagaaaatgaagagcactggctaggtcgctatatatctactttgcgcctatacctcatacctaccttccgtcaccgaccacgacgtgctcgacgtggatggcgatccgattcggaacggtttcatatactacgttttgccggcaataagaggaaacggtggcggaatagaacgagccgcactcgggaaagacacttgccctatcactgtagtgcaatctcccaatccaaactctaaggggttagaaattaagtttgaatctgcataccccgcctattacataaacgaaaccctaattntgcanataaagttcagttacccacagcagtgtgaaagacagaatccttggtgggccatttctaangatatatctgaaggaccacatgctattaaactctctgggttccatggtactgaactcggttggtttaaaat

SEQ ID NO: 255800 - DNA, 419 bp, Glycine max
gacagcaaaaacaattaataaagatgagtttgaagaacaacatggtggtgctaaaggtgtgtttgttgcttcttttacttgtgggggttacagctgcacgcatggaactgagcttcttcaaaagtgatcagtcatcaagttatgatgatgatgagtattcaaaaccatgctgagatctctgcatgtgcacacgctcaatgcctgctcaatgcagctgtgaagatattaggctgaattcatgccactcagattgtaagagctgtatgtgcacacactgacagcctggacagtgtcgttgtgttgacaccaacgacttttgctacaaaccttgcaagtccagatatgactagaacaactaatagctgtctcaaatggacgaaggccctttaggctttgattgttatgttaggggagacaaa

SEQ ID NO: 255801 - DNA, 487 bp, Glycine max
gacagcacaaacaattaataaagatgagtttgaagaacaacatggtggtgctaaaggtgtgtttgttgcttcttttgcttgtgggggttacagctgcacgcatggaactgagcttcttcaaaagtgatcagtcatcaagttatgatgatgatgagtattcaaaaccatgctgcgatctctgcatgtgcacacgctcaatgcctactcaatgcagctgtgaagatattaggctgaattcatgccactcagattgtaagagctgtatgtgcacacgctcacagccaggacagtgtcgttgtcttgacaccaacgacttctgctacagaccttgcaagtccagagatgactagaaaaactaatagctctctcaaatggacgaagcccctttaagctttgtttgttatgttaggggagacaaatcaaacaagaaataaaagctcagtggccagtaatttgcttttaacaaatttggtcatttttagcataa

SEQ ID NO: 255802 - DNA, 349 bp, Glycine max
ggggggattgtatatcatggacgatttcaatctctctctctctctgtctctctctctctagacttagattttgtgaatggctgaagtggaagagggacaggtcatcggcgtccacaccgttgatgagtggaagctgcaactccagaatgcaaaagactccaaaaaactgattgtggtggattttactgcttcctggtgtggtccatgccgttttatggccccagttcttgcagagattgcaaagaaaactcctgaattgatcttcctcaaagtggatgtggatgaagtgaggcctgttgctgaggaatattccattgaagccatgccaaccttcctcttcttgaaagat

SEQ ID NO: 255803 - DNA, 495 bp, Glycine max
ggagtttgttgatcgagataactagaaacggtgtgatgaaaatgaaggtccttgttttcttcgttgctacaattttggtagcatggcaatgccatgcgtacgatatgttccctctccgaatgaacactggctatggtgcccgtactccggaggtgaaatgcgcaagttggaggcttgctgtggaagcacacaacatctttggctttgagaccattcctgaagagtgcgttgaagcaacaaaggaatacatccatggcgaacaatatagatcagactccaaaacagttaaccaacgagcttacttttatgccagagacctcgaagtccatcccaaggacacatttgtgttcagtatagatggcaccgtactctctaatattccatactacaaaaaacatggatatggggtggagaaatttaactcgaccttgtatgatgaatgggttaacaagggcaatgcaccggcactgcccgagactcttaagaattacaaca

SEQ ID NO: 255804 - DNA, 419 bp, Glycine max
ctgtgaagcaactgtataattaacaaaagccatttcggtagcaaccggagaaaatgaagagcactagcttgttcgctatacatctactttgcaccttcatctgatacctaccttgcgacaccgcccaagacctgctcgacgaggatggctatccgatttgcaacgatctcatatactacgctctgtcagaaactagacgaaacagttgtggaatagaacgagtcaaactatgcaaagacaattgccctatcactgtattgcaaccttccaatccaaactctaatgggttagaaatcaacaccgaattttcatacccaacctattacatcaacgaaaccctaattatgtaaataaagtctaattacccacagcactctgaaagaaagaatccttgttggaccatttctaaagatatatct

SEQ ID NO: 255805 - DNA, 196 bp, Glycine max
caattctcacattctcctataacttaccttctatccccataccttccatcaattatatcttcaatatatcataacccatctcttcaaccatatatacttcaacacacattctcatttacatcatacctttatcaaacttattatttcaacaatcttcattcctatcttttatacaatcatttttacaaaccattat

SEQ ID NO: 255806 - DNA, 281 bp, Glycine max
tgggcttcacagttaagacaatcaataaagatgagtttgaagaacagcatgatgctgctaaaggtgtgtacagttgcttgttttccttgcgggggttacagatgcacgcatggcactgagctctttcaaaagtgatcagtcatcaagttatgatgatgatgagtattcaaaaccatgctgtgatctctgcatgtgcacacgctcaatgcctactcaatgcagctgcgaagatattacgctgaatttatgacactcacattgtaagagctgtatgtgcacac

SEQ ID NO: 255807 - DNA, 483 bp, Glycine max
gacagcaaaaacaattaataaagatgagtttgaagaacaacatggtggtactaaaggtgtgtttgttgcttcttttccttgtgggggttacagctgcacgcatggaactgagcttcttcaaaagtgatcagtcatcaagttatgatgatgatgagtattcaaaaccatgttgtgatctctgcatgtgcacacgctcaatgcctcctcaatgcagctgtgaagatattaggctgaattcatgccactcagattgtaagagctgtatgtgcacacgctcacagccaggacagtgtcgttgtcttgacaccaacgacttctgctacaaaccttgcaagtccagagatgactagaaaaactaatagctctctcaaatggacgaagtccctttaggctttgtttgttatgttaggggagacaaataaaccaggaaataaaagctcagtggccagtaattggcttttagcaaattgggacatttttatt

SEQ ID NO: 255808 - DNA, 491 bp, Glycine max
agaaggggacagcgcaaacacttaatatagatgagtttgaagagcaacatggtggtgctataggtgtgtgtgttgcttcttttccttgtgggggttacagatgtacgcatggaactgagcttcttcaaaagtgatcagtcatcaagttatgatgatgatgagtattcaaaaccatgctgtgatctctgtatgtgcacacgctcaatgcctcctcaatgcagatgtgaagatattatgctgaattcatgccactcagattgtgagagctgtatgtgcacacgctcacagacaggacagtgtcgctgtcttgacaccaacgacttttgctacaaacctttgaagtgcacagatgactataaaaactcatagctctctcaaatggacgaaacccctttagggtttgtttgttatgttaggggagacaaatataacacgaaatataagctcattggccagtaatttgcttttagcacatatggtcatttttattt

SEQ ID NO: 255809 - DNA, 489 bp, Glycine max
  unsure (1)..(489): unsure at all n locations
gattcacacaactaactaagaaagtcttccatagccccccagaaatgaagagcaccatcttctttgctctctttctcttttgtgccttcaccacctcatacctaccttcagccatcgctgatttcgtgctcgataatgaaggtaaccctcttgaaaatggtggcacatattatatcttgtcagacataacagcatttggtggaataagagcagccccaacgggaaatgaaagatgccctctcactgtggtgcgatctcgcaatgagctcgacaaagggattggaacaatcatctcgtccccatatcgaatccgttttatcgccgaaggccatcctttgagccttaagttcgattcattgcagttataatgctgtgtgttggaattcctaccgagtggtctgttgtggaagatctaccagaaggacctgctgttaaaattggtgagaacaaagatgcnaatggatggtggtttagacttgagagagtttc

SEQ ID NO: 255810 - DNA, 317 bp, Glycine max
  unsure (1)..(317): unsure at all n locations
ggatttgattgttgtgcatccatcgttaagctagtggcgatcggatccagctacagcatagagatcaaggaaggaaggaaggaagatgttgggtgctataaggaacaagagtattcgtcctgccttctccgcaatcagacactagtcttatgcagctaaagagattactgtcagggacgctctgaacttcgtactcgatgaggaaatgtgaggtgatcctaaagtgttcttgatgggtgaagaggttgnggaatactatggtgcgatcacgatatgacatgggctgatggacaggtacggtcaccacagggtcatat

SEQ ID NO: 255811 - DNA, 383 bp, Glycine max
gacacgcagttgtattgtagaactgaacaagggtttctctttctctttctctgtctgcttcttcagtttctctcgtttcaatcgaaaaaaatcatgggcagaaaattcttcgtcggtggcaactggaaatgcaatgggaccactgaggaggtgaagaagattgttactactttaaatgaagctaaagtccctggagaagatgttgtagaagttgttgtgagccctccttttgtgttccttccttttgtaaaaagtttgctgcgccctgatttccatgtctcggcccaaaattgttgggttcgcaaaggtggtgcttatactggagaggctagtgctgaaatgcttggtaatctgggaattccttgtgttattattggtcactc

SEQ ID NO: 255812 - DNA, 489 bp, Glycine max
  unsure (1)..(489): unsure at all n locations
ggcttcgcctcattttctagcttccaaaccctaacactcctcttgctcttcgatcatcacctctccacaatgccgccgaagttcgacccctcccagatagtcgacgtcttcgtccgcgttaccggcggcgaagtcggcgcggcgagttccctggccccgaagatcggtcccctcggtctctcccccaagaagatcggagaagacatcgccaaagaaaccgccaaggactggaagggcctccgcgtcaccgtcaagctcaccgttcagaatcgtcaggcgaaggtcacggtggtcccctccgccgncgccctcgttatcaaggccctcaaggagcccgagcgcgaccgcaagaagaccaagaacatcaagcacaacggcaacatctcgctcgatgacgtcatcgagatcgctagggttatgaggccgaggtccatggccaatgacctcagcggcttcattaaggagattctcggaacatgcgtntcggtt

SEQ ID NO: 255813 - DNA, 407 bp, Glycine max
ggcacacagcagggaacaacgtgtaacacgtgcacagctgagagagacgcacccatggggccaagacccgcaaggtgttataggcaaattaataacacaccataccacaagtcacggttttgccgcggagctcctgatcccaagatcaggattcaccatgttggtatgaagaataagggtgttgctgagtttgctttctgtgtacatctgcctcgttgggagaaggaaaacgtttctagtgaggccctggaagctgctcgtattgcttgcaacacgtacatggtcaaatttgatggacaggatcgctttcactcgacagtcagggtgcacccattccatgttcttaggatcaacaacatgctgtcgcgtgctggcactgatagcctccaaactgcaatgagaggtgc

SEQ ID NO: 255814 - DNA, 509 bp, Glycine max
  unsure (1)..(509): unsure at all n locations
gattcacacatctaactaagaaagtcttccatagccccccaagggtgaagagcaccatcttgtttggtctctatctcttttgcgccttcaccacctcatacctaccttcagccatcgctgatttcgtgctcgataatgaacgtaaccctcttgaaaatggcggcacatattatatctcgtcagacataacagcatttggtggaataagagcagcctcaacgggaaatgaaagatgccctctcactgtggtgcaatctaccaatgagctcgacaaatggattggaacaatcatatcgtccccatatcgaatccgttctatcgccaaatgccatcctttgagccttaagttcgattcatttgcagttataatgctgtgtgttggaattcctaccgagtggtctgttgtggatgatctaccagaaggacctgctgntcaaattggcgagaacaaagatgcaatggatggttcggttagacttgagagactttctgatgatgaattcaataac

SEQ ID NO: 255815 - DNA, 431 bp, Glycine max
  unsure (1)..(431): unsure at all n locations
gacagcaaatacaattaataaagatgagtttgaagaacaacatggtggtgctaaaggtgtgtttgttgcttcttttccttgtgggggttacagctgcacgcatggaactgagcttcttcaaaagtgatcagtcatcaagttatgatgatgatgagtattcaaaaccatgctgtgatctctgcatgtgcacacgctcaatgccttctcaatgcagctgtgaagatattaggctgaattcatgccactcagattgtaagagctgtatgtgcacacgctcacagccaggacagtgtcgttgtcttgacaccaacgacttctgctacaaaccttgcaagtccagagatgactagaaaaactaatagctctctcaaatggacgaagcccctttaggcttntgttggtatgttaggggagacaaattaaacaagaaa

SEQ ID NO: 255816 - DNA, 306 bp, Glycine max
gagggcagcatttgtgactagctcttacagagaaaaaagatggctgagacaagcggaggagatgcactgagaccagtggtgatatgtgataacatgggtggctgtacacttgcatgcactggtgggtccacttgcaggtgcacacgtgcttgcactgacacaggaggtggtgatcacgtgacatgctgttatgtatagaactgcacatgctatacatgctcatgatgcaagattgaggatgctagaagtggttgcagatgcggcacacattgtgcatgtacctgcagacgcacttagtctgacacc

SEQ ID NO: 255817 - DNA, 482 bp, Glycine max
ggattggggactcaagatcacgaaaacgatgtagctataggaggacagagggatgtccatgacggatcgagatggcgacaaacaagaatgggtgggacaataaatatccatctcgaccatattttggatacccatataaccatcgaagattattgaagtgactaatttcgtgaaattaagcagcggagatgacaaagaaattgctagaggtactgtagttcttatccagtaccaacatacttaatgttaagaaatcattatttacagagaggtatgatagatattttgatgtcaaaacactagccctgttcagttaataatgacaatactgcaatcttttttgattctatgaatatttatcattacacacattatgtaagagctcgatgagatgaatatcgtacgtacggatctggagcggagattctctgaaccgaatgacaacctgaacggatgttaatttaatcttaacgaaattatgc

SEQ ID NO: 255818 - DNA, 494 bp, Glycine max
gacagcaaaaacaattaataaagatgagtttgaagaacaacatggtggtgctaaaggtgtgtttgttgcttcttttccttgtgggggttacagctgcacgcatggaactgagcttcttcaaaagtgatcagtcatcaagttatgatgatgatgagtattcaaaaccatgctgtgatctctgcatgtgcacacgctcaatgcctgctcaatgcagctgtgaagatattaggctgaattcatgccactcagattgtaagagctgtatgtgcacacgctcacggccaggacagtgtcgttgtcttgacaccaacgacttctgctacaaaccttgcaagtccagagatgactagaaaaactaatagctctctcaaatggacgaagcccctttaggctttgcttgatatgttaggggagacaaataaaacatgaaataaaagctcagtggccagtaatttacttttagcaaatttggtcatttttattattcttatttt

SEQ ID NO: 255819 - DNA, 486 bp, Glycine max
ggaatattatagcagttactgtagcttggatcaaaggagaaggtttgttttactactagatattgaaccaacaaacacagtagggctgttgtttacataaatttgtcttaccttgtaggtctttcaatctggtttctatctatcatatactttatttccggtgttccagcatcctatgtgatgtggtatcgtcctctttatcgtgcgacaaggtagttttcaatttgattgaattcaattcttatggtatggcatggataattgatattcaagatgatttcagccttttcctaaactataaaaaattgttaatgtcatccacattggctttattgccattgtgaagcattaaacattttctgtagcagcagtatgtacatctggcgactttgtgagcagaatgtaagttaataaatgacaacgttgtcatcttgaaactgaaaggctttggggtgcaaagcttacattataaaataccttaatcta

SEQ ID NO: 255820 - DNA, 454 bp, Glycine max
acgacagaaggggggatgttagttcgtgttgcgggagataacatcatgatgtctccaccatatattatatgtcctggagaagttgaagagttaatcagcatttatgggaaagctttgaaagaaacggaaaagaaggtacaggagctcaagtctcagcgcaagtagcttaggcctcatgatggaataataaactctgctgcgcccacttccgggggaaaaggaaatattgtagtaacttgataagactttgttccaaccttttcgttattggaaatgtcaataaattgggttcctagttgcttcctaattatatgttggagttatacatatgcttagaataatgctcgttacacatcttcacattgcatgtagcgtagcctctcattaatgacgtggcagcatcaatagtgcaagtgtagaaattttagtaagccaaactgtaataaggtgatgg

SEQ ID NO: 255821 - DNA, 446 bp, Glycine max
atagcaatactgggtcacagaaatgttcatcagaggcaagaaatgagaaaagcttatgaggagatttaccaagaggatctcatcaaacgccttgagtccgagatctctggtgactttgagagagctatgtaccggtggatgttgcagcctgcggatcgtgatgctgttttggtgaatgtggcaatcaagaatggcaccaaagactaccatgtgattgcagagattgcttgcgtcctatcagctgaagagctcttggcagtgaggcgggcctaccaccgacgctacaagtgttccttggaggaagatgtggcagctaacaccaccggcaatcttcgccagctgttggttggattggtgacctcatataggtatgagggtgatgagatcaatgtaaaattttcacaaactgaagctaatgttcttcatgaatctgtcaaggagaagaa

SEQ ID NO: 255822 - DNA, 433 bp, Glycine max
atcggattgctgaagaccacattagggcaccgctggcagagaggacagaagggtacgactagatagaccacgacagatctcgtataccgcctcgagtcccagatctatggtgactgtgagagagctatgtaccggtagatgtcgctttctagggatcgagattctgacgcggtgaatgcagcaattaagaatggcatcatggactcccatgtgaatgcactgtgacgcttgtgtcctatcagctgatgagctattgctgggaggcccaacttccaccgcctgtacaagagttccttgttggaagatgtggcaattaacaccaacggcaatcttctccagcttttggatagattggcgacctgatataggtatgaggctgatgccatcaatgtaaaattttcacagactgaagctaatgttcttcatgaatctg

SEQ ID NO: 255823 - DNA, 463 bp, Glycine max
tatgcaactgaataattaagaaaagccatttccggagcagcctgagaaaatgaagagcactagctggttcgctatctttctactttgcgccttcacctcatacctaccttccgccaccgcccaggacgtgctcgacgtggatggcgatccgattcggaacggtttcatatactacgttttgccggcaataagaggaaacggtggcggaatagaacgagccgcactcgggaaagacacttgccctatcactgtagtgcaatctcccaatccaaactctaaggggttagaaattaagtttgaatctgcataccccgcctattacataaacgaaaccctaattttgcaaataaagttcagttacccacagcagtgtgaaagaaagaatccttggtgggccatttctaaggatatatctgaaggaccacctgctattaaactctctgggttccatggtactgaactc

SEQ ID NO: 255824 - DNA, 492 bp, Glycine max
  unsure (1)..(492): unsure at all n locations
ggcatcgaacagagagagagagaatggcagcacttggtgggaatcgtgatgtgacaggaagccagaacagcgttgagatcgatgctctagctcgctttgctgttgaagaacacaacaaaaaacagaatgcccttttggagtttgaaaaggtggtaactgcgaaacagcaagtggtttctggtaccttgtacaccatcactttggaggcaaaagatggtgggcaaaagaaggtttatgaagccaaagtttgggagaagtcatggttgaacttcaaggaggtgcaagagttcaagcttgttggagatgcacctgcatagtctagtgcttaattaggttgctgaagagtgaagaatgagacagcctggttcgaaggggaaaagcctaaggatatatcaaaggatcctatatgtataaaataaatgttgcttttttaccttcggtattgatatctgaagtctaattngacatcctatatatgaatatatgatctat

SEQ ID NO: 255825 - DNA, 260 bp, Glycine max
ttgtgacagcgaattcagttaataaagatgagtttgaggaacaacagggtgatgctaaaggtgtgtttgatgcttcttttacttgtgggggatacagctgcactcatgaaactgagcttgttcaaaagtgatcattcatcaagttatgatgatgatgagtattcaaaaccatgctgtgatctctgcatgtgcccacactaaatgcctactcaatgcagctgtgataatattaggctgaattcatgccactcagattagta

SEQ ID NO: 255826 - DNA, 433 bp, Glycine max
  unsure (1)..(433): unsure at all n locations
gacagcaaattcaattaataaagatgagtttgaagaacaacatggtggtgctaaaggtgtgtttgtggcttcttttccttgtgggggttacagctgcacgcatggaactgagcttcttcaaaagtgatcagtcatcaagttatgatgatgatgagtattcaaaaccatgctgtgatctctgcatgtgcacacgctcaatgcctcctcaatgcagctgtgaagatattaggctgaattcatgccactcagattgtaggagctgtatgtgcacacgctcacagccaggacagtgtcgttgtcttgacaccaacgacttctgctacaaaccttgcaagtccagagatgactagaaaaactaatagctctctcaaatggacgaagcccctttaggcttntgttggtatgttaagggagacaaataaaccagaaataa

SEQ ID NO: 255827 - DNA, 483 bp, Glycine max
  unsure (1)..(483): unsure at all n locations
gacagcaaaaacaattaataaagatgagtttgaggaacaacatggtggtgctaaaggtgtgtttgttgcttcttttccttgtgggggttacagctgcacgcatggaactgagcttcttcaaaagtgatcagtcatcaagttatgatgatgatgagtattcaaaaccatgctgtgatctctgcatgtgcacacgctcaatgccttctcaatgcagctgtgaagatattaggctgaattcatgccactcagattgtaagagctgtatgtgcacacgctcacagccaggacagtgtcgttgtcttgacaccaacgacttctgctacaaaccttgcaagtccagagatgactagaaaaactaatagctctctcaaatggacgaagcccctttaggcttntgttgttatgttaggggagacaaataaaacaagaaataaaagctcagtggccagtaatttgcttttagcanattnggtcatttttatt

SEQ ID NO: 255828 - DNA, 424 bp, Glycine max
gacagcaaaaacaattaatgaagatgagtttgaagaacaacatggtggtgctaaaggtgtgtttgttgcttcttttccttgtgggggttacagctgcacgcatggaactgagcttcttcaaaagtgatcagtcatcaagttatgatgatgatgagtattcaaaaccatgctgtgatctctgcatgtgcacacgctcaatgccttctcaatgcagctgtgaagatattaggctgaattcatgccactcagattgtaagagctgtatgtgcacacgctcacagccaggacagtgtcgttgtcttgacaccaacgacttctgctacaaaccttgcaagtccagagatgactagaaaaactaatagctctcttaaatggacgaagcccccttaggctttagttgatatgttaggggagacaaataaaa

SEQ ID NO: 255829 - DNA, 455 bp, Glycine max
gacacaactaactaagaaagtcttccatagccccccaaaagtgaagggcaccatcttctttgctctctttctcttttgtgccttcaccacctcatacctaccttcagccatcgctgatttcgtgctcgataatgaaggtaaccctcttgaaaatggtggcacatattatatcttgtcagacataacagcatttggtggaataagagcagccccaacgggaaatgaaagatgccctctcactgtggtgcaatctcgcaatgagctcgacaaagggattggaacaatcatctcgtccccatatcgaatccgctttatcgccgaaggccatcctttgagccttaagttcgattcatttgcagttataatgctgtgtgttggaattcctaccgagtggtctgttgtggaggatctaccagaaggacctgctgttaaaattggtgagaacaaagatgcac

SEQ ID NO: 255830 - DNA, 476 bp, Glycine max
gacagcaaaaacaattaataaagatgagtttgaagaacaacatggtggtgctaaaggtgtgtttgttgcttcttttccttgtgggggttacagccgcacgcatggaactgagcttcttcaaaagtgatcagtcatcaagttatgatgatgatgagtactcaaaaccatgctgtgatctctgcatgtgcacacgctcaatgcctcctcaatgcagctgtgaagatattaggctgaattcatgccactcagattgtaagagctgtatgtgcacacgctcacagccaggacagtgtcgttgtcttgacaccaacgacttctgctacaaaccttgcaagtccagagatgactagaaaaactaatagctctctcaaatggacgaagcccctttaggctttgtttgttatgttaggggagacaaataaaacaggatataaaagctcagtggccagtaatttgcttttagcaaaattggtcat

SEQ ID NO: 255831 - DNA, 483 bp, Glycine max
gacagcaaattcaattaataaagatgagtttgaagaacaacatggtggtgctaaaggtgtgtttgttgcttcttttccttgtgggggttacagctgcacgcatggaactgagcttcttcaaaagtgatcagtcatcaagttatgatgatgatgagtattcaaaaccatgctgtgatctctgcatgtgcacacgctcaatgcctcctcaatgcagctgtgaagatattaggctgaattcatgccactcagattgtaagagctgtatgtgcacacgctcacagtcaggacagtgtcgttgtcttgacaccaacgacttctgctacaaaccttgcaagtccagagatgactagaaagactaataactctctcaaatggacgaagcccctttaggctttgattgttatgttaggggagacaaataaaacaagaaataaaagctcagtggccagtaatttgcttttagcaaatttggtcatttctaat

SEQ ID NO: 255832 - DNA, 345 bp, Glycine max
caccgattgggacaacgatttcaattagataagatgagattggagaacaacatggtggtgctaaaagtgtgtctgtggcttcttttacttagctcgactacagctgcacgcatggaactgagcttcatcaaaagtgatcattcatcaagttatgattatgatgattattcaataccatgctagaatctctagttgtgtacactctcaatgcctactcaatgcagctgagaatatattatgcttaattcacgccactcatattatctgaactatatgagcacacactcacagtcaggacattatcgttgacttgacatcgacgacttctactcctaacctttcaag

SEQ ID NO: 255833 - DNA, 388 bp, Glycine max
gacagcaaattcaattaataaagatgagtttgaaggacaacatggtggtgctaaaggtgtgtttgttgcttcttttccttgtgggggttacagctgcacgcatggaactgagcttcttcaaaagtgatcagtcatcaagttatgatgatgatgagtattcaaaaccatgctgtgatctctgcatgcgcacacgctcaatgcctcctcaatgcagctgtgaagatattaggctgaattcatgccactcagattgtaagagctgtatgtgcacacgctcacagccaggacagtgtcgttgtcttgacaccaacgacttctgctacaaaccttgcaagtccagagatgactagaaaaactaatagctctctcaaatggacgaagccccttt

SEQ ID NO: 255834 - DNA, 483 bp, Glycine max
  unsure (1)..(483): unsure at all n locations
gacagcaggggcaattgataaagatgagtttgaagaacagcatggtggtgctaaaggtgtgtttgttgcttcttttccttgtgggggttacagctgcacgcatggaactgagcttcttcaaaagtgatcagtcatcaagttatgatgatgatgagtattcaaaaccatgctgtgatctctgcatgtgcacacgctcaatgcctcctcaatgcagctgtgaagatattaggctgaattcatgccactcagattgtaagagctgtatgtgcacacgctcacagccagggcagtgtcgttgtcttgacaccaacgacttctgctacaaaccttgcaagtccagagatgactagaaaaactaatagctctctcaaatggacgaagcccctttaggctttgnttgttatgttaggggagacaaataaaacaagaaataaaagctcagtggccagtaatttgcttttagcaaaattggtcatttttatt

SEQ ID NO: 255835 - DNA, 476 bp, Glycine max
gaacaccaattagacaatagacagcgacgatgaaagcaatgacagcaacgacaacgtttgatgtctctgccgcttgcttccgtgcccctccttcttgttcaccgaatccatgccacaccagtttttcagttataaactccctgaatcctcacaagggacgacggataagcgttgctgttccacctaagtttccaagcttccggagggaagcagctctgcaggggaatttggaggctgttagagtcccaacttcggtgcctgtgcgtgtagcatacgaacttcttctagctggtcatcgatatttggatgtaaggactccagaagagttcaatgctggacacgctcctggcgcaattaacataccttatatgttcagagttggatcggggatgacaaagaatagcaactttattagagaggtgtcttcaaattttaggaaagaagatgaaattattggtgggtgtgagcttggtaaa

SEQ ID NO: 255836 - DNA, 441 bp, Glycine max
ggcacaagtgagtttgttgatcgagataactagaaacagtgtgatgaaaatgaaggtccttgttttcttcgttgctacaattttggtagcatggcaatgccatgcgtacgatatgttccctcttcgaatgaacactggctatggtgcccgtactccggaggtgaaatgcgcaagttggaggcttgctgtggaagcacacaacatctttggctttgagaccattcctgaagagtgcgttgaagcaacaaaggaatacatccatggcgaacaatatagatcagactccaaaacagctaaccaacaagcttactcttatgccagagacctcgaagtccatcccaaggacacatttgtgttcagtatagatggcaccgtactctctaatattccatactacagaaaacatggatatggcgtggagaaatttaactttaccttgta

SEQ ID NO: 255837 - DNA, 438 bp, Glycine max
tcccggtcgaccgcgcgtccgaccactcctacaagacgacagaatttgactcacacatttaactaagaaagtcttccatgggcccccaaaaatgaagatcaccatcttctttgggctctttctcttttgtgccttcaccacctcatacctaccttcagccatcgctgatttcgtgctcgataatgaacgtaaccctcttgaaaatggtggcacatattatatcttgtcagacataacagcatttggtggaataagagcatccccaactgcaaatgaaagatgccctctcactgtggtgcaatctcgcaatgagctctacaaacggattggaacaatcatctcgtccccatatccaatccctcttatcgtcgaacgccatcctttgagccttaagttctattcatttgcaattataatgctccgtgttggaattcctac

SEQ ID NO: 255838 - DNA, 432 bp, Glycine max
agcaacaggtttagcaacctttggaagtgcggaaaggtagagctgaattgtctgaacaagatatatttgtaatcccagcaggttatccagttgtggtcaacgctacctcagatctgaatttctttgcttttggtatcaatgccgagaacaaccagaggaacttccttgcaggttcgaaagacaatgtgataagccagatacctagtcaagtgcaggagcttgcgttccctgagtctgcaaaagatattgagaacctaataaagagccaaagtgagtcctactttgtggatgctcagcctcagcagaaagaggaggggaacaagggaagaaagggtcctttgtcttcaattttgagggctttttacttgataagtacgtagtactaaaatgtatgctgtaataactcatagtgagcgaggaaagtttcgggct

SEQ ID NO: 255839 - DNA, 319 bp, Glycine max
gacacacagtttaaacaattaataaagatgagtttgaagaacaacatggtggtgctaaaggtgtgtttgttgcttcttttccttgtgggggttacagctgcacgcatggaactgagcttcttcaaaagtgatcagtcatcaagttatgatgatgatgagtattcaaaaccatgctgtgatctctgcatgtgcacacgctcaatgccttctcaatgcagctgtgaagatattaggctgaattcatgccactcagattgtaagagctgtatgtgcacacgctcacagccaggacagtgtcgttgtcttgacaccaacgact

SEQ ID NO: 255840 - DNA, 340 bp, Glycine max
tatgggtcacacagctgagacacttaataaagatcagttagaagaacttcaaaattgtggtaaaggtgtgggtgttgctacttttccttgtccagcttacatctgcactcattcaactgagcttcttcaaaagtgatcagtcattaacttatgatgattatgagtattcataaccattctgtaatctctgcatgtgcacacgctcaatacctactcaatacatctgtgaatatattatgctgaattcattccactcatattgtaatatctctatgttcacactctcacagccaatacagtgtcgttgtcttgacaccaacgacttatgctacaaaccttg

SEQ ID NO: 255841 - DNA, 483 bp, Glycine max
  unsure (1)..(483): unsure at all n locations
gacagtaaaaacaattaataaagatgagtttgaagaacaacatggtggtgctaaaggtgtgtttgttgcttcttttccttgtgggggttacagctgcacgcatggaactgagcttcttcaaaagtgatcagtcatcaagttatgatgatgatgagtattcaaaaccatgctgtgatctctgcatgtgcacacgctcaatgcctcctcaatgcagctgtgaagatattaggctgaattcatgccactcagattgtaagagctgtatgtgcacacgctcacagccaggacagtgtcgttgtcttgacaccaacgacttccgctacaaaccttgcaagtccagagatgactagaaaaactaatagctctctcaaatggacgaagcccctttaggcttntgttgntatgttaggggagacaaataaaacaagaaataaaagctcagtggccagtaatttgcttttagcaaatttggtcatttttatt

SEQ ID NO: 255842 - DNA, 479 bp, Glycine max
  unsure (1)..(479): unsure at all n locations
cacgacagaagggggcagccactctgtgagagaaagagatagtgtggtagagagagaggagcggaggagagaaaatgacgacgaggttcaagaagaacaggaagaagagaggccacgtcagcgccggtcacggtcgtatcgggaagcaccgcaagcatcccggtggtcggggtaacgccggtggcatgcaccaccaccgcatcctcttcgacaagtaccatcccggtttcttcggaaaggtgggtatgcgctacttccacaaactccgcaacaaattctactgccccatcgtcagcattgataagctatggtccctcctaccccaggaggccaaggacaaggccaccgncgacaaggcgccattgctcgatgtcacccagttcggttactttaaggttttgggtaaaggggttttgcctcagaaccagcctctggtcgtgaaggccaagcttgtttccaagatcgccgagaagaagatc

SEQ ID NO: 255843 - DNA, 485 bp, Glycine max
gacagcaaattcaattaataaagatgagtttgaagaacaacatggtggtgctaaaggtgtgtttgttgcttcttttccttgtgggggttacagctgcacgcatggaactgagcttcttcaaaagtgatcagtcatcaagttatgatgatgatgagtattcaaaaccatgctgtgatctctgcatgtgcacacgctcaatgcctactcaatgcagctgtgaagatattaggctgaattcatgccactcagattgtaagagctgtatgtgcacacgctcacagccaggacagtgtcgttgtattgacaccaacgacttctgctacaaaccttgcaagtccagagatgactagaaaaactaatagctctctcaaatggacgaagcccctttaggctttgtttgttatgttaggggagacaaataaaacaagaaataaaagctcagtggacggtaatttgcttttagtaaatttggtcatttttatcag

SEQ ID NO: 255844 - DNA, 377 bp, Glycine max
ttctgacagagatttctactgatggggacgacttcgaggaacctccgggaggttctggatgtgagatgggggcttattgttattgctgtgataacacctccacgcatggcacttagcttcttacaacgtgatcattcatcaacttatgatcatgatgagtatccaaaaccatgctatgatctctgcatctgctcacgctcaatgcctactgaatccagttgtgaaaatcttaagatgaattcatgccactcagattgctagatctgtctgtgcacacgctcacagccaggacatcgtctgcgacttgacaacaacaacttctgctacaaaccttgcaagtccacagatgactagaacatctaatagctctctgatat

SEQ ID NO: 255845 - DNA, 497 bp, Glycine max
  unsure (1)..(497): unsure at all n locations
tgttaggatttaaacaactttgccgaagatttaaagcaagagggtaaaatagcaccagatgaaccagcaattctgcccccgttgcctatagtccctaaacctgaaaagcgtaaacccatatatgtaactcctcaatcaaagagaattgattacagggatagagattgggatagggagcgtgatagggactttgagctgatgcctccaccaggaagtcataaaaaggagtatgctaccccgatggatgttgaccaacccattgatccaaatgaaccgacatactgtgtttgtcatcaggtatcttttggagatatgattgcttgtgacaatgaaaattgccaaggaggtgaatggttccactattcgtgcgttgggctaacgcangagacaatgttcaagggaaagtggtactgtccgacttgcatattactcccacaatgtcaacgatgaatctttgcacgaactaaattacattcataaatgaccactgtttcaat

SEQ ID NO: 255846 - DNA, 199 bp, Glycine max
gatagatagctccgttaattagggtttttgtgatctgcaagctacgatgggtaagggaacggggagtttcggtaagagaaggaacaagacccacaccctctgtgtgaggtgtggccgccgcagtttccacctccagaagagtcgttgcgccgcgtgcgctttccccgctgcgcgcaccaggaaatataactggagcgtg

SEQ ID NO: 255847 - DNA, 396 bp, Glycine max
  unsure (1)..(396): unsure at all n locations
gattcacacaactaactaagaaagtcttccatagccccccaaaaatgaagagcaccatcttctttgctctctttctcttttgtgccttcaccacctcatacctaccttcagccatcgctgatttcgtgctcgataatgaaggtaaccctcttgaaaatggtggcacatattatatcttgtcagacataacagcatttggtggaataagagcagccccaacgggaaatgaaagatgccctctcactgtggtgcaatctcgcaatgagcccgacaaagggattggaacaatcatctcgtccccatatcgaatccgttttatcgccgaaggccatcctttgagccttaagttcgattcatttgcaggtataatgctgngtgttggaattcctaccgagt

SEQ ID NO: 255848 - DNA, 375 bp, Glycine max
gacagcaaaaacaattaataaagatgagtttgaggaacaacatggtggtgctaaaggtgtgtttgttgcttcttttccttgtgggggttacagctgcacgcatggaactgagcttcttcaaaagtgatcagtcatcaagttatgatgatgatgagtattcaaaaccatgctgtgatctctgcatgtgcacacgctcaatgcctcctcaatgcagctgtgaagatattaggctgaattcatgccactcagattgtaagagctgtatgtgcacacgctcacagccaggacagtgtcgttgtcttgacaccaacgacttctgctacaaaccttgcaagtccagagatgactagaaaaactaatagctctctaaatgga

SEQ ID NO: 255849 - DNA, 380 bp, Glycine max
gattcatgcatctgaataattaaaaaaagccattgccatagcagcctaagaaaatgaagagcactaccttgttcgctatctttctactttgcgccttcacctcatacctaccttccgccaccgcccaggacgtgctcgacgtggatggcgatccgattcggaacggtttcatatactacgttttgccggcaataagaggaaacggtggcggaatagaacgagccgcactcgggaaagacacttgccctatcactgtagtgcaatctcccaatccaaactctaaggggttagaaattaagtttgaatctgcataccccgcctattacataaacgaaaccctaattttgcaaataaagttcagttacccacagcagtgtgaa

SEQ ID NO: 255850 - DNA, 381 bp, Glycine max
aggggctcagcataaacaattaataaacataatttggaggagcgatcatttgtagctaaaggcgtctttgttcctccttttccttgtgggggttacagctgcccgcatggaactgagcttcttcaaaagtgatcagtcatcacgttatgatgatgatgagtattgaaaaccatgctgtgatctctgcatgtgcacacgctcaatgcctcctcaatgcagctgtgaagatattaggctgtattcatgccactcacattgttagagctgtatgtgcacacattcacatccaggacagtgtcgttgtcttgacaccaacgacttctgctacaaacctcgcaagtccagagatgactagaaaaactaattgctctctcaaatgga

SEQ ID NO: 255851 - DNA, 387 bp, Glycine max
gattcacacaactaactaagaaagtcgggcatgagccccccaaaaatgaagagcaccatcttctttgctctctttctcttttgtgccttcaccacctcatacctaccttcagccatcgctgatttcgtgctcgataatgaaggtaaccctcttgaaaatggtggcacatattatatcttgtcagacataacagcatttggtggaataagagcagccccaacgggaaatgaaagatgccctctcactgtggtgcaatctcgcaatgagctcgacaaagggattggaacaatcatctcgtccccatatcgaatccgttttatcgccgaatgccatcctttgagccttaaattcgattcatttgcagttataatgctgtgtgttggaatt

SEQ ID NO: 255852 - DNA, 268 bp, Glycine max
acagctccttttagtcttcagacagcgatccacacaactaagtaatagtgtcttttataacccccccaaccttaacaacaccatcttctttgctctctttctctcttttgccttcaccacctcatacctaccttcatccatctctcatttctttctctataataaacctaaccctccccaaaataattgcacatattacatctcatcatacataacatcattttatagaataaaatcacccccaacttgaaattaaatattccctctc

SEQ ID NO: 255853 - DNA, 386 bp, Glycine max
ggcttattcacgcaacggaataagaaatgaagagtactatcttctttgctctctttctagtttgtgccttcaccatctcatacctgccttcagccaccgctcagttcgtgctcgacactgatgatgatcctcttcaaaacggtggcacatactatatgttgccagttatgggaggaaagggcggtggaatagaagtagattcaactggaaaagaaatatgccctctcactgttgtgcaatcacccaatgagctcgataaggggattggactagtctttacatctccattacatgccctttttatcgccgaaggctatcctttgagcattaagtttggttcatttgcagttataacgctgtgtgccggcatgcctactgagtgggct

SEQ ID NO: 255854 - DNA, 350 bp, Glycine max
gtccaaggctactttaatcagggctcggatcacaaccgttttctatatgttatgtggctgctttggctatgcttcttttatgcaagcccgggaaaccttctcactggcttcggcttctataacccatattggctcattgacatagccaatgttggcatagttatccaccttgttggtgcataccaagtttactgccaacccctcttctcattcgtggaatcacatgcagcagcaaggttcccaaatagtgattttatgagcagagagtttgaagtaccaatacctggctgtaaaccctacaggctcaacctcttcaggttggtttggaagacaatttttgtgattttgtc

SEQ ID NO: 255855 - DNA, 332 bp, Glycine max
  unsure (1)..(332): unsure at all n locations
gcgttagaacacntcagaaaggactccacattgacactgattaaagattacttcagagagcgacattttttatataaccacatacttgttcctccttttcattacgacagatacatacgcacgcatgaaaacgacctaattctaaagttatcagacatcaacttatgattacgattagtattcaaaaccatactgtgatctctgcatatgcacacactcaattccttcttaatgaagacgtcaatatattacgcttaatccatgacaatcaaattgtacgagctgtatatgcacacattcacatccaagacaatgtcgatgtctttacacca

SEQ ID NO: 255856 - DNA, 239 bp, Glycine max
gattcacacaactaactaagaaagtcttccatagccccccaaaaatgaagagcaccatcttctttgctctctttctcttttgtgccttcaccacctcatacctaccttcagccatcgctgatttcgtgctcgataatgaaggtaaccctcttgaaaatggtggcacatattatatcttgtcagacataacagcatttggtggaataagagcagccccaacgggaaatgaaagatgccct

SEQ ID NO: 255857 - DNA, 422 bp, Glycine max
ctgctataagacgaccgacggtgatagcgtatcagagagtggtttcagtgagggatcggggttcacttgatccttcataactcgtcatcatcatcatcatcatcaccgttgattgaagaagatgccgatcagaaacatcgccatcggaaggcctgaagaggctactcaccccgacacgttgaaagcggggttggctgagttcatctccaccttgatcttcgtgttcgccggttcaggttccggcatcgcctacaacaagctcaccgacaacagcgccgtcactcccgccggcctcatctacgcttccatcgcccatgctttcgccctcttcgtcgccgtctccgtcggcgccaacatctccggcggccacttctaccccgccgtcaccttctgcgccttctttggcggcaacatcaccttac

SEQ ID NO: 255858 - DNA, 402 bp, Glycine max
ggagagagaaaaaaggcaaaatgtcaaaaagaggacgcggtggttcggcggggaacaagttccggatgtcgctgggtctgccggtggcggcgacggtgaactgcgccgacaatacgggggcgaagaacctctacatcatatcggtgaaagggatcaaagggcgtttgaaccgtctcccctcggcttgcgttggcgacatggtgatggccaccgtgaagaaggggaaacccgatctgaagaagaaagttttgccagctgtcattgttcgccagcgcaagccatggcgccgaaaggacggcgtctacatgtatttcgaagataatgctggtgttattgtcaatcccaaaggaaaaatgaaaggttctgctatcactggtcccattggaaaagagtgtactgatc

SEQ ID NO: 255859 - DNA, 369 bp, Glycine max
aaagagacccggaaagggtgggaaccgcttttggaaatcgattgagcttggatttaatactcccagggaagccatcgaaggaacctacattgacaagaagtgccccttcactggcaatgtttacatccgtggccgtatcttggctggaacatgtcacagtgctaagatgaacaggactattattgttaggaggaattatctccattttatcaagaagtaccagaggtacgagaaaaggcactccaacattcctgctcatatatcacctgctttccgtgtgaaagaaggagatcacgttattattggtcaatgcaagccactttctaagactgtgaagttcaatgtgttgaaagtgatcccagctggatc

SEQ ID NO: 255860 - DNA, 356 bp, Glycine max
ccggtacggctgcgatccgacttcggaagtgtactgctctccgattacaaactaccggggagtccataggaagtacctaccttgacaaaattttccacttcactagctatgttaccatcctccactttagctttgatataaccatcctcgtttctcatatacacaagtctattattgttaaaaggaattatttccattctatcaacaagtaccagacgttcaagaatatgcgctccagctctgatgatcatatcttacctacttttcgtttcaacgaaagagatctcgtaattattgacctatgcacaacactctgtaagactgtttacatcaatgtgattaaaaaaacccctgct

SEQ ID NO: 255861 - DNA, 402 bp, Glycine max
gactttgagttcgaactaaacaattgggttcaggctgcctcgatcatggagaggaaaacatttgggtttttgttcttgctcctccttgtcttagcttctgatgtgacggtgaagagagcagaggcgaaagattgcttgacaaggaggcacgggttccagggtagatgcttattcgacaggcaatgtgcacatgtgtgcaggagcgatggtttcatcggtggtcagtgccgaggccctcttcgcaaatgcttttgcagcaggccatgttgatcgaaattactactgccaaagaggccatgaaataaacaaacaaacaaataaataaatagctctaaccgacacatatgtacgtagcgtcggggttctagctagctaggtaggtacgtgtgtcttttgttatcg

SEQ ID NO: 255862 - DNA, 303 bp, Glycine max
ggctgaagaccaaggaggttgggcaggatattgagagcatggcacaggatacaagggaggcagctgcaagggatgcaagggaggcagctgcaagggatgcaagggaagctgctgcaagggatgcaaaggtggaagcaagggatgtaaagaggacaacagtgacagcaacaaccgcaaccgcatgatgagtaattctgatattagagggagcattaatggtgttgtgggatgtgggttatatggggaaaataaaataaatgatgtatgtccctcttgcctaatgtaaggttgtgtgtttttgtt

SEQ ID NO: 255863 - DNA, 354 bp, Glycine max
ggcagcagaaagcgatgaaaggtcaacaacagctaaaaaaatctaaggtggtgaaaattgactcaagaaaatcatgggaacaccacataactaatgcaaccaataaaggctaccctgttatggttcatttctctgcttattggtgcatgccttcaatagctatgaatcatttctttcaacaactggcctccacctatcaaaatgttctctttctgaatgttgatgttgatgaggtcaaggaagttgcttccaagttggaaattaaagcaattcctaccttttgtttgatgaatggaagagctccagtggataaaattgtgggtgcaaaccctgatgaattaaagaaaaagatca

SEQ ID NO: 255864 - DNA, 363 bp, Glycine max
gacagcataaacaattaatacagatgagtttggggaacgggatggcggcgctaaaggtgcgtctgttgcttctcttccttgtgggggctacagctgcacgcatggaactgagcttcttcaaaagtgatcagtcatcaagttatgatgatgatgagtattcaaaaccatgctgtgatctctgcatgtgcacacgctcaatgcctactcaatgcagctgtgaagatattatgcagaattcatgccactcagattgtaagagctgtatgtgcacactctcacagccagtacagtgtcgttgtcttgacaccaacgacttctgctacaaaccttgcaagtccagagatgactagaaaaactaatagc

SEQ ID NO: 255865 - DNA, 414 bp, Glycine max
ccaagccttccaacgcttccaaaaaacctccgaatggggccggcaaaaccatttattaaggttggggtggaaaaccaccatggtggtgctaaaggtgtgttggttgcttcttttcctggtgggggttacagctgcacgcatggaactgagcttcttcaaaagtgatcagtcatcaagttatgatgatgatgagtattcaaaaccatgctgtgatctctgcatgtgcacacgctcaatgcctcctcaatgcagctgtgaagatattaggctgaattcatgccactcagattgtaagagctgtatgtgcacacgctcatagccaggacagtgtcgttgtcttgacaccaacgacttctgctacaaaccttgcaagtccagagatgactagaaaaactaatagctctctcaaatgga

SEQ ID NO: 255866 - DNA, 364 bp, Glycine max
caactcgaataatcagagaaaagccatttgcggagcagggctaagaaaatgaatagcactatcttgctcgctatctttctactttgcgccttcacctaatacctaccttccgccaccgtccaatacgtgctcgacgtggatggcgatccgattcataacggcttcatatactacgttttgccggcaataagaagaaacggtggcagaatacaacgagccccactcgggaaagacacttgccctatcactgttgtgcactctaccaatccaaactctaaggggttagaaactaagcttgaatctgcataccccgcctattacataaacgacaccctaattttgcaaataaagatcagatacccac

SEQ ID NO: 255867 - DNA, 354 bp, Glycine max
  unsure (1)..(354): unsure at all n locations
ggagcgtgtcaagcgctaagggggaaggagaaacagaattgaattgaattgcgtttgcgccattgaaaatcggaagtaatggaattgcattgctccgtgaaaaaattggaaaacgagaaagcgtttgagtttctcggaggcgttcctcttctgcagaggcttccgagctcgtctctgaggaagatagctcaacttgtggatgtcaaacactgtgagccaagagagtatgttgttcgcgagggtgaacctggagatggcgtgtacttcatattggatggagaggctgangttcttggatctgctatggccaatgatgaaaatcgaccagagttccaattgaaacaatatgactac

SEQ ID NO: 255868 - DNA, 414 bp, Glycine max
cgataagacaacaaaaggggactttgagttcgaactaaacaattcaattcaatctggctcgagcatggagaggaaaacatttgggtttttgttcttgctcctccttgtcttagcttctgatatgacggtgaagagagcagaggcgaaagattgcttgacaaggaggcacgggttccagggtagatgcttattcgacaggcaatgtgcacatgtgtgcaggagcgatggtttcatcggtggtcagtgccgaggccctcttcgcaaatgcttttgcagcaggccatgttgatcgaaattactactgccaaagaggccatgaaataaacaaacaaacaaataaataaatagctctaaccgacacatatgtacgtagtgtcggggttctagctagctaggtaggtacgtgtgtctttt

SEQ ID NO: 255869 - DNA, 381 bp, Glycine max
gctcctacagatccggcaggggctgcgattttggatcggaacctcttctgcggcgtaacaatgggacactacatcgtttgaaattatcacccaataaactacggtcctggttatcgcacttgccgagtgtgtgggaacacacatggattgatcaagaaacatggccttatgtgctacaagcaatgctttcctttcaatgccaaagaaactgacttcatcaaatatggcttaaagagctgctgtcacctactgaccaacattatgttctaacactagaatgctctgaagatgttatgtatgaagaaacttgagacttacttttttcatctatgttattatcagacataatgtgtgaaacgaaaaatactcttatataaattg

SEQ ID NO: 255870 - DNA, 379 bp, Glycine max
gattcacacaactaagtaaggagttcttccatagccccccaaaaatgaagagcaccatcttctttgctctctttctcttttgtgccttcaccacctcatacctaccttcagccatcgctgatttcgtgctcgataatgaaggtaaccctcttgaaaatggtggcacatattatatcttgtcagacataacagcatttggtggaataagagcagccccaacgggaaatgaaagatgccctctcactgtggtgcaatctcgcaatgagctcgacaaaaggattggaacaatcatctcgtccccatatcgaatccgttttatcgccgaaagccatcctttgagccttaagttcgattcatttgcagttataatgctgtgtgt

SEQ ID NO: 255871 - DNA, 306 bp, Glycine max
  unsure (1)..(306): unsure at all n locations
nnnttnnnnnnnngcnnaaaaaaatgagcaaatgtgctaaaagcaaattactggccacttatcttcttcaaaagtgatcagtcatcaagttatgatgatgatgagtattcaaaaccatgctgtgatctctgcatgtgcacacgctcaattcctcctcaatgcagctgcgaaaatattaggctgaattcattccactcatattgtaagagctgtatgtgcacacccttacatccaggacagtgtttttgtttttacaccaacgacttcttctacaaaccttgcaagttcctatattactacaaaaac

SEQ ID NO: 255872 - DNA, 394 bp, Glycine max
aaaccccacaaagggggcccaaacccatttaataaatatgtttttagggaacgacttgttgtccctaaaggcgggttggttgcttcttttcctgtgggggtacagctccccctggaactagcttcttcaaaagtgatcagccatcaagttatgatgatgatgagtattcaaaccatgctgtgatctctgcatgtgcacacgctcaatgcctcctcaatgcagctgtgaagatattaggctgaattcatgccactcagattgtaagagctgtatgtgcacacgctcacagccaggacagtgtcgttgtcttgacaccaacgacttctgctacaaaccttgcaagtccagagatgactagaaaaactaatagctctctcaaatggacgaagcccct

SEQ ID NO: 255873 - DNA, 415 bp, Glycine max
  unsure (1)..(415): unsure at all n locations
ggaattcccgggtccgaccccacgcccgtccgtaccggtctggctgatgaatacctacatgaagggggatttcacacccaactaactaagaaaagtcnttccatgagccccgccaaataatgatgagcaccatcnttctttgctctctnttctcttttgggtgccttcaccacctcatantcctaccttcagnccatcgcnntgatttcgtgccctcgataatgaatgggtaaccctcttgaaaataggtggcacaatatnntatatcttgtcagacactaacagcatttggtggaataaagagccagtccccaacgggaaatgaaaagatgnccctctcatctgtgtgtgcaatctcgcaatgaagctcgacaaaagggattgggaaccaatnncatctcgtccccattatcga

SEQ ID NO: 255874 - DNA, 426 bp, Glycine max
cccacccgtccgtgcaataagacgacagatgggggacaaagaaaactaaaccctagtgggagtcttgtcgtcgtctcttcctcttcgcaacaatggttgccgccaagaaaaccaagaagacccatgagagcatcaacaacaggcttgctcttgtcatgaagagcggcaaatacacccttggttataagaccgttctcaaatctcttaggagctccaaagggaaattgattatcattgctaacaactgcccccctttgagaaagtcagagattgaataccatgccatgttggcaaaggttggagttcatcattacaatgggaacaatgtggatttgggcactgcctgcggcaaatattacagagtgtgctgccttagcattattgatcctggtgattcggatatcattaagacactgcctggtgaac

SEQ ID NO: 255875 - DNA, 378 bp, Glycine max
acatatggctgtctctaagggaagccagttggattgaaacaggaaagccatgtctattcattgcaacgtgtgcatgcaaacatttatatgcaccacatcataagtgaggtgcaaggagcatgcttattccaaacaccccaaatctgatctccatgtttgttttcctcatcttaaaaagtgaaagaatgcatgttgagacatgatatatcaatatatggcctgttatatattctctatacacagagatcttcaatttcttttataacaaatatgtctgtgtgtatgtgtcctatggggtcagtagagactagaggggataattagtaaatttttccattgtttaatcgtgaaaaactatggtaattttctatttttttg

SEQ ID NO: 255876 - DNA, 386 bp, Glycine max
tcatgttatattttgttcatgctttttataggaaattgaggtaatttgcttatactttttttgagtttaaatattagattttaaatatattgtgaaagactaaaataaactatttaatttaatttaaaagaaaattcaattttgattagataaaaaaaaaaaacccatttaataaaagtgaaccttgtgtttgattgtgtggaaatgagggggcaaggaaagaagatcaaagaaaggagaggatctccagttgagtgcatcatttggtatgcaagaaatgagaaaataaaatttttatgtaggtgaatttaataaaataaattttaattttaaattaataaaaataaaataaaataaaataaataaaaaattttaaattgtatccc

SEQ ID NO: 255877 - DNA, 343 bp, Glycine max
ggaaaaaaactgaaaagtaaaggcgaaagactttaggtttggaattgggaattagggttgttcgcgtcacgaagatgatcgaggtggtgttgaacgatcgattggggaagaaggtgcgcgtgaagtgcaacgacgatgacaccatcggcgacctgaagaagctggtggcggctcagacgggcacaagagccgacaaggtccgcatccagaagtggtacaccatatacaaagatcacatcactctcaaggattacgagatccacgacggcatgggtctcgaactctactacaactaaacacaaggtgtgttttatgcatgatatattactatgatctgggaatg

SEQ ID NO: 255878 - DNA, 394 bp, Glycine max
ggcacaagtgagtttgttgatcgagggaactagaaacagtgtgatgaaaatgaaggtccttgttttcttcgttgctacaattttggtagcatggcaatgccatgcgtacgatatgtcccctctccgaatgaacactggctatggtgcccgtactccggaggtgaaatgcgcaagttggaggcttgctgtggaagcacacaacatctttggctttgagaccattcctgaagagtgcgttgaagcaacaaaggaatacatccatggcgaacaatatagatcagactccaaaacagttaaccaacaagcttacttttatgccatagacctcgaattccatcccaaggacacatttgtgttcagtatagatggcaccgtactctctaatattccatac

SEQ ID NO: 255879 - DNA, 365 bp, Glycine max
ggaagcatttgagactaactcttagagagaaaaaaaatggctgatacaggtggaggagatgcagtgagaccagtggtaatatgtgataacaagtgtggctgcacacttccatgcactggtggttccacttgcaggtgcacaagtgctggcactgccacaggagggggtgatcacgtgacatgctcgtgcggagagcactgtggttgcaatccatgctcatgtcccaagattgcggctgctggaagtggttgcagatgtggcacagattgtgcatgtgcctcctgccgcacttagtatcacaccttaaagcttaaacttcacgttttattttatgtcttcaaatcttgaatacgttttctatatat

SEQ ID NO: 255880 - DNA, 316 bp, Glycine max
aggacagcagagacaattaataaagatgagtttgaagaacaacatggtggtgctaaaggtgtgtttgttgcttcttttccttgtgggggttacagctgcacgcatggaactgagcttcttcaaaagtgatcagtcatcaagttatgatgatgatgagtattcaaaaccatgctgtgatctctgcatgtgcacacgctcaatgcctcctcaatgcagctgtgaagatattaggctgaattcatgccactcagattgtaagagctgtatgtgcacacgctcacagccaggacagtgtcgttgtctagacaccaacgac

SEQ ID NO: 255881 - DNA, 228 bp, Glycine max
ttagaacacacatactggcacttcactcattaccactctcaggccggcttagagatcttttcaaaagacgtttacagaacatcatccaaagatccagaacgaggaaggacatatcactgatctttacattcccaggaagtgctacgccacaaacacattgattaaccttaaagaccatgcttcatgtcagatcaacattattcataaccatgataatatcttttacaa

SEQ ID NO: 255882 - DNA, 379 bp, Glycine max
cccactcgtcctcccactcgtccttactctagaagacgacagaaggggacagcggaaacgagtaataaagatgagtttgaagaacaacatggtggtgctaaaggtgtgtttgttgcttcttttccttgtgggggttacagctgcacgcatggaactgagcttcttcaaaagtgatcagtcatcaagttatgatgatgatgagtattcaaaaccatgctgcgatctctgcatgtgcacacgctcaatgccttctcaatgcagctgtgaagatattaggctgaattcatgccactcatattgtaagagctgtatgtgcacacgctcacagccaggacagtgtcgttgtcttgacaccaacgacttctgctacaaaccttgc

SEQ ID NO: 255883 - DNA, 280 bp, Glycine max
gatagcaaaatcgtgtctccggtttaatcaccattgtacaacccaattcccttcgtcgttttcgattaagagagcaatggcacgtaccaagcaaaccgctcgcaagtccaccggaggaaaggctccgaggaagcaattggcaaccaaagccgctcgcaagtcagccccggcgaccggcggagtgaataagccccaccgcttcaagccaggaacggtggctctgaaggagattcgaaagtaccagaagagcaccgaacttctgatccgaaaactcccattc

SEQ ID NO: 255884 - DNA, 353 bp, Glycine max
gacacttgacagggggaacgggaaagatgggtttgaagaacaacatggtggtgctaaaggtgtgtttcttggttcttttccttgtgggggttactaatgcacgcatggaactgaacctcttcaaaagtgatcactcatcaagtgatgatgagtcttcaaaaccatgctgtgatctctgcatgtgcacagcctcaatgccacctcaatgccattgtgcagatattaggttgaattcatgtcactcaacttgtgatcgctgtgcgtgcacacgctcgatgccaggccagtgtcgttgccttgacaccaccgacttttgctacaaaccttgcaagtccagtgatgaagatgatgac

SEQ ID NO: 255885 - DNA, 190 bp, Glycine max
  unsure (1)..(190): unsure at all n locations
tggcttcttcttcctgctcctcctccttgtctttgcttcccnggtggtggtgctctctgggggctgtgtgtgtgtgtcnccttgccccggtttccttggtttgtgnttttgngtccccctctgtgctttggtctgctggttcgctcgtttctccggtggccggtgccttggcttccgccgccgctgcttt

SEQ ID NO: 255886 - DNA, 376 bp, Glycine max
  unsure (1)..(376): unsure at all n locations
ggaagagtgaagagaatggctcccaaaggtttggcctttctggctgtgttaatatgcgtttcagcactgtcactgagtccttctgttgcgggggaagggcaaaataatggccttgttatgaacttctacaaggaatcatgccctcaggctgaaggcatcatcacagaacaagtcaagcttctctacaagcgccacaagaacactgctttctcctggctcaggaacatcttccatgactgtgctgttcagagttgtgatgcttcactgttgctggactccacaagaaggagcttgtctgagaaggaaacagatagaagctttgggttgagaaatttcangtacattgaaaccatcaaagaagctttggaaagagaat

SEQ ID NO: 255887 - DNA, 314 bp, Glycine max
gacagcaaaaacaattaataaagatgagtttgaagaacaacatggtggtgctaaaggtgtgtttgttgcttcttttccttgtgggggttacagctgcacgcatggaactgagcttcttcaaaagtgatcagtcatcaagttatgatgatgatgagtattcaaaaccatgctgtgatctctgcatgtgcacacgctcaatgcctcctcaatgcagctgtgaagatattaagctgaattcatgccactcagattgtaagagctgtatgtgcacacgctcacagccaggacagtgtcgttgtcttgacaccaacgac

SEQ ID NO: 255888 - DNA, 413 bp, Glycine max
  unsure (1)..(413): unsure at all n locations
cgggcgaccacgcgtgcgtacggtgnagaaganacagaggggcagcataacaattaataaagatgagtttgggaacgcatggtggnctaaagagtgtgtttgtgcttcttttccttgtgggggttacagctgcacgcatggaactgagcttcttcaaaagtgatcagtcatcaagttatgatgatgatgagtattcaaaaccatgctgtgatctctgcatgtgcacacgctcaatgcctcctcaatgcagctgtgaagatattaggctgaattcatgccactcagattgtaagagctgtatgtgcacacgctcacagccaggacagtgtcgttgtcttgacaccaacgacttctgctacaaaccttgcaagtccagagatgactagaaaaactaatagctctctcaaatggac

SEQ ID NO: 255889 - DNA, 375 bp, Glycine max
gacagcaaaaacaattaataaagatgagtttggggaacaacatggtggtgcgaaaggtgtgtttgttgcttcttttccttgtgggggttacagctgcacgcatggaactgagcttcttcaaaagtgatcagtcatcaagttatgatgatgatgagtattcaaaaccatgctgtgatctctgcatgtgcacacgctcaatgcctcctcaatgcagctgtgaagatattaggctgaattcatgccactcagattgtaagagctgtatgtgcacacgctcacagccaggacagtgtcgttgtcttgacaccaacgacttctgctacaaaccttgcaagtgcagagatgactagaaaaactaataactctctcaaatgg

SEQ ID NO: 255890 - DNA, 392 bp, Glycine max
tttgggtcagcaaaaacaattaataaagatgggttttgtgaacatcatggtggtgcgaaaggtgtgtttgttgcttcttttccttgtgggggttacagctgcacgcatggaactgagcttcttcaaaagtgatcagtcatcaagttatgatgatgatgagtattcaaaaccatgctgtgatctctgcatgtgcacacgctcaatgccttctcaatgcacctgtgaagatattaggctgaattcatgccactcagattgtaagagctgtatgtgcacactctcacagccagtacagtgtcgttgtcttgacaccaacgacttctgctacaaaccttgcaagtccagagatgactagaaaaactaatatctctctcaaatgaccaaaccccttt

SEQ ID NO: 255891 - DNA, 429 bp, Glycine max
cccacgcgtccgtccggcaacggaagggggatacattacagagtgcgttgttgctccttcccacagctccctgccaacatgggtatctccagagattctatgcacaagaggcgtgccactggtggcaagaagaaggcatggaggaagaagagaaagtatgagcctggtcgccagcctgctaacactaagctgtcaagcaacaagacagtcaggaggatccgggttagaggtggaaatgtgaagtggagggcactgagattggatactggaaattactcctggggaagtgaagctgtaactcgcaagactcgtatactagatgtggtttacaatgcctcaaacaacgagcttgtgcgtactcagactcttgtaaaaagtgctattgttcaagttgatgctgctccattcaaacaatggtaccttcagcac

SEQ ID NO: 255892 - DNA, 340 bp, Glycine max
ggttacacatactcacacactttgtactctccggccttgcttcttcgatccagatctctctccttctccctcaaatggcttcccttctgcaatgttccatgcccctcgtctctctttccaatcgagctctggtacccggtaccaggatctccaacccaagttcagtttccctttcaattaagggaagaagtttcccacccgttacattgcagcccagagggcgtcggtttcagcttagatgtgcggcaaaaccagagacagtgaagaaggtgtgtgacatagtcaagaagcaattggcactgccaaatgaatcagctgttactggagagtctaaatttgc

SEQ ID NO: 255893 - DNA, 379 bp, Glycine max
tgggacagcacaaacaattaatggagatgagtgtgaagaacaacatggtggtgctaaaggcgtgtttgttgcttcttttccttgtgggggttacagctgcacgcatggaactgagcttcttcaaaagtgatcagtcatcaagttatgatgatgatgagtattcaaaaccatgctgtgatctctgcatgtgcacacgctcaatgcctcctcaatgcagctgtgaagatattaggctgaattcatgccactcacattgtaagagctgtatgtgcacacgctcacagccaggacagtgtcgttgtcttgacaccaacgacttctgctacaaaccttgcaagtccagagatgactagaaaaactattagctctctcaaatgga

SEQ ID NO: 255894 - DNA, 385 bp, Glycine max
gtctcaacactttctcgcattttccctgttcttgctctctcacgttttccgcttcagttttctcgggaaaatcatggtgaaaggtccaggcctctactctgacattggcaagagagctcgcgatcttctgttcaaggattatcagaatgaccacaagttcaccatcaccacttacacttccaccggagtggaaatcacttcaactggagtcaggaaaggtgagatatatttggccgatgtcagcactaaggtgaagaacaagaacatcacaactgatgtcaaagtggacactaactcatatctgcgtacaatcattactgtggatgaacctgcccctggactcaggacaatttttagctttaattttccagatcagaaatctggc

SEQ ID NO: 255895 - DNA, 400 bp, Glycine max
ggctttgagaaagagagagatgggaagagaaaaggagacaacaaaggtagcttacacggtggagcagcttgtagccttcaatccatacaatcccgatattcttccagatctcgaaaactatgtcaacgaccaggtttcgtcgcaaacttacagcctggacgcgaatctctgccttcttcgcctctaccagtttgaaccagagaaaatgagttcccagattgtggcccgcatattggtcaaggctctcatggcaatgccggcgccggatttcagcctttgtctctttttgattccagaacgcgtgcaaatggaggggcagttcaagactttgattgtcctgtctcactatttggagacaggaagatttcggcagttctgggatgaagcagcaaaaagtcgt

SEQ ID NO: 255896 - DNA, 375 bp, Glycine max
  unsure (1)..(375): unsure at all n locations
ggcttattcacgcaactaaataagaggggaagagtactatcttctttgctctctttctagtttgtgccttcaccatctcatacctgccttcagccaccgctcagttcgtgctcgacactgatgatgatcctcttcaaaacggtggcacatactatatgttgccagttatgagaggaaagggcggtggaatagaagtagattcaactggaaaagaaatatgccctctcactgttgtgcaatcacccaatgagctcgataaggggattggactagtctttacatctccattacatgccctttttatcgccgaaggctatcctttgagcattaagtttggttcatttgcagntataacgctgtgtgccggcatgccta

SEQ ID NO: 255897 - DNA, 234 bp, Glycine max
tttttactacagaaggggatagtgaagaaggcaaatcgcgaatactagatgtgatctgagagaatggctcctcggtctagcagcaaggacgcccaagaccttttccgcgctctttggtctgcttatgctgcaacccccactaatctcaagatcattgatctctatgtcatctatgccgtattcaccgctttcatccaggttgtttacatggctttggttggatcattttcattt

SEQ ID NO: 255898 - DNA, 220 bp, Glycine max
ttgtattattttctactgaaatgcattcaacaaaccaaaaaaatattccattccccgcgaggaataaaaagcaccatcttctttactctctctctctattgacccttcaccacctcatacctaccttcagccatcgctgatcatctgctcaataatcaaagtcacaccaaattaaatgggggggacattacatatttttggtgccgtcccagccttttca

SEQ ID NO: 255899 - DNA, 241 bp, Glycine max
  unsure (1)..(241): unsure at all n locations
gagagtgaagaaggcaaatcgcgaagactagatgtgatctgagagaatggctcctcggtctagcagcaaggacgcccaagaccttttccgcgctctttggtctgcttatgctgcaacccccactaatctcaagatcattgatctctatgtcatctatgccgtattcaccgctttcatccaggttgtttacatggctttggttggatcatttccatntaactccttcctatcaggagtactt

SEQ ID NO: 255900 - DNA, 275 bp, Glycine max
gattcacacaactaactaagaaagtcttccatagccggccaaaaatgaagagcaccatcttctttgctctctttctcttttgtgccttcaccacctcatgcctaccttcagccatcgctgatttcgtgctcgataatgaaggtaaccctcttgaaaatggtggcacatattatatcttgtcagacataacagcatttggtggaataagagcagccccaacgggaaatgaaagatgctctctcactgtggggcaatctcgcaatgagctcgacaaa

SEQ ID NO: 255901 - DNA, 347 bp, Glycine max
ggcagttcaaagcgaaaagagattcgaatccagggaagggaaaggaaagtaagagaagagaagaatggccgaagagggacaagtgattggtgtccacagcgtggaggagtgggaggaacatctcaagaagggacaagagtccaagaaattgattgtggtggattttactgctttttggtgcggcccatgcccgttcattgtcccaattcttggggatatggctaaaaaggtggccaatggcacctttcttaaagtggattgtgattaattggccacttgtttcaaggaattggaaggtgaagctaatccaacctttctattctttaaagaaagccaacttgtgaaaa

SEQ ID NO: 255902 - DNA, 348 bp, Glycine max
gaagaagagtgtcatttagcgtggaagataatcgtaaagagtacctaagccaggccctataaccaggggacatatctgcaactagctttgatgatgaagaggtcacaagcgatggagaatatggtgatggacaggactggtgcaggagggaaccagagataatatgtcggcatatcgatcatgtcaacatgcttggtctcaataaaactacactacgacttcggtttttgataaattggcttggtacctcgttactgcaactgaaagtgcctgcttctgatgggggtgaaaaagcaaggcttggccaaatctattgtcccaaaaaaaaaaaagccctttaaaaagaaa

SEQ ID NO: 255903 - DNA, 409 bp, Glycine max
tgttatttcagttcaattttaaacatgctttgcgtcgacactgtcttcacctctttcttacccacaaaatcaacttgcgtcttttcctccaaatcaaccaccccaatttcctgcaccctccaaggaacagttgcagagccaaaatctacagctgctgctgaaccgcttttgctaaatgcagttcgcgggatagatgttgaaagacccccggtttggctcatgaggcaagcagggaggtacatgaagagttaccaaaccatctgtgagaaatatccttcattccgtgaaagatctgaaaatgttgatcttcgtgtggaaatttctctgcaaccgtggcatgtttttaagccttgatgaatgattttattctcagacacttttaccccactttcctgaattaatataccct

SEQ ID NO: 255904 - DNA, 392 bp, Glycine max
  unsure (1)..(392): unsure at all n locations
gaagactacagaangggacagcaaatacaattaataaagatgagtttgaagaacagcgtggtggtgctaaaggtgtgtttgttgcttcttttccttgtgggggttacagctgcacgcatggaactgagcttcttcaaaagtgatcagtcatcaagttatgatgatgatgagtattcaaaaccatgctgtgatctctgcatgtgcacacgctcaatgcctcctcaatgcagctgtgaagatattaggctgaattcatgccactcagattgtaagagctgtatgtgcacacgctcacagccaggacagtgtcgttgtcttgacaccaacgacttctgctacaaacctttgcagtccagaaatgactagaaaaactaatagctctctcaaaatga

SEQ ID NO: 255905 - DNA, 371 bp, Glycine max
  unsure (1)..(371): unsure at all n locations
gacccacgcttccttccgctctttcttaccgnttctataagatttcagaaagggatgcaactgaataattaatagaagcctttttcatatcatcctactaaaatgaataccactaccttgttcgctatctttctactttgcgccttcacctcatacctaccttccgccaccgtccagtacgtgctctacgtggatgtcaatcctattcggaacggtttcatatactaccttcttccggcaataatatgaaactgtggcggaatataactagccgcactctctaaaaacacttgccctatcactgtaatgcaatcttccaatccaaaatttaaggtgttagaaattaactttgaattttcatacccctccta

SEQ ID NO: 255906 - DNA, 401 bp, Glycine max
  unsure (1)..(401): unsure at all n locations
ccgggctttcttacaccaccgaaaggattatcgaaggcgatgcaactgaataattaanagaagccatttccatagcatcctaccaaaatgaatagcactagcttgttcgctatctttctactttgcgccttcacctcatacctaccttccgccaccgcccaggacgtgctcgacgtggatggcgatccgattcggaacggattcatatactacgtttcgccggcaataagaggaaaccgtggcggaatagaacgagccgcactcaggaaagacacttgccctatcactgtagtgcaatctcccaatccaaactctaaagggttagaaattaaatttgaatctgcataccccgcctattacataaacgaaaccctaattttgcaaataagttcatttaccca

SEQ ID NO: 255907 - DNA, 230 bp, Glycine max
gcatcatctacaacccctcgagtgggcacatttctactctacgctctaaaccctctctctctctctctctcgatctatcatggcttcgcccaatcagcaaaccgtggattaccctaccttcaaactcgtcatcttctgtgacggcggtacaagaatgacaacattcgtgaaaaggcatcttaccggtgaattccaaaaaaaatactaaccgaccatttgagtagaggttc

SEQ ID NO: 255908 - DNA, 272 bp, Glycine max
gacagcaaaaacaattaataatgatgagtttgaagagcggcatggtggtgctaaaggtgtgtttgttgcttctttttcttgtgggggttacagctgcacgcatggaactgagcttcttcaaaagtgatcagtcatcaagttatgatgatgatgagtattcaaaaccatgctgtgatctctgcatgtgcacacgctcaatgcctcctcaatgcaaatgtgaagatattaggctgaattcatgccactcacattgtaagagctgtatgtgcaca

SEQ ID NO: 255909 - DNA, 350 bp, Glycine max
gatgcaactgaataattaagaggagccatttccatagcagcctaagaaaatgaagagcactagcttgttcgctatctttctactttgcgccttcacctcatacctaccttccgccaccgcccaggacgtgctcgacgtggatggcgatccgattcggaacggtttcatatactacgttttgccggcaataagaggaaacggtggcggaatagaacgagccgcactcgggaaagacacttgccctatcactgtagtgcaatctcccaatccaaactctaaagggttagaaaataaatttgaatcttcataccccgcctattacataaacgaaaccctaattttgcaaaata

SEQ ID NO: 255910 - DNA, 415 bp, Glycine max
gtcagcaaaaacaattaataaagatgagtttgaagaacaacatggtggtgctaaaggtgtgtttgttgcttcttttccttgtgggggttacagctgcacgcatggaactgagcttcttcaaaagtgatcagtcatcaagttatgatgatgatgagtattcaaaaccatgctgtgatctctgcatgtgcacacgctcaatgcctactcaatgcagctgcgaagatattaagctgaattcatgccactcatattgtaagaactgtatttgcacacgcttacagacaggacagggtcgttgtcttgacaccaacgacttctgctacaaaccttgcaagttcaaagatgacttgaaaaactaataacttttttaaatggaccaaacccctttaagctttgtttgttatgttaagggaaa

SEQ ID NO: 255911 - DNA, 359 bp, Glycine max
gacggcaaaaacaattaatggagatgagtttgaagaacaacatggtggtgctaaaggtgtgtttgttgcttcttttccttgtgggggttacagctgcacgcatggaactgagcttcttcaaaagtgatcagtcatcaagttatgatgatgatgagtattcaaaaccatgctgtgatctctgcatgtgcacacgctcaatgcctcctcaatgcagctgtgaagatattaggctgaattcatgccactcagattgtaagagctgtatgtgcacacgctcacagccaggacagtgtcgttgtcttgacaccaacgacttctgctacaaacctttgcagtccagagatgactaagaaaaacta

SEQ ID NO: 255912 - DNA, 265 bp, Glycine max
ggttctagtgtatgtgattgttgtgactcggtggtcttcgtcgttatcttcttcttttgttgtttgtgtgtttgttttttctctcacctgaaaatgtcttgctgcggtggtaactgtggttgcggaagcgcctgcaagtgcggcaacggctgcggaggctgcaagatgtacccagacttgagctacaccgagtcaaccaccaccgagaccttggtcatgggagtggcaccagttaaagctcaattcgagagtgctgaaatgggtg

SEQ ID NO: 255913 - DNA, 316 bp, Glycine max
ccgcgcgtccgaacacctccgagaacgtctccagaaggggacacttactagtagtaaggatggagtcctcaaagatctatgcttacctcttcctctgcatgatctttctctcttaccacactcccattctcggttgtggctactgagacaaaccccccaaaaagcacatgcctggtaaaacacctaagacacccaaaacacccgctgttaagccaccagtcaccatccctcccattaatgttcctaccgatgttcttccaccaatagtcaaaccccccagtattattccttccattcccattattaacccaaccac

SEQ ID NO: 255914 - DNA, 422 bp, Glycine max
gacttcatctcttcacacaaaaaaaaagagaggaggatgtttttgaagaacaacattctcgttctcaacgtgtcatacgtgctacttttccttgttgcgagttctactagtgcctacttgaagctgaatatacttgacctgctcatgaaaagtgatcatcattaacactcaaatgatgatgagtcttcaaaaccatgctgcgatcaataagcatgcacaaagttaaaccctcctcaatgcatctaactaacattttatgctgcattcatgcccctcaaaaagtaagagcttttattttcttacgctcaccaaacagtttagtcttcatttttttactaccatctacttttttttcaaacctttttaatttctataatattttaaaaaaacctaataacttttttatattgaccaaaccccct

SEQ ID NO: 255915 - DNA, 373 bp, Glycine max
tgattcacacaactaactaagaaagtcttccgtggccccccaaaaatgaagagcaccatcttctttgctctctttctcttttgtgccttcaccacctcatacctaccttcagccatcgctgatttcgtgctcgataatgaaggtaaccctcttgaaaatggtggcacatattatatcttgtcagacataacagcatttggtggaataagagcagccccaacgggaaatgaaagatgccctctcactgtggtgcaatctcgcaatgagctcgacaaagggattggaacaatcatctcgtccccataccgaatccgttttatcgccgaaggccatcctttgagccttaaattcgattcatttgcagttattatgc

SEQ ID NO: 255916 - DNA, 370 bp, Glycine max
  unsure (1)..(370): unsure at all n locations
tgtgacagcaaaaacaattaataaagatgagtttgaanaacaacatggtggtgctaaaggtgtgtttgttgcttcttttccttgtgggggttacagctgcacgcatggaactgagcttcttcaaaagtgatcagtcatcaagttatgatgatgatgagtattcaaaaccatgctgtgatctctgcatgtgcacacgctcaatgcctcctcaatgcagctgtgaagatattaggctgaattcatgccactcagattgtaagagctgtatgtgcacacgctcacagccaggacagtgtcgttgtcttgacaccaacgacttttgctacaaacctttgcagttcagagattactagaaaaactaattgctttt

SEQ ID NO: 255917 - DNA, 302 bp, Glycine max
gattcacacaactaactaagaaagtcttccatggccccccaaaaatgaagagcaccatctcctttgctctctttctcttttgtgccttcaccacccatacctaccttcagccatcgctgatttcgtgctcgataatgaaggtaaccctcttgaaaatggtggcacatattatatcttgtcagacataacagcatttggtggaataagagcagccccaacgggaaatgaaagatgccctctcactgtggtgcaatctcgcaatgagctcgacaaagggatggaacaatcatctcgttcccata

SEQ ID NO: 255918 - DNA, 276 bp, Glycine max
gtgaaaacaaacgacagagagcctttccaattgaattctccacagagaagaaggggcggagtcgatcatcacttaacttcactaatacatcatggcagacgagacccagaacaagtatgagagctctgaggttgaggtccaggatcgtgacctctttgactttctcgtgaagaaaaaggatgaagaacacaagcctcatcctcaggaagaggtcatcgccaccgagtttcaaaaagtcactgtctcagaccaaggagagaacaagcacagcctctt

SEQ ID NO: 255919 - DNA, 319 bp, Glycine max
gatttcaaaaacaattaataaagatgagtttgagaacaacatggtggtgctaaaggtgtgtttgttgcttcttttccttgtgggggttacagctgcacgcatggaactgagcttcttcaaaagtgatcagtcatcaagttatgatgatgatgagtattcaaaaccatgctgtgatctctgcatgtgcacacgctcaatgcctacttaatgcagctgtgaagatattacgctgaattcatgccactcagattgtaagagctgtatgtgcacacgctcacagccaggacagtgtctttgacttgacaccaacgacttctgc

SEQ ID NO: 255920 - DNA, 239 bp, Glycine max
  unsure (1)..(239): unsure at all n locations
ccgacccaggcgtacgggtactcntagacaaacgcgtgggattctttcaaagaagacaacaaaaggggcttcggaggttatatacaataaaaaaacactagccccaacaacaacattgtggtgctcaatgtctatttatagcttcttttactcatgggtgatacatctcctcacattgaactgaactctttcaaaagtgatcagtcatattatatgatgatgatatacttcaaaaccat

SEQ ID NO: 255921 - DNA, 395 bp, Glycine max
ggcactgcaactttgctctctgtggggcttcaatttctaattagggtttcgcttagagtaaccaataaccatgggagtcttcacctttgtcgtccgcaaatccggcagcgaatggagcgccaagcaatattccggcgacatcgaggcctccgccgattccaccttcgatctccaacggaagctcgtgcaagccgctctcgccgttgattcctccggtggagttcagtcctctttctctcccgtgtctcctacctccgctgtgttccaggtgatagtgggtggtgcagtattcgttggaggtggtggtggtgcttttgcagctgcacctgcaggtggtgctgccgcagctgatgcttgcccacttgctgaaaaaaaggaagaaaaggtggaggaag

SEQ ID NO: 255922 - DNA, 356 bp, Glycine max
gacagcaaaaacaattaataaggatgagtttggggaataacatggtggtgctaaaggtgtgtttgttgcttcttttccttgtgggggttacagctgcacgcatggaactgagcttcttcaaaagtgatcagtcatcaagttatgatgatgatgagtattcaaaaccatgctgtgatctctgcatgtgcacacgctcaatgcctcctcaatgcagctgtgaagatattaggctgaattcatgccactcagattgtaagagctgtatgtacacacgctcacagccaggacagtgttgttgtcttgacaccaacgacttctgctacatacctttgaagttcagagatgactagaaaaac

SEQ ID NO: 255923 - DNA, 254 bp, Glycine max
gacttcaaaaacaattaataaagatgagtttggagaacaacatggtggtgctaaaggtgtgtttgttgcttcttttccttgtgggggttacagctgcacgcatggaactgagcttcttcaaaagtgatcagtcatcaagttatgatgatgatgagtattcaaaaccatgctgtgatctctgcatgtgcacacgctcaatgcctcctcaatgcagctgtgaagatattaggctgaattcatgccactcagattgt

SEQ ID NO: 255924 - DNA, 367 bp, Glycine max
tgtttgagtagacatattattatcaaaaagcggggggggtgtatattgaattcaatcctgacacattaacaatagtttcaattcaattgtggtgctgtcagctccctatctcagacgaccatgttatttttatatatatgggaatccaagatgtacaacactaaaccaagatgaccttataatttgacaacacaaaataagcattagattaatgaagcctttgagttattatatactgatggctcacgtactattgatgccaaagagctgaatgttgctattatggcacttgttttttaaattacataacaacaaataaattcaatgatagccatatttttaacaacgatggaagtggagcattttt

SEQ ID NO: 255925 - DNA, 357 bp, Glycine max
tgacagcaaaaacaattaataaagatgagtggggggaacaacatggtggtgctaaaggtgtgtttgttgcttcttttccttgtgggggttacagctgcacgcatggaactgagcttcttcaaaagtgatcagtcatcaagttatgatgatgatgagcattcaaaaccatgctgtgatctctgcatgtgcacacgctcaatgcctcctcaatgcagctgtgaagatattaggctgaattcatgccactcagattgtaagagctgtatgtgcacacgctcacagccaggacagtgtctttgtcttgacaccaacgacttctgctacaaaccttgcaagtccagaaatgactagaaaaac

SEQ ID NO: 255926 - DNA, 388 bp, Glycine max
gacagcaaaaacaattaataaagatgagtttgaggagcaacatggtggtgctaaaggtgtgtttgttgcttcttttccttgtgggggttacagctgcacgcatggaactgagcttcttcaaaagtgatcagtcgtcaagttatgatgatgatgagtattcaaaaccatgctgtgatctctgcatgtgcacacgctcaatgcctcctcaatgcagctgtgaagatattaggctgaattcatgccactcagattgtaagagctgtatgtgcacacgctcacagccaggacagtgtcgttgtcttgacaccaacgacttctgctacaaacctttgcagtccagagatgactagaaaaactaatagctctcttaaatggacgaagccccttt

SEQ ID NO: 255927 - DNA, 344 bp, Glycine max
agaaggggacaccaacaccaaaacaaacccactaagatggcggggggtgtatccttcctagtgctgcttcttgcagcccttatcctcatgcctcaagggcttgctacttactacaaaccaattaagaagccaccagtgtacaagcctccagtgtacaagccaccagtgtacaaaccaccggtttataagccaaaaccaccggtttacaagccgaaaccaccggcttacaagccaccatataagaagccaccatacaagaaaccaccttatggaaagtaccctccagtagaagacaacacccatgcctaaagcaagcaatgaggtctattatctacttaataaat

SEQ ID NO: 255928 - DNA, 300 bp, Glycine max
agggaccacattaattactcactcttcactcagaaggcttgtctttcattttgataattcccacactatggctgagcttcactaccaacaacaacaccaataccctcaccgataccctaatgatccatacgaacaacaaactagctactccactcaggtcgtcaaggcggccaccgccgtcaccgcgggcggctccctcttgatcctcgcctcgttgatccttgccggcaccatcatcgccctcaccatcgtcacaccaccgctcgtcatcttcagtccggttctcgtccccgcggtgat

SEQ ID NO: 255929 - DNA, 189 bp, Glycine max
aaaaaactcttccataccccccccggcattattatcaccatcatccctcccctctatctctttttttccttcaccacctcatacctaccttcatccattccctatttctcactccataataaaactaactcctctttcaaatatttccacctattatatctttttacacataacaacatctctttttat

SEQ ID NO: 255930 - DNA, 210 bp, Glycine max
gattcacacatctaactaagaaagtcttccatagcccgccggaaatgaagagcaccatcttctttgctctctttctcttttgagccttcaccacctcatacctaccttcagccatcgatgatttcgtgctcgataatgaaggtaaccctcttgaaaatggtggcacatattatatcttgtcagacataacagcatttggtggaataagag

SEQ ID NO: 255931 - DNA, 274 bp, Glycine max
cactgattctagatgactacggagagcaacatggtgcgagatgacggcgtaatggttccttttgtagattacgacagatacagctacacacatggtactgaacttattcaaaagtgatcagtcatcacgtcctgattataataactattctaaactcatgctttgatctatgtatgtgctcactcttaatgcctcctaaatgcaactgacaagacattattcttaaatcatgccactcatattgcaatatcctcacgaaattaaatattccttc

SEQ ID NO: 255932 - DNA, 361 bp, Glycine max
gattcacacaactaactaagaaagtcttccatagccccccaaaaatgaagagcaccatcttctttgctctctttctcttttgtgccttcaccacctcatacctaccttcagccatcgctgatttcgtgctcgataatgaaggtaaccctcttgaaaatggtggcacatattatatcttgtcagacataacagcatttggtggaataagagcagccccaacgggaaatgaaagatgccctctcactgtggtgcaatctcgcaatgagctcgacaaagggattggaacaatcatctcgtccccatatcgaatccgttttatcgccgaaggccatcctttgagccttaaattcgattcatttgc

SEQ ID NO: 255933 - DNA, 204 bp, Glycine max
acgcgtccgaagacgacgacaggatgcttctgctgcaagacgacgacagggggggacagcaactacctttgatagtgatgagtatgaagaacaacatggtggggctcaaggtgtgtgcgctgcttctattccgtgccgtggttacatcatacctccctgaactgatcgttttttaaagggatcattcttaatgttacgatgttg

SEQ ID NO: 255934 - DNA, 358 bp, Glycine max
gacaacacagaacaaaaacaaagaaaaaaaaaaacccttagccaacacaaccatcatggccacctctgctattcagcaatcagcattcactggtcaaactgctctgaagcagctcaatgagttcgtccgcaagaccggtggcgccggcaaaggtcgcactaacatgcgccgcaccgtcaagagtgctcctcagagcatttggtatggccctgaccgtcccaagtacttgggtccattctcggagcagattccatcatacctgaccggagaattccctggtgactacggatgggacactgctggattatcagctgacccggaaaccttcgccaggaaccgggagctggaggtgattcac

SEQ ID NO: 255935 - DNA, 344 bp, Glycine max
gattcacacaactaactaagaaagtcttccatagccccccaaaaatgaagagcaccatcttctttgctctctttctcttttgtgccttcaccacctcatacctaccttcagccatcgctgatttcgtgctcgataatgaaggtaaccctcttgaaaatggtggcacatattatatcttgtcagacataacagcatttggtggaataagatcagccccaactggaaatgaaagatgccctctcactgtggtgcaatctcgcaatgagctcgacaaatggattggaacaatcatcttgtccccatatcgaatccgttttatcgcctaatgccatcctttgagcctt

SEQ ID NO: 255936 - DNA, 383 bp, Glycine max
gattcacacaactaactaagaaagtcttccatagccccccaaaaatgaagagcaccaccttctttgctctctttctcttttgtgccttcaccacctcatacctaccttcagccatcgctgatttcgtgctcgataatgaaggtaaccctcttgaaaatggtggcacatattatatcttgtcagacataacagcatttggtggaataagagcagccccaacgggaaatgaaagatgccctctcactgtggtgcaatctcgcaatgagctcgacaaagggattggaacaatcgtctcgtccccatatcgaatcccgtttatcgccgaaggccatcctttgagccttaagttcgattcatttgcagttataatgctgtgtgttgga

SEQ ID NO: 255937 - DNA, 339 bp, Glycine max
gctgccgcaagcagagatgacaacccgatttaagaagaaccgcaagaagcgcggccacgtcagcgccggccacggccgtattggaaagcaccgcaagcaccccggcggccggggaaatgccggcggcatgcaccaccacaggatcctcttcgacaagtaccacccggggttcttcgggaaggtagggatgaggtactttcataagctccgcaacaaattctactcccccatcgtcaacatcgacaagctatggtctctgataccccaagacgcgaaggacaaagccctaaaatcgaaggacactgcccctctaatcgacgtcactcagcacgggtactt

SEQ ID NO: 255938 - DNA, 377 bp, Glycine max
gattcacacaactaactaagaaagtcttccatagccccccaaaaatgaagagcaccatcttctttgctctctttctcttttgtgccttcaccacctcatacctaccttcagccatcgctgatttcgtgcccgataatgaaggtaaccctcttgaaaatggtggcacatattatatcttgtcagacataacagcatttggtggaataagagcagccccaacgggaaatgaaagatgccctctcactgtggtgcaatctcgcaatgagctcgacaaagggattggaacaatcatctcgtccccatatcgaatccgttttatcgccgaaggccatcctttgagcctttagttcgattcatttgcagttataatgctgtgt

SEQ ID NO: 255939 - DNA, 314 bp, Glycine max
gaaggatcatcagggagaattaggtttttagggtttacaccgagcagccacacctgccgcagcagccatggttctcaaaactgaactatgccgattcagtggtgccaagatctacccaggaaagggcatcagatttgttcgtggtgattctcaggttttcctgtttgcaaactcaaaatgtaagaggtatatccacaatcgcctgaagccttcaaagctcacctggactgcaatgtacagaaagcaacacataaaggacattgcttaagaagctgtgaggaagaagaaacgtgctgtcaaaaagccttactcta

SEQ ID NO: 255940 - DNA, 390 bp, Glycine max
gattcacacaactaactaagaaagtcttccatagccccccaaaaatgaagagcaccatcttctttgctctctttctcttttgtgccttcaccacctcatacctaccttcagccatcgctgatttcgtgctcgataatgaaggtaaccctcttgaaaatggtggcacatattatatcttgtcagacataacagcatttggtggaataagagcagccccaacgggaaatgaaagatgccctctcactgtggtgcaatctcgcaatgagctcgacaaagggattggaacaatcatctcgtccccatatcgaatccgttttatcaccgaaggccatcctttgagccttaagttcgattcatttgcagttataatgctgtgtgttggaattccta

SEQ ID NO: 255941 - DNA, 260 bp, Glycine max
gattcacacaactaactaagaaagtcttggcataggcccccaaaaatgaagagcaccatcttctttgctctctttctcttttgtgccttcaccacctcatacctaccttcatccatcgctgatttcgtgctcgattatgaaggtaaccctcttgaaaatggtggcacatattatatcttgtcatacataacatctatttggtggaataagagcagccccatctgttaatgaaagatgcccttttactgtggtgcaattct

SEQ ID NO: 255942 - DNA, 364 bp, Glycine max
gaggtttttagggtttacaccgagcagccacacgtcccgcagcagccatggttctcaaaactgaactatgccgattcagtggtgccaagatctacccaggaaagggcatcagatttgttcgtggtgattctcaggttttcctgtttgcaaactcaaaatgtaagaggtatttccacaatcgcctgaagccttcaaagctcacctggactgcaatgtacagaaagcaacacaaaaaggacattgctcaagaagctgtgaggaagaggagacgtgctgccaaaaagccttactctaggtccattgttggtgcgaccttggaagtaatccagaaaaagagagctgagaagcccgaagttcgagatgc

SEQ ID NO: 255943 - DNA, 394 bp, Glycine max
gacaccaacaccaaaacaaacccactaagatggcttcctttgtatccttcctagtgctgcttcttgcagcccttatcctcatgcctcaagggcttgctacttactacaaaccaattaagaagccaccagtgtacaagcctccagtgtacaagccaccagtgtacaaaccaccggtttataagccaaaaccaccggtttacaagccgaaaccaccggtttacaagccaccatataagaagccaccatacaagaaaccaccttatggaaagtaccctccagtagaggacaacacccatgcctaaagcaagcaatgaggtctattatctacttaataaataagaggaacttgcttgtgttttctagcaatgtgatttacaactttctaacaatgcat

SEQ ID NO: 255944 - DNA, 142 bp, Glycine max
atgcgttcgtaccgacacaaggggactccagcatctaaacatacccactaagatggctgtctgggtaatcttcatagtgctgcttcttgcagcccttatcctcatgccttaagggcttgccacttacttctaaccaatttat

SEQ ID NO: 255945 - DNA, 383 bp, Glycine max
gataacaatccctattaaaatcttctaaaattaaattaccatatatagtcacattttctttacactttgtgaggtctaaaatgttgtccatttttcacaaggggtttgttcacccacctgaagagcttaaaagccctgcatctaacagtggctccaacaagcctaagattcctgaggaaactctaagagaatttctttctcatcatccccataacactttttctctgagttttggtcactctgctgttctagcttatactcgtcctgatccacctttctttgttcatcaaaggttgttttgtgggattgatgacatatactgtatctttttggggagcttgaacaatttgtgctcactcaacaagcagtatggttttggcaaa

SEQ ID NO: 255946 - DNA, 139 bp, Glycine max
gacagcaataacaattaataaagatgagtttgaagaacaacatggtggtgctaaaggtgtgtttgttgcttctttgtcttgtgggggttacagctccacgcatggaacttatctttttcagatgtgatcagtcattcat

SEQ ID NO: 255947 - DNA, 196 bp, Glycine max
gattcacacatctagctaagaaagtcttgcattgcccctcaaatatgaagagcaccatcttcattgctctctttctcttttgtgcctttaccaccttatacctacctttagccattgttgatttcgtgctcgataatgaaggtaaccctattgaatatggtggcacatattatatcttgtcagacataacatcatt

SEQ ID NO: 255948 - DNA, 413 bp, Glycine max
gacagcaaaaacaattaataaagatgagtttgaagaacaacatggtggtgctaaaggtgtgtttgttgcttcttttccttgtgggggttacagctgcacgcatggaactgagcttcttcaaaagtgatcagtcatcaagttatgatgatgatgagtattcaaaaccatgctgtgatctctgcatgtgcacacgctcaatgcctcctcaatgcagctgtgaagatattaggctgaattcatgccactcagattgtaagagctgtatgtgcacacgctcacagccaggacagtgtcgttgtcttgacaccaacgacttctgctacaaaccttgcaagtccagagatgactagaaaaactaatagctctctcaaatggacgaagcccctttaggctttgtttgttatgttaaggga

SEQ ID NO: 255949 - DNA, 303 bp, Glycine max
gacaattgagctagttgcaagtcaccaccatggcacttgttcaaccctttgcttctctttcaatctcttttcgcgatgctcgtgttttcactgcaccaaaatgctctcccaccactcactttcctcatcggaatttggttccaactcgagcatcattcatcgctggttccccactgttgattcgaagaaatcatggaaggaatggtgcatgcaaagcaatgcctgtttcaataagatgtgagcaaagtacccaggaagggaacagtttagatgtgtggctaggccggctagccatggttgggt

SEQ ID NO: 255950 - DNA, 308 bp, Glycine max
gacagcaaaaacaattaataaagatgagtttgaagaacaacatggtggtgctaaaggtgtgtttgttgcttcttttccttgtgggggttacagctgcacgcatggaactgagcttcttcaaaagtgatcagtcatcaagttatgatgatgatgagtattcaaaaccatgctgtgatctctgcatgtgcacacgctcaatgccttctcaatgcagctgtgaagatattaggctgaattcatgccactcagattgtaagagctgtatgtgcacacgctcacagccaggacagtgtcgttgtcttgacacc

SEQ ID NO: 255951 - DNA, 262 bp, Glycine max
ggttctagtgtgtgattgtttgttgttgtaactcgttcttcttcttttgttgttctgtgtttgtgtttgttttttctctcacctgaaaatgtcttgctgcggtggtaactgtggttgcggaaactcctgcaagtgcggcaacggctgctgaagctgcaagatgtacccagacttgagctacactgagtcaaccaccaccgagaccttggtcatgggagtggcacctgttaaggctcaatttgagggtgctgaaatgggtgtg

SEQ ID NO: 255952 - DNA, 329 bp, Glycine max
gacagcaaaaacaattaataaagatgagtttggggaacaacatggtggtgctaaaggtgtgtttgttgcttcttttccttgtgggggttacagctgcacgcatggaactgagcttcttcaaaagtgatcagtcatcaagttatgatgatgatgagtattcaaaaccatgctgtgatctctgcatgtgcacacgctcaatgcctcctcaatgcagctgtgaagatattaggctgaattcatgccactcagattgtaagagctgtatgtgcacacgctcacagccaggacagtgtcgtcgtcttgacaccaacgacttctgctacaaacct

SEQ ID NO: 255953 - DNA, 245 bp, Glycine max
gattcacacatctaactaagaaagtcttccatagccccgcaaaaatgaagagcaccatcgtctttgctctctttctcttttgtgccttcaccacctcatacctaccttcagccatcgctgatttcgtgctcgataatgaaggttaccctcttgaaaatggtggcacatattatatcttgtcagacataacatcatatggtggaataagagcagccccaacgggaaatgaatgatgccctcttact

SEQ ID NO: 255954 - DNA, 346 bp, Glycine max
ggcgcctctggttgcgggagtgaaaaccttgtgttacccttctctcaagtttcaagagatttcatcatggctccaaagaaggacaaggctccaccaccttcctccaagcccgccaaatctggctgtggcaagcagaagaagaagaagtggagcaagggaaagcaaaaggagaaggtgaacaatatggtgccgtttgatcatggcacctatgacaagctcctttctgaagctcccaaatacaagctcattactccttccattctctctgatcgtttgaggattaatggatcacttgcaaggaatgctttttgagaattgatgcaagaagttctattaggattgtgtc

SEQ ID NO: 255955 - DNA, 404 bp, Glycine max
  unsure (1)..(404): unsure at all n locations
gatagcagcatcatacaaagcattgaattcaaaaactaagttcatttcttgtgctttgttttattcctcaaaaccaaacatgtcgaacacatgcggcaactgtgactgcgctgacaagactaactgcaccaagggaaacagctatggtgttatagtagagactgagaagagctacatcgagactgttgacatggatgttccagcagctgagcatgatgggaagtgcaagtgtggcactaactgcacttgcacggactgcacttgtggccattaaagaatatgtatgaaaatgtaattgccatgtgttttgcaatacaaatctccaaataatgtaatcctcgtatgaataaatgtgtgcttgtatcctacttcanggtctgtgtagtcatgcaatctgaatcatg

SEQ ID NO: 255956 - DNA, 409 bp, Glycine max
gattcacacaactaactaagaaagtcttccatagccccccaaaaatgaagagcaccatcttctttgctctctttctcttttgtgccttcaccacctcatacctaccttcagccatcgctgatttcgtgctcgataatgaaggtaaccctcttgaaaatggtggcacatattatatcttgtcagacataacagcatttggtggaataagagcagccccaacgggaaatgaaagatgctctctcactgtggtgcaatctcgcaatgagctcgacaaagggattggaacaatcatctcgtccccatatcgaatccgttttatcgccgaaggccatcctttgagccttaagttcgattcatttgcagttataatgctgtgtgttggaatttctaccgagtggtctgttgtgga

SEQ ID NO: 255957 - DNA, 358 bp, Glycine max
gacacttactagtagtaagcatggagtcctcaaagatctatgcttacctcttcctctgcatgatctttctctcttccgccactcccattctcggttgtggttactgtggcaaaccccccaaaaagcacaagcctggtaaaacaccaaagacacccaaaacacccgttgttaagccaccagtcaccatccctcccattaatgttcctcccgttgatcttccaccaatcgtgaagcccccaagtattctccctccaattccaattattaacccaccaaccacaccattgaagggagggaacacttcatgcccaccaccaaagtcttctgctcatgctacttgccccattgtcactctaaa

SEQ ID NO: 255958 - DNA, 262 bp, Glycine max
gcttgacaggttaaacaattaataaagatgagtttgaagaacaacatggtggtgctaaaggtgtgtttgttgcttctttttcttgtgggggttacagctgcacgcatggaactgagcttcttcaaaagtgatcagtcatcaagttatgatgatgatgagtattcaaaaccatgctgtgatctctgcatgtgcacactctcaatgccttcttaatgcatctgtgaagaatttatgctggattcatttccactcagattgtaag

SEQ ID NO: 255959 - DNA, 293 bp, Glycine max
gattcacacagctaactaagaaagtcttccatagccccccaaaaatgaagagcaccatcttctttgctctctttctctttcgtgccttcaccacctcatacctaccttcagccatcgctgatttcgtgctcgataatgaaggtcaccctcttgaaaatggtggcacatattatatcttgttagacataacagcatttggtggaataagagcattctcaacgggaaatgaatgatgccctctcactgtggtgcaatctctcaattgagctcgactaagggactggaacaatcat

SEQ ID NO: 255960 - DNA, 406 bp, Glycine max
ggaagcatttgagactaactcttagagagaaaaaaaatggctgatacaggtggaggagatgcagtgagaccagtggtaatatgtgataacaagtgtggctgcacacttccatgcactggtggttccacttgcaggtgcacaagtgctggcactgccacaggagggggtgatcacgtgacatgctcgtgcggagagcactgtggttgcaatccatgctcatgtcccaagattgcggctgctggaagtggttgcagatgtggcacagattgtgcatgtgccttctgccgcacttagtatcacaccttaaagcttaaacttcacgttttattttatgtcttcaaatttttgaatacgttttctatatattagtcttgtttaaagttaaagtgtggacgtgggttctact

SEQ ID NO: 255961 - DNA, 376 bp, Glycine max; identical to SEQ ID NO: 254782

SEQ ID NO: 255962 - DNA, 292 bp, Glycine max
  unsure (1)..(292): unsure at all n locations
gacagcaaaaacaattaataaagatgagtttgaagaacaacatggtggtgctaaaggtgtgtttgttgcttcttttccttgtgggggttacagctgcacgcatggaactgagcttcttcaaaagtgatcagtcatcaagttatgatgatgatgagtattcaaaaccatgctgtgatctctgcatgtgcacacgctcaatgcctnctcaatgcagctgtgaagatattaagctgaattcatgccactcagattgtaagagctgtatgtgcacacgctcacagacaggacagtg

SEQ ID NO: 255963 - DNA, 290 bp, Glycine max
gacagcaaaagcaattaataaagatgagtttgaagaacaacatggtggtgctaaaggtgtgtttgttgcttcttttccttgtgggggttacagctgcacgcatggaactgagcttcttcaaaagtgatcagtcatcaagttatgatgatgatgagtattcaaaaccatgctgtgatctctgcatgtgcacacgctcaatgcctactcaatgcagctgtgaagatattaggctgaattcatgccactcagatcgtaagagctgtatgtgcacacgcttacagccaggacag

SEQ ID NO: 255964 - DNA, 374 bp, Glycine max
ttgggacagcaaaaacaattaataaagatgagtttgaagaacaacatggtggtgctaaaggtgtgtttgttgcttcttttccttgtgggggttacagctgcacgcatggaactgagcttcttcaaaagtgatcagtcatcaagttatgatgatgatgagtattcaaaaccatgctgtgatctctgcatgtgcacacgctcaatgcctactcaatgcagctgtgaagatattaggctgaattcatgccactcagattgtaagagctgtatgtgcacacgctcacagtcaggacagtgtctttgtcttgacaccaacgacttctgctacaaaccttgcaagttcagagattgactagaaaaacttattactctctc

SEQ ID NO: 255965 - DNA, 395 bp, Glycine max
gattcacacaactaactgagagagtcttccatagccccccaaaaatgaagagcaccatcttctttgctctctttctcttttgtgccttcaccacctcatacctaccttcagccatcgctgatttcgtgctcgataatgaaggtaaccctcttgaaaatggtggcacatattatatcttgtcagacataacagcatttggtggaataagagcagccccaacgggaaatgaaagatgccctctcactgtggtgcaatctcgcaatgagctcgacaaagggattggaacaatcatctcgtccccatatcgaatccgttttatcgccgaaggccatcctttgagccttaagttcgattcatttgcaattataatgctgtgtgttggaattcctaccgag

SEQ ID NO: 255966 - DNA, 406 bp, Glycine max
gattcacacaactaactaagaaagtcttccatagccccccaaaaatgaagagcaccatcttctttgctctctttctcttttgtgccttcaccacctcatacctaccttcagccatcgctgatttcgtgctcgataatgaaggtaaccctcttgaaaatggtggcacatattatatcttgtcagacataacagcatttggtggaataagagcagccccaacgggaaatgaaagatgccctctcactgtggtgcaatctcgcaatgagctcgacaaagggattggaacaatcatctcgtccccatatcgaatccgttttatcgccgaaggccatcctttgagccttaagttcgaatcatttgcagttataatgctgtgtgttggaattcctaccgagtggtctgttgt

SEQ ID NO: 255967 - DNA, 518 bp, Glycine max
  unsure (1)..(518): unsure at all n locations
gatagtaagagtttgtaatattattgtattgtagtagtagccagtggggactttcaatcactatgtgattgttaagttcaaggatggcgtggctgttgatgaacttattcaagggttggagaagatggtctcggggattgaccatgtcaagtccttcgaatggggaaaggacattgaaagtcatgatatgctaagacaaggtttcactcatgttttcttgatggcattcaatgggaaggaggagttcaacgcatttcagactcacccaaatcaccttgagtttactggagtattttcacctgctattgagaagattgtggtgctggacttcccatctaaccttgtgaaagcaccagcaagatcctcaacttattcaagcaaataaaattttccattnttaaagtgcatgcatgtgtgtgcatctgctatttgtagtctggtatggttgttcctagctagtttctaaaagctcttatgcaatttcaacttgataaataagctcttttttttcctaaata

SEQ ID NO: 255968 - DNA, 375 bp, Glycine max
ggaggatcgttcacataaaacatcgacagagatcgacgaggaagggctaagcctaacaatgtggagctccaaaacgacattgatgtttggcgtcgcagccattgctctgatgatgtttctctcatctgcttcagcggacgacgtcgttgcactcacagaggaaaccttcgaaaacgaggttggcaaggatcgtgccgctctcgtcgagttttacgctccctggtgtggacactgtaaaaggcttgcaccggagtacgaacagctcggaacgacttttaagaaaacgaagtccgttttgattgccaaggtggattgtgatgaacagaaaagtgtttgtagtaaatatggggtatctggttactctaccattcaatg

SEQ ID NO: 255969 - DNA, 424 bp, Glycine max
ggcggcgcacagcagaactctgcttcttcggattccgatcgcacgcgccgtcaccatggtgaacgttccgaaaacaaagaagacatactgcaagagtaaggagtgcaggaagcacacgctgcacaaggttacccaatacaagaagggtaaggatagcattgctgcccaaggaaaacgccgttatgatcgcaaacaatccggttattgcggacaaactaagcccgtctttcacaagaaggcttaaaccaccaagaagattgttctgaggttgcaatgccagggttgcaagcatgtcttccaacacgctattaagaagtgcaagcactttgagattggtggtgacaagaaaggcaagggaacatcactcttctagtttgagaattaggatttagagctttatgtttcagcaatgttggaatgtttt

SEQ ID NO: 255970 - DNA, 305 bp, Glycine max
gacagcaaaaacaattaataaagatgagtttgaagagacaacatggtggtgctaaaggtgtgtttgttgcttcttttccttgtgggggttacagctgcacgcatggaactgagcttcttcaaaagtgatcagtcatcaagttatgatgatgatgagtattcaaaaccatgttgtgatctctgcatgtgcacacgctcaatgcctactcaatgcaactgtgaagatattaggctgaattcatgccactcagattgtaagagctgtatgtgcacacgctcacagccaggacagttgtcttgtcttga

SEQ ID NO: 255971 - DNA, 375 bp, Glycine max
cccacgcgtccgcgactgaaggggacaacttaaacattctctccattggtccttggacacggatcagtcatcaccatggccaagctagttttttccctttgttttctgcttttcagtggctgctgcttcgctttcagttccagagagcagcctcagcaaaacgagtgccagatccaaaaactcaatgccctcaaaccggataaccgtatagagtcataaggagggctcattgagacatggaaccctaacaacaagccatttcagtgtgccggtgttgccctctctcgctgctccctcaaccgtatacgcccttcgttgaccttcctacaccaactgtccccaggaaatttacattcaacatggtaagggtatttt

SEQ ID NO: 255972 - DNA, 356 bp, Glycine max
gacacaactaactaagaaagtcttccatagcccggcaaaaatgaagagcaccatcttctttgctctctttctcttttgtgccttcaccacctcatacctaccttcagccatcgctgatttcgtgctcgataatgaaggtaaccctcttgaaaatggtggcacatattatatcttgtcagacataacaacatttggtggaataagagcagccccaacgggaaatgaaagatgccctcttactgtggtgcaatctcgcaatgagctcgacaaagggattggaacaatcatcttgtccccatattcaatatcgtttatcgcccaatgccattctttgagccttaaattcgattcatttt

SEQ ID NO: 255973 - DNA, 383 bp, Glycine max
gatgcaactgaataattaggaaaagccatttccagtagcagcctaagaaaatgaagagcactagcttgttcgctatctttctactttgcgccttcacctcatacctaccttccgccaccgcccaggacgtgctcgacgtggatggcgatccgattcggaacggtttcatatactacgttttgccggcaataagaggaaacggtggcggaatagaacgagccgcactcgggaaagacacttgccctatcactgtagtgcaatctcccaatccaaactctaaggggttagaaattaagtttgaatctgcataccccgcctattacataaacgaaaccctaattttgcaaataaagttcagttacccacagcagtgtgaaagaaag

SEQ ID NO: 255974 - DNA, 128 bp, Glycine max
gacagcaaaaacaattaataaagatgagtttgaagaacaacatggtggtgctaaaggtgtgtttgttgcttctttttcttgtgggggttacagctgctcgcatggaactgagcttcttcaaaagtgat

SEQ ID NO: 255975 - DNA, 417 bp, Glycine max
gacagcaaaaacaattaataaagaagagtttgaagaacaacatggtggtgctaaaggtgtgtttgttgcttcttttccttgtgggggttaccgctgcacgcatggaactgagcttcttcaaaagtgatcagtcatcaagttatgatgatgatgagtattcaaaaccatgctgtgatctctgcatgtgcacacgctcaatgcctcctcaatgcagctgtgaagatattaggctgaattcatgccactcagattgtaagagctgtatgtgcacacgctcacagccaggacagtgtcgttgtcttgacaccaacgacttctgctacaaaccttgcaagtccagagatgactagaaaaactaatagctctctcaaatggacgaagcccctttaggctttgtttgttatgttaggggagaca

SEQ ID NO: 255976 - DNA, 369 bp, Glycine max
  unsure (1)..(369): unsure at all n locations
cggtgtgtgtgaagaagcagagggagcagcggcgtggagcatgcagatcttcgtgagaactctgacagggaagactataaccctggacgcctagagcagcgacaccatcgacaatgtcaaggccaagattcaagacaaggaaggcattcctacggatcaccagcatntgagtattcgcacgaaagcaactggaagatggaaggaccctggccgattacaacatgcataaagaatcaacccttcatctgagcctcatgctctcaggcggcatcattgaaccttgcctcatggctgtggctcgcaaatacaaccaggacacgatgatgtgccgcaagtgctatgcccgcctgcatcctatggctgtgaact

SEQ ID NO: 255977 - DNA, 355 bp, Glycine max
  unsure (1)..(355): unsure at all n locations
gacagcataaacaattaataaagatgagnttgaagaacaacatggtggtgctaaaggtgtgttcgttgcttcttttccttgtgggggtacagctgcacgcatggactgacttttaaaagtgacagcataatatatatatagttcaaaatctggacttgattcacacctaagctctaagcctgaaatttagctgatcatgcatcaatgagactgattcaacctaaccgacaggtcgtgctgacacacatttgtcaactgagtcaaatgctgaactatgctttaatgcaacccttagctgtgtatgaggaacataacagataaactatgcatattgttacaattgcatttatatcta

SEQ ID NO: 255978 - DNA, 462 bp, Glycine max
gattcacacaactaactatgaaagtcttccatagccccccaaaggtgaagagcaccatcttctgtgctctctttctcttttatgccttcaccacctcatacctaccttcagccatcgctgatttcgtgctcgataatgaaggtaaccctcttgaaaatggtggcacatattatatcttgtcagacataacagcatttggtggaataagagcagccccaacgggtaatgaaagatgccctctcactgtggtgcaatctcgcaatgagctcgacaaagggattggaacaatcatctcgtccccatatcgaatccgctttatcgccgaaggccatcctttgagccttaagttcgattcatttgcagttataatgctgtgtgttggaattcctaccgagtggtctgctgtggaggatctaccagaaggacctgcttgtaaaatggtgagaacaaagatgcaatgga

SEQ ID NO: 255979 - DNA, 353 bp, Glycine max
gattcattcaactaaaagcaagaacaattacttgagtggtttctcttgtcacataaaagtcatctaagaagaattacaagatcatcatcacaataacaagatgagttcaggaattagagcatggagtgtggcagcaagtgttggaattgtggaggccttgaaagaccaaggcatatgcaggtggaatcatgccttaagatcagctcaacaccatctcaaaaaccatgttggctcattctctcaggctaacaagctttcctcttctgctatgatatccacaacactaaaacatgagaaggcaaatcaatcataagagtctttgagaactgtcatgtacttaagcctgctgggtt

SEQ ID NO: 255980 - DNA, 300 bp, Glycine max
ggttgctgcagcagagaagcactcatcattcttggtttgtctaagatccgccttcgctgaattgtaaaaatgtcgctcggagaaactgcttgttcatacgcagctctcatccttcatgaagatggaatcagtgtaactgccgacaagatcagcaccttgttggaaactgcaaaggttcaagtagatacctattggccaaccttatttgctaaacttgctgagaagaaaaatcttggcgatttgatagccaatgcagcatgcggtggtgcaccaagtgctgttgcagctgcccctgttgct

SEQ ID NO: 255981 - DNA, 330 bp, Glycine max
gacaactcaaacattctctccattggtccgtagagactcatcagtcatcaccatggccaagctagttttttccctttgttttctgcttttcagtggctgctgcttcgctttcagttccagagagcagcctcagcaaaacgagtgccagatccaaaaactcaatgccctcaaaccggataaccgtatagagtcagaaggagggctcattgagacatggaaccctaacaacatgccattccagtgtgccggtgttgccctctctcgctgcaccctcaaccgcaacgcccttcgtagacctttctacaccaacggtccccaggaaatctacat

SEQ ID NO: 255982 - DNA, 424 bp, Glycine max
gatcaagaaccagttcaatatcctagtacaccgtattaaagaatggaagatatactatgatgagagcgcggttcccattactgttgctgggagttgttttcctggcatcagtttctgtctcatttggcattgcgtattgggaaaagcagaaccccagtcacaacaagtgcctccgaagttgcaatagcgagaaagactcctacaggaaccaagcatgccacgctcgttgcaacctccttaaggtggaggaagaagaagaatgcgaagaaggtcaaattccacgaccacgaccacaacacccggagagggaacgtcagcaacacggtgagaaggaggaagacgaatgtgagcagccacgttcattcccattcccacgcccacgccaacctcatcaagaggaagagcacgagcagaatgaggaaca

SEQ ID NO: 255983 - DNA, 415 bp, Glycine max
  unsure (1)..(415): unsure at all n locations
gacagcaaatacaattaataaagatgagtttgaagaacaacatggtggtgctaaaggtgtgtttgttgcttcttttccttgtgggggttacagctgcacgcatggaactgagcttcttcaaaagtgatcagtcatcaagttatgatgatgatgagtattcaaaaccatgctgtgatctctgcatgtgcacacgctcaatgcctgctcaatgcagctgtgaagatattaggctgaattcatgccactcagattgtaagagctgtatgtgcacacgctcacagccaggacagtgtcgttgtcttgacaccaacgacttctgctacaaaccttgcaagtccagagatgactagaaaaactaatagctctctcaaatggacgaagccnctttaggctttggttgttatgttaggggaga

SEQ ID NO: 255984 - DNA, 396 bp, Glycine max
ggttctagtgtgtgattgtttgttgttgtaactcgttcttcttgttttgttgttctgtgtttgtgtgggttttttctctcacctgaaaatgtcttgctgcggtggtaactgtggttgcggaagctcctgcaagtgcggcaacggctgcggaggctgcaagatgtacccagacttgagctacactgagtcaaccaccaccgagaccttggtcatgggagtggcacctgttaaggctcaatttgagggtgctgaaatgggtgtgcccgctgagaacgatggctgcaaatgtggaccaaactgctcctgcaacccctgcacttgcaagtgaggtgttgggagagcaagcttcaagcagagatagcccttattaggaataatgataaactattaatgtgt

SEQ ID NO: 255985 - DNA, 416 bp, Glycine max
gacagcaaaaacaattaataaagatgagtttgaagaacaacatggtggtgctaaaggtgtgtttgttgcttcttttccttgtgggggttacagctgcacgcatggaactgagcttcttcaaaagtgatcagtcatcaagttatgatgatgatgagtattcaaaaccatgctgtgatctctgcatgtgcacacgctcaatgccttctcaatgcagctgtgaagatattaggctgaattcatgccactcagattgtaagagctgtatgtgcacacgctcacagccaggacagtgtcgttgtcttgacaccaacgacttctgctacaaaccttgcaagtccagagatgactagaaaaactaatagctctctcaaatggacgaagcccctttagggctttgttgtatgttaggggagaca

SEQ ID NO: 255986 - DNA, 459 bp, Glycine max
  unsure (1)..(459): unsure at all n locations
ggcagccaatgaaaagaaaatcctcaattttctgagcagccaagcgactctctctctgtctctcgaaaattctcagtttgcagagaaaatctgaatcatgtcgtggcaagcgtatgtcgacgatcaccttctgtgtgacatcgaaggtaaccacctcactcacgctgctatcatcggccaagacggcagcgtttgggctcagagtaccgacttccctcagttcaaacctgaggagataactgccatcatgaatgactntaatgagcctggatcacttgctccaactggattgtatctcggtggcaccaaatatatggtcatccagggtgaacccggtgctgtcattcgagggaagaagggtcctggtggtgttactgtgaagaggactcgtgcggccttgatcattggcatttatgatgaaccaatgactncaggtcaatgcaacatggtagttgaaag

SEQ ID NO: 255987 - DNA, 318 bp, Glycine max
gagtgaaggtgctgaatcgaatcgaatctccgaagatggccgcgagcgatcgcacagtgttgcaattctcttcatcatcttcttcttcgcagagcttgtccgcgaaggtccaccctctggtcatcttcaacatctgcgattgctacgttcgacgccctgaccaagccgatcgcgtcatcggaaccctactcggctccgtccttcccgatggaaccgtcgatatccgcaattcctatgctgttccttacaacgaatctatcgaacaggttgcgttggatatagagtaccaccacaatatgttaatatcccaccaaaaag

SEQ ID NO: 255988 - DNA, 344 bp, Glycine max
gacagcaaaaacaattaataaagatgagtttgaagaacaacatggtggtgctaaaggtgtgtttgttgcttcttttccttgtgggggttacagctgcacgcatggaactgagcttcttcaaaagtgatcagtcatcaagttatgatgatgatgagtattcaaaaccatgctgtgatctctgcatgtgcacacgctcaatgcctcctcaatgcagctgtgaagatattatgctgaattcatgccactcagattgtaagagctgtatgtgcacacgctcacagtcaggacagtgtcgttgtcttgacaccaacgacttctgctacaaccttgcaagttcagaaatg

SEQ ID NO: 255989 - DNA, 381 bp, Glycine max
ggaggaagtgatgcctcaggaacaatgggtggggcatgtggatatggaaacctctacagccaaggttatggaacaaatactgctgctttgagcactgctttgttcaacaatggtcttagttgtggctcatgctatgagataaggtgtgtgaatgaccataggtggtgcctccctggctccattatggtcactgccaccaatttctgtcctccaaacaatgctttaccaaacaatgcaagagggtggtgcaacccttcaatgcaccattttgacctctctcaacctgttttccttcgcattgcacaatacagagcaggaattgtgcctgttttctacagaagggtaccctgcaagagaaggggaggcataaggttcacaatc

SEQ ID NO: 255990 - DNA, 178 bp, Glycine max
ttgttggacacaactaacttataaagtgttacgggtccctcttataatgatgagcgccatcttttttgctctttatcttaaatgtaccttcactcatcatattcctacctttcatcctattcttatttcttgctctataattaatgtaacctttatgaaaattccttcacttattatt

SEQ ID NO: 255991 - DNA, 268 bp, Glycine max
gatttctaaaacaattaataaagatgagtttgaggaacaacatggtggtgctaaaggtgtgtttgttgcttcttttccttgtgggggttacagctgcacgcatggaactgtgcttcttcaaaagtgatcagttcatcaagttatgatgatgatgagtattcataaccatgctgtgatctctgcatgtgcacacgctcaatgccttctcaatgcatttttgaatatattatgccgaattcattccactcatattgtttgatcttgtatg

SEQ ID NO: 255992 - DNA, 406 bp, Glycine max
gatttacacaactaactaagaaagtcttccatagctccccaaaaatgaagagcaccatcttctttgctctctttctcttttgtgccttcaccacctcatacctaccttcagccatcgctgatttcgtgctcgataatgaaggtaaccctcttgaaaatggtggcacatattatatcttgtcagacataacagcatttggtggaataagagcagccccaacgggaaatgaaagatgccctctcactgtggtgcaatctcgcaatgagctcgacaaagggattggaacaatcatctcgtccccatatcgaatccgttttatcgccgaaggccatcctttgagccttaagttcgattcatttgcagttataatgctttgtgttggaattcctaccgagtggtctgttgt

SEQ ID NO: 255993 - DNA, 411 bp, Glycine max
gacagcaaaaacaattgataaagatgagtttgaagaacaacatggtggtgctaaaggtgtgtttgttgcttcttttccttgtgggggttacagctgcacgcatggaactgagcttcttcaaaagtgatcagtcatcaagttatgatgatgatgagtattcaaaaccatgctgtgatctctgcatgtgcacacgctcaatgcctcctcaatgcagctgtgaagatattaggctgaattcatgccactcagattgtaagagctgtatgtgcacacgctcacagccaggacagtgtcgttgtcttgacaccaacgacttctgctacaaaccttgcaagtgcagagatgcctagaaaaactaatagctctctcaaatggacgaagcccctttaggctttgtttgttatgttaggg

SEQ ID NO: 255994 - DNA, 390 bp, Glycine max
tactataaatgttacaggcttacttctccaaatcctaggatgtacattggctctggcaaggtttctgaaattaagagtgcaattcatgcattgggcgttgaaactgttatctttgatgatgagctgtcagctgggtagggccctttttcctttgttttaacatttatgtcatccatatgtgtgcttcatgcttcatgttaagactaatttttgtctgtgccaccatttattagtgaattaagggttagatgggtgggtattgagagtatgatgtatttatgttggagaatatcaatttgcaagctgttggaatggaaaggtattaagcagtcaattggtccgtttggggttgtgagtttacctgcagcatttggattttgggattgatta

SEQ ID NO: 255995 - DNA, 149 bp, Glycine max
caacagcaaaaacaatgaatagggatcaatttgaaggaccacatggtggtgctaaaggtgtgattgttgctccttttccatgttgtacttacagatatacacatggtactgagcgttctaaaaagtgatcagtcatcaagttattatta

SEQ ID NO: 255996 - DNA, 256 bp, Glycine max
gatccccaatcagagagaaaagttagggttcacaacttttccttttccttttgcttgcgaatctgaatcaaataatcaatcatccattcattattcatcatgtcgtctgcgaagaaaatcacgctgaagagttcggacggcgaggctttcgaggtggaggatgcggtggcgctggagtcgcatacgataaagcacatgatcgaagactactgctccgacagcggcatccctctgccgaacgttactagcaagatcc

SEQ ID NO: 255997 - DNA, 233 bp, Glycine max
ccgcttgtacgaacacgccagagggggcctccaaaaccacttattaaggttacgtttgaggaccaccttgggggtcctaaaggttatttggtggctcattttcctggtggggtttcaagtttaccccttgaacctaacttttttaaaaattgttcattcataaattatgactgattataagtattcaaacccatgctgtgatctttgattttccaaatcttaaatgcttctta

SEQ ID NO: 255998 - DNA, 378 bp, Glycine max
gacagcaaaaacaattaataaagatgagtttgaagaacaacatggtggtgctaaaggtgtgtttgttgcttcttttccttgtgggggttacagctgcacgcatggaactgagcttcttcaaaagtgatcagtcatcaagttatgatgatgatgagtattcaaaaccatgctgtgatctctgcatgtgcacacgctcaatgcctcctcaatgcagctgtgaagatattaggctgaattcatgccactcagattgtaagagctgtatgtgcacacgctcacagccaggacagtgtcgttgtcttgacaccaacgacttctgctacaaaccttgcaagtccagagatgactagaaaaactaatagctctctcaaatggacg

SEQ ID NO: 255999 - DNA, 362 bp, Glycine max
taatacgacagaatttgtcagcatatacaatttatataggggagtgtgaagaacaacatggtggtgctaaatgtgtttttgttgctttttttccttttttgagttacatctttcactcatgtaactgatcttctttaaaatttatcattctttaatttattattattatttttatttaaaactatgttgatattttttctatttcttatccttaatgtctccttaattcttttgtttatttttaaagcttatttaatcctcttcttatttttatatcctttatttttcatatttttatatttattactttaattttatttttatatctaataaatttttttttccatatttttttattatct

SEQ ID NO: 256000 - DNA, 227 bp, Glycine max
tctaatacgatttattgttacagcaaaaacaattaataaaggtgagtgtttatatcaacatgggggtgctaaatgtgtgttagttgcttcttttcctttctgttgttacatcttcacgcatggaactgatctttttcaaaagttatcagtcatcaatttatgatgattattagtattccaaaccattctttgatctcttcatttgcacactctcaatgccttcttaa

SEQ ID NO: 256001 - DNA, 324 bp, Glycine max
cgggattcacacaactgactaagaaagtcttccatagccccccaaaaatgaagagcaccatcttctttgctctctctctcttttgagccttcaccacctcatacctaccttcagccatcgctgatttcgtgctcgataatgaaggtaaccctcttgaaaatggtggcacatattatatcttgtcagacataacagcatttggtggaataagagcagccccaacgggaaatgaaagatgccctctcactgtggtgcaatctcgcaatgagctcgacatatggattggaacaatcatctcgagcccatatcgaatacgttttatcg

SEQ ID NO: 256002 - DNA, 380 bp, Glycine max
  unsure (1)..(380): unsure at all n locations
gacagcataatcaattaataaagattgagttgagaacaacatgggtggtgctaaaggtgtggtntgtggcttcctttnccttgtgggggttacagctgcacgcattggaactgagcttcttcaaaagtgatcagtcatcaagttatgatgatgatgagtattcataaccatgctgtgatctctgcatgtgcacacgctcaatggcctnctcaatgcatctgtgaagatattaggctgaattcatgccactcagattgtaagagctgtatgtgcacacgctcacagccaggacaagtgtcgtgtcttgacaccaacgacttctgctacaaaccttgcaagtccagagatgactagaaaaactaataactctctcaaatgga

SEQ ID NO: 256003 - DNA, 421 bp, Glycine max
  unsure (1)..(421): unsure at all n locations
gacagcaaaaacaattaataaagatgagtttgaagaacaacatggtggtgctaaaggtgtgtttgttgcttcttttccttgtgggggttacagctgcacgcatggaactgagcttcttcaaaagtgatcagtcatcaagttatgatgatgatgagtattcaaaaccatgctgtgatctctgcatgtgcacacgctcaatgcctnctcaatgcagctgtgaagatattaggctgaattcatgccactcagattgtaagagctgtatgtgcacacgctcacaaccaggacagtgtcgttgtcttgacaccaacgacttctgctacaaacctttgcaagtncagagatgactaganaaactaatagctctctcaaatggacgaagcccctttaagcttttgttgtatgttaggggagacaaata

SEQ ID NO: 256004 - DNA, 368 bp, Glycine max
gatcaagaaccagttcaatatccgagtacaccgtattaaagaatttaagatatactatgatgagagcgcggttcccattactgttgctgggagttgttttcctggcatcagtttctgtctcatttggcattgcgtattgggaaaagcagaaccccagtcacaacaagtgcctccgaagttgcaatagcgagaaagactcctacaggaaccaagcatgccacgctcgttgcaacctccttaaggtggaggaagaagaagaatgcgaagaaggtcaaattccacgaccacgaccacaacacccggagagggaacgtcagcaacacggtgagaaagaggaagacgaatgtgagcagccacgttcattccca

SEQ ID NO: 256005 - DNA, 297 bp, Glycine max
gagcgccaatgtttttttcagaggagtttgatcgggtaatcaaaagagtttatcttatagtaagaaatcgatgtcttactccattttaaggaacaaaacaagagaacaatagcctgacaaagggtttagccataaaatcgaatccatcattgatttgagatattgataaggtgaatactcatttctcgtcaatgctaggcataatgcgggtatagggacctaaaaaagattatcttttcttcctatcttatgaactttaatgtgtatgaagtgtcagttactatcttagatttgaat

SEQ ID NO: 256006 - DNA, 434 bp, Glycine max
  unsure (1)..(434): unsure at all n locations
gaactaagtagagaataaaatcaaatcaggagagcatgcatatgaacatgatgatgaagaaagtgtgtgggtttgcaatagtgatggtggcagtgcagcttctggtggaggtgagtcccaaggcagangctgtgacttgtacccctgtggagctgagtccttgtttggnggcaataacttcctctcaaccaccatcaacaatttgttgccagaaggtgagggaacaaaggcaatgcctctgtggttacctcaaaaacccaagtctaaggccatatgccaattctcctggctccagaagggttgctagctcttatggggttccctttccaacttngtaattaccttcatatcatatcatatatagtatgtaataaacccttgtggctggaaaatatatatatatatatataagaatgatatcagtcagtattgca

SEQ ID NO: 256007 - DNA, 407 bp, Glycine max
  unsure (1)..(407): unsure at all n locations
gacagcaaaaacaattaataaagatgagtttgaagaacatcatggtggtgctaaaggtgtgtttgttgcttcttttccttgtgggggttacagctgcacgcatggaactgagcttcttcaaaagtgatcagtcatcaagttatgatgatgatgagtattcaaaaccatgctgtgatctctgcatgtgcacacgctcaatgcctgctcaatgcagctgtgaagatattaggctgaattcatgccactcagattgtaagagctgtatgtgcacacgctcacagccaggacagtgtcgttgtcttgacaccaacgacttctgctacaaaccttgcangtccagagatgactagaaatactaatagctctctcaaatggacgaagcccccttagggcttttgttggtatgt

SEQ ID NO: 256008 - DNA, 354 bp, Glycine max
  unsure (1)..(354): unsure at all n locations
ggccgcaagcagagatgacaacccgatttaaggagaaccgcaagaagcgcggccacgtcagcgccggccacggccgtattggaaancaccgcaagcaccccggcggccggggaaatgccggcggcatgcaccaccacaggatcctcttcgacaagtaccacccggggttcttcgggaaggtanggatgaggtactttcataagctccgcaacaaattctactcccccagcgtcaacatccacaagctatggtctctgatatcccaagacgcgaacgacaaaaccctaaaatcgaaagacactgcccctctaatcgaggtcactcaacacgggtacttcaaggttctcggaaaag

SEQ ID NO: 256009 - DNA, 288 bp, Glycine max
ggcagcacttggtggcaatcgtgatgtggcaggaagccagaacagccttgagatcgatggtttagctcgctttgctgttgaagaacagaggaaaaaacagaatgcccttttggagtttgaaaaggtagtaagtgcaaaacagcaagtggtttctggtaccttgtacaccatcactttggaggcaatagatggtgggcaaaagaaggtttatgaagccaaagtttgggagaaggcatggttgaacttcaaggaggtgcaagagttcaagcttgttggagatgcacctgc

SEQ ID NO: 256010 - DNA, 343 bp, Glycine max
  unsure (1)..(343): unsure at all n locations
cagaaaggggaaacaaacaacaaatattcatggctttctttattctctccttccccttccttcttcttgtttcatctgccactgcttgtgatcgctgcttgtatcaatccaaggcttcctatttctccaaagcttctgctctttcatctggggcatgtgggtatggctctttggcactanacataagtggtggacaccttgcagctggtgtggattctctcttcaaaaatggagcaggttgtggtgcctgctttcggataagatgcaagaacccaactctatgtagcaaagaaggtaccaaagtggtattgactgatcttaatcacaacaatcaaactgattt

SEQ ID NO: 256011 - DNA, 402 bp, Glycine max
gacagcaaaaacaattaataaagatgagtttgaagaacaacatggtggtgctaaaggtgtgtttgttgcttcttttccttgtgggggttacagctgcacgcatggaactgagcttcttcaaaagtgatcagtcatcaagttatgatgatgatgagtattcaaaaccatgctgtgatctctgcatgtgcacacgctcaatgcctcctcaatgcagctgtgaagatattaggctgaattcatgccactcagattgtaagagctgtatgtgcacacgctcacagccaggacagtgtcgttgtcttgacaccaacgacttctgctacaaaccttgcaagtccagagatgactagaaaaactaatagctctctcaaatggacgaagcccctttaagctttgtttgtt

SEQ ID NO: 256012 - DNA, 409 bp, Glycine max
gtaggcgcgagaagacacagaaggtacgctgcacaagacacagaagggaagcaaaacaattaataaagatgatttgaaaacacatgtggtgcaaaggtgtgttgttgctctttacttgtgggggttaagctgcacgcatggaactgagcttctcaaaagtggtcagtcatcaagttatgatgatgatgagtattcaaaaccatgctgtgatctctgcatgtgcacacgctcaatgcctcctcaatgcagctgtgaagatattaggcagaattcatgccactcagattgtaacagctgtatgtgcacacgctcacagccaggacagtttctttgtcttgacaccaaccacttctgctacaaaccttgcaagtccagagattactagaaaaactaatacctctctcaaatg

SEQ ID NO: 256013 - DNA, 381 bp, Glycine max
acgcgtccggatgaaagaagacgacagaaggggacagcaaaaacaattaataaagatgagtttgaagaacaacatggtggtgctaaaggtgtgtttgttgcttcttttccttgtgggggttagagctgcacgcatggaactgagcttcttcaaaagtgatcagtcatcaagttatgatgatgatgagtattcaaaaccatgctgtgatctctgcatgtgcacacgctcaatgcctcctcaatgcagctgtgaagatattaggctgaattcatgccactcagattgtaagagctgtatgtgcacacgctcacagccaggacagtgtcgttgtcttgaacacaacgacttctgctacaaacctttcaagtccagagatgacta

SEQ ID NO: 256014 - DNA, 179 bp, Glycine max
gacagcaaaaacaattaataaagatgagtttgaacaacaacccggtggtgctaaacgtgtgtttgttgcttcttttgcgggcgggggttacagctgcacccataaaactgagcttcttcaaaagtgatcagtcatcaagttatgatgatgatgactattcaaaaccatgctgtcatctc

SEQ ID NO: 256015 - DNA, 360 bp, Glycine max
gacagcaaaaacaattaataaagatgagtttgaagaacaacatggtggtgctaaaggtgtgtttgttgcttcttttccttgtgggggttacagctgcacgcatggaactgagcttcttcaaaagtgatcagtcatcaagttatgatgatgatgggtattcaaaaccatgctgtgatctctgcatgtgcacacgctcaatgcctcctcaatgcagctgtgaagatattaagctgaattcatgccactcagattgtaagagctgtatgtgcacacgctcacagccaggacagtgtcgttgtcttgacaccaacgacttctgctacaaaccttgcaaatcaagagatgactagaaaaactaat

SEQ ID NO: 256016 - DNA, 405 bp, Glycine max
  unsure (1)..(405): unsure at all n locations
ggtgacagtgaagagatggaaggcatagtacacaggacagttgaagtgaatggcataaaaatgcatgttgctgagaaaggtgaaggtcccgtggtcttgttcctccacggcttcccggagctctggtactcctggcgccaccagattctggctctcagcaacctcggctaccgcgccgtggctccagatctccgcggctacggagacaccgaggcaccagcttcaatcagcggctacaccatcctccacttagtttctgacatcgtcgcgctcattcactcacttgctgtggattaagtcttcctcgtagcccatgattggggggctgtcatangttggtacctctgcttgtttcgccccgacagaatcaaggcctatgtttgtctcagtgttcctttcatgcct

SEQ ID NO: 256017 - DNA, 347 bp, Glycine max
  unsure (1)..(347): unsure at all n locations
ggccagcaagtgtgagtgatatttgagcttaaaccctagccgctcttctcttcattcttcactttggaaacaatcataatggcgttctgtaagaaggttggaaatgtcttgaggcagggtgctgctcgcancacacatgcccctgttgcgtccatgcttaattacatccgctgcatgtcttcaagcaagcttttcattggaggcctttcatatggagttgatgaccagtctcttaaggatgcattttctggctttggagatgtggttgatgcacaagttataactgatagagacagtggaaaattaaggggatttggaatttgtcacttctccaatgatgagtctgc

SEQ ID NO: 256018 - DNA, 205 bp, Glycine max
  unsure (1)..(205): unsure at all n locations
gactcactcatacaatagagaccagcttttgcttctttgtgaacatggagatgaggaaatcatgtggcttcttcttcttgctcctcggcgggtgggggtgcctcccangtggtggtacagacggagggaacagtgtgtgagtcacaaagccacgggttccatggtttgtgtaataaagaccaaaactgtgctttggtctgcagga

SEQ ID NO: 256019 - DNA, 410 bp, Glycine max
gattcacacaactaactaagaaagtcttccatagccccccaaaaatgaagagcaccatcttctttgctctctttctcttttgtggcttcaggagctcatacctaccttcaaccatcgctgatttcgtgctcgataatgaaggtaaccctcttgaaaatggtggcacatattatatcttgtcagacataacagcatttggtggaataagagcagccccaacgggaaatgaaagatgccctctcactgtggtgcaatctcgcaatgagctcgacaaagggattggaacaatcatctcgtccccatatcgaatccgttttatcgccgaaggccatcctttgagccttaagttcgattcatttgcagttataatgctgtgtgttggaattcctaccgagtggtctgttgtggag

SEQ ID NO: 256020 - DNA, 403 bp, Glycine max
acagcatatctatttactaaagatgagtttgaagaacaacatggtggtgctaaaggtgtgtttgttgcttcttttccttgtgggggttacagctgcacgcatggaactgagcttcttcaaaagtgatcagtcatcaagttatgatgatgatgagtattcaaaaccatgctgtgattcctgcatgtgcacacgctcaatgcctcctcaatgcagctgtgaagatattaggctgaattcatgccactcagattgtaagagctgtatgtgcacacgctcacagccaggacagtgtcgttgtcttgacaccaacgacttctgctacaaaccttgcaagttcagagatgactagaaaaactaatagctctctcaaatggacgaaacccctttaggctttgtttgttat

SEQ ID NO: 256021 - DNA, 233 bp, Glycine max
gacagcaaaaacaattaataaagatgagtttgaagaacaacatggtggggctaagggtgtgtttgttgcttcataaccttgtgggggttacagctgcacgcatggaactgagcttcttcaaaagtgatcagtcatcaagttatgatgatgatgagtattcaaaaccatgctgtgatctctgcatgtgcacacgctcaatgcctcctcaatgcagctttgaaaaatattaaggc

SEQ ID NO: 256022 - DNA, 265 bp, Glycine max
gataccaaaaacaaaacaagccaagtgaaagagagaagaaaagtcaaagacaatgtcagggatcattcacaagattgaggagacccttcatgtgggaggccacaagaaggaggaggagcacaagggtgagcagcaccatggtggagaatacaaaggggagcatcatggtgaacacagtactgaatacaaaggagagcatcatgttggtgagcacaagccggagcaccatggaggagaagagcacacagaggggttcctagacaag

SEQ ID NO: 256023 - DNA, 401 bp, Glycine max
gacacacaactaactaagaaagtcttccatagccccccaaaaatgaagagcaccatcttctttgctctctttctcttttgtgccttcaccacctcatacctaccttcagccatcgctgatttcgtgctcgataatgaaggtaaccctcttgaaaatggtggcacatattatatcttgtcagacataacagcatttggtggaataagagcagccccaatgggaaatgaaagatgccctctcactgtggtgcaatctcgcaatgagctcgacaaggggattggaacaatcatctcgtccccatatcgaatccgttttatcgccgaaggccatcctttgagccttaagttcgattcatttgcagttataatgctgtgtgttggaattcctaccgagtggtctgt

SEQ ID NO: 256024 - DNA, 298 bp, Glycine max
  unsure (1)..(298): unsure at all n locations
gacgcagcttcatccctaacgcgtgcatagcagagtcagagacagagacgcagccatggggcggagacctgcgaggtgttatangcaaattaagaacaagccataccccaagtcacgtttctgccgtggtgttcctgatcccaagatcaggatttatgatgttggtatgaagaagaacggtgttgatgagtttcctttctgtgtccatctggttagttgggagaaggaaaatgtttcaagtgaggccctggaagctgctcgcattgcttgcaacaagtacatggccaaatttgctgga

SEQ ID NO: 256025 - DNA, 390 bp, Glycine max
  unsure (1)..(390): unsure at all n locations
gactcactcatacaatagagaccagcttttgcttctttgtgaacatggagatgaggaaatcatgtggcttcttcttcttgctcctcctccttgtctttgcttcccaggtggtggtgcanacggagggaagagtgtgtgagtcacaaagccacgggttccatggtttgtgtaatacagaccacaactgtgctttggtctgcaggaacgaaggtttctccggtggcaggtgcaaaggcttccgccgccgctgcttttgcaccaagatttgttgagatctcatcaaacactactcttgccatgcaaattaataaatcatagctaggccaaataaattgcatctactctttatccatttgggagctagctaccacaaccaactcatacttggtc

SEQ ID NO: 256026 - DNA, 376 bp, Glycine max
gacagcaaaaacaattaataaagatgagtttgaagaacaacatggtggtgctaaaggtgtgtttgttgcttcttttccttgtgggggttagagctgcacgcatggaactaaacttcttcaaaagtgatcagtcatcaagttatgatgatgatgagtattcaaaaccatgctgtgatctctgcatgtgcacacgctcaatgcctcctcaatgcagctgtgaagatattaggctgaattcatgccactcagattgtaagagctgtatgtgcacacgctcacagccaggacagtgtcgttgtcttgacgccaacgacttctgctacaaaccttgcaagtccagagatgactagaaaaactaatagctctctcaaatgga

SEQ ID NO: 256027 - DNA, 378 bp, Glycine max
gattcacacaactaactaagaaagtcttccatagccccccaaaaatgaagagcacatcttctttgctctctttctcttttgtgccttcagcacctcatacctaccttcagccatcgctgatttcgtgctcgataatgaaggtaaccctcttgaaaatggtggcacatattatatcttgtcagacataacagcatttggtggaataagagcagccccaacgggaaatgaaagatgccctctcactgtggtgcaatctcgcaatgagctcgacaaagggattggaacaatcatctcgtccccatatcgaatccgttttatcgccgaaggccatcctttgagccttaagttcgattcatttgcagttataatgctgtgtgt

SEQ ID NO: 256028 - DNA, 353 bp, Glycine max
gatgcaactgaataattaagaaaagccatttccatagcagcctaagaaaatgaagagcactagcttgttcgctatctttctactttgcgccttcacctcatacctaccttccgccaccgcccagggcgtgctcgacgtggatggcgatccgattcggaacggtttcatatactacgttttgccggcaataagaggaaacggtggcggaatagagcgagccgcactcgggaaagacacttgccctatcactgtagtgcaatctcccaatccaaactctaaggggttagaaattaagtttgaatctgcataccccgcctattacataaacgaaaccctaattttgcaaataaagt

SEQ ID NO: 256029 - DNA, 372 bp, Glycine max
gacagcaaaaacaattaataaagatgagtttgaagaacaacatggtggtgctaaaggtgtgtttgttgcttcttttccttgtgggggttacagctgcacgcatggaactgagcttcttcaaaagtgatcagtcatcaagttatgatgatgatgagtattcaaaaccatgctgtgatctctgcatgtgcacacgctcaatgcctcctcaatgcagctgtgaagatattaggctgaattcatgccactcagattgtaagagctgtatgtgcacccgctcacagccaggacagtgtcgttgtcttgacaccaacgacttctgctacaaaccttgcaagtccaaagatgactagaaaaactaatagctctctcaaa

SEQ ID NO: 256030 - DNA, 247 bp, Glycine max
  unsure (1)..(247): unsure at all n locations
gagtgtctgcgtctcttcctcctctctctgcatcgctgcgttttccgaatccaaacgttaggttagtaagtaacaatggtggaaaacgccaaaggtangaaggaggaggttgtcactcgagagtacaccatcaacctccacaaacgcttgcatggctgcacatttaagaagaaggctcctaaagcaattaaggagataaagaagtttgctcacaaagcgatggggacgaatgatgttagagtggatg

SEQ ID NO: 256031 - DNA, 340 bp, Glycine max
  unsure (1)..(340): unsure at all n locations
caacaagggggggggcaaaaggtgtgtttgttgcctcctttccnttgtggggtttacagctgcacncatggaaactgagcttcttcaaaagtgatcagtcatcaagttatgatgatgatgagtgttcacaaccatgctgtgatctctgcatgtgcacacgctcaatgcctcctcaatgcagctgtgaagatattaagctgaattcatgccactcagattgttagagctgtatgtgcacacgctcacagccaggacagtgtcgttgtcttgacaccaacgacttctgctacaaaccttgcaagtccagaaatgactagaaaaactaatagctctctcaaat

SEQ ID NO: 256032 - DNA, 321 bp, Glycine max
gattcacacaactaactaagaaagtcttccatagccccccaaaaatgaagagcaccatcttctttgctctctatctcttttgtgccttcagcacctcatacctaccttcagccatcgctgatttcgtgctcgataatgaaggtaaccctcttgaaaatggtggcacatattatatcttgtcagacataacagcatttggtggaataagagcagccccaacgggaaatgaaagatgccctctcactgtggtgcaatctcgcaatgagctcgacaaagggattggaacaatcatctcgtccccatatcgaatccgttttatcg

SEQ ID NO: 256033 - DNA, 261 bp, Glycine max
gacacaactaactaagaaagtcttccatagccccccaaaaatgaagagcaccatcttctttgctctctttctcttttgtgccttgagggggtgagacctaccttcagccatcaaagatttcgtgctcgataatgaaggtaaccctcttgaaaatggtggcacatattatatcttgtcagacataacagcatttggtggaataagagcagccccaacgggaaatggaagatgccctctcactgtggtgcaatctcccaatga

SEQ ID NO: 256034 - DNA, 378 bp, Glycine max
  unsure (1)..(378): unsure at all n locations
gacagcanaaacaattaataaagatgagtttgaagaacaacatggtggtgctaaaggtgtgtttgttgcttcttttccttgtgggggttacagctgcacgcatggaactgagcttcttcaaaagtgatcagtcatcaagttatgatgatgatgagtattcaaaaccatgctgtgatctctgcatgtgcacacgctcaatgcctcctcaatgcagctgtgaagatattaggctgaattcatgccactcagattgtaagagctgtatgtgcacacgctcacagccaggacagtgtcgttgtcttgacaccaacgacttctgctacaaaccatgcaagttcagagatgactagaaaaactaatagctctctcaaatggacg

SEQ ID NO: 256035 - DNA, 327 bp, Glycine max
ggattcccaacttcaccatattatgaagctcacaggtttcctgcaagcggtgactctaactgctttggtgttatccaccttcactgcatcagatggcgattctcttcaagacctctgtgtcacagaccttgcctcaccggttaaagtgaatggattcacctgcaaagatgctggcaaggtaaatgcgagtgatttcttctcagacatactatccaaaccaggtaccacaaacaacacgtatggctccctagtgactggagccaacgttcagaaaatcccacgactcaacacccttggcgtgtccttttcacgcattgactatgcccc

SEQ ID NO: 256036 - DNA, 403 bp, Glycine max
gacagcaaaaacaattaataaagatgagtttgaagaacaacatggtggtgctaaaggtgtgtttgttgcttcttttccttgtgggggttacagctgcacgcatggaactgaacttcttcaaaagtgatcagtcatcaagttatgatgatgatgagtattcaaaaccatgctgtgatctctgcatgtgcacacgctcaatgcctcctcaatgcagctgtgaagatattaggctgaattcatgccactcagattgtaagagctgtatgtgcacacgctcacagccaggacagtgtcgttgtcttgacaccaacgacttctgctacaaaccttgcaagtccagagatgactagaaaaactaatagctctctcaaatggaccaagcccctttacgctttgtttgtta

SEQ ID NO: 256037 - DNA, 384 bp, Glycine max
ggagttcgaactaaacaattcaattcaatctgcctcgatcatggagaggaaaacatttgggtttttgttcttgcccctccttgtcggagcgtctgatgtgacggtgaaaaaagcagaggcgaaagattgcttgacaaggaggcacgggttccagggtagatgcttattcgacaggcaatgtgcacatgtgtgcaggagcgatggtttcatcggtggtcagtgccgaggccctcttcgcaaatgcttttgcagcaggccatgttgatcgaaattactactgccaaagaagccatgaaataaacaaacaaacaaataaataaatagctctaaacgacacatatgtacgtagtgtcggggttctagctagctacgtaagtacgtgtg

SEQ ID NO: 256038 - DNA, 204 bp, Glycine max
  unsure (1)..(204): unsure at all n locations
taggcgagtcataaagacgaggagcgtcgaatacatgccatttactttgtccatgtttttaaccatcaatgctgttatgtggttcttctatggccttctcctcanggattattacgttgctcttccaaacacgcttgggtttgtcttcggcataattcagatggtgatgtatttgatgtacagaaacgccaccccagtggtact

SEQ ID NO: 256039 - DNA, 372 bp, Glycine max
gacagcaaaaacaattaataaagatgagtttgaagaacaacatggtggtgctaaaggtgtgtttgttgcttcttttccttgtgggggttacagctgcacgcatggaactgagcttcttcaaaagtgatcagtcatcaagttatgatgatgatgagtattcaaaaccatgctgtgatctctgcatgtgcacacgctcaatgcctcctcaatgcagctgtgaagatattaggctgaattcatgccactcagattgtaagagctgtatgtgcacacgctcacagccaggacagtgtcgttgtcttgacaccaacgacttctgctacaaaccttgcaaatccagagaatactagaaaaactaataactcctctcaa

SEQ ID NO: 256040 - DNA, 387 bp, Glycine max
gacagcaaaaacaattaataaagatgagtttgaagaacaacatggtggtgctaaaggtgtgtttgttgcttcttttccttgtgggggttacagctgcacgcatggaactgagcttcttcaaaagtgatcagtcatcaagttatgatgatgatgagcattcaaaaccatgctgtgatctctgcatgtgcacacgctcaatgcctcctcaatgcagctgtgaagatattaggctgaattcatgccactcagattgtaagagctgtatgtgcacacgctcacacccaggacagtgtccttgtcttgacaacaacgacttctgctacaaaccttgcaagtccagagatgactagaaaaactaatagctctctcaaatggacgaaacccctt

SEQ ID NO: 256041 - DNA, 405 bp, Glycine max
cacgcatccgcagcaaaaaagacgacagaaggggacagcaaaaacaattattaaagatgattttgaaaaacaacatgggggggctaaaggggtgtttgttgcttcttttccttgtgggggttacagctgcacgcatggaactgaacttcttcaaaagtgatcagtcatcaagttatgatgatgatgagtattcaaaaccatgctgtgatctctgcatgtgcacacgctcaatgcctcctcaatgcagctgtgaagatattaggctgaattcatgccgctcagattgtaagagctgtatgtgcacacgctcacagccaggacagtgtcgttgtcttgacaccaacgacttctgctacaaaccttgcaagtccagagatgactagaaaaactaatagctctctcaaa

SEQ ID NO: 256042 - DNA, 286 bp, Glycine max
  unsure (1)..(286): unsure at all n locations
gggaacctgaaaatctagtttcttacaaggctctactctactgcttcaccttctgctctagaaaattcagtggtgatacatggcttcggctactctctctgtanccaaaccagcccttcaggcaaatgggaaaggcttctctgaattctctggcctccgcagctcatcaggcttccttcccttttctagaaaatcttcagaggatttccattctgtcattgccttccagacctatgcagttggnagcagtggaggatacaaaaagggtgtgacagaagcaaaactg

SEQ ID NO: 256043 - DNA, 386 bp, Glycine max
gacagcaaaaacaattaataaagatgagtttgaagaacaacatggtggtgctaaaggtgtgtttgttgcttcttttccttgtgggggttacagctgcacgcatggaactgagcttcttcaaaagtgatcagtcatcaagttatgatgatgatgagtattcaaaaccatgctgtgatctctgcatgtgcgcacgctcaatgcctcctcaatgcagctgtgaagatattaggctgaattcatgccactcagattgtaagagctgtatgtgcacacgctcacagccaggacagtgtcgttgtcttgacaccaacgacttctgctacaaaccttgcaagtccagagatgactagaaaaactaatagctctctcaaatggacgaaacccct

SEQ ID NO: 256044 - DNA, 283 bp, Glycine max
cacagaacggggaggaagccacatacagacacaatacagagtgagttgttgctccttcgccacaactctctgccaacatgggtatctccagagattcgaggcggaaggggcgtgccactggtggcaaaaagaaggcctggaggaaaaatataaagtatgaccttggtcgccaccctgctaacactaacctgtcaagcaacaaaacagtcaggaggatccgtgttacaggtggaaatgtgaactggagggcattgacattggatactggaaattacccctgcgg

SEQ ID NO: 256045 - DNA, 328 bp, Glycine max
  unsure (1)..(328): unsure at all n locations
ctcaatgggatctggcatcanaagaacaactacttgataactaagaatgagaagcaaatggcttcctcaatgatctcctccccagctgttaccacgtgtggggggtggcggtgccggcatagataaaccattcactgccctcaattccatggctggcttccccaccagaaagaccaataatgacattacctccattgctaccaacggtggaagactgcaatgcatgcacgcgtggccaccacttggcaaaaacaactttgagactctttcctacctgccataccttgatgatgcacaattggcaaacgaactataatatcttcttagg

SEQ ID NO: 256046 - DNA, 304 bp, Glycine max
gaccacacaccacacacatagtagctattagactcgctagagtaattgcggaatctgctagaattttctaataatggcgaaagacgttgagcaggtcacagagcaaggtgaatactccgcgaaggactaccatgaccctcctccggcaccgttgatcgacccagatgagctcacaaagtggtccttgtacagagccgccatagctgagttcatagcaacactcctttttctttacatcaccgtgttgaccattattggctacaagagacacaatcacaccaaaatccccggtaacaacgaaatg

SEQ ID NO: 256047 - DNA, 405 bp, Glycine max
gacagcaaaaacaattaataaagatgagtttgaagaacaacatggtggtgctaaaggtgtgtttgttgcttcttttccttgcgggggttacagcgtgcacgcatggaactgagcttcttcaaaagtgatcagtcatcaagttatgatgatgatgagtattcaaaaccatgctgtgatctctgcatgtgcacacgctcaatgcctcctcaatgcagctgtgaagatattaggctgaattcatgccactcagattgtaagagctgtatgtgcacacgctcacagccaggacagtgtccttgtcatgacaccaacgacttctgcgacaaaccttgcgagttcagagatgactacaaaaactaatagctctctcaaatggaccaaaccccctttacgctttgtttgtta

SEQ ID NO: 256048 - DNA, 315 bp, Glycine max
  unsure (1)..(315): unsure at all n locations
gattcacacaactaactaagaaagtcttccatagccccccaaaaatgaagagcaccatcttctttgctctctttctcttttgtgccttcaccacctcatacctaccttcagccatcgctgatttcgtgctcgataatgaaggtaaccctcttgaaaatggtggcacatattatatcttgtcagacataacagcatttggtggaataagagcagccccaacgggaaatgaaagatgccctctcactgtggtgcaatctcgcaatgagctcgacaaagggattggaacaatcatctcgtcnccatatcgaatccgtt

SEQ ID NO: 256049 - DNA, 361 bp, Glycine max
  unsure (1)..(361): unsure at all n locations
acataaaaaagcacaaagaaaacattagcactangagcagcaacaactagtctcagctganatggcctcttcagtgatggcatctgtggccctcagacctgcccctttcactgttgagaagtcctcagcgagaggccttccctctctctcaaggaactcttcttcattcagagttgtggccagtggcaagaagatcaagactgacaaaccttatggaattaatggtggcatggctttgagggatggaactgatgcatctggcangaaaggaaagggaaagggtgtttaacagtttgtagacaaatacggtgctaatgtcgatggttacagtcctatctacgacaccaaggactggtctcca

SEQ ID NO: 256050 - DNA, 408 bp, Glycine max
agaaggggacacaactaactaagaaagtcttccatagccccccaaaaatgaagagcaccatcttctttgctctctttctcttttgtgccttcaccacctcatacctaccttcagccatcgctgatttcgtgctcgataatgaaggtaaccctcttgaaaatggtggcacatattatatcttgtcagacataacagcatttggtggaataagagcagccccaacgggaaatgaaagatgccctctcactgtggtgcaatctcgcaatgagctcgacaaagggattggaacaatcatctcgtccccatatcgaatccgttttatcgccgaaggccatcctttgagccttaagttcgattcatttgcagttataatgctgtgtgttggaattcctaccgagtggtctgttg

SEQ ID NO: 256051 - DNA, 340 bp, Glycine max
agggacaccaaaaacaattaataaagatgagtttgaagaacaacatggtggtcccaaaggtgtgtttgttgcttcttggcggtgtgggggttacacctcccaacatggaagcgagcttcctcacaaatgatccgtcatcaagttatgatgatgatcagtattcaaaaccatgccgtgatctctgcatgtccacaccctcaatgcctcctcaatgcacccgtgaagatatcacgccgaactcataccacccacattgtaacagctgtatgtccacactcccacagccacgacagtctccgtgtggtgacaccaacgaccctcttgccacacaccctgcccc

SEQ ID NO: 256052 - DNA, 307 bp, Glycine max
gacagcaaaaacaattaataaagatgagtttgaacaacaccatggtggtgctaaaggtgtgtgtgttgcttcttttccttgagggggatacagctgcacgcatggcactgagcttcttcaaaagtgatcagtcatcaagttatgacgatgatgagtattcaaaaccatgctgtgatctctgcatgtgcacacgctcaatgcctcctcaatgcacctgtgaatatattaggctgaattcatgccactcacattgtaagatctgtacgtgcacacactcacagcgaggacagtgtccttgtcttgacac

SEQ ID NO: 256053 - DNA, 405 bp, Glycine max
gacagcaaaaacaattaataaagatgagtttgaagaacaacatggtggtgctaaaggtgtgtttgttgcttcttttccttgtgggggttacagctgcacgcatggaactgagcttcttcaaaagtgatcagtcatcaagttatgatgatgatgagtattcaaaaccatgctgtgatctctgcatgtgcacacgctcaatgcctcctcaatgcagctgtgaagatattaggctgaattcatgccactcagattgtaagagctgtatgtgcacacgctcacagccaggacagtgtcgttgtcttgacaccaacgacttctgctacaaaccttacaagtccagagatgactagaaaaactaatagctctctcaaatggacgaagcccctttaggctttgtttgttatg

SEQ ID NO: 256054 - DNA, 473 bp, Glycine max
gggtccgccacgcgtccgcagcaagaagacgacagaagggcttctcagagatggtatcatgttcctcgctcatggctgagctcaggtggtaactccttggttgtgtttgaagaatggggaggtgaccctaatggagagtgcgttggtgaaaagaacatgaagtgtgatattttatgatgctctcttaaaaggcattgacaggcaatatatatcttgtaacaaatgtctaggaaatgcaaagaagctgtcaagtgagtcctatgcggttaggaccctatgatgcagcaatttaccaaatatgtgtggtttagatcatattaggttcagtatataaaaaatatttgaagttcataattggtgctccttgtcttctggttgttcgagtatacctcaaaagattgccaaggcctaatcatgcattgcctggccaaaaacaaagatttatataagagaattttgattcgcaaagactg

SEQ ID NO: 256055 - DNA, 420 bp, Glycine max; identical to SEQ ID NO: 255074

SEQ ID NO: 256056 - DNA, 245 bp, Glycine max
gacagcaaaaacaattaataaagatgagtttgaagaacagcatggtggtgctaaaggtgtgtttgttgcttcttttccttgtgggggttacagctgcacgcatggaactgaccttcttcaaaagtgatcagtcatcaagttatgatgatgatgagtattcaaaaccatgctgtgatctctgcatgtgcacaccctcaatgcctcctcaatgcagctgtcaacatattacgctgaattcatgccca

SEQ ID NO: 256057 - DNA, 420 bp, Glycine max
gacagcaaaaacaattaataaagatgagtttgaagaacaacatggtggtgctaaaggtgtgtttgttgcttcttttccttgtgggggttagagctgcacgcatggaactgaacttcttcaaaagtgatcagtcatcaagttatgatgatgatgagtattcaaaaccatgctgtgatctctgcatgtgcacacgctcaatgcctcctcaatgcagctgtgaagatattacgctgaattcatgccactcagattgtaagagctgtatgtgcacacgctcacagccaggacagtgtcgttgtcttgacaccaaagacttctgctaaaaaccttgcaagtccagagaatactataaaaactaatagctccctcaaatggacgaaacccctttaagccttgttttgtatgtaagggagacaaata

SEQ ID NO: 256058 - DNA, 465 bp, Glycine max
gcgtccggattcaagtgtgtgattgtttgttgttgtaactcgttcttcttcttttgttgttctgtgtttgtgtttgttttttctctcacctgaaaatgtcttgctgcggtggtaactgtggttgcggaagctcctgcaagtgcggcaacggctgcggaggctgcaagatgtacccagacttgagctacactgagtcaaccaccaccgagaccttggtcatgggagtggcacctgttaaggctcaatttgagggtgctgaaatgggtgtgcccgctgagaacgatggctgcaaatgtggaccaaactgctcctgcaacccctgcacttgcaagtgaggtgttgggggagcaagcttcaagcaaagatagcccttaattaggaataatgataaactattaatgtgtagctaacaacttatgtattatgtctgtgatggttttcgtgcactctggtgttttgtgtaaa

SEQ ID NO: 256059 - DNA, 397 bp, Glycine max
gacagcaaaaacaattaataaagatgagtttgaagaacaacatggtggtgctaaaggtgtgtttgttgcttcttttccttgtgggggttacagctgcacgcatggaactgagcttcttcaaaagtgatcagtcatcaagttatgatgatgatgagtattcaaaaccatgctgtgatctctgcatgtgcacacgctcaatgcctcctcaatgcagctgtgaagatattaggctgaattcatgccactcagattgtaagagctgtatgtgcacacgctcacagccaggacagtgtcgttgtcttgacaccaacgacctctgctacaaaccttgcaagtccagagatgactacaacaactaatagctctctcaaatggacgaagcccctttaagctttgt

SEQ ID NO: 256060 - DNA, 445 bp, Glycine max
gcgtccgaagcaagaagacgacagaaggggacagaagaaaaaagagaagaagatgggtttgaagaacaacatggtggtgctaaaggtgtgtttggtgctacttttccttgtggggggtactactagtgccagcttgaggctgagtgagcttggcctgctcatgaaaagtgatcatcatcaacactcaaatgatgatgactcttcaaaaccatgctgtgatcaatgcgcatgcacaaagtcaaaccctcctcaatgccgctgttcagatatgaggctgaattcgtgccattcagcttgcaaatcttgtatttgcgcattatcgtatcctgcacagtgtttttgtgttgacataacggatttctgctatgaaccttgcaagcccagtgaggatgacaaggaaaactactaatgaacaagtgttatgcatgtaagctctctctccaat

SEQ ID NO: 256061 - DNA, 415 bp, Glycine max
gaacactgtattgacaggctacttctttgtacttgggattgttgccctttcggcaacattattaccatttattaaacgttttctgccaaagcattgggatgaggacctcatagtctggcgttttccatatttccgttcattggagattgagtttacaaagtcacaggtcgttgctggaatccctgggacatttttttgtgcctggtatgctttgcagaagcattggctagcaaataatatattgggtcttgctttctgtattcagggaattgaaatgctttctcttgggtctttcaagactggtgctattctcttggctggtctatttgtgtatgacattttctgggttttcttcaccccagtgatggtcagcgttgcaaaatcatttgatgctccaatatagcttttgttccca

SEQ ID NO: 256062 - DNA, 334 bp, Glycine max
cagtatgaaggggtagctgccatatttaaaattgggaacagcaaagatatgcgtgagggcgccgagcatctttcgaacgatgcaaaaaatttcatcaagctatgcttacaaagagacccattagctcgtccgacagcccataagttactagatcaccccttcattcgagatcaatcggcaacaaaagctgcaaatgtcagcataaccagagatgcttttccttgcatgtttgatggaagccggacaccgcctgtgttagagtcccattccaaccgaagaagtataacttctcttgatggagactttgcatcacagccagctcctgcagcaccac

SEQ ID NO: 256063 - DNA, 401 bp, Glycine max
  unsure (1)..(401): unsure at all n locations
gacacaactaactaagaaagtcttccatagccccccaaaaatgaagagcaccatcttccttgctctctttctcttttgtgccttcaccacctcatacctaccttcagccatcgctgatttcgtgctcgataatgaaggtaaccctcttgaaaatggtggcacatattatatcttgtcagacataacagcatttggtggaataagagcagccccaacgggaaatgaaagatgccctctcactgtggtgcaatctcgcaatgagctcgacaaagggattggaacaatcatctcgtcnccatatcgaatccgttttatcgccgaaggccatcctttgagccttaagttcgattcatttgcagttataatgctgtgtgttggaattcctaccgagtggtctgttg

SEQ ID NO: 256064 - DNA, 403 bp, Glycine max
gagtgagagagagagaaggcaagatgtcgaagagaggacgcggtggttcggcggggaacaagttccggatgtcgctgggtctgccggtggcggcgacggtgaactgcgccgacaatacgggggcgaagaacctctacatcatatcggtgaaagggatcaaagggcgtttgaaccgtctcccctcggcttgcgttggcgacatggtgatggccaccgtgaagaaggggaaacccgatctgaggaagaaggttttgccagctgtcattgttcgccagcgcaagccatggcgccgaaaggacggcgtctacatgtatttcgaagataatgctggtgttattgtcaatcccaaaggagaaatgaaaggttctgctatcactggtctcattggaaaagagtgtgctga

SEQ ID NO: 256065 - DNA, 397 bp, Glycine max
gacagcaaaaacaattaataaagatgagtttgaagaacaacatggtggtgctaaaggtgtgtttgttgcttcttttccttgtgggggttacagctgcacgcatggaactgagcttcatcaaaagtgatcagtcatcaagttatgatgatgagtattcaaaaccatgctgtgatctctgcatgtgcacacgctcaatgcctcctcaatgcagctgtgaagatattaggctgaattcatgccactcagattgtaagagctgtatgtgcacacgctcacagccaggacagtgtcgttgtcttgacaccaacgacttctgctacaaaccttgcaagtccagagatgactagaaaaactaatagctctctcaaatggacgaagcccctttaagctttgtttg

SEQ ID NO: 256066 - DNA, 387 bp, Glycine max
gacagcaaaaacaattaataaagatgagtttgaagaacaacatggtggtgctaaaggtgtgtttgttgcttcttttccttgtgggggttacagctgcacgcatggaactgagcttcttcaaaagtgatcagtcatcaagttatgatgatgatgagtattcaaaaccatgctgtgatctctgcatgtgcacacgctcaatgcctcctcaatgcagctgtgaagatattaggctgaattcatgccactcagattgtaagagctgtatgtgcacacgctcacagccaggacagtgtcgttgtcttgacaccaacgacttctgctacaaaccttgcaagtccagagatgactagaaaaactaatagctctctcaaatggacgaagcccctt

SEQ ID NO: 256067 - DNA, 409 bp, Glycine max
gattcacacaactaactaagaaagtcttccatagccccccaaaaatgaagagcaccatcttctttgctctctttctcttttgtgccttcagcagctcatacctaccttcagccatcgctgatttcgtgctcgataatgaaggtaaccctcttgaaaatggtggcacatattatatcttgtcagacataacagcatttggtggaataagagcagccccaacgggaaatgaaagatgccctctcactgtggtgcaatctcgcaatgagctcgacaaagggattggaacaatcatctcgtccccatatcgaatccgttttatcgccgaaggccatcctttgagccttaagttcgattcatttgcagttataatgctgtgtgttggaattcctaccgagtggtctgttgtgga

SEQ ID NO: 256068 - DNA, 349 bp, Glycine max
gatgcaactgaataattaagaaaagccatttccatagcagcctaagaaaatgaagagcactagcttgttcgctatctttctactttgcgccggcagctcagacctaccttccgccaccgaccaggacgtgctcgacgtggatggcgatccgattcggaacggtttcatatactacgttttgccggcaataagaggaaacggtggcggaatagaacgagccgcactcgggaaagacacttgccctatcactgtagtgcaatctcccaatccaaactctaaggggttagaaattaagtttgaatctgcataccccgcctattacataaacgaaaacctaattttgcaaata

SEQ ID NO: 256069 - DNA, 373 bp, Glycine max; identical to SEQ ID NO: 254784

SEQ ID NO: 256070 - DNA, 338 bp, Glycine max
agaaggcagcggtggtttacgagagaaagaagcaactcaacaaattaagggtgaaagctgacaaggttgctgaagagaagctcggttcccaacttgatgttcttgctcctgttaagtattgagtagtttttgttagtgtttgaaattttttatgccacttataccacattgaactacctttcaattttgcttgacgttgctttgttattggatcatagatttgatatctgatcatcttggaaactgttttttatttaattgtgtgttttgtgtaatttttgtcatccagaagttttccaatgccttgggaaaaaaagaaaaaaagctgttcactgtgc

SEQ ID NO: 256071 - DNA, 388 bp, Glycine max
gacagcaaaaacaattaataaagatgagtttgaagaacaacatggtggtgctaaaggtgtgtttgttgcttcttttccttgtgggggttacagctgcacgcatggaactgagcttcttcaaaagtgatcagtcatcaagttatgatgatgatgagtattcaaaaccatgctgtgatctctgcatgtgcacacgctcaatgcctcctcaatgcagctgtgaagatattaggctgaattcatgccactcagattgtaagagctgtatgtgcacacgctcacagccaggacagtgtcgttgtcttgacaccaacgacttctgctaaaaaccttgcaaatccagagatgactagaaaaactaatagctctctcaaatggacgaaaccccttt

SEQ ID NO: 256072 - DNA, 386 bp, Glycine max
gatgcaactgaataattaagaaaagtcatttccatagcagcctaagaaaatgaagagcactagcttgttcgctatctttctactttgcgccttcacctcatacctaccttccgccaccgcccaggacgtgctcgacgtggatggcgatccgattcggaacggtttcatatactacgttttgccggcaataagaggaaacggtggcggaatagaacgagccgcactcgggaaagacacttgccctatcactgtagtgcaatctcccaatccaaactctaaggggttagaaattaagtttgaatctgcataccccgcctattacataaacgaaaccctaattttgcaaataaagttcagttacccacagcagtgtgaaagaaagaatc

SEQ ID NO: 256073 - DNA, 353 bp, Glycine max
ggccgaaaagtagtaccaagatggcttcagttgtgtatctcctctttggcttccatctcattgtgatcatgtcaagttccttacccgcaactagtgaagtgtttgcaaaacagtatccatccacagaacccgtgggagaaaaactcacccaactccacttctatttccataacaacataacgggggaacacccaactgctatgaaaactgttttgcctcctaaggggtccattcatggttttggggctacttacatgatggatgaccctctaactgaaggaccaagtccaacttcaaagcttgtgggaagatctcaaggaatatacgctttggcttcacaacatgagcctggg

SEQ ID NO: 256074 - DNA, 401 bp, Glycine max
gacagcaaaaacaattaataaagatgagtttgaagaacaacatggtggtgctaaaggtgtgtttgttgcttcttttccttgtgggggtgtagaactgcacgcatggaactgagcttcgtcaaaagtgatcagtcatcaagttatgatgatgatgagtattcaaaaccatgctgtgatctctgcatgtgcacacgctcaatgcctcctcaatgcagctgtgaagatattaggctgaattcatgccactcagattgtaagagctgtatgtgcacacgctcacagccaggacagtgtcgttgtcttgacaccaacgacttctgctacaaaccttgcaagtccagagatgactagaaaaactaatagctctctcaaatggacgaagccccttttagctttgtttg

SEQ ID NO: 256075 - DNA, 329 bp, Glycine max
gacaggtgtttgcaatactagcgatagctgataagagagataccaacaagaaaagaaaaaaagaagagttgagattccctttgaagaaaagatggcatcccataggcaaagctatgaagctggtcaaactaagggccgaactgaggaaaagacgaaccagacgatgggcaatattggagagaaggctcaagctgcaaaggagaagacccaggaaatgggccaagctgcaaaggagaagacccaacaaacagcccaagctgccaaagacaagacttgcgacacttcccaagcggcacaggagaagacccaacagaataaaggagctgctc

SEQ ID NO: 256076 - DNA, 398 bp, Glycine max
gacagcgaaacagagagtgatttcagtgagtgatcggtgttcacttgatctcatcataatcgtcagcgtcaattgaagaagatgccgatcagaaacatcgccgtcggaaggcctgaagaggcgactcaccccgacacgttgaaggcggctttggctgagttcatctcaaccttcatcttcgtgttcgccggctcaggctccggcatcgcctacaacaagctcaccgacaacggcgctgccacccctgccggactcatctccgcctccatcgcccatgcattcgccctcttcgtcgccgtctccgtccgcgccaacatctccggcggccacgtcaaccccgccgtcaccttcggcgccttcgtcgggggcaacatcaccttcctccggggcatcgtcta

SEQ ID NO: 256077 - DNA, 283 bp, Glycine max
gattcacacaactaactaagaaagtcttccatagccccccaaaaatgaagagcagcatcttctttgctctctttctcttttgtgccttcaccacctcatacctaccttcagccatcgctgatttcgtgctcgataatgaacgtaaccctcgtgaaaatggtggcacatattatatcttgtcagacataacagcatttggtggaataagagcagccccaacgggaaatgaaagatgccctctcactgtggtggaatctcgcagtgagctcgaacaagggattgg

SEQ ID NO: 256078 - DNA, 423 bp, Glycine max
gacagcaaaaacaattaataaagatgagtttgaagaacaacatggtggtgctaaaggtgtgtttgttgcttcttttccttgtgggggttacagctgcacgcatggaactgagcttcttcaaaagtgatcagtcatcaagttatgatgatgatgagtattcaaaaccatgctgtgatctctgcatgtgcacacgctcaatgcctcctcaatgcagctgtgaagatattaggctgaattcatgccactcagattgtaagagctgtatgtgcacacgctcacagccaggacagtgtcgttgtcttgacaccaacgacttctgctacaaaccttgcaagtccagagatgactagaaaaactaatagctctctcaaatggacgaagcccctttaagctttgtttgttaagttaagggagaccaataaa

SEQ ID NO: 256079 - DNA, 388 bp, Glycine max
gaataagatttgtgagagaaagggagaaagggtgcgagaatggagagcaaagaggaagatgtaagggttggagcaactaagttctcagaaaggcaaccaattggtacagcagctcagggtgacaaggactacaaagaaccacccccagcacctttgtttgagcctggtgagctaaagtcatggtccttctacagagctggaattgctgagtttgtggccactttcttgttcctctacattaccatcttaactgtcatgggtgtcaacaggtcaccctccaagtgtgcctctgttggcattcaaggcattgcttgggcctttggtggcatgatctttgcccttgtctactgcactgctggaatttcagggggacacatcaacccagctg

SEQ ID NO: 256080 - DNA, 272 bp, Glycine max
gccgcaagaatctcagcaacgaggacgaagccagaggccccaagaccgtcaccaaaaggtacatcgcttcagagagggtgatttgatcgcagtgcctactggtgttgcatggtggatgcacaacaatgaagacactcctgttgttgccgtttctattattgacaccaacagcttggagaaccagctcgaccagatgcctaggagattctatcttgctgggaaccaagagcaagagtttctaaaatatcagcagcagcagcaaggaggttccc

SEQ ID NO: 256081 - DNA, 366 bp, Glycine max
gattcacacaactaactaagaaagtcttccatagccccccaaaaatgaagagcaccatcttctttgctctctttctcttttgtgccttcaccacctcatacctaccttcagccatcgctgatttcgtgctcgataatgaaggtaaccctcttgaaaatggtggcacatattatatcttgtcagacataacagcatttggtggaataagagcagccccaacgggaaatgaaagatgccctctcactgtggtgcaatctcgcaatgagctcgacaaagggattggaacaatcatcccgtccccatatcgaatccgttttatcgccgaagggcatcctttgagccttaagttcgattcatttgcagtta

SEQ ID NO: 256082 - DNA, 398 bp, Glycine max
gattcacacaactaactaagaaagtcttccatagccccccaaaaatgaagagcaccatcttctttgctctctttctcttttgtgccttcaccacctcatacctaccttcagccatcgctgatttcgtgctcgataatgaaggtaaccctcttgaaaatggtggcacatattatatcttgtcagacataacagcatttggtggaataagagcagccccaacgggaaatgaaagatgccctctcactgtggtgcaatctcgcaatgagctcgacaaagggattggaacaatcatctcgtccccatatcgaatccgttttatcgccgaaggccatcctttgagccttaagttcgattcatttgcagttataatgctgtgtgttggaattcctaccgagtgg

SEQ ID NO: 256083 - DNA, 406 bp, Glycine max; identical to SEQ ID NO: 254969

SEQ ID NO: 256084 - DNA, 312 bp, Glycine max
aggacagcaaaaacaattaataaagatgagtttgaagaacaacatggtggtgctaaaggtgtgtttgttgcttcttttccttgtgggggttacagctgcacgcatggaactgagcttcttcaaaagtgatcagtcatcaagttatgatgatgatgagtattcaaaaccatgctgtgatctctgcatgtgcacacgctcaatgcctcctcaatgcagctgtgaacatattaggctgaattcatgccactcagattgtaagagctgtatgtgcacacgctcacagccaggacagtgtccctgtcttgacaccaa

SEQ ID NO: 256085 - DNA, 325 bp, Glycine max
gacagcaaaaacaattaataaagatgagtttgaagaacaacatggtggtgctaaaggtgtgtttgttgcttcttttccttgtgggggttacagctgcacgcatggaactgagcttcttcaaaagtgatcagtcatcaagttatgacgatgatgagtattcaaaaccatgctgtgatctctgcatgtgcacacgctcaatgcctcctcaatgcagctgtgaagatattaggctgaattcatgccactcagattgtaagagctgtatgtgcacacgctcacagccaggacagtgtcgttgtcttgacaccaacgacttctgctacaa

SEQ ID NO: 256086 - DNA, 389 bp, Glycine max
ggcaaaaatccgatcagaaaacagcatcgaacccgtcgtagcagaaaaacttgtcaccatggtttcttccgacaaggatccacgagaggatgtccttcaagcctggtacatggatgatagtgatgaagatcaaagactcccccaccacaaagaacccaaggagtttgtctcgttggaccaacttgctgaacttggagtccttagctggaaactagatgctgataaccatgaaaatgatccagagctgaagaagattcgtgaagagcgtggttacacctacatggatgtttgtgaggtctgcccagaaaagttgccaaattatgaacagaaaatcaaaagcttctttgaagagcatcttcacactgatgaggagatccgcttttgtgctg

SEQ ID NO: 256087 - DNA, 399 bp, Glycine max
gagagaaagagagagaaagatgtcgaagcgtggtcgtggtggttcggcggggaacaagttccgcatgtcgctgggtcttccagtggcggcgacggtgaactgcgccgacaacacgggggcgaagaacctctacatcatttcggtgaaagggatcaaaggccgtttgaaccgtcttccctcggcctgcgttggcgacatggtgatggccaccgtgaagaagggaaagcccgatctgaggaagaaggtcttgccagctgtcatcgttcgccagcgcaagccatggcgccgaaaggacggcgtctacatgtacttcgaagataatgctggtgttattgtcaatcccaagggagaaatgaaaggttctgctatcactggtcccattggaaaagagtgtgctga

SEQ ID NO: 256088 - DNA, 394 bp, Glycine max
gagagcgaaagagatgtcgttggtttcaagcatgttcgggtgtggagtggtgatggcggcgtcgcaggcaatgggaattggaaggagaagcgatggtggattgacgatagtgtgttcgtctaggccgcagaagaaagcgacggcgcatcacatgaagactcggcctcggaagacgcaggcatgggatagaaaccgcaagcccaccgtctacgatccactccctcctcttcctcctgattggaccctcgttattcccgctgacgcttcttctgctcccgttacgcctccgcctccaactccctctgcctagtcactctctcggtactctctctcgttttcatgtagtcttatctttaattccagcagcttttctttcatgttttcatctcaaatc

SEQ ID NO: 256089 - DNA, 401 bp, Glycine max
gaatctcttcacagaagaaaaaagagaagaagatgggtttgaagaacaacatggtggtgctaaaggtgcgtttggtgctacgtttccttgtggggggtactactagtgccaacttgagactgagtaagcttggcctgctcatgaaaagtgatcatcatcaacactcaaatgatgatgagtcttcaaaaccatgctgtgatcaatgcgcatgcacaaagtcaaaccctcctcaatgccgctgttcagatatgacgctgaattcgtgccattcagcttgcaaatcttgtatttgcgcattatcgtatcctgcacagtgtttttgtgttgacaataacgatttctgctatgaaccttgcagacccagttaagatgacaaggaaaactactaatgaacaaatgtt

SEQ ID NO: 256090 - DNA, 405 bp, Glycine max
gattcacacaactaactaagaaagtcttccatagccccccaaaaatgaagagcaccatcttctttgctctctttctcttttgtgccttcagcacctcatacctaccttcagccatcgctgatttcgtgctcgataatgaaggtaaccctcttgaaaatggtggcacatattatatcttgtcagacataacagcatttggtggaataagggcagccccaacgggaaatgaaagatgccctctcactgtggtgcaatctcgcaatgagctcgacaaagggattggaacaatcatctcgtccccatatcgaatccgttttatcgccgaaggccatcctttgagccttaagttcgattcatttgcagttaaaatgctgtgtgttggaattcctaacgagtggtctgttg

SEQ ID NO: 256091 - DNA, 388 bp, Glycine max
gacagcaaaaacaattaatagagatgagtttgaagaacaacatggtggtgctaaaggtgtgtttgttgcttcttttccttgtgggggttacagctgcacgcatggaactgagcttcttcaaaagtgatcagtcatcaagttatgatgatgatgagtattcaaaaccatgctgtgatctctgcatgtgcacacgctcaatgcctcctcaatgcagctgtgaagatattaggctgaattcatgccactcagattgtaagagctgtatgtgcacacgctcacagccaggacagtgtcgttgtcttgacaccaacgacttctgctacaaaccttgcaagtccagagatgactagaaaaactaatagctctctcaaatggacgaagccccttt

SEQ ID NO: 256092 - DNA, 381 bp, Glycine max
gacagcaaaaacaattaataaagatgagtttgaagaacaacatggtggtgctaaaggtgtgtttgttgcttcttttccttgtgggggttacagctgcacgcatggaactgagcttcttcaaaagtgatcagtcatcaagttatgatgatgatgagtattcaaaaccatgctgtgatctctgcatgtgcacacgctcaatgcctcctcaatgcagctgtgaagatattaggctgaattcatgccactcagattgtaagagctgtatgtgcacacgctcacagccaggacagtgtcgttgtcttgacaccaacgacttctgctacaaaccttgcaagtccagagatgactagaaaaactaatagctctctcaaatggacgaag

SEQ ID NO: 256093 - DNA, 281 bp, Glycine max
ggggagagaatagagaagagagatggatccagacgcgttggcaaaggcattcgtggagcactactacagcaccttcgagaccaagaggaacggcttagcgaatctctaccaggagggttccatgctcactttccaacggcagaacatccaaggcgcttcgatcatcgttgccaagctcaccgcactcccttttcagcagtgccaccactcaatctccaccgtcgactgccaaccgtccggcgtcaacgccggcatgctcgtcttcgtcagcggaaaccttc

SEQ ID NO: 256094 - DNA, 348 bp, Glycine max
gacagcaaaaacaattaataaagatgagtttgaagaacaacatggtggtgctgaaggtgtgtttgttgcttcttttccttgtgggggttacagctgcacgcatggaactgagcttcttcaaaagtgatcagtcatcaagttatgatgatgatgagtattcaaaaccatgctgtgatctctgcatgtgcacacgctcaatgcctcctcaatgcagctgtgaagatattaggctgaattcatgccactcagattgtaagagctgtatgtgcacacgctcacacccagtacagtgtcgttgtcttgacaccaacgacttctgctacaaaccttgcaagtccatagatgact

SEQ ID NO: 256095 - DNA, 336 bp, Glycine max
gaagaaggacaagaagaagaaggagcatggacatgaccatcatggtcatatcagcagcagtgacagtcatgatatggtacatgttaagcatgtgtacggtacgatggtagtgaggagccataatccgtcttcctgctttatgatataacagatatagtatagcgattccggaaatcatgtctgtagctgctctttttatttatgtgataaatgtaaaacgctttggtttggcctggtcgttgtgcattaagttgagtaaatcactgttatcattacccaacaccgagcctataaggaagtgtactaaagcggcctcgctataggattgatgcttac

SEQ ID NO: 256096 - DNA, 382 bp, Glycine max
gatggtaaagaagttggtggcatcgatataagaaaggcaagtttggtcggaataagattcaaaacgctgttttttgcagtttgggcggggctctcgttctctttcttcaaaaaaagtgaacccattcaaagaaagaaagaaagagcgatcatttccaatcacaatggcagatcaactcaccgatgaacagatctcggagctcaaggaagccttcagtttgttcgataaggatggcgatggttgcatcacaacaaaggagcttgggactgttatgcgttcgttgggtcacaatccaacagatgctgagctccaagacatgatcaatgaattacatgctgatgggaatggcaccaatgactttcctgagtttcttaacctcatt

SEQ ID NO: 256097 - DNA, 373 bp, Glycine max; identical to SEQ ID NO: 254784

SEQ ID NO: 256098 - DNA, 380 bp, Glycine max
gattcacacaactaactaagaaagtcttccatagccccccaaaaatgaagagcaccatcttctttgctctctttctcttttgtgccgtcaccacctcatacccaccttcagccatcgctgatttcgtgctcgataatgaaggtaaccctcttgaaaatggtggcacatattatatcttgtcagacataacagcatttggtggaataagagtagccccaacgggaaatgaaagatgccctctcactgtggtgcaatctcgcaatgagctcgacaaacggattggaacaatcatctcgtccccatatcgaatccgttttatcgccgaaggccatcctttgagccttaagttcgattcaattgcagttataatgctgtgtgtt

SEQ ID NO: 256099 - DNA, 375 bp, Glycine max
ggtagtgtgtagtcaccaaacaaacatggcgaaaaaggcaaaagggtctcactctgcctcttctgcctctgcatcttcttcgtccgacaaactagtgctgaggattaaatcaaatgaggggaccaagagatcagtgcggcaaactaattcaagaaagaaacttaaagcaaagcaaaagaagaacaaacaaaagtttgatgctatgaaacccaggaaacctcctacagctttcttctacttcttggaggattttcgtaaagaatttcaagagcagaatccagatgtaaagtcaatgcgtgatattggcaaggcatgtggagagaagtggaaaacaatgacttatgaagagaaagtacaatactatgatatagcaac

SEQ ID NO: 256100 - DNA, 385 bp, Glycine max
  unsure (1)..(385): unsure at all n locations
gacagcanaaacaattaataaagatgagtttgaagaacaacatggtggtgctaaaggtgtgtttgttgcttcttttccttgtgggggttacagctgcacgcatggaactgagcttcttcaaaagtgatcagtcatcaagttatgatgatgatgagtattcaaaaccatgctgtgatctctgcatgtgcacacgctcaatgcctcctcaatgcagctgtgaagatattaggctgaattcatgccactcagattgtaagagctgtatgtgcacacgctcacagccaggacagtgtcgttgtcttgacaccaacgacttctgctacanaccttgcaagtccagagatgactagaaaaactaatagctctctcaaatggacgaagcccc

SEQ ID NO: 256101 - DNA, 420 bp, Glycine max
gattcatgcaactgaataattaagaaaagccatttccatagcagcctaagaaaatgaagagcactagcttgttcgctatctttctactttgcgccttcacctcatacctaccttccgccaccgcccaggacgtgctcgacgtggatggcgatccgattcggaacggtttcatatactacgttttgccggcaataagaggaaacggtggcggaatagaacgagccgcactcgggaaagacacttgccctatcactgtagtgcaatctcccaatccaaactctaaggggttagaaattaagtttgaatctgcataccccgcctattacataaacgaagccctaattttgcacataaagttcagttacccacagcagtgtgaaagaaagaatccttggtgggccattttcaacgatatatctg

SEQ ID NO: 256102 - DNA, 288 bp, Glycine max
gacatcaagaacacttaatacagatgggtttgatctacacaacatgccggtgccaaaagtgtgtatgttgcatctggccgtgtgggggttacagctgcacgcatgggactgagcttcttcaaaagtgatcagtcatcaagttatgattatgatgagtattcaacaccatgctgtgatcaccgcatgtgcacacgctcaatgcctcctcaatgcaactgtgcagatattacgctgagttcatgccactcacattggtatagctgtatgtgcacaccctcacattcacga

SEQ ID NO: 256103 - DNA, 407 bp, Glycine max
gactttgagttcgaactaaacaattcaattcaatctgcctcgatcatggagaggaaaacatttgggtttttgttcttgctcctccttgtcttagcttctgatgtgacggtgaagagagcagaggcgaaagattgcttgacaaggaggcacgggttccagggtagatgcttattcgacaggcaatgtgcacatgtgtgcaggagcgatggtttcatcggtggtcagtgccgaggccctcttcgcaaatgcttttgcagcaggccatgttgatcgaaattactactgccaaagaggccatgaaataaacaaacaaacaaataaataaatagctctaaccgacacatatgtacgtagtgtcggggttctagctagctaggtaggtacgtgtgtcttttgttatcgatcct

SEQ ID NO: 256104 - DNA, 356 bp, Glycine max
gataccaaaaacaaaacacaagccaagtgaaagtgagaaaaaataaaaatcaaagagcataatgtcagggatcattcacaagattggggagacccttcatgtgggagggcacaagaaggaggaggagcataagggtgagcaccatgctggagaatacaaaggggagcaccatggtgaacacagtagtgagtacaaaggagagcatcatggtgaacacaaagctggagagtaccatggtgagcacaagccagagcacaaagaggggttcctagacaaagtcaaggacaagatccatggtgagggcggcgccgccgagggcgagaagaagaagaatgagaagaagaagaaggagcatg

SEQ ID NO: 256105 - DNA, 324 bp, Glycine max
acgcttacaccaaacctttttttccaaaacaaaaaccaatgagtcatggccaaaccaagaagccacaagcagacggtgaacccagcgagggcggcgacgttttcggtgtctccaccgccgcggagcctcacgctgcgccggtggtgtccgccggtatcggttcggctgccatagatggcgaccccataaccatcggagaagctctggaagcggcggcaatatcgatcggggataaaccagtggaccaaaatgacgccgatgcgattggcgtcgcggacattagggccaccggagagaataatgtaaggtccggttgggtgggtg

SEQ ID NO: 256106 - DNA, 378 bp, Glycine max
  unsure (1)..(378): unsure at all n locations
gattcacacaactaactaagaaagtcttccatagccccccaaaaatgaagagcaccgtcttctttgctctctttctcttttgtgccttcaccacctcatacctaccttcagccatcgctgatttcgtgctcgataatgaaggtgaccctcttgaaaatggtggcacatattatatcttgtcagacataacagcatttggtggaataagagcagccccaacgggaaatggaagatgccctctcactgtggtgcaatctcgcaatgagctcgacanagggattggaacaatcatctcgtccccatatcgaatccgttttatcgccgaaggccatcctttgagccttaggttcgattcatttgcagttataatgctgtgtg

SEQ ID NO: 256107 - DNA, 381 bp, Glycine max
  unsure (1)..(381): unsure at all n locations
ggcacttgcacatgcatttgctctatttgctgctgtttcttctagcatgcatgtatcaggtggccatgtcaacccagctgtgacatttggtgctctcattggaggcaggatttctgtgctccgtgccgtatactactggattgctcaaattctangtgctatagtggctgccctcgtgctcagacttgtcactaataacatgagaccatcagggttccacgtggggcaaggtgttggagtaggacacatgcttatacttgagataatcatgacatttgggctaatgtacactgtgtatggtactgcaattgatcccaanaagggttctgttagcaacattgcacctttggcaattggactcattgttggggcaaacatcct

SEQ ID NO: 256108 - DNA, 289 bp, Glycine max
cagaacggggcacttgcacatgcatttgctctatttgctgctgtttcttcaagcatgcatgtatcaggtggccatgtcaacccagctgtgacagttggtgctctcattggaggcaggatttctgtgctccgtgccgtataccactggattgctcaaattctaggtgctacactggctgccctcgtgctcagacttgtcactaataacatgggaccatcaaggttccacctggggcaatgtgttggcttacgacacatgcctatacttgagataatcatgacatttgggc

SEQ ID NO: 256109 - DNA, 256 bp, Glycine max
tgacatgatattcaagtggcacactgtcagacacaggtatgacagttggtgccctcattgggaggcaagatattctggtgctccagtgcacgtctaatagtggattgcacaaattctaggtgcaagaatggctgccctcgtgctcagacttgtcacgaaaaagatgagagcatcagggctccacatgaggcaacgtgtttgtctacgacacatgcctatacttgagaggagcatgacatttgcgctaatgtagact

SEQ ID NO: 256110 - DNA, 284 bp, Glycine max
gtacgagaagacgacaggatgggacacaactacataagggcatcgtccatagcatgtcactaacaactagcatgaccttcgttgactctctctctctgtgtagagcctttatggggtcaggtcatatcttcagccatcgcagaatttcgtgctcgataatgaaggtgaacctcttgatccatggtggcatatactagcacgtgacatccatacccttctatggtggcacataaattaacttcactggacgtcgttttatacccttccagatgtgggaaaatcct

SEQ ID NO: 256111 - DNA, 374 bp, Glycine max
gactttgagttcgaactaaacaattcaattcaatctgcctcgatcatggagaggaaaacatttgggtttttgttcttgctcctccttgtcttagcttctgatgtgacggtgaagagagcagaggcgaaagattgcttgacaaggaggcacgggttccagggtagatgcttattcgacaggcaatgtgcacatgtgtgcaggagcgatggtttcatcggtggtcagtgccgaggccctcttcgcaaatgcttttgcagcaggccatgttgatcgaaattactactgccaaagaggccatgaaataaacaaacaaacaaataaataaatagctctaaccgacacatatgtacgtagtgtcggggttctagctagct

SEQ ID NO: 256112 - DNA, 349 bp, Glycine max
gattcacacaactaactaagaaagtcttccatagccccccaaaaatgaagagcaccatcttctttgctctctttctcttttgtgccttcaccacctcatacctaccttcagccatgcgtgatttcgtgctcgataatgaaggtaaccctcttgaaaatggtggcacatattatatcttgtcagacataacagcatttggtggaataagagcagccccaacgggaaatgaaggatgccctctcactgtggtgcaatctcgcaatgagctcgacaaagggagttgaacaatcatctcgtcgccataacgaatccgttttatcgccgaaaggcatcctttgagccttaagtt

SEQ ID NO: 256113 - DNA, 349 bp, Glycine max
gcactttgagttcgaactaaacaattcaattcaatctgcctcgatcatggagaggaaaacatttgggtttttgttcttgctcctccttgtcttagcttctgatgtgacggtgaagagagcagaggcgaaagattgcttgacaaggaggcacgggttccagggtagatgcttattcgacaggcaatgtgcacatgtgtgcaggagcgatggtttcatcggtggtcagtgccgaggccctcttcgcaaatgcttttgcagcagggcatgttgatcgaaattactactgccaaagagggcagtaaatacggaggcaagcagataagtgagatagctctaaccgacacatatg

SEQ ID NO: 256114 - DNA, 227 bp, Glycine max
gattcacgcaactaaataagaaatgaagagtactatcttctttgctctctttctagtttgtgccttcaccatctcatacctgccttcagccaccgctcagttcgtgctcgacactgatgatgatcctcttcaaaacggtgggacatactaaatgttgccagttatgagaggaaagggcggtggaatagaagtagattcaacctggaaagaaatatgccctctcactg

SEQ ID NO: 256115 - DNA, 172 bp, Glycine max
acgaagactgtctctaaggaggaagcgtctgccatcaacgctgctgggaaagcatggtatcacactatggtgtcagattctgagtatacagaattcgacaacttttcgaagtggttgggtgtttcacagtagacttcatgaattagtttttcgtattaaaattttgggtttt

SEQ ID NO: 256116 - DNA, 380 bp, Glycine max
gacaaacattattcctaatccttatcctgtttgcttccatggaagtgatttccgcttcgagcttgaatcccaacgctccgatgttcgtgcctctcgcctatcggacggtggaggatttctccgaccaatggtgggacctcatccactcctccccctggttccgcgactactggctccgcgagtgcttccaagatccccagtaccaatacgacgacgttttcgacttcgactttgacctagatctccaagataaagatgaagatgaagggaaggaagggaaagaggtggtgtcgttgggggtgctcaaatggcgaagctgtggaggacgatgggccgaagcgccgaggtatgtggaaaaaggccctaagtttgtgaagccc

SEQ ID NO: 256117 - DNA, 329 bp, Glycine max
  unsure (1)..(329): unsure at all n locations
ggagacacaaactcacacactttgtactctccgtccttccttcttcgatccagatctctctccttctccctcaaatggcttcccttctgcaatgttccatgcccctcgtctctctttccaatcgagctctggtacccggtaccaggatctccaacccaagttcagtttccctttcaattaagggaagaagtttcccatccgttacattgcagcccagagggcgtcggtttcagcttagatgtgcggcaaaaccagagacagtgaagaaggtgtgtgacatagtcaagaagcaattggcaatgccanatgaatcagctgttactggagag

SEQ ID NO: 256118 - DNA, 378 bp, Glycine max
gattcacacaactaactaagaaagtcttccatagccccccaaaaatgaagagcaccatcttctttgctctctttctcttttgtgccttcaccacctcatacctaccttcagccatcgctgatttcgtgctcgataatgaaggtaaccctcttgaaaatggtggcacatattatatcttgtcagacataacagcatttggtggaataagagcagccccaacgggaaatgaaagatgccctctcactgtggtgcaatctcgcaatgagctcgacaaagggattggaacaatcatctcgtcgccatatcgaatccgttttatcgccgaaggccatcctttgagccttaagttcgattcatttgcagttataatgctgtgtg

SEQ ID NO: 256119 - DNA, 285 bp, Glycine max
gagtccgaaggtggtttgattcaaacatggaactctcaacaccctgagctgaaatgcgccggtgtcactgtttccaaactcaccctcaaccgcaatggcctccacttgccatcttactcaccttatccccggatgatcatcatcgcccaagggaaaggagcacttggagttgcaattccaggatgtcctgagacgtttgaggagccacaggaacaatcaaacgggagaggctcaaggtcgcagaagcagcaactacatgacagtcagcagaagattcgtcacttc

SEQ ID NO: 256120 - DNA, 100 bp, Glycine max
gaaaaaaaaaattgtgtttattttgtacttcaagttatgaataaaagaatttcactgtttgtttgtaaaaaaaaaaaaaaaaaaaccaaagggagagagg

SEQ ID NO: 256121 - DNA, 369 bp, Glycine max
gacagcaaaaacaattaataaagatgagtttgaagaacaacatggtggtgctaaaggtgtgtttgttgcttcttttccttgtgggggttacagctgcacgcatggaactgagcttcttcaaaagtgatcagtcatcaagttatgatgatgatgagtattcaaaaccatgctgtgatctctgcatgtgcacacgctcaatgcctcctcaatgcagctgtgaagatattaggctgaattcatgccactcagattgtaacagctgtatgtgcacacgctcacggccaggacactgtcgttgtcttgagaccaacgacgtccgctacaaaccttgcaagtccagagatgactagaagaactaataactctctc

SEQ ID NO: 256122 - DNA, 281 bp, Glycine max
gacaactcaaacattctctccattgggccttaaacactcatcagtcatcaccatggccaggctagttttttccctttgttttctgcttttcagtggctgctgcttcgctttcagttccagatagcagcctcagcaaaagcagtgccacatccaatgactcaatgccctcaaaacggataaccgtatagagtcagaaggagggctcattgagacatggtaccctaacaacaagccattccagtgtgccggtgtcgccctctctcgctgcagcctcaaacgca

SEQ ID NO: 256123 - DNA, 99 bp, Glycine max
gacagcacaagcaattaataaagatgagtttgaagaacaacatggtggtgctgcaggtgtgtttgttgcgtcttttccgtggtggggttacagctgcac

SEQ ID NO: 256124 - DNA, 296 bp, Glycine max
cacaaacgggattcacgcaacaactacatatgaataatacagcctctttgctccctctccactttgtgccttcaccatctcatacctacctggccggcgacagttcgtgctcacactatagggatcacctcacaccagtggcacatttctatagttccagttatatatgaatgggccgttaatataaatcattcacctgcaatagacattgccctctcacttttgtgctacctccctgtgtgcccgatattgggacttaactattctttatatctccatttcatactctttttatc

SEQ ID NO: 256125 - DNA, 280 bp, Glycine max
gacacaagaatctcatcatcgaggtcaatttcaaaagccccatgatcgtcaccaaagtgtatatctcttcacatatccttattggatcggagtgcctactgcagttgcataatcaatgtacaacattataaatactcctgttgttgccgtttctattattcacaccaacaccttggtcaaccaactcgaccacatgcctaggacattctatcttgctgtgaaccaagagcaataatttctaacatatcagcatcaacaacatggatgttcccacaccaac

SEQ ID NO: 256126 - DNA, 335 bp, Glycine max
agagagaagagagatggatccagacgcgttggcaaaggcattcgtggagcactactacagcaccttcgacaccaccaagaacggcttagcgaatctctaccagcacggttccatgctcactttcgaagggcagaagatccacggcgcttccaacatcgttgccaagctcacctccctcccctttcagcagtgccaccactcaatctccaccgtccactgccacccctccggcgtccacgccggcatgctcgtcttcgtcagccgaaaccttcagctcgcccgcgaacagcacactctcaagttcagcccgatgttccatttgataccaacccctc

SEQ ID NO: 256127 - DNA, 352 bp, Glycine max
ggctgacaagccaatcctttgtgtaggtgctcaaccctagtaagccgcaatggtgaagtactcaagggagcctgacaatccaactaagtcttgcaaggctagaggcgccgaccttagggttcattttaagaacacaagggaaactgcctttgcaatcaggaagttgcccttggtcaaggctaaaaggtacttggaagatgttcttgcccacaagcaggcaattccattcagacgtttttgtcgaggtgttggaaggacagcccaggctaagaatagacactctaatggccaaggacggtggcctgtcaagtcagcaaaattcagtcttgatttgctcaaaaatgctgagagc

SEQ ID NO: 256128 - DNA, 327 bp, Glycine max
gagcgccaatgtttttttcagaggagtttcatcttgtaatcaaaagagtttatcttatagtaagaaatcgatgtcttactccattttaaggaacaaaacaagagaacaatagcctgacaaagggtttagccataaaatcgaatccagcattgatttgagatattgataaggtgaatactcatttctcgtcaatgctaggcataatgcgggtatagggacctaaaaaagattatcttttcgtccgatcgtatgaactttaacgtgtatgaagtgtcatttcctaacgtagattttaagtttagtaggtagatgaagagtccagttaac

SEQ ID NO: 256129 - DNA, 369 bp, Glycine max
gacagcataaacaattaataaagatgagtttgaagaacaacatggtggtgctaaaggtgtgtttgttgcttcttttccttgtgggggttacagctgcacgcatggaactgagcttcttcaaaagtgatcagtcatcaagttatgatgatgatgagtattcaaaaccatgctgtgatctctgcatgtgcacacgctcaatgcctcctcaatgcagctgtgaagatattaggctgaattcatgccactcagattgtaataactgtatgtgcacacgctcacagccaggacagtgtcgttgtcgtgacaccaacgacctctgctacataccttgcaagtccagagatgactagaaaaactaatagctctctc

SEQ ID NO: 256130 - DNA, 370 bp, Glycine max
gacagcaaaaacaattaataaagatgagtttgaagaacaacatggtggtgctaaaggtgtgtttgttgcttcttttccttgtgggggttagagctgcacgcatggaactgagcttcttcaaaagtgatcagtcatcaagttatgatgatgatgagtattcaaaaccatgctgtgatctctgcatgtgcacacgctcaatgcctcctcaatgcagctgtgaagatattatgctgaattcatgccactcagattgtaagagctgtatgtgcacacgctcacagccatgacagtgtcgttgtcttgacaccaacgacttctgctacaaaccttgcaagtctagagatgactataaaaactaatagctctctca

SEQ ID NO: 256131 - DNA, 376 bp, Glycine max
gattcacacaactaactaagaaagtcttccatagccccccaaaaatgaagagcaccatcttctttgctctctttctcttttgtgccttcaccagctcatacctaccttcagccatcgctgatttcgtgctcgataatgaaggtaaccctcttgaaaatggtggcacatattatatcttgtcagacataacagcatttggtggaataagagcagccccaacgggaaatgaaagatgccctctcactgtggtgcaatctcgcaatgagctcgacaaagggattggaacaatcatctcgtccccatatcgaatccgttttatcgccgaaggccatcctttgagccttaagttcgattcatttgcagttataatgctgtg

SEQ ID NO: 256132 - DNA, 185 bp, Glycine max
gacagcagcaacaattaattcagatgagtttgaagaacaacatggtggtgctaaatgtgtgtctgttgcttctttgggttgggggggttacagctgcacgcaaggaactgagcttcttcaaaagtgatcagtcatcaagttatgatgatgatgagtattcaaaaccatgctgtgatctctgcatg

SEQ ID NO: 256133 - DNA, 216 bp, Glycine max
gagagcgaaagagatgccgttggcttcaagcatgttcgggtgtggagtggtgatggcggcgtcgcaagcaatgggaattggaaggagaagcgatggtggattgacgatagtgtgttcgtctaggccgcagaagaaagcgacggcgcatcacatgaagactcggcctcggaagacgcaggcatgggatagaaaccgcaagcccaccgtctacgattc

SEQ ID NO: 256134 - DNA, 300 bp, Glycine max
gacagcaaaaacaattaataaagatgagtttgaagaacaacatggtggtgctaaaggtgtgtttgttgcttcttttccttgtgggggttacagctgcacgcatggaactgagcttcttcaaaagtgatcagtcatcaagttaggatgatgatgagtattcaaaaccatgctgtgatctctgcatgtgcacacgctcaatgcctcctcaatgcagctgtgaagatattaggctgaattcatgccactcagattgtaagagctgtaggtgcacacgctcacaggcaggacagtgtcgttggc

SEQ ID NO: 256135 - DNA, 383 bp, Glycine max
gattcacgcaactaaataagaaatgaagagtactatcttctttgctctctttctagtttgtgccttcaccatctcatacctgccttcagccaccgctcagttcgtgctcgacactgatgatgatcctcttcagaaccgtggcgcatactatatgttgccagttatgagaggaaagggcggtggaatataagtagattcaactggaaaagaaatatgccctctcactgttgtgcaagcaggcaatgagctcgatgaggggattgggctagtcgttacatctccagttgatgccctttttagcgcctaaggctagcctttgagcattaagtttggttcatttgcagttaatacgctgtgtgccggcatgcctactgagttgggct

SEQ ID NO: 256136 - DNA, 385 bp, Glycine max
ggtcgagaaacggcgcactccgtctgttcctcaccgtcaccggcgcgcgcaccctctgttccagcgattcctaattaagttgggaaataaaaaagacttcaaatttcccagatggctgcagcctttgcttccagatgcgcgcgggtgggccgttctctgtctggtggattaaccaacagttcccctggtttatttacctcatcacatggcatgagatgcaacaatttgttttctcagcaacaacgtaccttcatggaagtgaggactgttctcaaggttgtcgataactcaggtgctaaaaaggggatgtgcatacaagcattgacaagggaagaaaggggcaagattacgtgacacaataatagcatctgtgaaggaagcacat

SEQ ID NO: 256137 - DNA, 404 bp, Glycine max
gacacaactaactaagaaagtcttccatagccccccaaaaatgaagagcaccatcttctttgctctctttctcttttgtgccttcaccacctcatacctaccttcagccatcgctgatttcgtgctcgataatgaaggtaaccctcttgaaaatggtggcacatattatatcttgtcagacataacagcatttggtggaataagagcagccccaacgggaaatgaaagatgccctctcactgtggtgcaatctcgcaatgagctcgacaaagggattggaacaatcatctcgtccgcatatcgaatccgttttatcgccgaaggccatcctttgagccttaagttcgattcatttgcagttataatgctgtgtgttggaattcctaacgattggtctgttgtgg

SEQ ID NO: 256138 - DNA, 386 bp, Glycine max
gacagcaaaaacaattaataaagatgagtttgaagaacaacatggtggtgctaaaggtgtgtttgttgcttcttttccttgtgggggttacagctgcacgcatggaactgagcttcttcaaaagtgatcagtcatcaagttatgatgatgatgagtattcaaaaccatgctgtgatctctgcatgtgcacacgctcaatgcctcctcaatgcagctgtgaagatattaggctgaattcatgccactcagattgtaagagctgtatgtgcacacgctcacagccaggacagtgtcgttgtcttgacaccaacgacttctgctacaaaccttgcaagtccagagatgactagaaaaactaatagctctctcaaattgaccaaacccct

SEQ ID NO: 256139 - DNA, 258 bp, Glycine max
gagactctgtgggattcatgcaatggggtagtaaaatcttccatcatcccccatgagtgtcgtccaccatcttctctgctctctttctcatttgtgccttcaccacctcatacctagcttcagccatctctgatttcgtgctcgataatgacagtaaccctcttgaaaatggtggcacatattatatcatgtcagacataacagcatttggtggactaacaccagccccaacgggtaatgatagattccctctcactg

SEQ ID NO: 256140 - DNA, 421 bp, Glycine max
  unsure (1)..(421): unsure at all n locations
gactttgagttcgaactaaacaattcaattcaatctgcctcgatcatggagaggaaaacatttgggtttttgttcttgctcctccttgtctgagcttctgatgtgacggtgaagagagcagaggcgaaagattgcttgacaaggaggcacgggttccagggtagatgcttattcgacaggcaatgtgcacatgtgtgcaggagcgatggtttcatcggtggtcagtgccgaggccctcttcgcaaatgcttttgcagcaggccatgttgatcgaaattactactgccaaagagggcatgaaataaacaaacaaacaaataaataaatagctctaaccgacacatatgtacgtagtgtccgggttctagctagctaggtaagtacgtgtgtcntttgttatcgatcctagtttggtggagca

SEQ ID NO: 256141 - DNA, 290 bp, Glycine max
tcacgcatcagtaaagcttccatactacatcatagggcattcatacatgtcacctaaattctcttcactggccctccttttataacgtccatcatcgttcattgctctcttgctcttttgcgggttcggcatctgagacataccttcatcgatagctggcttcatactcaataagcatgcgtagcttcttcttcctggtggttacacttacttcatgtcaaatcatacaccatttgtatggaataatgaagccccaacggtaaatgagttatgcctctcactgtggtgca

SEQ ID NO: 256142 - DNA, 368 bp, Glycine max; identical to SEQ ID NO: 255421

SEQ ID NO: 256143 - DNA, 345 bp, Glycine max
gatgtgttaacaatcgtgaagttttttctttgagaagcaaaagatcttagtgcaagtaattaacatggaatctcagcaagcaaaccgtgaagaacttcatgagagggcaaggtaaggtgaaactgtggttcctggtggaaatggcgggaagagtcttgaggctcaagaacatcttgctgaaggaaggaaccgtggagggcagacgaggaaggagcagatggggagagaagggtaccaagagatgggacgcaaaggaggcctcagcgccatggacaagtctggtgtagagcgtgctgaagaggaacgcatagacatcgatgagtctaagtttaagaataaataaag

SEQ ID NO: 256144 - DNA, 233 bp, Glycine max
gacagcaaaaacaattaataaagatgagtttgaagaacaacatggtggtgctaaaggtgtgtttgttgcttcttttccttgtgggggttagagctgcacgcatggaactgagcttcttcagaagtgatcagtcagcaggtgaggagcaggagtacgcaaaaccatgcggtgatctctgcatgtcgagacgctcaatgccgcctcaatgcggctgtgaagatattaggctgaat

SEQ ID NO: 256145 - DNA, 239 bp, Glycine max
gataccaaaaacaaaacacaagccaagtgaaagtgagaaaaaataaaaatcaaagagcataatgtcagggatcattcacaagattggggagacccttcatgtgggagggcagaagaaggaggaggagcataacggtgagcacgatgctggagaatacaaaggggagcaccatggtgaacacagtagtgagtacaaacgagagcatcatggtgaacacaaagctggagagtaccatggtg

SEQ ID NO: 256146 - DNA, 298 bp, Glycine max
gacacttactagtagtaagcatggagtcctcaaagatctatgcttacctcttcctctgcatgatctttctctcttccgccactcggattctcggttgtggctactgtggcaaaccccccagaaagcacaagcgtggtaagaacaccagagacacccaaaacacccgttgttaggccaccagtcaccatccctcgcattagtgttcctcccgttggtcttccaccaatagtgcagcccccaggtattctcactccagttccaagtattaggccaccaaccactccagggaacgggagga

SEQ ID NO: 256147 - DNA, 289 bp, Glycine max
ggcgtcaatgtggacacgtgaggcgcattttagtaacagtccacaagaccacgtactatatatatacgcgcatgggggcattctctttggcgtgcagttcaaagcgaaaagagattcgaatccatggaacggaaaggaaagttggagaagagaagaatggccgaagagggacatgtgagtggtgtccacagcgtggaggagtgggaggaacatctcaagaatggacaagagtccatgaaattgagtgtggtggattttactgcttcttggtgcggcacatgccgtttca

SEQ ID NO: 256148 - DNA, 344 bp, Glycine max
gcactcactcatacaatagagaccagcttttgcttctttgtgaacatggggatgaggaaatcatgtggcttcttcttcttgctcctcctccttgtctttgcttcccaggtggtggtgcagacggagggaagagtgtgtgagtcacaaagccacgggttccatggtttgtgtaatagagaccacaactgtgctttggtctgcaggaacgaaggtttctccggtgggaggtgcaaaggcttccgccggcgctgcttttgcaccaggatttgttgagatctcatcagacactactcttgccatgcaaattaataaatcatagctaggccaaataaattgcatctact

SEQ ID NO: 256149 - DNA, 307 bp, Glycine max
acgcatccgacacgcgtccgtacgaagacgacagaaggggactcactcatacaatagagaccagcttttgcttctttgtgaacatggacatgaggaaatcatgtggcttcttcttcgtgctcctcctccttgtcattgcttcccaggtggtggtgcagacggacggaagagtgtgtgagtcacagatccacgggttccatggtttgtgtaagagagaccatacctgtgctttggtctgcaggaacgaatgtttctccggtggcaggtgcaaaggcttccgtcgccgctgagtttgcaccaggatttg

SEQ ID NO: 256150 - DNA, 332 bp, Glycine max
ggagacattgttatgaggaaagtttttgtcactgaccaggacagaattgcaggagtaaactcctttcacgacacaaacaacgtacgtggtgtggcacgcgtaatggttgcttgtcaaaacagtggtatatcgatggacatctacaatatgtgtcacaagtacctaatggatacgaaacattttggagcaccattagcagctttccaaatcatccagcataaacttgttcagatgcctggtaatattcactctacgatacttgttggttgacgcctctgcaaattgtctgacaatggtaaaactacaccagttcaatctagcttgcaaaactc

SEQ ID NO: 256151 - DNA, 395 bp, Glycine max
gatcaagaaccagttcaatatcctagtacaccgtattaaagaatttaagatatactatgatgagagcgcggttcccattactgttgcggggagttgttttcctggcatcagtttctgtcgcagttggcattgcgtattgggaaaagcagaaccccagtcacaacaagtgcctccgaagttgcaatagcgagaaagactcctacaggaaccaagcatgccacgctcgttgcaacctccttaaggtggaggaagaagaagaatgcgaagaatgtcaaattccacgaccacgatcacaacacccggagagggaacgtcagcaacacggtgagaatgaggaagacgaacgtgagcaaccacgtccattcccattcccacgcccaagccaatctcatcaa

SEQ ID NO: 256152 - DNA, 176 bp, Glycine max
gcttcacagcaaaaacagcaagcaaagttgcgtttgaagattaccatggttgtgctaaaagtttctttgatgcgtcttatccttgtgggggttcaagctgaacttatgaaattaaacgtcgacatgactcatcagacgtcaagttataatgatgggaagtaatcacttgcatgctg

SEQ ID NO: 256153 - DNA, 342 bp, Glycine max
gacaacacaacacaaacacacagagttagaggagaaatcatcatggcatcagcagcatctgggtttgtgttgtcacttaatgttgcagctgccaccacaaactcaagggtggtcatgttcaacacaaagaacaacgcttctaggcttgttgtaagggcttcagatgagcctgcagcggcggcacccgccaccgccacacccccagctgaagctgaagctaaaccaaagccaccacctattggccccaagagaggtgctaaggtgaagattcttaggaaggaatcctactggtacaaaggcactggttcagtgggtgctgttgatcaggaccccaacactcgc

SEQ ID NO: 256154 - DNA, 300 bp, Glycine max
gatagcagcatcatacaaagcattgaattcaaaaactaagttcatttcttgtgctttgctttattcctcaaaaccaaacatgtcgaacacatgcggcaactgtgactgcgctgacaagactaactgcaccaagggaaacagctatggtgttagagtagagactgagaagagctacatcgagactgttgacatggatgttccagcagctgagcatgatgggaagtgcaagtgtggcactaactgcacttgcaccgactgcacttgtggccattaaggaatatgtatgaaaatgtaattgcc

SEQ ID NO: 256155 - DNA, 195 bp, Glycine max
gacagcaaatacaattaataatgattagtttgactgaaacattcgcgacgctaaacgagtgtttgttgcctcttttccttgtgggggttacagctgcactcatgtgactgagcttcttcaatggtgatcagtcatcaagttatgatgatgatgagtattcacaaccatgctgtgatctctgcatgtgcacaccac

SEQ ID NO: 256156 - DNA, 372 bp, Glycine max
gacagcaaaaacaattaataaagatgagtttgaagaacaacatggtggtgctaaaggtgtgtttgttgcttcttttccttgtgggggttacagctgcacgcatggaactgagcttcttcaaaagtgatcagtcatcaagttatgatgatgatgagtattcaaaaccatgctgtgatctctgcatgtgcacacgctcaatgcctcctcaatgcagctgtgaagatattaggccgaattcatgccactcagattgtaagagctgtatgtgcacacgctcacagccaggacagtgtcgttggcttgacagcaacgacttctgctacaaaccttgcaagtccagagatgactaaaaaaactaatagctctctcaaa

SEQ ID NO: 256157 - DNA, 353 bp, Glycine max
attcacacaactaactaagaaagtcttccatagccccccaaaaatgaagagcaccatcttctttgctctctttctcttttgtgccttcagcacctcatacctaccttcagccatcgctgatttcgtgctcgataatgaaggtaaccctcttgaaaatggtggcacatattagatcttgtcagacataacagcagttggtggaataagagcagccccaacgggaaatgaaagatggcctctcactgtggtgcaatctcgcaatgggctcgacaaagggattgggagaagcatcgcgtcgccatatcgaatccgttttatcgccgaaggcatcctttgagccttaagttcgattc

SEQ ID NO: 256158 - DNA, 209 bp, Glycine max
gtcacaacagatgagaaagaacacaagcaagtttggtgggaaagtgaacgacaaagaggcgtaccccatggggggtgtatggccaagtccattatcaagcatgtttctcctaaatgcgtctctagacaccatgatccctcctcgtgttccagtcaggagcataggaccatatgtcgaccttgcatatctcaccatcacatagaagcaca

SEQ ID NO: 256159 - DNA, 323 bp, Glycine max
gagattttggttggaggaaaatacccaccgaaccatggctgcaaccattcctttctctctgcttaggaactgcgcgccattgaaactagcaacacctttcgctcgcaaagcctccatctttaatcttcttctccctcttcaaccacgcaggttggtctctagtacctgtgctgtgaacaatgaagaggctacagcaaaaacagcagctgttaattttgatagtgaagctccaacaatatttgataagatcataaataaggaaatcccttcgagcattgtatatgaggatgaaaaggttcttgcatttcgtgacattaatccac

SEQ ID NO: 256160 - DNA, 292 bp, Glycine max
  unsure (1)..(292): unsure at all n locations
gacagctaaaacaattaataaagatgagtttgaggaacaacatggtggtgctaaaggtgtgtttggtgcttcttttccttgagggggttacagctgcacgcatggaactgagctttttcaaaagtgatcagtcatcaagttatgatgatgatgagtattcaaaaccatgctgggatcattgcatgtgcacacgctcaatgcctccgtaatgcagcttgtaagatattaagctgaattgatgccactcatattgtaagagctgtatgtgcacacgcttacagncaggacagtg

SEQ ID NO: 256161 - DNA, 312 bp, Glycine max
gacagcaaaaacaattaataaagatgagtttgaagaacaacatggtggtgctaaaagtgtgtttgttgcttcttttccttgtgggggttacagctgcacgcatggaactgagcttcttcaaaagtgatcagtcatcaagttatgatgatgatgagtattcaaaaccatgctgtgatctctgcatgtgcacacgctcaatgccttctcaatgcagctgtgaagatattaggctgaattcatgccactcagattgtaagagctgtatgtgcacacgcttacagccaggacagtgtcggtgtcttgacaccaacg

SEQ ID NO: 256162 - DNA, 293 bp, Glycine max
gacagcaaaaacaattaataaagatgagtttgaagaacaacatggtggtgctaaaggtgtgtttggtgcttcttttccttgggggggttacagcttcacgcatggaactgaacttcttcaaaagtgatcagtcatcaagttatgatgatgatgagtattcaaaaccatgctgtgatctctgcatgtacacacgctcaatgccttctcaatgcagctgtgaagatattaggctgaattcatgccactcagattgtaagagctgtatgtgcacacgctcacagacaggacagtgt

SEQ ID NO: 256163 - DNA, 369 bp, Glycine max
gactttgagttcgaactaaacaattcaattcaatctgcctcgatcatggagaggaaaacatttgggtttttgttcttgctcctccttgtcttagcttctgatgtgacggtgaagagagcagaggcgaaagattgcttgacaaggaggcacgggttccagggtagatgcttattcgacaggcaatgtgcacatgtgtgcaggagcgatggtttcatcggtggtcagtgccgaggccctcttcgcaaatgcttttgcagcatgccatgttgatcgaaattactactgccaaagaggccatgaaataaacaaacatacaaataaataaatagctctaaccgacacatatgtacgtaggtgtcgggttctagc

SEQ ID NO: 256164 - DNA, 324 bp, Glycine max
attcacaattggaaataaaccttttgtcctcacaccagagcaggatattctaaaaactggagaaggcattacagaagtctgccttagtgggtttattgcttctgatgttcctcctccaaagggtccattgtggattcttggcgatgttttcatgagggcatatcacaccgtctttgactactgaaatctacaagttggttttgccgaaactgtctaattaggctttctggaggattttctttgaaaaattgttaagcgtgttgtaaataagctgctataacaattgtagctgggattcactctatggaatcacgaatggattta

SEQ ID NO: 256165 - DNA, 362 bp, Glycine max
  unsure (1)..(362): unsure at all n locations
ggcacaagtgagtttgttgatcgagataactagaaacagtgtgatgaaaatgaaggtccttggtttcttcgttgctacaattttggtagcatggcaatgccatgcgtacgatatgttccctctccgaatgaacactggctatggtgcccgtactccggaggtgaaatgcgcaagttggaggcttgctgtggaagcacacaacatctttggctttgagaccattcctgaagagtgcgttgaagcaacaaaggaatacatncatggcgaacaatatagatcagactccaaaacagttaaccaacaagcttacttttatgccagagacctcgaagtccatgccaaggacacatttgtgttcagta

SEQ ID NO: 256166 - DNA, 358 bp, Glycine max
  unsure (1)..(358): unsure at all n locations
gacagcaaaaacaattaataaagatgagtttgaagaacaacatggtggtgctaaaggtgtgtttgttgcttcttttccttgtgggggttacagctgcacgcatggaactgagcttcttcaaaagtgatcagtcatcaagttatgatgatgatgagtattcaaaaccatgctgtgatctctgcatgtgcacacgctcaatgcctnctcaatgcagctgtgaagatattaggctgaattcatgccactcagattgtaagagctgtatgtgcacacgctcacagtcaggacagtgtcggtgtcttgacaccaacgacttctgctacaaaccttgcaagtncagagatgactagaaaaacta

SEQ ID NO: 256167 - DNA, 314 bp, Glycine max
gacagcaaaaacaattaataaagatgagtttgaagaacaacatggtggtgctaaaggtgtgtttgttgcttcttttccttgtgggggttacagctgcacgcatggaactgagcttcttcaaaagtgatcagtcatcaagttatgatgatgatgagtattcaaaaccatgctgtgatctctgcatgtgcacacgctcaatgccttctcaatgcagctgtgaagatattaggctgaattcatgccactcagattgtaagagctgtatgtgcacacgctcacagtcaggacagtgtcgttgtcttgacaccaacgac

SEQ ID NO: 256168 - DNA, 145 bp, Glycine max
gctggaagaggagtgaagcggcagagggaggagcggcattaaaaatgcagatcttcgtgaaaaccctaacggggaagaccataaccctcgaggtcgaaagcagcgacaccattgacaatgtcaaggctaagattcaagacaagga

SEQ ID NO: 256169 - DNA, 223 bp, Glycine max
ggaaacagagagtgatttcagtgagtgatcggtgttcacttgatctcatcataatcgtcagcgtcaattgaagaagatgccgatcagaaacatcgccgtcggaaggcctgaagaggcgactcaccccgacacgttgaaggcggctttggctgagttcatctcaaccttcatcttcgtgttcgccggctcaagctccggcatcgcctacaacaagctcaccgac

SEQ ID NO: 256170 - DNA, 358 bp, Glycine max
ggcttattcacgcaactaaataagaaatgaagagtactatcttctttgctctctttctagtttgtgccttcaccatctcatacctgccttcagccaccgctcagttcgtgctcgacactgatgatgatcctcttcaaaacggtggcacatactgtatgttgccagttatgagaggaaagggcggtggaatagaagtagattcaactggaaaagaaatatgccctctcactgttgtgcaatcacccaatgagctcgataaggggattggactagtctttacatctccattacatgccctttttatcgccgaaggctatcctttgagcattaagtttggttcatttgcagttataacgct

SEQ ID NO: 256171 - DNA, 343 bp, Glycine max
ggcgctaacaacaactaacgtgcaagttccaaggcggagaaaacaataatggccaccaacgaggagagggatatggagaacaagaagagtgaggaagaactgaagcatctcgggtttgtgaagattgcggcaatgaaagccttagtgtgtgtgtcgaatctctacggcttcgcaaagcaaaactcgggacttttgagatctgctgttggaaccgtggaagacactgtaaccaccgttctgggtcccgtctaccacaaattcaacgctgttcccaaccacatcctcctttttgtcgacaacaaggtggatgaagctgctcacaaattcgatgagcatgcacctt

SEQ ID NO: 256172 - DNA, 219 bp, Glycine max
gacacagctaactaagaaagtgtttcataggctcccaaaaatgaggagcaccatcttctttgctctcgttctcttttgtgccttcagcaccttatacctacctttagccatcgctgatttcgagctcgatcatgaacgtaaccctccttgaaatggtggcacatattatatcgtggcagacataacatcatttggtggaataagagcagcccccacggg

SEQ ID NO: 256173 - DNA, 165 bp, Glycine max
  unsure (1)..(165): unsure at all n locations
ggcggcacaaagcattcactgtgtcggaaaaagaagaagagaggaaagatgagcgacggaggaaaacgacaaggtggaagagcgttgccgccgccgccaagaggctctccgccttctaccccctctcgccctcgcctcgaacccgtcgatcgcgaaaagacatgn

SEQ ID NO: 256174 - DNA, 333 bp, Glycine max
gatgcaactgaataattaagaaaagccatttccatagcagcctaagaaaatgaagagcactagcttggtcgctatctttctactttgcgccttcacctcatacctaccttgcgccaccgcccaggacgtgctcgacgtggatggcgatccgattcggaacggtttcatatactacgttttgccggcaataagaggaaacggtggcggaatagaacgagccgcactcgggaaagacacttgccctatcactgtagtgcaatctcccaatccaaactctaaggggttagaaattaagtttgaatctgcataccccgcctattacataaacgaaac

SEQ ID NO: 256175 - DNA, 360 bp, Glycine max
gacagcaaaaacaattaataaagatgagtttgaagaacaacatggtggtgctaaaggtgtgtttgttgcttcttttccttgtgggggttacagctgcacgcatggaactgagcttcttcaaaagtgatcagtcatcaagttatgatgatgatgagtatccaaaaccatgctgtgatctctgcatgtgcacacgctcaatgccttctcaatgcagctgtgaagatattaggctgaattcatgccactcagattgtaagagctgtatgtgcacacgctcacagccaggacagtgtcgttgtcttgacaccaacgacttctgctacaaaccttgcaagtccagagatgactagaaaaactaat

SEQ ID NO: 256176 - DNA, 314 bp, Glycine max
gacagcaaaaacaattaataaagatgagtttgaagaacaacatggtggtgctaaaggtgtgtttgttgcttcttttccttgtgggggttacagctgcacgcatggaactgagcttcttcaaaagtgatcagtcatcaagttatgatgatgatgagtattcaaaaccatgctgtgatctctgcatgtgcacacgctcaatgccttctcaatgcagctgtgaagatattaggctgaattcatgccactcagattgtaagagctgtatgtgcacacgctcacagccaggacagtgtcgttgtcttgacaccaacgac

SEQ ID NO: 256177 - DNA, 377 bp, Glycine max
  unsure (1)..(377): unsure at all n locations
gacagcacaaacaattaataaagatgagtttgaagaacaacatggtggtgctaaaggtgtgtttgttgcttcttttccttgtgggggttacagctgcacgcatggaactgagcttcttcaaaagtgatcagtcatcaagttatgatgatgatgagtattcaaaaccatgctgtgatctctgcatgtgcacacgctcaatgcctcctcaatgcagctgtgaagatattaggctgaattcatgccactcagattgtaagagctgtatgtgcacacgctcacagncaggacagtgtcgttgtcttgacaccaacgacttctgctacaagccttgcaagtncagagatgactagaaaaactaatagctctctcaaatggac

SEQ ID NO: 256178 - DNA, 254 bp, Glycine max
ttgttacagcttacacaattaataaagatgagtttgaagaactgcatattagttctaagagcgtcgtgtgttgctctcatttacttgtaggggctacatgctgctcgcatggaactcagcttctctaatagtgatcagtcattataatatgattatgatgactattcataaccatgctgagaactctgaatgatcacacgctcaatgcctgatcacatgctctatgaatattttatgcatgatattcatgatat

SEQ ID NO: 256179 - DNA, 372 bp, Glycine max
gacagcaaaaacaattaataaagatgagtttgaagaacaacatggtggtgctaaaggtgtgtttgttgcttcttttccttgtgggggttacagctgcacgcatggaactgagcttcttcaaaagtgatcagccatcaagttatgatgatgatgagtattcaaaaccatgctgtgatctctgcatgtgcacacgctcaatgccttctcaatgcagctgtgaagatattaggctgaattcatgccactcagattgtaagagctgtatgtgcacacgctcacagccaggacagtgtcgttgtcttgacaccaacgacttctgctacaaaccttgcaagtccagagatgactagaaaaactaatagctctctcaaa

SEQ ID NO: 256180 - DNA, 130 bp, Glycine max
gccagcaaaaccaattaataaagatgggtttgaagaacaccttggtggtgctaaaggtgtgttggtggtttcttttcctggggggggttacagctgcacccatggaactgacctttttcaaaagtgatca

SEQ ID NO: 256181 - DNA, 356 bp, Glycine max
  unsure (1)..(356): unsure at all n locations
gacagcaaaaacaatgaataaagatgagtttgaagaacaacatggtggtgctaaaggtgtgtttgttgcttcttttccttgtgggggttacagctgcacgcatggaactgagcttcttcaaaagtgatcagtcatcaagttatgatgatgatgagtattcaaaaccatgctgtgatctctgcatgtgcacacgctcaatgcctnctcaatgcagctgtgaagatattaggctgaattcatgccactcagattgtaagagctgtatgtgcacacgctcacagccaggacagtgtcgttgtcttgacaccaacgacttctgctacaaaccttgcaagtccagagatgactagaaaaac

SEQ ID NO: 256182 - DNA, 309 bp, Glycine max
gattcacacaactaactgagaaaggcttccatatccccccaaaaatgaagagcaccatcttctttgctctctttctcttttgtgccttcaccacctcatacctaccttcagccatcgctgatttcgtgctcgataatgaaggtaaccctcttgaaaatggtggcacatattatatcttgtcagacataacagcatttggtggaataagagcagccccaacgggaaatgaaagatgccctctcactgtggtgcaatctcgcaatgagctcgacaaagggattggaacaatcatctcgtccccatatcgaa

SEQ ID NO: 256183 - DNA, 354 bp, Glycine max
gattgtaaagcattcttcgcctttctctctcttctttttactctctctctgtctctctctacgctttctcgttcgagatccctcaagggatccactaactgaaggagaaatggggttgacattcaccaagcttttcagccggcttttcgccaagaaggaaatgcgaattctgatggtgggtctcgatgcagctggtaagaccaccatcctgtacaagctcaaacttggagagatcgttaccacaattcccaccattgggttcaatgtggagactgtggaatacaagaacattagtttcactgtctgggatgttggtggccaggacaagattcgtcccttgtggaggcactactt

SEQ ID NO: 256184 - DNA, 410 bp, Glycine max
gaggcttcagttcagccatgagaactcacactcacacttacacgtatactattttctctctaattcttctctccttatttcttcgaacccattccgaggttataacgttaacctctgatacatttaatgataagatcaaggagaaagacactgcatggtttgtgaaattctgcgttccctggtgcaagcattgtaagaatcttggttcattgtgggatgatttggggaaagcaatggaaggagaagatgaaatagaggttggagaagtcgattgcggcatggacaaagcagtatgttccaaagttgatattcactcctatcctacctttaaggttttctatgatggtgaagaagtagccagataccaaggtacaagagatgttgaatcaatgaaaacctttgttttggaa

SEQ ID NO: 256185 - DNA, 311 bp, Glycine max
  unsure (1)..(311): unsure at all n locations
gacagcaaaaacaattaataaagataagtttgaagaacaacatggtggtgctaaaggtgtgtttgttgcttcttttccttgtgggggttacagctgcacgcatggaactgagcttcttcaaaagtgatcagtcatcaagttatgatgatgatgagtattcaaaaccatgctgcgatctctgcatgtgcacacgctcaatgcctcctcaatgtagctgtgaagatattaggctgaattcatgccactcagattgtaagagctgtatgtgcacacgctcacagncaggacagtgtcgttgtcttgacaccaac

SEQ ID NO: 256186 - DNA, 315 bp, Glycine max
ggccgaaaagtagtaccaagatggcttcagttgtgtgtctcctctttggcttccatctcattgttatcatgtcaagttccttacccgcaactagtgaagtgtttgcaaaacagtatccatccacagaacccgtggaagaaaaactcacccaactccacttctatttccataacaacataacgggggaacacccaactgctatgaaaactgttttgcctcctaaggggtccattcatggttttggggctacttacacgatggatgaccctctaactgaaggaccaagtccaacttcaaagcttgtgggaagatctc

SEQ ID NO: 256187 - DNA, 404 bp, Glycine max
  unsure (1)..(404): unsure at all n locations
gactttgagttcgaactaaacaattcaattcaatctgcctcgatcatggagaggaaaacatttgggtttttgttcttgctcctccttgtcttagcttctgatgtgacggtgaagagagcagaggcgaaagattgcttgacaaggaggcacgggttccagggtagatgcttattcgacaggcaatgtgcacatgtgtgcaggagcgatggtttcatcggtggtcagtgccgaggccctcttcgcaaatgcctttgcagcangccatgttgatcgaaattactactgccaaagaggccatgaaataaacaaacatacaaataaataaatagctctaaccgacacatatgtacgtagtgtcggggttctagttagctaggtaggtacgtgtgtcttttggtatcgat

SEQ ID NO: 256188 - DNA, 424 bp, Glycine max
  unsure (1)..(424): unsure at all n locations
gacagcaaaaacaattaataaagatgagtttgaagaacaacatggtggtgctaaaggtgtgtttgttgcttcttttccttgtgggggttacagctgcacgcatggaactgagcttcttcaaaagtgatcagtcatcaagttatgatgatgatgagtattcaaaaccatgctgtgatctctgcatgtgcacacgctcaatgcctnctcaatgcagctgtgaagatattaagctgaattcatgccactcaaaatggaagaactttattttcacacgcttacaagcaggacagtgtcgttgtcttgacaccaacgacttctgctacaaaccttgcaagttcagagatgactagaaaaactaatagctctctcaaatgggcgaagcccctttaggctttgnttggtatgttaggggagacaaattaaa

SEQ ID NO: 256189 - DNA, 328 bp, Glycine max
gacagcaaaaacaattaataaagatgagtttgaagaacaacatggtggtgctaaaggtgtgtttgttgcttctttcccttgtgggggttacagctgcacgcatggaactgagcttcttcaaaagtgatcagtcatcaagttatgatgatgatgagtattcaaaaccatgctgtgatctctgcatgtgcacacgctcaatgcctcctcaatgcagctgtgaagatattaggctgaattcatgccactcagattgtaagagctgtatgtgcacacgctcacagccaggacagtgtcgttgtcttgacaccaacgacttctgctacaaacc

SEQ ID NO: 256190 - DNA, 314 bp, Glycine max
gacagcaaaaacaattaataaagatgagtttgaagaacaacatggtggtgctaaaggtgtgtttgttgcttcttttccttgtgggggttacagctgcacgcatggaactgagcttcttcaaaagtgatcagtcatcaagttatgatgatgatgagtattcaaaaccatgctgtgatctctgcatgtgcacacgctcaatgcctcctcaatgcagctgtgaagatattaggctgaattcatgccactcagattgtaagagctgtatgtgcacacgctcacagccaggacagtgtcgctgtcttgacaccaacgac

SEQ ID NO: 256191 - DNA, 358 bp, Glycine max
  unsure (1)..(358): unsure at all n locations
ggattcacacaactaactgaaaaagtgttccatagccccccaaaaatgaagagcaccatcttctttgctctctttctcttttgggccttcaccaccttatacctaccttcaaccatcgctgatttcgggctcgattattaaagcaaccctcttgaaaatggttgcacaatttatatcttgtcagacataacaacatttgggtggaataagagcagccccaacgggaaattgaaagatgccctctcactgtggtgcaatctcgcaatgagctcgacanagggattggaacaatcatctcgtccccatatcgaatccgttttatcgccgaaggccatcctttgagccttaagttcgattc

SEQ ID NO: 256192 - DNA, 337 bp, Glycine max
  unsure (1)..(337): unsure at all n locations
gatgcaactgaataattaagaaaagcgatttccatagcagcctaagaaaatgaagagcactagcttgttcgctatctttctactttgcgccttcacctcatacctaccttccgccaccgnccaggacgtgctcgacgtggatggcgatccgattcggaacggtttcatatactacgttttgccggcaataagaggaaacggtggcggaatagaacgagccgcactcgggaaagacacttgccctatcactgtagtacaatctcccaatccaaactctaaggggttagaaattaagtttgaatctgcataccccgcctattacataaacgaaacccta

SEQ ID NO: 256193 - DNA, 347 bp, Glycine max
gccataatcccaatctcagtgttctggcttgtccctcaatacagccttcatggaatggctgaggcctttatgtcaattggacacttggagtttttctatgaccaggcccctgagagtatgaggagcactgccatggcattattttggactgctatcgctgctgggaactatgtgagtaccattatggttactttggtccacaagttcagtgctgggtctaatgggtcaaattggctccctgacaacaacctcaacaaagggaagttggagtacttttactggcttatcaccatattgcagtttctcaatcttatttactacttggtttgtgccaaattgtacaccta

SEQ ID NO: 256194 - DNA, 275 bp, Glycine max
  unsure (1)..(275): unsure at all n locations
gacagcaaaaacaattaataaagatgagtttgaagaacaacatggtggtgctaaaggtgtgtttgttgcttcttttccttgtgggggttacagctgcacgcatggaactgagcttcttcaaaagtgatcagtcatcaagttatgatgatgatgagtattcaaaaccatgctgtgatctctgcatgtgcacacgctcaatgcctnctcaatgcagctgtgaagatattaggctgaattcatgccactcagattgtaagagctgtatgtgcacacgc

SEQ ID NO: 256195 - DNA, 373 bp, Glycine max
aagacgacagaaggggataacaatccctattaaaatcttctaaaattaaattaccatatatagtcacattggctttacactttgtgaggtctaaaatgttgtccatttttcacaaggggtttgctcacccacctgaagagcttaaaagccctgcatctaacagtggctccaacaagcctaagattcctgaggaaactctaagagaatttctttctcatcattcccataacactttttctctgagttttgatcactttgctgttctagcttatactcgtcctgatccacctttctttgttcatcaaaggttgttttgtgggattgatgacatatactgtatctttttggggagcttgaacaatttgtgctcact

SEQ ID NO: 256196 - DNA, 164 bp, Glycine max
gatcatgaaccagatcattatcctagtacaccgtattaaagaatttaagatatactatgatgagagcgcggtttccatgactgatgctgagagctggtttactggcatcagtatctgtctcatatggcatcgcatattgagataagtagaaccccattcacaac

SEQ ID NO: 256197 - DNA, 314 bp, Glycine max; identical to SEQ ID NO: 256176

SEQ ID NO: 256198 - DNA, 363 bp, Glycine max
  unsure (1)..(363): unsure at all n locations
gaaagagaagcattagtaaaagcaagaagaactagtctaagcagaaatggcctcttcagtgatggcatctgtggccctcaaacctgcccctttcactgttgagaagtcctcagttagaggccttccctccctctcaaggaactcctcttcattcagagttgtggccagtggtggcaagaagatcaagactgacaagccttatggaattaatggtggcatggctttgagggaaggagttgatgcatctggcaggaaaggaaagggaaagggcgtttaccagtttgtagacaaatacggtgctaatgtcgatggttacagtcctatctacgacaccaaggactggtctncaaaccgtgatgtcta

SEQ ID NO: 256199 - DNA, 313 bp, Glycine max
gattcacgcaactaactaagaaagtcttccatagccccccaaaaatgaagagcaccatcttctttgctctctttctcttttgtgccttcaccacctcatacctaccttcagccatcgctgatttcgtgctcgataatgaaagtaaccctcttgaaaatggtggcacatattatatcttggcagacataacaacatttggtggaataagagcaagcccaacgggaaaatgaaagatccccctctcactgtgtgcaatctcgcaatgagctcgaccaagggattggaccatcatttcgtccccatatcgaatccg

SEQ ID NO: 256200 - DNA, 363 bp, Glycine max
  unsure (1)..(363): unsure at all n locations
gacagcaaaaacaattaataaagatgagtttgaagaacaacatggtggtgctaaaggtgtgtttgttgcttcttttccttgtgggggttacagctgcacgcatggaactgagcttcttcaaaagtgatcagtcatcaagttatgatgatgatgagtattcaaaaccatgctgtgatctctgcatgtgcacacgctcaatgccttctcaatgcagctgtgaagatattaggctgaattcatgccactcagattgtaagagctgtatgtgcacacgctcacagccaggacagtgtcngtgtcttgacaccaacgacctctgctacaaacctttgcagtncagagatgactagaaaaactaatagc

SEQ ID NO: 256201 - DNA, 385 bp, Glycine max
  unsure (1)..(385): unsure at all n locations
gacagcaaaaacaattaataaagatgagtttgaagaacaacatggtggtgctaaaggtgtgtttgttgcttcttttccttgtgggggtaacagctgcacgcatggaactgagcttcttcaaaagtgatcagtcatcaagttatgatgatgatgagtattcaaaaccatgctgtgatctctgcatgtgcacacgctcaatgcctnctcaatgcagctgtgaagatattaggctgaattcatgccactcagattgtaagagctgtatgtgcacacgctcacagncaggacagtgtcgttgtcttgacaccaacgacttctgctacaaaccttgcaagtccagagatgactaggaaaactaatggctctctcaaatggacgaagcccc

SEQ ID NO: 256202 - DNA, 317 bp, Glycine max
gattgtggaaatctcgaaggaacagattcgggcactgagcaaacgtgccaaatctagttcaaggaaaaccatttcttctgaagataaaccttttaacttgagaagccgcgaccccatctactccaacaagcttggcaagttctttgagatcaccccagagaaaaacccccagcttcgggacttggatatcttcctcagtattgtggatatgaacgagggagctcttcttctaccacacttcaattcaaaggcgatagtgatactggtaattaatgaaggagatgcaaacattgaactttgttgcctaaaagaacaac

SEQ ID NO: 256203 - DNA, 308 bp, Glycine max
accactggcgcagataccctggggctacggttctcttgtattgtctgtcgtgagtcaccatggtgagggatagtgtgctgaacgatgctctgaagagcatgtacaatgctgagaaaaggggaaagcgccaagtcatgattaggccatcctccaaagtcattatcaaattccttttggtgatgcaaaagcacggatacatcggagagtttgagtatgttgatgaccacagggctggtaaaatcgtggttgaattgaacggtagactgaacatgtgtggcgttattagtccccgttttgatgtgggcgtc

SEQ ID NO: 256204 - DNA, 363 bp, Glycine max
  unsure (1)..(363): unsure at all n locations
gacagcaaaaacaattaataaagatgagtttgaagaacaacatggtggtgctaaaggtgtgtttgttgcttcttttccttgtgggggttacagctgcacgcatggaactgagcttcttcaaaagtgatcagtcatcaagttatgatgatgatgagtattcaaaaccatgctgtgatctctgcatgtgcacacgctcaatgcctnctcaatgcagctgtgaagatattaggctgaattcatgccactcagattgtaagagccgtatgtgcatacgctcacagccaggacagtgtcgttgtcttgacaccaacgacttctgctacaaaccttgcaagtccagagatgactagaaaaactaatagc

SEQ ID NO: 256205 - DNA, 257 bp, Glycine max
tcgacagatggggatgcaactgaataatggacaaaagccatttacatagcagactgagacaatgaataccactaataaagatgagtttgaagaacaacatggtggtgctaaaggtgtgtttgtagcttcttttccttgtgggggttacagatgcacgcatggaactgagcttcttcaaaagtgatcagtcatcaagatatgatgatgatgagtattcaaaaccatgctgtgatctctgcatgtgcacactctcaatg

SEQ ID NO: 256206 - DNA, 356 bp, Glycine max
  unsure (1)..(356): unsure at all n locations
gatgcaactgaataattaagaaaagccatttccatagcagcctaagaaaatgaagagcactagcttgttcgctatctttctactttgcgccctcacctcatacctaccttccgccaccgcccaggacgtgctcgacgtggatggcgatccgattcggaacggtttcatatactacgttttgccggcaataagaagaaacggtggcggaatagaacgagccgcactcgggaaagacacttgccctatcactgtagtgcaatctnccaatccaaactctaangggttagaaattaagctngaatctgcataccccgnctattacataaacgaaaccctatttttgcaataaagttcag

SEQ ID NO: 256207 - DNA, 342 bp, Glycine max
gatcccaatcagaaaaagttagggtttgtaactttgtcttttgcttgcgaatctgaatcgaataataatcaatcaatcatcatgtcgtcggcgaagaagatcacactgaagagttcggacggcgaggctttcgaggtggacgaggcggtggcgctggagtctcagacgataaagcacatgatcgaggacgactgcgccgacagcggcatccctctgccgaacgtgacgagcaagatcctggcgaaggtgatcgagtactgcaagaagcacgtcgaggccgcgaatcccgaagacaaacccttcgaggacgatctcaaagcctgggacgccgatttcgtcaag

SEQ ID NO: 256208 - DNA, 257 bp, Glycine max; identical to SEQ ID NO: 256205

SEQ ID NO: 256209 - DNA, 190 bp, Glycine max
gagtgcaatttagctgaagcaaagcaatggctacttcaaagttgaaaacccaaaatgtggttgtatctctctccctaaccttaaccttggtactggtgctactgaccagcaaggcaaactcagcggaaactgtttctttcagctggaacaagttcgtgccgaagcaaccaaacatgatccttcaaggaga

SEQ ID NO: 256210 - DNA, 314 bp, Glycine max
  unsure (1)..(314): unsure at all n locations
gacagcaaaaacaattaataaagatgagtttgaagaataacatggtggtgctaaaggtgtgtttgttgcttcttttccttgtgggggttacagctgcacgcatggaactgagcttcttcaaaagtgatcagtcatcaagttatgatgatgatgagtattcaaaaccatgctgtgatctctgcatgtgcacacgctcaatgccttctcaatgcagctgtgaagatattangctgaattcatgccactcagattgtaagagctgtatgtgcacacgctcacagncaggacagtgttcgtgtcttgacaccaacgac

SEQ ID NO: 256211 - DNA, 367 bp, Glycine max
gaatcacaatcattcatttcattcataccgttcgcgacacgatcactattctgcgacgatggtggcacattcgagttcttggggaagggcactcgtcgcgatcttgccctacaccttctccgccatcggcatcgacggcgctatcggcgtctacgtactcggctgccgctgggggatctacatcaccggaagcatcttgatctgcgctgcaatcagggctcctcgaatcacttccaaaaatctcattaggttgtgtgtaggagtaattggaagcagctgtgcattgtctgatgccaagaactcctctctctttgtgaaaattcttgtgatcgagatctttggtagtgcgctgaggctattggagtta

SEQ ID NO: 256212 - DNA, 191 bp, Glycine max
gacagcataaacaattaataaagatgagtttgaagaacaacatggtggtgctaaaggtgtgtttgatgcttcttttccttgtgggggttacagctgcacgcatggaactgagcttatttataagtgatcagtcatcaaggtatgatgatgatgagtattcaaaaccatgctgtgatctctgcatgtgcaca

SEQ ID NO: 256213 - DNA, 173 bp, Glycine max
gacagcggaaacaattaataaagatgagtttgaagaacaacatggtggtgctaagggtgtgtatgaggcttatattactagtggggggtacagagtgaagcatggaacatagcttcttcaaaaggtgataggtagtcaaggtatgatgatgatgagtattcaaaaccatgctg

SEQ ID NO: 256214 - DNA, 256 bp, Glycine max
gattcacacaactaactgagaaagtctttcatagccccccaaaaatgaagagcaccatcttctatgctctctttctcttttgtgcctccaccacctcatacctaccttcagccatcgctgatttcgtgctcgataatgaaggtaaccctcttgaaaatggtgccacatattatatctggtcagacataacagcatttggtggaataagaccagccccaacgggaattgaaaaatgccctctcactggggcgcaatc

SEQ ID NO: 256215 - DNA, 351 bp, Glycine max
  unsure (1)..(351): unsure at all n locations
gccactttgagttcgaactaaacaattcaattcaatctgcctcgatcatggagaggaaaacatttgggtttttggtcttactcctacttgtcttagcttctgatgtgacggtgaagagagcagaggcgaaagattgcttgacaaggaagcacgggttccagggtagatgcttattcgacaggcaatgtgcacatgtgtgcaggagcgatggtttcatcggtggtcagtgccgaggccctcttcgcaaatgcttttgcagcaagccatgttgatcgaaagtactactggcaaagaggccatgaaataaacanacaaacaaataaataaatagctctaaccgacacatatgta

SEQ ID NO: 256216 - DNA, 136 bp, Glycine max
gaatctcttcacagaagaaaaaagagaagaagatgggtttgaagaacaacatggtggtgctaaaggtgtgtttggtgctacttttccttgtggggggtactactagtgccaacttgatgctgagtaagcttggcct

SEQ ID NO: 256217 - DNA, 454 bp, Glycine max
gactttgagttcgaactaaacaattcaattcaatctgcctcgatcatggagaggaaaacatttgggtttttgttcttgctcctccttgtcttagcttctgatgtgacggtgaagagagcagaggcgaaagattgcttgacaaggaggcacgggttccagggtagatgcttattcgacaggcaatgtgcacatgtgtgcaggagcgatggtttcatcggtggtcagtgccgaagccctcttcgcaaatgcttttgcagcaggccatgttgatcgaaattactactgccaaagaggccatgaaataaacaaacaaacaaataaataaatagctctaaccgacacatatgtacgtagtgtccgggttctagctagctaggtaggtacgtgtgtcttttgttatcgatcctaagttggtggaacaagtgtggcatcatgatctaagtatatatatata

SEQ ID NO: 256218 - DNA, 338 bp, Glycine max
  unsure (1)..(338): unsure at all n locations
gacaggtgtttgcaatactagcgatagctgataagagagataccaacgagaaaagaaaaaaaagaagagttgagattccctttgaagaaaagatggcatcccataggcaaagctatgaagctggtcaagctaagggccgaactgaggaaaagacgaaccagacgatgggcaatattggagagaaagctcaagctgcaaaggagaagacccaggaaatggcccaagctgcaaaagagaagacccaacaaacagtccaagctgccaaggacaagacttgcgacacnttccaagcggcaaaggagaagacccaacagaatacaggagctgctcaacaaaag

SEQ ID NO: 256219 - DNA, 374 bp, Glycine max
agacgacagatggggattcacacaactaactaagaaagtcttctatagccattcaaaaatgaagagcaccatcttctatgctctctttctcttttgtgccttcatcacctcatacctaccttcagccatcgatgatattgtgctcgataattaatgtaaccctcttgataatggtggcacatattatatcttgtcagacatatcatcattcggtggaatattttcattctcaactggaaatgaaagatgccctctcactgtggtgcaatctcgcaatgagctcgacatatttatgtaacaatcattttgttcttatatcgaatcctgtttatcgccgagggccatcctttgagccttaagttcgattcatttgc

SEQ ID NO: 256220 - DNA, 314 bp, Glycine max
gacagcataaacaatgaataaagatgagtttgaagaacaagatggtggtgctaaaggtgtgattgaagcttcttttccttgtgggggttacagctgcacgcatggaactgagcatcttcaaaagtgatcagacatcaagttatgatgatgatgagtatgcaaaaccatgctgggatctctgcatgtgcacacggctaatgccttctcaatgcagctgtgaagatattaggctgaattcatgccactcagattgtatgagctgtatgtgcacacagttacaggcaggacagtgtcgttgtcttgacaccaacgac

SEQ ID NO: 256221 - DNA, 374 bp, Glycine max
gacagcaaaaacaattaataaagatgagtttgaagaacatcatggtggtgctaaaggtgtgtttgttgcttcttttccttgtgggggttacagctgcacgcatggaactgagcttcttcaaaagtgatcagtcatcaagttgtgatgatgatgagtattcaaaaccatgctgtgatctctgcatgtgcacacgctcaatgccttctcaatgcagctgtgaagatattaggctgaattcatgccactcagattgtaagagctgtatgtgcacacgctcacagccaggacagtgtcgttgtcttgacaccaacgacttctgctacaaaccttgcaagtccagagatgactagaaaaactaatagctctctcaaatg

SEQ ID NO: 256222 - DNA, 308 bp, Glycine max
gacagcaggggcaattaataaagatgagtttgaagaacaacatggtggtgctaaaggtgtgtctgctgcttcttttccttgtgggggttacagctgcacgcatggaactgagcttcttcaaaagtgatcagtcatcaagttatgatgatgatgagtattcaaaaccatgctgcgatctctgcatgtgcacaagctcaatgtcttctcaatgcagctgtgaagatattatgctgaattcatgccactcaaattgtaagagctgtatgtgcacacgctcacaggcaggacagtgtccttgtattgacacc

SEQ ID NO: 256223 - DNA, 445 bp, Glycine max
  unsure (1)..(445): unsure at all n locations
gcgcccacgcgggcgcccacgcggccggacncacacaactttctaagaaagtcttccatagggggccaaaaatggagagcaccatcttctttgctctctatctcttttgtgccttcaccacctcatacctaccttcagccatcgctgatttcgtgctcgataatgaacgtaaccctcttgaaaatggtggcacatattatatcttgtcagacataacagcatttggtggaataagagcagccccaaccggaaacgaaagatgccctctcactgtcgtgcaatctcgcaatgagctcgacaaaaggattggaacaatcatctcgtccccatatcgaatccgctttatcgccgaatgccatcctttgaaccttaacttcgattcatttgcagatataatgctgtgcgttggaatttctaaccagtggtctgttgtggaggatctacc

SEQ ID NO: 256224 - DNA, 349 bp, Glycine max
tggcagtgcataactcacaacacatctaaacaaagaatcaagaacaatggcttatgctaggcttgctcctatggctgtcttcttgcttgccacttccaccataatgttcccaacgaatatagaagcagcagattgtaatggtacatgttcacctttcgagatgccaccgtgccgttcacgtgattgtcgtggagtacctataggactagttgctggtttctgcatacatccaactggactgtcatctgttgcaagattgacgacagacattccaactgatgtcaatctgatgatgaatgcatgaagaaaggaagtggcaatttttgcgctcgttaccctaataattata

SEQ ID NO: 256225 - DNA, 281 bp, Glycine max
  unsure (1)..(281): unsure at all n locations
gacacttgacaggaaaaacagtaaagatgggtttgaagaacaacatggtggtgctaaaggtgtgttttttggatcttttgcttgagagggatactaatgctcgctggaactgaacctgtataaaagtgattactcatgaagtgatgatgagtcttcaaaaccatgctgtgatctctgcatgtgcacaggctcaatgccacctgaatgacattgggcagatattaaganggagttcaatgtactcagcttgtgatcgctgtgcgtgcacacgctcgatgcca

SEQ ID NO: 256226 - DNA, 170 bp, Glycine max
gacagtaaaaacaattaataaagatgagattggagaacaacatggtggtgctaaaggtgtgtttgttgcgtattttgcgtgtgggtggtacagctgtacgcatggaactgagcttctttaatagtgatcagttatcaagttatgatgatgatgagtattcaaaaccatgc

SEQ ID NO: 256227 - DNA, 304 bp, Glycine max
gattcacacggctaactaagaaagtcttccatagccccccaaaaatgaagagcaccatcttctttgctctctttctcttttgtgccttcaccacctcatacctaccttcagccatcgctgatttcgtgctcgataatgaaggtaaccctcttgaaaatggtggcacatattatatcttgtcagacataacagcatttggtggaataagagcagccccaacgggaaatgaaagatgccctctcactgtggtgcaatctcgcaatgagctcgacaaagggattggaacaatcatctcgtccccata

SEQ ID NO: 256228 - DNA, 303 bp, Glycine max
gatcacactaatcactcactcttcactcaaaactcttctctttcgtgttcataattcccacacattatggctgagcttcactaccaaccacaacaccaatacccccttcgctaccctaacgatccacaccaacaaacccgttccttcacccaccaagtcgtcaaggccgccaccgtcgtcacagcgggcggcttcctcttgatcctcgcctcggtgatcctcgccgccaccgtcattgccctcaccatcggcaccccgctgttcgtcattttcagtcccgttctcgtgcccgccgtaatcacc

SEQ ID NO: 256229 - DNA, 453 bp, Glycine max
  unsure (1)..(453): unsure at all n locations
gtcgacccagcgttcgagcgagaatctacagagggggagggttattggacacattcttcagcgactgcgtttttggatcggaagctcttctgcggcgtatcaatgggacactccaacgtgtggaactcttacccataaaactacggtcctggttctcgcacttgccttgtatgtgggaatccacatggactgatcaggaagtatggccttatgtgctgcacgcagtgctttcgtatcattgccaaggaaattggcttcatcaagtatcgctaaaagagcagttgtcaactacggaccaatattgtgatcaggcactaggatgtgtataggatgttaatgttgaagaaacttgagactttcttttttcatctaattaattatcagacgtaatttgnggtactaagaatacttttatattaattggtttgaaccaaaacaaaaatacttntacct

SEQ ID NO: 256230 - DNA, 460 bp, Glycine max
  unsure (1)..(460): unsure at all n locations
ggggaaccctaattctgcgaggtgagtgaaaatggcggtaccggggctcttcaagaagatcgtgaagaagcgcgtcaagaagtttatacgccctcatagtgatcgcaagatctccgtcaagccaagctggcgcagacccaaaggtatagattctcgtgtcatgagaaagttcaaaggatgcactttgatgcccaacatnggttatggctcagacaagaaaacccgccattatctaccaaatggtttcaagaaatttgtcgtgcacagtgtgtaagacctggaacttctcataaggcataacaggacatattgtgctgagattgctcacgatgtatccacaaggaagaggaaggacatagttgagagagctgctcagcttgatgttgtcttgacgaacaagacgggcagactacgtatccaggaggatgagtngatccaatacatgggagatgtatttatg

SEQ ID NO: 256231 - DNA, 242 bp, Glycine max
  unsure (1)..(242): unsure at all n locations
gagggttttgcgctgttgatgctgcatatgctacgtaacctgggagctctgtgccgaagaacgaagccatggagaagactcatggaatgggatctgctcgcaagcttaagtcctaccgcangaggctaatgtgggcttgcaagtcatacagtgaatcacatcttggaaattgttggaatataccttttgctgggttattcctgtcaagggaattgtccttgaaaagataggtattgaggcta

SEQ ID NO: 256232 - DNA, 418 bp, Glycine max
gggctacattttctatcagctcctcgcctaccagccttcacaaaggcgctatcacccacccttaggatccaagtttacactacccttgcttaccacgctaccttcgttttacacatgcaccaacaaccacatcaccctcaaactcctcacagcttgcccactattcaaactttgcgcaaccaaactagagctattccagataccaaagacctgtgggataattcaattctgacaagtgaaatcccagtcctcgctatattctacgcaaactgatgctgaccgtgcaagatggctcacccgataatagatcagatcgcaacacagtatgctgggaaactcacatgttgtatagtcaacacagacactggcatgcaaactgctgatgactatgaaatcaatgctgtaccagcgggtttga

SEQ ID NO: 256233 - DNA, 414 bp, Glycine max
gacagccaaaacaattaataacgatgagtttgaagaacaacatggtggtgctaaaggtgtgtatgttgcttcttttacttgcgggggttacagctgcacgcatggaactgagcttcttcaaaagtgatcagtcatcaagttatgatgatgatgagtattcaaaaccatgctgtgatctctgcatgtgcacacgctcaatgcctcttcaatgcagctgtgaagatattaggctgaattcatgccactcagattgtaagagctgtatgtgcacacgctcacagccagtacagtgtcgctgtcttgacaccaactacttctgctacaaaccttgcaagtccagagatgactagaaaaactaatagctctctcaaatggacgaagtccctttaggctttgttgttatgttaggggaga

SEQ ID NO: 256234 - DNA, 351 bp, Glycine max
caacataggtcatcgaaaggatctcgaagacccaccaacgcacgaaagccgggatctttcagaaaatggattcctattcgaagggtgcataaccgcatggataagctcacactaacccgtcaatttgggatccaattctggtccttatgatgtatcgggaaggaattttggaatgtaataatatcgattcatacagattcagaagaaagggttctctattgattcaaacgctctacctacgagatagggatagagaaagaggaattaaccgatgattgcacatagtgcatttggtcgaaaaatcgatctgatttttttcgtacttttcgctcaatgatgaaatgggtcaaa

SEQ ID NO: 256235 - DNA, 407 bp, Glycine max
  unsure (1)..(407): unsure at all n locations
tgagggtttggttattagggttttcgcttgccggtgcgcagtcgagcctncagaagacgaatcgaaaatgccgtcgcacatgacattcataatcaataagaagttggctaataagatgaggcagaacatgcccattccctactggatccgcattaggaccgatatcatcatcangtacaactcgaagcgccgtcactgtgctcntactcagcttggattctgaggtgtatgctctgcctaggttcaatttatccaattaattagtgtgttattttcttgaggcaaaaacattgttttgagttttaatattttccatttggtcgaagactatattgtggaaggaacttattgtaggtaatactcatggcggttggcaactatttttaaaggattttcggattcattgt

SEQ ID NO: 256236 - DNA, 337 bp, Glycine max
gaacaaaaaattaacacccagttcaattctcaaatggaagctcgggaacagagaatgagaaagagaatggacgccattgattcggtgtacgatccgttgagagaatactcagaggacagcatgaggctcgttaagcgctgttacaaacttgatcgcatagaattctacaaggttgtcgtgcgtaccgtaatagttatagatgtgatgggattcgtgggtttcttcgtgaagcttattttcaatccaattaacaacattaagtttatatctagttaggattgatgttactacaagcagcttaagaattcaggttgtcaagcaaaagtaggcagaaaga

SEQ ID NO: 256237 - DNA, 357 bp, Glycine max
tgatttcgacagcaaaaactactaataaagatgagtttgaagaacaacatgggggtgctaaatgtgtgaatgttgcttcttttcacttgtggtggttacagcttcactcatagaactcatcttcttcaatagtgatcattcatcaagttatgatgatcatgactattcaaaaccatgctgtgatctctgcatgtgcacacatctcaatgcctattcaatgcacttgttaagatattaggctgaattcatgccactcagattgtaagagctgtatgtgcacactctcacagccaggacagtgtcgttgtcttgacaccaactacttctgctacaaaccttgcaagtccaaacatgact

SEQ ID NO: 256238 - DNA, 414 bp, Glycine max
  unsure (1)..(414): unsure at all n locations
gacagcaaaaacaattaataaagatgagtttgaagaacaacatggtggtgctaaaggtgtgtttgttgcttcttttccttgtgggggttacagctgcacgcatggaactgagcttcttcaaaagtgatcagtcatcaagttatgatgatgatgagtattcaaaaccatgctgtgatctctgcatgtgcacacgctcaatgcctnctcaatgcagctgtgaagatattaggctgaattcatgccactcagattgtaagagctgtatgtgcacacgctcacagccaggacagtgtcgttgtcttgacaccaacgacttctgctacaaaccttgcaagtccagagatgactagaaaaactaatagctctctcaaatggacgaagcccctttaggcttttgttgntatggtaggggag

SEQ ID NO: 256239 - DNA, 110 bp, Glycine max
  unsure (1)..(110): unsure at all n locations
ggcacaccaacaccaaaacaaacccactaagatggcttcctttgtatgcttcctagtgctgcttcttgcagcccttatnctcatgccctcaagggcttgctacttactac

SEQ ID NO: 256240 - DNA, 419 bp, Glycine max
  unsure (1)..(419): unsure at all n locations
gacagcaaaaacaattaataaagatgagtttgaagaacaacatggtggtgctaaaggtgtgtttgttgcttcttttccttgtgggggttacagctgcacgcatggaactgagcttcttcaaaagtgatcagtcatcaagttatgatgatgatgagtattcaaaaccatgctgtgatctctgcatgtgcacacgctcaatgcctnctcaatgcagctgtgaagatattaggctgaattcatgccactcagattgtaagagctgtatgtgcacacgctcacagtcaggacagtgtcgttgtcttgacaccaacgacttctgctacaaaccttgcaagtccagagatgactagaaaaactaatagctctctcaaatggacgaagcccctttaggctttgnttgntaatgtaggggagacaaa

SEQ ID NO: 256241 - DNA, 359 bp, Glycine max
gagttccaagtcgcatacaaagtaacactagaactcacaaaggacagaagaaacgcgaatgccaggagaactccaattaccacccgggttcagattccaccccactgacgatgagcttgtgaatcactacttatgtagaaagtgtgctgcacaaaccattgctgtttccatcatcaaagaaatcgatttgtacaagtttgatccatggcagcttccagagatggctctttacggtgagaaagagtggtactttttctctcctatagaccgaaaatacccaaacggttagagaccgaaccgggctgccggaaacgggtactggaaagctaccggagctgacaaaccgatcggaaaaccga

SEQ ID NO: 256242 - DNA, 234 bp, Glycine max
tgacagcataaacaattgataaagatgagtttgaagaacaacatggtggtgctaaaggtgtgtttgttgcttcttttccttgtgggggttacagctgcactcatggaactgagcttcttcaaaagtgatcagtcatcaagttatgatgatgatgagtattcaaaaccatgctaggatctctgcatgtgcacacgctcaacgccttctcaatgcagctgtgaagatattaagctg

SEQ ID NO: 256243 - DNA, 453 bp, Glycine max
ggaagcatttgagactaactcttagagagaaaaaaaatggctgagacaggtggaggagatgcagtgagaccagtggtaatatgtgataacaagtgtggctgcacacttccatgcactggtggttccacttgcaggtctcttaagttcatgatttcaacaaagtgcacaagtgctggcactgccacaggagggggtgatcacgtgacatgctcgtgcggagagcactgtggttgcaatccatgctcatgtcccaagattgcggctgctggaagtggttgcagatgtggcacagattgtgcatgtgcctcctgccgcacttagtatcacaccttaaggcttaaacttcacgttttattttatgtcttcaaatcttgaatacgttttctatatattagtcttgtttaaagttcaaagtgtggacgtggtttctacttagtactcaaacgtattagt

SEQ ID NO: 256244 - DNA, 272 bp, Glycine max
  unsure (1)..(272): unsure at all n locations
tttggacagccaagactatttatgcagatcagcttgaagaacaacatggtagtgctaaacgtgagtttgatgcttctggtccttgtggacaacacagctgctcgcataaacctgagcttactcaaaagtgatcagttatcaagttatgatgattatgactgttgacaaccatgctaagagctctgcatgtagcacacgttcaaagcctncgtaatgcctgtatgaagatgttaacctgcattgatgcgactcatattgcacgagctgtatgt

SEQ ID NO: 256245 - DNA, 376 bp, Glycine max
gacagcaaaaacaattaatagagatgagtttgaagaacaacatggtggtgctaaaggtgtgtttgttgcttcttttacttgtgggggttacagctgcgcgcatggaactgagcttattcaaaagtgatcagtcatcaagttatgatgatgatgagtattcaaaaccatgctgtgatctctgcatgtgcacactcttaatgcctactcaatgcagctgtgaagatattaagctgaattcatgctactcagattgtaagagctgtatgtgcacacgctcacagccaggacagtgtcggtgttttgacaccaacaacttgtgctacaaaccttgcaagtacagagatgactagaaaaactaatagctctcttaaatgga

SEQ ID NO: 256246 - DNA, 157 bp, Glycine max
gacagcaaaaacaattaataaagatgagtttgaagaacaacatggtggtgctaaaggtgtgtctgctgcttcttttccttgggggggttacagcttcacgcatggaactgagcttcttcaaaagggatcaggcatcaagttatgatgaccatgagta

SEQ ID NO: 256247 - DNA, 416 bp, Glycine max
  unsure (1)..(416): unsure at all n locations
gacagcataaacaattaataaagatgagtttgaagaacaacatggtggtgctaaaggtgtgtttgttgcttcttttccttgtgggggttacagctgcacgcatggaactgagcttcttcaaaagtgatcagtcatcaagttatgatgatgatgagtattcaaaaccatgctgtgatctctgcatgtgcacacgctcaatgcctnctcaatgcagctgtgaagatattaggctgaattcatgccactcagattgtaagagctgtatgtgcacacgctcacagccaggacagtgtcgttgtcttgacaccaacgacttctgctacaaaccttgcaagtccagagatgactagaaaaactaatagctctctcaaatggacgaagcccctttaggctttgnnttgtatgttaggggagac

SEQ ID NO: 256248 - DNA, 415 bp, Glycine max
  unsure (1)..(415): unsure at all n locations
agataataaagagaataatcatattaaatattaaatagaaaaaagggcccgatcatttatcaaaggccaatcttcggtagaagagaaggttcctttggaatacttatttctatttcagtataccgggtctctttctttcatttcaaaaaatttatagaatttcgattttgaaatgaaagaaaagtgtggggataaatataaatgacaaaaagatattggaacataatcttggaagagatgatggaagcaggagttcattttggccacggtactagaaaatggaatcctaaaatgtcaccttatatatctgcaaagcgtaagggtattcatattataaatcttattagaactgctcggtttttatcagaagcttgtgatttagtttttgatgcagcataanaaaaaaatannaatt

SEQ ID NO: 256249 - DNA, 228 bp, Glycine max
ggaagtaagggatcgagcctcggaggagggaatcgcagcgaagtccactatgccgaagcaaattcacgagattaaggacttcctcctcactgctaggaggaaggatgcacgctctgtgaaaatcaagcggagcaaggatgtggtgaagttcaaagtcccgtgctccaagtacctttacaccctctgtgtgtttgattctgagaaggctgataagttgaagcaatcact

SEQ ID NO: 256250 - DNA, 133 bp, Glycine max
  unsure (1)..(133): unsure at all n locations
cctcagccatatgcaaatgaagcagttgctaggtntgctaatggaggagcttatgctccagatctaagtctttgtaccaaaccccgtcacaatggtcagaactatgttttttgcccttctgaactggtatcgt

SEQ ID NO: 256251 - DNA, 368 bp, Glycine max
gacaggaacagcagagaaacaaagttagaagtgaagaagatcatggcttctctagcaaccttggctgctgttcaaccagctacgatcaatggccttgctggaagttccctctctggaactaagctctctttcaagccctctcgccacagtgtcaaatccaagaacttcaggagtggtgccgtggtagcaaagtatggtgacaagagtgtgtactttgatttggaggatttgggcaacactacagggcagtgggacttgcatggctcagatgcaccttcaccctacaaccctcttcagagcaagttcttcgagacatttgctgctccattcacaaagaggggattgttactcaagtttctgatattggg

SEQ ID NO: 256252 - DNA, 194 bp, Glycine max
taagtttgctaatcgagggacttatgctccatatctaagtctttttaccaaatcccgtcacaatggtcataactattttttttcccttctgacttgttatcgttacccacctgcttgtgtttctataagacaaggacttcattataatcctcacttttcttgtggaacaattgccatgcctaaaatgcttaatt

SEQ ID NO: 256253 - DNA, 414 bp, Glycine max
  unsure (1)..(414): unsure at all n locations
gacagcaaaaacaattaataaagatgagtttgaagaacaacatggtggtgctaaaggtgtgtttgttgcttcttttccttgtgggggctacagctgcacgcatggaactgagcttcttcaagagtgatcagtcatcaagttatgatgatgatgagtattcaaaaccatgctgtgatctctgcatgtgcacacgctcaatgcctcctcaatgcagctgtgaagatattaggctgaattcatgccactcagattgtaagagctgtatgtgcacacgcccacagccaggacagtgtcgttgtcttgacaccaacgacttctgctacaaaccttgcaagtccagagatgactagaaaaactaatagctctctcaaatggacgaagcccctttaggctttnngttgtatgttaggggag

SEQ ID NO: 256254 - DNA, 429 bp, Glycine max
cggcacagctgtcagaatacgacagaacggtacagctgtgaggatacgagagaacgagaatcatgtcatgttattagatgatttgtcatgcataccgttaccatgtgtcaaactgttggtctcaaagctggtatatcatgtgaaggatgtgttggagcagtgaagagagttctaggaaaattggatggtgtggaatcatatgacattgatttggaggaacaaaaggtggtagtgaaaggaaatgtgcagccagacacagttctgcagaccgaattcaaaactgggaagaatactaccttctgggaaggtgaatcagcagcatctgatactagcacagcaactgcctaaaacatttgcctatattctgtgcagaagaagtatctgcgtgaatccaatactatatgatggtcttgaaataatgatgaaact

SEQ ID NO: 256255 - DNA, 359 bp, Glycine max
gactcactcatacaatagagaccagcttttgcttggttgcgaacatggagatgaggaaatcatgtggcttgttcttcttgctcctactccttgtctttgcttcccaggtggtggtgcatactgagggaagagtgtgtgagtcacaaagccacgggttccatggtttgtgtaatggagaccacaactgagctttggtctgcaggaacgaaggtttctccggtggcaggtgcaaatgcttacgacgtcgctgcttttgcaccaggatttgttgagatctcatcaaacactactcttgccatgcaaattaataaatcatagctaggcccaataaattgcatctactctttattcatttggga

SEQ ID NO: 256256 - DNA, 258 bp, Glycine max; identical to SEQ ID NO: 236832

SEQ ID NO: 256257 - DNA, 428 bp, Glycine max
  unsure (1)..(428): unsure at all n locations
ngtaccgtaatccttacgctctctcactcacanacgcacactgaattcaaaaacatcgaaagagagaggcatggccgagcaaaccttcatcatgatcaagccagatggcgttcaaagaggccttattggcgagattattagcagatttgagaggaagggtttttacttgaaagggttgaaactcgttactgtggaccgtccttttgctgagaagcactatgctgatttgtctgcaaagcctttctttagtggtttggtggattacattgtctctggccctgttgttgccatgatctgggagggtaagaatgttgttacaactggcncgaaagattatcggagccacanacncagctcaatctgagcctggaactattcgtggtgactttgctattgacattggaagggaatgtatccatggaagtgat

SEQ ID NO: 256258 - DNA, 374 bp, Glycine max
  unsure (1)..(374): unsure at all n locations
gatgcaactgattaattaagaaaagccatttccatagcagcctaagaaaatgaagagccctagcttgttcgctatctttctactntgcgccttcacctcatacctaccttccgncaccgnccaggacgtgctcgacgtggatggcgatccgattcggaacggtttcatatactacgttttgccggcaataagaggaaacggtggcggaatagaacgagccgcactcgggaaagacactngccctatcactgtagtgcaatctcccaatccanactctaaggggttagaaaataagtttgaatctgcataccccgcctattacataaacgaaaccctaatnttgcaaataaagttcagttacccacagcagtgtg

SEQ ID NO: 256259 - DNA, 296 bp, Glycine max
gaccgcatgcacaattaatacagatgagttcgaataacaacatggtgctgctaaaggtgtatgcgacgcttctattacttgaaggcgttacagttgcacgcatggaacctgaacttctttaaacgtgatcagtcattaagtactgaggatgatgagtatataaaaccatgctgcgatctctacatgtgcacacgctcaaagcctgatccatgcagctgcgaagatatatgctgcattcatgccacttagaatgaaacagctgtatgtgcacaacctcacagactcgacagagacac

SEQ ID NO: 256260 - DNA, 438 bp, Glycine max
  unsure (1)..(438): unsure at all n locations
gacagcanaaacaattaatanagatgaagttgaagaacaacatggtggtgctaaaggtgtgtttgttgcttcttttccttgtggnggttacagctgcacgcatggaactgagcttcttcaaaagtgatcagtcatcaagttacgatgatgatgagtattcaaaaccatgctgtgatctctgcatgtgcacacgctcaatgcctnctcaatgcagctgtgaagatattaggctgaattcatgccactcagattgtaagagctgtatgtgcacacgctcacagccaggacagtgtcgttgtcttgacaccaacgacttctgctacaaaccttgcaagtccagagatgactagaaaaactaatagctctctcaaatggacgagggccccttaggctttgntngttatgttaggggagacaaataaaacaagaaataaaagc

SEQ ID NO: 256261 - DNA, 424 bp, Glycine max
  unsure (1)..(424): unsure at all n locations
gatcaagaaccagttcaatatcctagtacaccgtattaaagaatttaagatatactatgatgagagcgcggttcccattactgttgctgggagttgttttcctggcatcagtttctgtctcatttggcattgcgtattgggaaaagcagaaccccagtcacaacaagtgcctccgaagttgcaatagcgagaaagactcctacaggaaccaagcatgccacgctcgttgcaacctccttaaggtggaggaagaagaagaatgcgaagaaggtcaaattccacgaccacgaccacaacacccggagagggaacgtcagcaacacggtgagaaagaagaagacgaatgtgagcagccacgtncattcccattcccacgcccacgccaacctcatcaagaggaagagcacgagcagaatgagggaca

SEQ ID NO: 256262 - DNA, 433 bp, Glycine max
gatgctggagaccatttcccagtaattgccttcaacttaggtggaaacctcgtaataaggatcgtaagcgagcaaactgatattcttgaaccatttactgcgtcgagtttgccaagttcccttatattgtggaaggaagcaaatgctaaaggaagtctatttcaaagatttccttcagatttgttgacacagctgaagacagattgtctcgtcctgcacaatcatcgttatgccatatccccacgcaagcttcaatataataccaagttatctgacttttttgagattctggcaatatctgaggatagagatggaaagactttcgtttccacagcacgtggtaagaaatatcccgtgactgtcaacctatggcaaccagagaaaaatgcttttgaatgggctacatctttgaaagcccctacacagaggatgc

SEQ ID NO: 256263 - DNA, 416 bp, Glycine max
  unsure (1)..(416): unsure at all n locations
gacagcaaaaacaattaataaagatgagtttgaagaacaacatggtggtgctaaaggtgtgtttgttgcttcttttccttgtgggggttacagctgcgcgcatggaactgagcttcttcaaaagtgatcagtcatcaagttatgatgatgatgagtattcaaaaccatgctgtgatctctgcatgtgcacacgctcaatgcctnctcaatgcagctgtgaagatattaggctgaattcatgccactcagattgtaagagctgtatgtgcacacgctcacagccaggacagtgtcgttgtcttgacaccaacgacttctgctacaaaccttgcaagtccagagatgactagaaaaactaatagctctcttaaatggacgaagcccctttaggcttttgttggtatgttaggggagac

SEQ ID NO: 256264 - DNA, 271 bp, Glycine max
  unsure (1)..(271): unsure at all n locations
gattcatgcaactgaataattaagaaaagccatttccatagcagcctaagaaaatgaagagcactagcttgttcgctatctttctactttgcgccttcacctcatacccacccttcgncaccgtccaggacgtgctcgacgtggatggcgatccgattcggaacggtttcatatactacgttttgccggcaataagaggaaacggtggcggaatagaacgagccgtactcgggaaagacacttgccctatcactgtagtgcaatcttccaa

SEQ ID NO: 256265 - DNA, 414 bp, Glycine max
gacagcagaaacaattgataaagatgagtttgaagaacaacatggtggtgctaaaggtgtgtttgttgcttcttttccttgtgggggttacagctgcacgcatggaactgagcttcttcaaaagtgatcagtcatcaagttatgatgatgatgagtattcaaaaccatgctgtgatctctgcatgtgcacgcgctcaatgcctcctcaatgcagctgtgaagatattaggctgaattcatgccactcagattgtaagagctgtatgtgcacacgctcacagccaggacagtgtcgttgtcttgacaccaacgacttctgctacaaaccttgcaagtccagagatgactagaaaaactaatagctctctcaaatggacgaagcccctttaggcttttgttgggtatgtaggggag

SEQ ID NO: 256266 - DNA, 418 bp, Glycine max
  unsure (1)..(418): unsure at all n locations
gcttcacagcataaacatttaataaagatgagtttgaggaacagcatggtggtgctaaaggtgtgtttgttgcttcttttccttgtgggggttaaagctgcacgcatggaactgagcttcttcaaaagtgatcagtcatcaagttatgatgatgatgagtattcanaaccatgctgtgatctctgcatgtgcacacgctcaatgcctnctcaatgcagctgtgaagatattaggctgaattcatgccactcagattgtaagagctgtatgtgcacacgctcacagncaggacagtgtcgttgtcttgacaccaacgacttctgctacaaaccttgcaagtncagagatgactaganaaactaatagctctctcaaatggacgaagcccctntagggcttgnntnngtatgtaggggag

SEQ ID NO: 256267 - DNA, 345 bp, Glycine max
gcatgcaactgaataattaagaaaagccagttccatagcagcctaagaaaatgaagagcactagcttgttcgctatctttctactttgcgccttcacctcatacctaccttccgccaccgcccaggacgtgctcgacgtggatggcgatccgattcggaacggtttcatatactacgttttgccggcaataagaggaaacggtggcggaatagaacgagccgcactcgggaaagacacttgccctatcactgtagtgcaatctcccaatccaaactctaaagggttagaaattaagtttgaatctgcataccccgcctattacataaacgaaaccctaattttgc

SEQ ID NO: 256268 - DNA, 362 bp, Glycine max
gatagcagcatcatacaaagcattgaattcaaaaactgaagttcattccttgtgttttgctttcttcctcaaaaccaagcatgtcgaacacatgcggcaactgcggctgcgctgacaagactagctgcaccaagggaaacagctatggtgttattgtagagactgagaagagttacatcgagactgttgtcatggatgttccagcagctgagcatgatgggaagtgcaagtgtggcactaactgcacttgcacggactgcacctgtggccattaaggaatatgtatgaaaatgtaattgccatgtgtttggcaatacaaatattcaaataatgtaatcttcgtatgaataaatgtgtgtgct

SEQ ID NO: 256269 - DNA, 244 bp, Glycine max
gggtgctgatcggaacaaacagggaatagaagagaggagaagatgggtttcataatggaatttgcggagaacttggtattaaagttgatggaagatccgaaggaaagggatcggaggttcagggagcacgtttatagagtgaaggacaggtgcgagaagacgaatgagatgtggagctaccctatgcgaccctatgggttttggacattcgaacggcacaattctcagcttgcttgggatgcac

SEQ ID NO: 256270 - DNA, 269 bp, Glycine max
ggtagtgggagacgcagtgactaaaccaaacctttcactcgccgtcgtagggtttatcctttcgcttagcgacaacaacaatggttgcagccaagaaaaccaagaagacccatgagagcattaacaacaagctcgctcttgtcatgaagagtggaaaattcaacctctgctacaagacggttctcaaatcacttaggagcttcaaagggaaaatgattatcaatgctaacaacttgccccctttgaggaaatcaagagatggatactat

SEQ ID NO: 256271 - DNA, 479 bp, Glycine max
  unsure (1)..(479): unsure at all n locations
ggggagtgaactgaaaaagcataaagtatggcttcgacggcagcgtaccttgctcggcgcgcggcgcagaaggagagggttcggatcctctaccgccgcgccctcaaagacactctcaactgggccgtacatcgccacctcttctacgacgacgcttcaaacctccgcgaaaggttcgaggagaacagacacgtggaagaccctgataccattgacaggctcataacggatgctgaagcttcctacaacaagtggcgccatcccgatccctatattgttccttgngctcctggtggttccaagtttactcgcaacccaactccacctcaagggattgagatagtttataattatggccgtgaagatgatgactgaaatcttattttattttttttgcacccttgcaatgaataaaagtctgcaatcaaactgttccgtattcacaaaatgataccgattgagtccatccatgcttatga

SEQ ID NO: 256272 - DNA, 247 bp, Glycine max
  unsure (1)..(247): unsure at all n locations
gacagcaaaaacaattgataaagatgagtttgaagaacaacatggtggtgctaaaggtgtgtttgttgcttcttttccttgtgggggttacagctgcacgcatggaactgagcttcttcaaaagtgatcagtcatcaagttatgatgatgatgagtattcaaaaccatgctgtgatctctgcatgtgcacacgctcaatgcctnctcaatgcagctgtgaagatattangctgaattcatgccactc

SEQ ID NO: 256273 - DNA, 419 bp, Glycine max
  unsure (1)..(419): unsure at all n locations
gacagcaaaaacaattaataaagatgagtttgaagaacaacatggtggtgctaaaggtgtgtttgttgcttcttttccttgtgggggttacagctgcacgcatggaactgagcttcttcaaaagtgatcagtcatcaagttatgatgatgatgagtattcaaaaccatgctgtgatctctgcatgtgcacacgctcaatgccttctcaatgcagctgtgaagatattaggctgaattcatgccactcagattgtaagagctgtatgtgcacacgctcacagccaggacagtgtcgttgtcttgacaccaacgacttctgctacaagccttgcaagtccagagatgactagaaaaactaatagctctctcaaatggacgaagcccctttaggctttgnttggtatgttaggggagacaaa

SEQ ID NO: 256274 - DNA, 348 bp, Glycine max
ggcagccgacacaatgaatcaatatgagtccgaagaacaacatgcgggaactaaacgtgtgcacattgccactttaccatgtgggggttacagctgcacgcatggaactgagcttattaatgagagatcagtccttaagatatgatcatgatgagtattgaaaaccatgctgaagatctatcgatgtgtacacgcttaatggactggtaatgcagctgtcaatatcttatgctgaaatcatgccactcagatcgttagaactggatgtgcacacggttacagcctggacagcgtcagtgtcttgacaataacgactattgctacgaatcttgcaagtgcagatatcac

SEQ ID NO: 256275 - DNA, 263 bp, Glycine max
gacagcaaaaacaattaataaagatgagtttgaagaacaacatggtggtgctaaaggtgtgtttgttgcttcttttccttgtgggggttacagctgcacgcatggaactgagcttcttcaaaagtgatcagtcatcaagttatgatgatgatgagtattcaaaaccatgctgtgatctctgcatgtgcacacgctcaatgcctcctcaatgcagctgtgaagatattaggctgaattcatgccactcagattgtaagagctgt

SEQ ID NO: 256276 - DNA, 399 bp, Glycine max
gagagaaagagagagaaagatgtcgaagcgtggtcgtggtggttcggcggggaacaagttccgcatgtcgctgggtcttccagtggcggcgacggtgaactgcgccgacaacacgggggcgaagaacctctacatcatttcggtgaaagggatcaaaggccgtttgaaccgtcttccctcggcctgcgttggcgacatggtgatggccaccgtgaagaagggaaaacccgatctgaggaagaaggtcttgccagctgtcatcgttcgccagcgcaagccatggcgccgaaaggacggcgtctacatgtacttcgaagataatgctggtgttattgtcaatcccaaaggagaaatgaaagggtctgctatcactggtcccattggaaaagagtgtgctga

SEQ ID NO: 256277 - DNA, 289 bp, Glycine max
  unsure (1)..(289): unsure at all n locations
accggaggggacggcaaaaccattataaggatagtttgagaaccacatggggtgctaaagggtgttggttgcttcttttccttgtggggttacagctggacgcatggaactgagcttttttcaaagtgatcagtcatcaagttatgatgatgatgagtattcaaaccatgctggatctctgatgtcacacgctaatgcctctcatgcactgtgaaatatangctgaattatgcactcagatgtagagctgatgtcacacgctacagncagacagtgtcgtgtctgacac

SEQ ID NO: 256278 - DNA, 273 bp, Glycine max
ccacgcgtccgagacgacaggagatgacgaccacatacagcacgagatttaggcacttatagaaaatggtattaacatcatggtatctttggcaagagtgtaatttgcgactcacgataccacatgctacagatgctcgcatcgatcgtagctaatgaacttctgaatggtcataacgtgatgatgatactctgcaatgagatttgcatttacagttgtctctgcacgcacaatatgaactacttgcgtttacttcgtaagcgcatgaacacc

SEQ ID NO: 256279 - DNA, 205 bp, Glycine max
gacagcataaacaattaataaagatgagtttgaagaacaacatggtggtgctaaaggtgtgtttgttgcttcttttccttgtgggggttacagctgcacgcatggaactgagcttcttcaaaagtgatcagtcatcaagttatgatgatgatgagtattcaaaaccgggctgggatctctggatgggcacacgcttaatggcttc

SEQ ID NO: 256280 - DNA, 262 bp, Glycine max
gactttgagttcgaactaaacaattcaattcaatctgcctcgatcatggaaaggaaaacatttgggttttggttcttgctcctccttgcctaaccttctgatgtgacggtgaaaagagcaaaggcaaaagattgcttgacaaggaggcacgggttccagggtagatgcttattcgacaggcaatgtgcacatgtgtgcaggagcgatggtttcatcggtggtcagtgccgaggccctcttcgcaaatgcttttgcagcaggc

SEQ ID NO: 256281 - DNA, 333 bp, Glycine max
tggcagtggaacaacagttggggagtcaatcgaaatcggcggaaatggttgccatgaggtttcaccagtaccaggtggtggaaagggctcttcctaccgaatccgatgagcatcctaagatctaccgcatgaaactttgggccaccaacgaggtccgtgccaaatccaagttctggaattttttgagaaaattgaagaaggttaagaaaagcattggacaagtgctagccatcaatgagatttttgagaagaatcctaccaagattaagaattatggaaaaatttggctgcgttatcaaagccgcactggtatcacaatatgtccaaggaata

SEQ ID NO: 256282 - DNA, 521 bp, Glycine max
  unsure (1)..(521): unsure at all n locations
gacgactgcacgggactcactcatccaatatgagaccagcaccatgatcagtttgtgaacatggagatgaggaaatcatgtggcttcttcttcttgctcctcctccttgtctttgcttcccaggtggtggtgcagacggagggaagagtgtgtgagtcacaaagccacgggttccatggtttgtgtaatagagaccacaactgtgctttggtctgcaggaacgaaggtttctccggtggcaggtgcaaaggcttccgccgccgctgcttttgcaccaggatttgttgagatctcatcaaacactactcttgccatgcaaattaataaatcatagctaggccaaataaattgcatctactctntatccatttgggagctagctaccacaaccaactcatacttggtcattggattgcttccctttggcttctgcctttgcttatctctctacctctacgtcttggtcagggcttatgtttcggaatgattaatgaatgctggttaattaacttgccgaaaaa

SEQ ID NO: 256283 - DNA, 284 bp, Glycine max
gactttgagttcgaactaaacaattcaattcaatctgcctcgatcatggagaggaaaacatttgggtttttggtcttgctccttcttgtcttagcttctgatgtgacggtgaagagagcagaggcgaaagattgcttgacaaggaagcacgggttccaaggtggatgcttattcgacaggcaatgtgcacatgtgtgcaagaaccatggtttcatcggtggtcagtgccgaagccctcttcgcaaatgcttttgcagcaggccatggtgatcgaaattactact

SEQ ID NO: 256284 - DNA, 341 bp, Glycine max
  unsure (1)..(341): unsure at all n locations
gcccattttgtgaaattcaattccaagggtttccattttccatttcaatgtcttcccattcgcacaaaggcacctncttctacggcgatgccgccccttatcgatccagagaggggcttagcactcgacccgttgcatcctccgatgaaatccaattgcacatcgatcccggcatcgacttcgacgacgaaatcaccggtcttcgtggccaagttaaaaaattgaaaaatgttgctgaagagataggttcagaagtcaagtttcaaagagattttctggaacaagtgcaaatggtgatgatacaagctcaaactggggtcaagaataacttaagaagattg

SEQ ID NO: 256285 - DNA, 349 bp, Glycine max
gacagcagagaaagaagcttcacaattgacattcccaccaacggaaccatggcctccgtgtacagctgtacggagtgcggatccaacctgaatcttaactccgctcatgcctaccctccagacttctacttcgaagccggcaacaagggctccgtctccttctccgccgtggaccccaccaagttcaagttcgagaaggaggacaagcttcgccccttcttcgaaaccgtcaactactggggaatccagaggaagaggaccaagatcaagcgcaacaccttgggtgactgtctccttggctacgtctatgacgatggtccacctcttaccaatagtcccggtcaatttc

SEQ ID NO: 256286 - DNA, 324 bp, Glycine max
gacgcacttagcaatcaatcaaaacattcccaataacaataatatacacatcttcaattaagctccttctcctatagccatggctctttctaagcttataattgcttcccttcttgcgtcgcttctccttcttcatttcgttgatgctgatcaatcggcacatgcacaaacgcaggggtctcttcttcagcagatagattgtaacggagcatgtgctgcgaggtgccgtttatcatctcgtccacgcctctgccaaagaagagcttgtggaacttgttgtagacgctgtaactgcgtgccacctggcactgctggaaaccaaga

SEQ ID NO: 256287 - DNA, 335 bp, Glycine max
ataaaaatggccaaatttgctaaaagcaaattactggccactgagcttttatttcttggtttatttgtctcccctaacataacaaacaaagcttaaaggggcttcgtccatttgagagagctattagtttttctagtcatctctggacttgcaaggtttgtagcagaagtcgttggtgtcaagacaacgacactgtcctggctgtgagcgtgtgcacatacagctcttacaatctgagtggcatgaattcagcctaatatcttccaaacagctgcattgaggaggcattgagcgtgtgcacatgcagagatcacagcatggttttgaatactcat

SEQ ID NO: 256288 - DNA, 346 bp, Glycine max
gacagcaaaaacaattaataaaggtgagtttgaagaacaacatggtggtgctaaaggtgtgtttgttgcttcttttccttgtgggggttacagctgcacgcatggaactgagcttcttcaaaagtgatcagtcatcaagttatgatgatgatgagtattcaaaaccatgctgtgatctctgcatgtgcacacgctcaatgcctcctcaatgcagctgtgaagatattaggctgaattcatgccactcagattgtaagagctgtatgtgcacacgctttcacagccaggacagtgtcgttgtcttgacaccaacgacttctgctacaaaccttgcaagtccagagat

SEQ ID NO: 256289 - DNA, 315 bp, Glycine max
ggaattcacacaagagatggcttctcctcttcttactccttacaagatgggcaaattcaatctgtcccatagagttgttttggcaccgctgaccagacagaggtcttacgacaacgtcccacaaccccatgccatcctctactactcccagagaacttccaacggaggccttctcattactgaagccactggcgtctctgacacggctcaaggctatccgcaaacccctggcatatggactaaagacccaaatgttcaagcttggaaacccattgtcgatgccgtccacgccaaaggcggtgttttcttctgtca

SEQ ID NO: 256290 - DNA, 310 bp, Glycine max
agggacagcaaaaacaattaataaagatgagtttgaagaacaacatggtggtgctaaaggtgtgtttgttgcttcttttccttgtgggggttacagctgcacgcatggaactgagcttcttcaaaagtgatcagtcatcaagttatgatgatgatgagtattcaaaaccatgctgtgatctctgcatgtgcacacgctcaatgcctcctcaatgcagctgtgaagatattaggctgaattcatggggccactcagattgtaagagctgtatgtgcacacgctcacagccaggacagtgtcgttgtcttga

SEQ ID NO: 256291 - DNA, 456 bp, Glycine max
aacgacgagaatctcagaatgatgacactcgccatacccgttaacaaacccggtagatttgagagtttcttcctatctagcactcaagctcaacagtcctacttgcaagggttcagcaagaatattctagaggcctcatacgacaccaaattcgaggagataaacaaggttctgtttggtagagaggaggggcagcaacaaggggaggagaggctgcaagagagtgtgattgtggaaatctcaaagaaacaaattcgggaactgagcaaacatgccaaatctagttcaaggaaaaccatttcttctgaagataaacctttcaacttgagaagccgcgaccccatctattccaacaagcttggcaagttggttgagattaccccagagaaaaacccttcagcttcggacttggatgtcttcctcagtggtgtggatatgaacgagggagctcttttt

SEQ ID NO: 256292 - DNA, 413 bp, Glycine max
gacacttactagtagtaagcatggagtcctcaaagatctatgcttacctattactctgcatgatctttctctcttccgccactcccattctcgggtgtagctactgtggcaaaccccccaaaaagcacaagcctggtaaaacaccatagacacccaaaacacccgttgctaagccaccagtcaccatccctcccattaatgttcctaccgttggtcttgcaccaatagtgaagcccccaggtattctccctccaattccaattattaacccaccaaccacaccaaggaacggagggaacactccatgcccaccaccaaagtcttctgcgcaggctacgtgctccattgacacgttcaaactaggcgcctgtgtggatctccctggagggttggttcacattggcttgggtgac

SEQ ID NO: 256293 - DNA, 403 bp, Glycine max
  unsure (1)..(403): unsure at all n locations
gatagcagcatcatacaaagcattgaattcaaaagcttaagttcattccttgtgttttgctttcttcctcaaaaccaaacatgtcgaacacatgcggcaactacgactgcgctgacaagactagctgcaccaagggaaacagctatggtgttattgtagagactgagaagagttacgtcgagactgttgtcatggatgttccagcagctgagcatgatgggaagtgcaagtgtggcactaactgcacttgcacggactgcacctgtggccattaaggaatatgtatgaaaatgtaattgccatgtgtttggcaatacaaatatccaaataatgtaatcttcgtatgaataaatgtgtgtgctgttatcctacttcaggtctgtgtagaaaaaaaaaaannant

SEQ ID NO: 256294 - DNA, 351 bp, Glycine max
  unsure (1)..(351): unsure at all n locations
gacagcaaaaacaattaataaagatgagtttgaagaacaacatggtggtgctaaaggtgtgtttgttgcttcttttccttgtgggggttacagctgcacgcacggaactgagcttcttcaaaagtgatcagtcatcaagttatgatgatgatgagtattcaaaaccatgctgtgatctctgcatgtgcacacgctcaatgcctcctcaatgcagctgtgaagatattaggctgaattcatgccactcagattgtaagagctgtatgtgcacacgctcacaggnntcaggacagtgtcgttgtcttgacaccaacgacttctgctacaaaccttgcaagtccagagatgact

SEQ ID NO: 256295 - DNA, 324 bp, Glycine max
  unsure (1)..(324): unsure at all n locations
gactcactcatacaatagagaccagcttttgcttctttgtgaacatggagatgaggaaatcatgtggcttcttcttcttgctcctcctccttgtctttgcttcccaggtggtggtgcagacggagggaagagtgtgtgagtcacaaagccacgggttccatggtttgtgtaatagagaccacaactgtgctttggtctgcaggaacgaaggtttctccggtggcaggtgcaaaggcttccgccgncgctgcttttgcacccccaggatttgttgagatctcatcaaacactactcttgccatgcaaattaataaatcatagcta

SEQ ID NO: 256296 - DNA, 342 bp, Glycine max
  unsure (1)..(342): unsure at all n locations
gattcacgcaactaaataagaaatgaagagtactatcttctttgctctctttctagtttgtgccttcaccatctcatacctgccttcagccaccgctcagttcgtgctcgacactgatgatgatcctcttcaaaacggtggcacatactatatgtagccagttatgagaggaaagggcggtggaatagaagtagattcaactggaaaagaaatatgccctctcactgttgtgcaatcacccaatgagctcgataaggggattggactagtcttntttacatctccattacatgccctttttatcgccgaaggctatcctttgagcattaagtttggttcatt

SEQ ID NO: 256297 - DNA, 315 bp, Glycine max
  unsure (1)..(315): unsure at all n locations
gactcactcatacaatagagaccagcttttgcttctttgtgaacatggagatgaggaaatcatgtggcttcttcttcttgctcctcctccttgtctttgcttcccaggtggtggtgcagacggagggaagagtgtgtgagtcacaaagccacgggttccatggtttgtgtaatagaggccacaactgtgctttggtctgcaggaacgaaggtttctccggtggcaggtgcaaaggcttccgncgnnnccgctgcttttgcaccaggatttgttgagatctcatcaaacactactcttgccatgcaaattaataaa

SEQ ID NO: 256298 - DNA, 452 bp, Glycine max
  unsure (1)..(452): unsure at all n locations
ggtggtcgtcgaagcgcgagcaagcatcccaaaaccctagctcgcgttctgctttcgtcttttacatcaggatggagtctcaggtgaagcacgcacttgttgtcaaagttatgggtcgtactggatccagaggacaagtaacccaggttagagtgaaatttttggatgatcagaaccgtcacatcatgaggaatgtgaaaggacctgtgcgagaaggagacattctcaccctactcgagtctgaaagggaagcaagaagattgcgctagatggtttcttttggcttgcctccaaattcgaacaaaacagtgtgattatgttgattntaatggtagttggtggatgtcaaaggttntagcaccctatcttatngtctgtctttggtctattcttattcgaattatggcgtgaactttggatgatttgagtttaagcttcaagggtttagtatg

SEQ ID NO: 256299 - DNA, 418 bp, Glycine max
  unsure (1)..(418): unsure at all n locations
gacagcaaaaacaattaataaagatgagtttgaagaacaacatggtggtgctaaaggtgtgtttgttgcttcttttccttgtgggggttacagctgcacgcatggaactgagcttcttcaaaagtgatcagtcatcaagttatgatgatgatgagtattcaaaaccatgctgtgatctctgcatgtgcacacgctcaatgccttctcaatgcagctgtgaagatattaagctgaattcatgccactcagattgtaagagctgtatgtgcacacgctcacagccaggacagtgtcgttgtcttgacaccaacgacttctgctacaaaccttgcaagtccagagatgactagaanaactaatagctctctcaaatggacgaagcccctttaggctttnngttgtatgtaggggagacaaa

SEQ ID NO: 256300 - DNA, 395 bp, Glycine max
gacaggtgtttgcaatactagcgatagctgataagagagataccaacaagaaaagaaaaaaagaagagttgagattccctttgaagaaaagatggcatcccataggcaaagctatgaagctggtcaaactaagggccgaactgaggaaaagacgaaccagacgatgggcaatattggagagaaggctcaagctgcaaaggagaagacccaggaaatggcccaagctgcaaaggagaagacccaacaaacagcccaagctgccaaggacaagacttgcgacacttcccaagcggcaaaggagaagacccaacagaatacaggagctgctcaacaaaagacctcagagatgggccagtccacgaaggaatcggaccagtcagggaaggacaacaccc

SEQ ID NO: 256301 - DNA, 275 bp, Glycine max
ggtgtctgctcactcgctcttctccgccacttctgaatctatggaatcaacaatcatgtcggacgaagagcaccatttcgagtccaaggccgacgccggagccttcaaaacctaccctcagcaagccggtaccatccgcaagaacggctacatcgtcatcaaaggcccgccctgcaaggttgtggaagtttcgacttccaaaactggaaagcacggtcacgctaagtgtcacttttgtggaattgatattttcacttgccagaaacttgaggata

SEQ ID NO: 256302 - DNA, 350 bp, Glycine max
  unsure (1)..(350): unsure at all n locations
gacagcaaaaacaattaataaagatgagtttgaagaacaacatggtggtgctaaaggtgtgtttgttgcttcttttccttgtgggggttacagctgcacgcatggaactgagcttcttcaaaagtgatcagtcatcaagttatgatgatgatgagtattcaaaaccatgctgtgatctctgcatgtgcacacgctcaatgccttctcaatgcagctgtgaagatattaggctgaattcatgccactcagattgtaagagctgtatgtgcacacgctcacagcnnccaggacagtgtcgttgtcttgacaccaacgacttctgctacaaaccttgcaagtccagagatgac

SEQ ID NO: 256303 - DNA, 349 bp, Glycine max
ggctgtgagtgagattacccatagatagagagcgcggcataacctaaacttacccttcttctctctgtgtgtgtgcgcatcaaacgcaaccagaagcagccatggccactgcaagaactgtgaaggacgtttctcctcatgagttcgtcaaagcttactcttctcacctcaagcgatctggcaagatggagctgccagagtggactgatattgtgaaaactgcaagatttaaggagttggctccttatgatcctgactggtactatgtcagagctgcttccaaatggcaagaaagatctacttgagaggaggacttggtgttggtgcctttcagaggatttatggtggg

SEQ ID NO: 256304 - DNA, 311 bp, Glycine max
gattcacacaactaactaagaaagtcttgcatagcgcggccaaaaatgaagagcaccatcttctttgctctctttctcttttgtgccttcaccacctcatacctaccttcagccatcgctgatttcgtgctcgataatgaaggtaaccctcttgaaaatggtggcacatattatatcttgtcagacataacagcatttggtggaataagagcagccccaacgggaaatgaaagatgccctctcactgtggtgcaatctcgcaatgagctcgacaaatggattggaaaaacaatcatctagttcccatatcg

SEQ ID NO: 256305 - DNA, 338 bp, Glycine max
gacagcaaaaacaattaataaagatgagtttgaagaacaacatggtggtgctaaaggtgtgtttgttgcttcttttccttgtgggggttacagctgcacgcatggaactgagcttcttcaaaagtgatcagtcatcaagttatgatgatgatgagtattcaaaaccatgctgtgatctctgcatgtgcacacgctcaatgcctcctcaatgcagctgtgaagatattaggctgaattcatgccactcagattgtaagagctgtatgtgcacacgccttcacagccaggacagcgtcgttgtcttgacaccaacgacttctgctacaaaccttgcaagt

SEQ ID NO: 256306 - DNA, 342 bp, Glycine max
gaatagaaatagaactggcttttcatatagatatcccttcaacacaacataggtcatcgaaaggatctcgaagacccaccaacgcacgaaagccgggatctttcagaaaatggattcctattcgaagggtgcataaccgcatggataagctcacactaacccgtcaatttgggatccaattcggttccttaggaggtatcgggaaggaattttggaatgtaataatatcgattcatacagatacagaagaaagggttctctattgattcaaacggggctctacctacgagatagggatagagaaagaggaaaaaaccgaggatttcacatagtacttttggt

SEQ ID NO: 256307 - DNA, 411 bp, Glycine max
gacacaactaactaagaaggtcttccatagccccccaaaaatgaagagcaccatcttctttgctctctttctcttttgtgccttcaccacctcatacctaccttcagccatcgctgatttcgtgctcgataatgaaggtaaccctcttgaaaatggtggcacatattatatcttgtcagacataacagcatttggtggaataagagcagccccaacgggaaatgaaagatgccctctcactgtggtgcaatctcgcaatgagctcgacaaagggattggaacaatcatctcgtccccatatcgaatccgttttatcgccgaaggccatcctttgagccttaagttcgattcatttgcagttataatgctgtgtgttggaattcctaccgagtgggtctgtgtggaggatct

SEQ ID NO: 256308 - DNA, 336 bp, Glycine max
gattcttcaagatgatgaaaatgttggaggccttgaagtgctccacagttctacttcttttgtgccaatccctcttttccctggatcccttctagtcaatcttggagatattgctcgtgtgtggagcaatggaaggttttgcaatttgacacaccgggtacaatgcaaggaagcgaccaaacgtttttcaattgctacatttatgatagcacccaagaataggaatgttgaagccccagcagaattggtggaccatgatcacccacgtttgtatcaaccttttatttatgaagactacaggaaagctcagaattagcaataagatgcacacttgtg

SEQ ID NO: 256309 - DNA, 416 bp, Glycine max
gattcacacaactaactaagaaagtcttccatagctccccaaaaatgaagagcaccatcttctttgctctctttctcttttgtgccttcaccacctcatacctaccttcagccatcgctgatttcgtgctcgataatgaaggtaaccctcttgaaaatggtggcacatattatatcttgtcagacataacagcatttggtggaataagagcagccccaacgggaaatgaaagatgccctctcactgtggtgcaatctcgcaatgagctcgacaaagggattggaacaatcatctcgtccccatatcgaatcccgtttatcgccgaaggccatcctttgagccttaagttcgattcatttgcagttataatgctgtgtgttggaattcctaccgagtggtctgttgtggaggatcta

SEQ ID NO: 256310 - DNA, 350 bp, Glycine max
gacgatgagtcgatttgataactaagatattgttattcgtgatattgatccaatttgatatcatcgaaatccaatttataccattgttgaattaattatcgatggaagatttatcatctctatgggattaaatcccgaatttttttattggaaatttaagagaaataaaacataataaagattatggaagtaaatattcttgcatttattgctactgcactgtttattctagttcctactgcttttttacttataatttacgtaaaaacggtaagtcaaaggggtgactaatttcactgaaatctgacttcttcatttttatcaatgtaatcaatgattaaaaaaaatga

SEQ ID NO: 256311 - DNA, 351 bp, Glycine max
gatgcaactgaataattaagaaaagccatttgcatagcagcctaagaagatgaagagcactagcttgttcgctatctttctactttgcgccttcacctcatacctaccttccgccaccgcccaggacgtgctcgacgtggacggcgatccgattcggaacggtttcatatactacgttttgccggcaataagaggaaacggtggcggaatagaacgagccgcactcgggaaagacacttgccctaccactgtagtgcaatctcccaatccaaactctaagggggggttagaaattaagtttgaatctgcataccccgcctattacataaacgaaaccctaattttgcaaat

SEQ ID NO: 256312 - DNA, 384 bp, Glycine max
gatatcttaatttcaaatcataaaattcttccaccaagttatgggtttccttgtgttgcttcttttctccctcttaggtctctcttctagttccagcatatcaactcatcgttccatattggaccttgacctaaccaagtttaccacacagaaacaggtgtcttcactgttccaactatggaagagtgagcatggacgtgtctaccataaccacgaagaagaggcaaagagacttgagattttcaagaataacttgaactatatcagggacatgaatgcaaacagaagatcaccccattctcatcgtttaggattgaacaagtttgctgacatcactcctcaagagttcagcaaaaagtacttgcaagctcccaaagatgtgtc

SEQ ID NO: 256313 - DNA, 210 bp, Glycine max
aggaacaccaaatacaactaatttagatgacgtcgcacaacaacatggtcattcgaaaagtgttaacagtgctacttttacctatcacatttacaaacgcactcatcgaacctaacattctcaaaactgatcagccatcaaattatcatgatgatcactattcaaaacacatctgcgatctctgaactttcacacactcaatacctcctc

SEQ ID NO: 256314 - DNA, 324 bp, Glycine max
ggttctagtgtatgtgattgttgtgactcgttcttcttcgtcgttatcttcttcttttgatgtttgtgtgtttgttttttctctcacctgaaaatgtcttgctgcggtggtaactgtggttgcggaaacgcctgcaagtgcggcaacggctgcggaggctgcaagatgtacccagacttgagctacaccgagtcaaccaccaccgagaccttggtcatgggagtggcaccagttaaagctcaattcgagagtgctgaaatgggtgttcccgctgagaacgattgggctgcaaatgtggagctaactgcacctgcaacccctgca

SEQ ID NO: 256315 - DNA, 330 bp, Glycine max
ggcttattcacgcagctaaataagaaatgaagagtactatcttctttgctctctttctagtttgtgccttcaccatctcatacctgccttcagccaccgctcagttcgtgctcgacactgatgatgatcctcttcaaaacggtggcacatactatatgttgccagttacgagaggaaagggcggtggaatagaagtagattcaactggaaaagaaatatgccctctcactgttgtgcaatcacccaatgagctcgataagggggggattggactagtctttacatctccattacatgccctttttatcgccgaaggctatcctttgagca

SEQ ID NO: 256316 - DNA, 333 bp, Glycine max
ggtagttcaattccaatatattccattctctctgtgtatttccctacctctcccttcaagatgcagatcttcgtcaagaccctcaccgacaagaccatcacccttgaggtggaaagctctgacaccatcgacaacgtcaaggccaagatccaggacaaggaaggaatccccccggaccagcaacgtctcattttcgccggaaagcaacttgaggacggccgtacccttgctgactacaacattcagaaggagagtactcttcaccccctcgtcctccgtctccgtggtggcatgcagatcttcgttaagacactcaccggcaagaccataacc

SEQ ID NO: 256317 - DNA, 324 bp, Glycine max
ggccctgagagagagaattggaaggttgcgacgagtgatgatatacacatattgtgacggtagtgaaatcgaggaaaaagaggtagcaatttgcgagttgcaatgagtaacgaaaaggctccttcatcagcttcttcgagtagctacgagttgagcaaaggcatcaatggcctcgacaaggttattcttcgcgacgcacgtggtagccccgctgaggtgtacttgtacggtgctcacgtgacttcatggaagaatgaccatgccgaggaattgctttttctcagtagtaaggctatctttaagccttcaaagccaattcgtgga

SEQ ID NO: 256318 - DNA, 303 bp, Glycine max
taatttgggaattattgctcccatcgccattggtttcattgtcggcgctaacattttgttgggtggggccttctctggagcggccatgaaccccgctgtgacatttgggcctgctgtcgtgagctggaccaggaccaaccactggatctactgggccgggcctctcatcggtggtggaatcgctggccttgtttacgaggttgtctttatcagccacacccacgagcagcttaccaccactgactactagagggggggaaatgaaaattaaaaaaaaaaaattgcgtattattgaatttctct

SEQ ID NO: 256319 - DNA, 342 bp, Glycine max
gattcctgacgttttgatatcaagtggacatacgtgaagattttaattatcagtctaaatatttcattagcacttaatacttttctgttttattcctatcctataagtagtcccgattctcccaacattgcttattcacacaactaactaagaaagtcttccatagccccccaaaaatgaagagcaccatcttctttgctctctttctcttttgtgccttcaccacctcatacctaccttcagccatcgctgatttcgtgctcgataatgaaaaaggtaaccctcttgaaaatggtggcacatattatatcttgtcagacataacagcatttggtggaataa

SEQ ID NO: 256320 - DNA, 334 bp, Glycine max
ggtagcattcagtgaaacactagctagggtattgggagctctcgttgtttcggagttagggaccttacgcagccatggccactgctacgaatgccgccgccgccccaccacgccagctctcccagaaggaagctgacatccagatgatgttggccgccgacgtccacctcggcaccaagaactgcgacttccaaatggaacgttacatcttcaagcgccgcaacgacgggatttacattattaaccttgggaagacgtgggagaagcttcagctagcagctaggggggttatagttgcaattgagaacccccaagatatcattgttcaatctgc

SEQ ID NO: 256321 - DNA, 360 bp, Glycine max
gacagcaaaaacaattaataaagatgagtttgaagaacaacatggtggtgctaaaggtgtgtttgttgcttcttttccttgtgggggttacagctgcacgcatggaactgagcttcttcaaaagtgatcagtcatcaagttatgatgatgatgagtattcaaaaccatgctgtgatctctgcatgtgcacacgctcaatgcctcctcaatgcagctgtgaagatattaggctgaattcatgccactcagattgtaagagctgtatgtgcacacgctcacagccaggacaaaagtgtcgttgtcttgacaccaacgacttctgctacaaaccttgcaagtccagagatgactagaaaaact

SEQ ID NO: 256322 - DNA, 318 bp, Glycine max
ggcacaagtgagtttgttgatcgagataactagaaacagtgtgatgaaaatgaaggtccttgttttcttcgttgctacaattttggtagcatggcaatgccatgcgtacgatatgttccctctccgaatgaacactggctatggtgcccgtactccggaggtgaaatgcgcaagttggaggcttgctgtggaagcacacaacatctttggctttgagaccattccttgagaatgcgttgaagcaacaaaggaataacccatccatggcgaacaatatagatcaaacttcaaaacagttaaccaacaagcttactttta

SEQ ID NO: 256323 - DNA, 353 bp, Glycine max
ggcacaagtgagtttgttgatcgagatggctagaaacagtgtgatgaaaatgaaggtccttgttttcttcgttgctacaattttggtagcatggcaatgccatgcgtacgatatgttccctctccgaatgaacactggctatggtgcccgtactccggaggtgaaatgcgcaagttggaggcttgctgtggaagcacacaacatctttggctttgagaccattcctgaagagtgcgttgaagcaacaaaggaatacatccatggcgaacaatatagatcagacttttcaaaacagttaaccaacaagcttacttttatgccagagacctcgaagtccatcccaaggacacatt

SEQ ID NO: 256324 - DNA, 323 bp, Glycine max
gattcacacaactaacgaagaaagtcttccatagccccccaaaaatgaagagcaccatcttctttgctctcttcctcttttgtgccctcaccacctcatacctaccttcagccatcgctgatttcgtgctcgataatgaaggtaaccctcttgaaaatggtggcacatattatatcttgtcagacataacagcatttggtggaataagagcagccccaacgggaaatgaaagatgccctctcactgtggtgcaatctcgcaatgaaaggctcgacaaagggattggaacaatcatctcgttcccatatcgaatccgttttatc

SEQ ID NO: 256325 - DNA, 337 bp, Glycine max
gacagcaaaaacaattaataaagatgagtttgaagaacaacatggtggtgctaaaggtgtgtttgttgcttcttttccttgtgggggttacagctgcacgcatggaactgagcttcttcaaaagtgatcagtcatcaagttatgatgatgatgagtattcaaaaccatgctgtgacctctgcatgtgcacacgctcaatgccttctcaatgcagctgtgaagatattaggctgaattcatgccactcagattgtaagagctgtatgtgcacacgcttttacagccaggacagtgtcgttgtcttgacaccaacgacttctgctacaaaccttgcaag

SEQ ID NO: 256326 - DNA, 356 bp, Glycine max
gacagcaaaaacaattaataaaggtgagtttgaagaacaacatggtggtgctaaaggtgtgtttgttgcttcttttccttgtgggggttacagctgcacgcatggaactgagcttcttcaaaagtgatcagtcatcaagttatgatgatgatgagtattcaaaaccatgctgtgatctctgcatgtgcacacgctcaatgccttctcaatgcagctgtgaagatattaggctgaattcatgccactcagattgtaagagctgtatgtgcacacgctcacggtcaggacaagtgtcgtgtcttgacaccaacgacttcttgtacaaaccttgcaagtccagagatgacttgaaaaac

SEQ ID NO: 256327 - DNA, 349 bp, Glycine max
gacagcaaaaacaattaataaagatgagtttgaagaacaacatggtggtgctaaaggtgtgtttgttgcttcttttccttgtgggggttacagctgcacgcatggaactgagcttcttcaaaagcgatcagtcatcaagttatgatgatgatgagtattcaaaaccatgctgtgatctctgcatgtgcacacgctcaatgcctcctcaatgcagctgtgaagatattaggctgaattcatgccactcagattgtaagagctgtatgtgcacacgctcacagccaagggacagtgtcgttgtcttgacaccaacgacttctgctacaaaccttgcaagtccagagatgac

SEQ ID NO: 256328 - DNA, 334 bp, Glycine max
gagtgcaatttagctgaagcaaagcaatggctacttcaaagttgaaaacccagaatgtgggtgtatctctctccctaaccttaaccttggtactggtgctactgaccagcaaggcaaactcagcggaaactgtttctttcagctggaacaagttcgtgccgaagcaaccaaacatgatccttcaaggagacgctattgtgacctcctcgggaaagttacaactcaataaggttgacgaaaacggcaccccaaaaccctcgtatcttggtcgcgccctctactccacccccccatccacatttgggacaaagaaaccggtagcgttgtcagcttc

SEQ ID NO: 256329 - DNA, 272 bp, Glycine max
gacagcaaaaacaattaataaagatgagtttgaagaacaacatggtggtgctaaaggtgtgtttgttgcttcttttccttgtgggggttacagctgcacgcatggaactgagcttcttcaaaagtgatcagtcatcaagttatgatgatgatgagtattcaaaaccatgctgtgatctctgcatgtgcacacgctcaatgcctttttctcaatgcagctgtgaagatattaggctgaattcatgccactcagattgtaagagctgtatgtgc

SEQ ID NO: 256330 - DNA, 337 bp, Glycine max
gacgcctaagccctctcttatttccagacgcggcggcttcttcttccgtttttgtctatcggcgtgaacaatggcgacttacgctgcgatgaagcccacaaagcccggcttggaggagccccaggagcagatccacaagataaggatcaccctttccttcaagcacgtcaaaaacctcgagaaggtttgtgcggacttggttcgcggtgcaaaggacaagcgcctcaaggttaagggacctgtcaggatgcccactaaggttcttctcatcactaccaagaagttttccccttgtggtgaaggtaccaacacatgggacagatttgaacttcgtgtg

SEQ ID NO: 256331 - DNA, 179 bp, Glycine max
gattcacacaactaactaagaaagtcttccatagccccccaaaaatgaagagcaccatcttctttgctctctttctcctttgtgccttcaccaccttatacctacctttagccattgcttttgatttcgtgctcgataatgaaagtaaccctcttgaaaatggtggcacatattatatc

SEQ ID NO: 256332 - DNA, 315 bp, Glycine max
gacagcaaaaacaattaataaagatgagtttgaagaacaacatggtggtgctaaaggtgtgtttgttgcttcttttccttgtgggggttacagctgcacgcatggaactgagcttcttcaaaagtgatcagtcatcaagttatgatgatgatgagtattcaaaaccatgctgtgatctctgcatgtgcacacgctcaatgcctgctcaatgcagctgtgaagatattaggctgcattcatgccactcagattgtaagagctgtatgtgcacacgctcacagccaggacagtgtcgttgtcttgacaccaacgact

SEQ ID NO: 256333 - DNA, 226 bp, Glycine max
gacagcaaaaacaattaataaagatgagtttgaagaacaacatggtggtgctaaaggtgtgtttgttgcttcttttccttgtgggggttacagctgcacgcatggaactgagctttttcaaaagtgatcagtcatcaagttatgatgatgatgagtattcaaaaccatgctgtgatctctgcatgtgcacacgctcaatgccttctcaatgcacctgtgaagatat

SEQ ID NO: 256334 - DNA, 321 bp, Glycine max
ccacgcgtccgatcacgcgttcgagacgacagaaggggacagcacaaacaattaatagagatgagtttgaagatcaacatggtggtgctaaaggtgtgtcagacgcttcttttccttgcgggggttacagcttcacgcatggaactgagctttttcaaaagtgatcagccttcaagttatgatcatgatgagtcttcaaaaccatgctgtgatctctgcatgtgcacacgctcgatgcctcctcaatgcatctgttaagatatgaggctgtaatcatgccacttatattgctagtgctcgctgtgcacatgctcacagcca

SEQ ID NO: 256335 - DNA, 403 bp, Glycine max
gacagcaaaaacaattaataaagatgagtttgaagaacaacatggtggtgctaaaggtgtgtttgttgcttcttttccttgtgggggttacagctgcacgcatggaactgagcttcttcaaaagtgatcagtcatcaagttatgatgatgatgagtattcaaaaccatgctgtgatctctgcatgtgcacacgctcaatgcctcctcaatgcagctgtgaagatattaggctgaattcatgccactcagattgtaagagctgtatgtgcacacgctcacagccaggacagtgtcgttgtcttgacaccaacgacttctgctacaaaccttgcaagtccagagatgactaggaaaactaatagctctctcaaatgacgaacccctttagggctttgttgtatgt

SEQ ID NO: 256336 - DNA, 396 bp, Glycine max
gattcacacaactaactaataaagtcttccatagccccccacatatgaagagcaccatcttctttgctctctttctctcttgtgccttcaccacctcatacctaccttcagccatcgctgatttcgtgctcgataatgaaggttaccctcttgaaaatggtggcacatattatatctcgtcagacataccagcatttggtgcaatctgagcacccccaacaggaaatgaaagatgccctatcactgtggtgcaatctcgcaatgagctcgacacactgattggaacaatcatctcgtccccatatcgaatccgttttatcgccgaatgccatcctgtgagccttaagttcgattcatttgcagctataatgctgcgtgttggaattcctaccgagt

SEQ ID NO: 256337 - DNA, 397 bp, Glycine max
gacgacagacggggcagggcttggttattagggttttcagcgtcgaccggtgcgcagtggagcctacataagactaatcgaaaatgccgtcgcacaggacattcagattcaagaagaatttggcgtataagatgaggcagaacaggcccattccactactggatccgcatgaggaccgataacaccatcaggtacaacgcgaagcgcctttactggcgatgcatcaagcttggattctgaggtgcatgctctggctaggtgcaatgtatccaagtaattagcgtactattttcttgaggcagacacgagtgttttgagttttgaacatcactcatttgatcgaagactatatcgagtaaggtacttattgtaggtcatacgcatggctgttgtcaac

SEQ ID NO: 256338 - DNA, 261 bp, Glycine max
taagtggtaatcccattttaattctcagatccatgctggcgagactgataaggagaaagagattggtctccattgattctgtgatcgatccgctaagtgaattcgtagaggacatcgtgaggctcgagaagctcttctacatacccgatcgcagagaattctccaaggttgtcatccgaactgtgattgttttcatcctgaaggcattcatcgtgctgttcttgaggctcatgggtatatcgattaacatcatcatggacg

SEQ ID NO: 256339 - DNA, 397 bp, Glycine max
gacagccaaaacaattaataaagatgagtttgaagagcaacatggtggtgctaaaggtgtgtttgttgcttcttttccttgtgggggttacagctgcacgcatggaactgagcttcttcaaaagtgatcagtcatcaagttatgatgatgatgagtattcaaaaccatgctgtgatctctgcatgtgcgcacgctcaatgccttctcaatgcagctgtgaagatattaggctgaattcatgccactcagattgtaagagctgtatgtgcacacgctcacagccaggacagtgtccgtgacttgacaccaacgacttttgctaccaaccttgcaagtccagagatgactagaaaaactaatagctctcttaaatggacgaagcccctttaggctttga

SEQ ID NO: 256340 - DNA, 314 bp, Glycine max
gggaaagggtgaagtgtgggtaaacggtcgaagcattggtcgccattggcctggatatatagcacatggtagttgcaatgcttgtaattatgctggatattatactgatacaaaatgccggacgaattgtggacaaccttctcagagatggtatcatgttcctcgctcatggttgagctcaggtggtaactccttggttgtgtttgaagaatggggaggtgaccctaatggaattgctttggtgaaaagaacatgaagtgtgatattttatgatgctctcttaaaaggggcaacattgacaggcaatatatgtc

SEQ ID NO: 256341 - DNA, 363 bp, Glycine max
  unsure (1)..(363): unsure at all n locations
gacaggtgtttgcaatactagcgatagctgataagagagataccaacaagaaaagaaaaaaagaagagttgagattccctttgaagaaaagatggcatcccataggcaaagctatgaagctggtcaaactaagggccgaactgaggaaaagacgaaccagacgatgggcaatattggagagaaggctcaagctgcaaagggagaagacccaggaaaatggcccaagctgcaaaggagaagacccaacanacagcccaagctgccaaggacaagacttgcgacactttccaagcggcaaaagagaagacccaacagaatacaggagctgctcaacaaaagacctcagagatgggccagtccgcg

SEQ ID NO: 256342 - DNA, 369 bp, Glycine max
gagaagacgactgaagggactcactcatacaatagaaaccagcttttgcttcttggggacatggaataaggaatcatgtggctttttctttttgctcctctcttgtcttgcttccaagtgtggtgcagactgagggaagagtgtgtgagtcacaaagccacgggttccatggtctgtgtaatagagaccacaactgtgctttggtctgcatgaacgaaggtttctccggtggcaggtgcaaaggcttccgacgtcgctgcttttgcaccaggatttgttgagatctcatcaaacactactcttgccatgcaaattaataaatcatagctaggccaaataaattgcatctactctttatccatttgggag

SEQ ID NO: 256343 - DNA, 272 bp, Glycine max
tcatgggtcagactagaactaaccaactcaagctaatctgcctacatcatgatgaggaaaacatgtggcttattgttcttgctcctccttgtcgtaactgctgaccagacggtgaagcaaaccgaggccaaagagtgcttgacacggaggcacgggttccatggtctatgcttattagaccagcaatgtgcacatgtctgcaggaacgaaggtttcatcggtggtcagtgccaaggccttcttcgccaatgcttttgcaccaggacatgttg

SEQ ID NO: 256344 - DNA, 382 bp, Glycine max
agaagacgacagaaggggacaacacagacattctctccattgtctttgaacactcatcaccatggccaagcttgttctttccctttgtttccttcttttcagtggctgcttcgctctgagagagcaggcacagcaaaatgagtgccagatccaaaagctgaatgccctcaaaccggataaccgtatagagtcggaaggtgggttcattgagacctggaaccctaacaacaagccattccagtgtaccggtgttgccctctctcgctgcacccttaaccgcaatgcccttcgtagaccttactacaccaacggtccccaggaaatctacatacaacaaggtaatggtatttttggcatgatattcccgggttggcctaacact

SEQ ID NO: 256345 - DNA, 373 bp, Glycine max
ggactttgagttccaactaaacaattcaattcaatctgcctcgatcatggagaggaaaacattagggtttttggtcttgctccttcttgtcttagcttctgatgtgacagtcaagagagcagaagccaaagattggttgacaaggaagcaccggttccagggtagatgcttattcgacaggccatgtgcacatgtgtgcaggagcgatggtttcatcggtggtcactgccgaggccctcttcgcaaatgcttatgcagcaggccatgttgatcgaaattactactgccaaagaggccatgtaataaacaaacagacgaattcactaattgctctaaccgacacatatgtacgtagtgtcggagctctagctag

SEQ ID NO: 256346 - DNA, 392 bp, Glycine max
gataccaaaaacaaaacacgagccaagtgaaagtgagaaaaaataagaatcaaagagcataatgtcagggatcattcacaagattggggagacccttcatgtgggagggcacaagaaggaggaggagcataagggtgagcaccatgctggagaatacaaaggggagcaccatggtgaacacagtagtgagtacaaaggagagcatcatggtgaacacaaagctggagagtaccatggtgagcacaagccagagcacaaagaggggttcctagacaaagtcaaggacaagatccatggtgagggcggcgccgccgagggcgagaagaagaagaaggagaagaagaagaaggagcatggccatgagcatggccatgacagcagcagcagcagtg

SEQ ID NO: 256347 - DNA, 383 bp, Glycine max
gacaccgagtcgcagaaaaagaaaaaagcgatcatagtttcacttcggccttatccagtttagggtttcggttctctaccctatctttcccgtatcgaaaccttaaatttacgatcaggtctgagcaatctggttggtagaacctttggtcttagtgagtcaagttttatgtctgaattagacgatcaaattcctactgccttcgatccttttgctgatgcaaatgctgatgactcgggtgctgggtcaaaggagtatgtgcatattcgtgtacagcagcgaaatggtaggaaaagcctgacaaccgttcagggattgaaaaaggaattcagctataacaagatacttaaagacgtcaagaaagagttctgttgcaatggaac

SEQ ID NO: 256348 - DNA, 386 bp, Glycine max
gacagcacaaacaattaataaagatgagtttgaagaacaacatggtggtgctaaaggtgtgtttgttgcttcttttccttgtgggggttacagctgcacgcatggaactgagcttcttcaaaagtgatcagtcatcaagttatgatgatgatgagtattcaaaaccatgctgtgatctctacatgtgcacacgctcaatgcctcctcaatgcagctgtgaagatattaggctgaattcatgccactcagattgtaagagctgtatgtgcacacgctcacagccaggacagtgtcgctgtcttgacaccaacgacttctgctacaaaccttgcaagtccagagatgactagaaaaactaatagctctctcaaatggacgaagcccct

SEQ ID NO: 256349 - DNA, 390 bp, Glycine max
gtcctacagattcttcagcaactgcgattttggatcggaacctcttctgcggcgtagcaatgggacactccaacgtttggaattctcactcaaaaaactacggtcctggttctcgcacttgccgagtgtgtgggaatccacatggattgatcaggaagtatggccttatgtgctgcaggcagtgcttacgtagcaatgccaaggaaattggcttcatcaagtatcgctaaaagagctgttgtcacctacggaccaatattatgttctggcactaggatgttttgaagatgttatgtttgaagaaacttgagacttgtctttttcatctattttattatcagacataatgtgtggaacgaagaatacttttatataaattggtttgcacga

SEQ ID NO: 256350 - DNA, 376 bp, Glycine max
tgggacagcaaaaacaattaatagagatgagtttgaagaacaacatggtggtgctaaaggtgtgtttgatgcttcttttccttgtgggggttacagctgcacgcatggaactgagcttcttcaaaagtgatcagtcatcaagttatgatgatgatgagtgttcagaaccatgctgtgatctctgcatgtgcacacgctcaatgccttctcaatgcaactgtgaagatattaggctgaattcatgccactcacattgtaagagctgtatgtgcacacgctcacagccaggacagtgtcgttgtcttgacaccaacgacttctgctacaaaccttgcaagtccagagatgactagaaaaactaatagctctctcaaat

SEQ ID NO: 256351 - DNA, 369 bp, Glycine max
gagcacatagatggctattcctgtgatagatttcagcactctcaatggagacaaaaggggtgaaaccatggcgcttttggatgaagcttgtcagaaatggggtttctttctggtaaagagaattagatttgcgttaattcctccttttaatcaattgttagtttagttggctttgttgtttaatacattacatgtgcagattgagaaccatgaaattgacaaaaacctgatggaaaaggtgaaggagctaattaatattcactatgaggagaacctgaaggaaggtttctaccagtccgagatagcaaagaccttggagaaaaaacagaacacctctgatatagattgggaaagtgccttcttcatttg

SEQ ID NO: 256352 - DNA, 396 bp, Glycine max
catttttggtattataggtaacatgatttctgtgatggtgtacttggctccggtgccaacgttttaccagatatacaaaaagaaatgcacggacggtttccactcgctgccatacttgttgtcattaatgagttctatgctttggttatactacgccttcctcaaaattcatgactgcgttgatccccttattacgatcaactcgatcggatgtgtcatagagctcatctacattctcacctacattaagtatgctcacacggatgcaaggaacttaacctatacgctattcgcggccatgaatattgccttcttgacctcggtcctttcctcgcattttgctctacatggttcccaccgtgtcaaagtcattggatggatttgtgacgccgtttc

SEQ ID NO: 256353 - DNA, 394 bp, Glycine max
  unsure (1)..(394): unsure at all n locations
gacagcaaaaacaattaataaagatgagtttgaagaacaacatggtggtgctaaaggtgtgtttgttgcttcttttccttgtgggggttacagctgcacgcatggaactgagcttcttcaaaagtgatcagtcatcaagttatgatgatgatgagtattcaaaaccatgctgtgatctctgcatgtgcacacgctcaatgccttctcaatgcagctgtgaagatattaggctgaattcatgccactcagattgtaagagctgtatgtgcacacgctcacagccaggacagtgtcgntgtcttgacaccaacgacttctgctacaaaccttgcaagtccagagatgactangaaaactaatagctctctcaaatggacgaagcccctttaggctt

SEQ ID NO: 256354 - DNA, 385 bp, Glycine max
agagacgacagagggggacacaactaactaagaaagtcttccatagccccccaaaaatgaagagcaccatcttctttgctctctttctcttttgtgccttcaccacctcatacctaccttcagccatcgctgatttcgtgctcgataatgaaggtaaccctcttgaaaatggtggcacatattatatcttgtcagacataacagcatttggtggaataagagcagccccaacgggaaatgaaagatgccctctcactgtggtgcaatctcgcaatgagctcgacaaagggattggaacaatcatctcgtccccatatcgaatccgttttgtcgccgaaggccatcctttgagccttaagttcgattcatttgcagttataatgct

SEQ ID NO: 256355 - DNA, 410 bp, Glycine max
agttcgtcgaagacgtcagacggggatccacaccaacaaacccgttcctccacccaccgggtcgtcaaggccgccaccgccgtcacagcgggcggctccctcttgatccttgcctcatcgatcctcgccgacaccgtcattgccctcaccatcgtcaccccactgtccgtcattttcagtccggttctcggccctggcgtaatcaccgttgcgctcctgagcctggggttcctcgcctcgagtgggttctgtgtggcggctgtcactgtgctggcgtctatctacaggtacgttaccggcggacaaccacctggcgcggatcagttagacagcgcgcgtcacaagatcatggacaatgcgcgtgagatcaacgactacggacagcaacacatcatccgcgtccaggcttc

SEQ ID NO: 256356 - DNA, 374 bp, Glycine max
  unsure (1)..(374): unsure at all n locations
gacagcaaaaacaattaataaagatgagtttgaagaacaacatggtggtgctaaaggtgtgtttgttgcttcttttccttgtgggggttacagctgcacgcatggaactgagcttcttcaaaagtgatcagtcatcaagttatgatgatgatgagtattcaaaaccatgctgtgatctctgcatgtgcacacactcaatgcctnctcaatgcagctgtgaagatattaggctgaattcatgccactcagattgtgagagctgtatgtgcacacgctcacagtcaggacagtgtcgttgtcttgacaccaacgacttctgctacaaaccttgcaagtccagagatgactagaaaaactaatagctctctcaaatg

SEQ ID NO: 256357 - DNA, 376 bp, Glycine max
gacattattctatatcaattttggttaagagtcttgaaaaagcaagagaaaaaaaaataccaaccatggcaaccatttctgatcaacctagagggtcctactcctatggaacctcatatggagcaccctatggaaccacgtatgagaccaacaccagcattaacaacccaccttcacgccaaacagtgaagttcataactgctgccactattggcatcacactcttgctcctgtctgggttgaccctcacaggcactgtcataggtttgatcattgtaacccctcttcttgttatcttcagccccatccttgtccctgctgcgtttgtgctgatcctagatgcttctggctatttgttctctgggggctgtggtgt

SEQ ID NO: 256358 - DNA, 376 bp, Glycine max
gacacaactaactaagaaagtcttccatagccccccaaaaatgaagagcaccatcttctttgctctctttctcttttgtgccttcaccacctcatacctaccttcagccatcgctgatttcgtgctcgataatgaaggtaaccctcttgaaaatggtggcacatattatatcttgtcagacataacagcatttggtggaataagagcagccccaacgggaaatgaaagatgccctctcactgtggtgcaatctcgcaatgagctcgacacagggattggaacaatcatctcgtacccatatcgaatccgctttatcgccgaaggccattctttgagccttaagttcgattcatttgcagttataatgctctgtgtt

SEQ ID NO: 256359 - DNA, 388 bp, Glycine max
  unsure (1)..(388): unsure at all n locations
gacagcaaaaacaattaataaagatgagtttgaagaacaacatggtggtgctaaaggtgtgtttgttgcttcttttccttgtgggggttacagctgcacgcatggaactgagcttcttcaaaagtgatcagtcatcaagttatgatgatgatgagtattcaaaaccatgctgtgatctctgcatgtgcacacgctcaatgcctnctcaatgcagctgtgaagatattaggctgaattcatgccactcagattgtaagagctgtatgtgcacacgctcacagccaggacagtgtcgttgtcttgacaccaacgacttctgctacaaaccttgcaagtccagagatgactagaaaaactaatagccctctcaaatggacgaagccccttt

SEQ ID NO: 256360 - DNA, 256 bp, Glycine max
ggttcacaatcctcctcatctctcttctcttctgcatcgcccacacttgcagcgcctccaaatggcagcaccagcaagatagctgccgcaagcagctccagggggtgaacctcacgccctgcgagaagcacatcatggagaagatccaaggccgcggcgatgacgatgatgatgatgacgacgacaatcacattctcaggaccatgcggggaagaatcaactacataaggaggaacgaagaaaaaaaaactaatag

SEQ ID NO: 256361 - DNA, 386 bp, Glycine max
tacgccaagttgcggattcgatgacccttttcatccaacaaggtggactttatattcaacaagttttctgtcaaacccgggtcagaggaggctcagatcatgaagaatactattagtgagtgtgaagagggtggaatcaaaggagaggaaaagtactgtgccacttcgcttgaatccatggttgatttcagcactttcaagcttggaaataatgttgaggttgtgtccacagaagtggacaaggaaacgggattgcagaaatacaccgtaacaccgggagtgaagaagttatcaggggacaaggctgttgtgtgccataagcagaactacccttatgctgcgttatactgtcacaaaaccgagaccaccagagcttactctgtgcc

SEQ ID NO: 256362 - DNA, 386 bp, Glycine max
gcacctccttgttcacatcatcatcatcatcatcatcatcatctttttcttcttcaatcagttgactcttcggtcctccctctattcatctgatggagcccatggacatcgttgggaaggccaaggaagacgcttctcttcctaaagcgacaatgacgaaaattattaaagagatgttgcccccggacgtgcgtgtcgccagagatgcacaggatttattgatcgagtgttgtgtcgagtttataaaccttgtctcgtccgagtccaacgaagtctgtaacaaagaagaaagaaggacgattgcaccggagcacgtgctgaaggctttaggggttctcggatttggcgagtaccttgaggaagtttatgcagcctatgaacaacac

SEQ ID NO: 256363 - DNA, 367 bp, Glycine max
gatgcaactgaataattaagaaaagccatttccatagcagcctaagaaaatgaagagcactagcttgttcgctatctttctactttgcgccttcatctcatacttaccttccgccaccgcccaggacgtgctcgacgtggatggcgatccgattcggaacggtttcatatactacgttttgccggcaataagaggaaacggtggcggaatagaacgagccgcactcgggaaagacacttgccctatcactgtagtgcaatctgccaatccaaactctaaggggttagaaattaagtttgaatctgcataccccgactattacataaacgaaaccctaattttgcaaataaagttcaggtacccacag

SEQ ID NO: 256364 - DNA, 326 bp, Glycine max
gactttgagttcgaactaaacaattcaattcaatctgcctcgatcatggagaggaaaacatttgggtttttggtcttgctcctccttgtcttaacttctgatgtgaccgtgaagagagccgaggccaaagattgcttgacaaggaggcacgggttccagggtagatgcttattcgacaggcaatgtgcacatgtgtgcaggagccatggtttcatcggtggtcagtgccgaagccctcttcgcaaatgcttttgcagcaggccatgttgatcgaaattactactggcaaagaggccatgaaattaaccaaccaaccaattaattaa

SEQ ID NO: 256365 - DNA, 373 bp, Glycine max
  unsure (1)..(373): unsure at all n locations
gattcacacaactaactaagaaagtcttccatagccccccaaaaatgaagagcaccatcttctttgctctctttctcttttgtgccttcaccacctcatacctaccttcagccatcgctgatttcgtgctcgataatgaaggtaaccctcttgaaaatggtggcacatattatatcttgtcagacataacagcatttggtggaataagagcagccccaacgggaaatgaaagatgccctctcactgtggtgcaatctcgcaatgagctcgacaaagggattggaacaatcatctcgtccccatatcgaatccgttttatcgccgaaggccatcctttgagccttaagttcgattcattngcagttataatgct

SEQ ID NO: 256366 - DNA, 218 bp, Glycine max
acgaccagcttgtgggacaagagccaggaggagaccacccgaaggagccatgtgaatgagcgtaaacacgactttcaagctcaccgtggctctcttggcaaactttatgacttttgcagctgtgtgtgatagggcatatttgcccaggagtgctaaagaacttatatggctgcgcattaagacatactccaaagcttttcaccccaaaagtatcagag

SEQ ID NO: 256367 - DNA, 370 bp, Glycine max
  unsure (1)..(370): unsure at all n locations
aggccccaaaaattaaagctcaaggttatcaaccaggaatttgtaaacttccaccggcaaattcagatcctgaaaaattctaacaggcacctgatgggtgatgccttgagcacactgactgtgaaggaacttaagcagttggagaatagacttgaaagagggatcactagaatcagatctaagaaacatgaaatgctattggcctgaattgaatactttcaaaaaagggagattgagctggaaaatgaaaaatcttgcctccggactaagataactgacgttgagaggattcagcangtaaacatggtttctggaccagaactgaatgtcattcaggcattagcttcccgtaacttcttcaatccaaaca

SEQ ID NO: 256368 - DNA, 293 bp, Glycine max
gacagcaaaaacaattaataaagatgagtttgaagaacgacatggtggtgctaaaggtgtgtttgttgcttcttttccttgtgggggatacagctgcacgcatggaactgagcttcttcaaaagtgatcagtcatcaagttatgatgatgatgagtattcaaaaccatgctgtgatctctgcatgtgcacacgctcaatgcctactcaatgcatctgtgaagatattaggctgaattcatgccactcagattgtaagagctgtatgtgcacacgctcacagccaggacagtgt

SEQ ID NO: 256369 - DNA, 431 bp, Glycine max
gcgagaagacgacagacgggggtgtgattgtttgttgttgtaactcgttcttcttcttttgttgctctgtgtttgtgtttgttttttctctcacctgaaaatgtcttgctgcggtggtaactgtggttgcggaagctcctgcaagtgcggcaacggctgcagaggctgcaagatgtacccagacttgagctacactgagtcaaccaccaccgagaccttggtcatgggagtggcacctgttaaggctcaatttgagggtgctgaaatgggtgtgcccgctgagaacgatggctgcaaatgtggaccaaactgctcctgcaacccctgcacttgcaagtgaggtgttgcgagagcaagcttcaagcagagatagcccttaattaggaataatgataaactattaatgtgtagctaagaacttatgtattatg

SEQ ID NO: 256370 - DNA, 398 bp, Glycine max
gattcacacaactaactaagaaagtcttccatagccccccaaaaatgaagagcaccatcttctttgctctctttctcttttgtgccttcaccacctcatacctaccttcagccatcgctgatttcgtgctcgataatgaaggtaaccctcttgaaaatggtggcgcatattatatcttgtcagacataacagcatttggtggaataagagcagccccaacgggaaatgaaagatgccctctcactgtggtgcaatctcgcaatgagctcgacaaagggattggaacaatcatctcgtccccatatcgaatccgttttatcgccgaaggccatccttcgagccttaagttcgattcatttgcagttataatgctgtgtgttggaattcctaccgagtgg

SEQ ID NO: 256371 - DNA, 367 bp, Glycine max
gcttcacagcaaaaacaattaataaagatgagtttgaagaacaacatggtggtgctaaaggtgtgtttgttgcttcttttccttgtgggggttacagctgcacgcatggaactgagcttcttcaaaagtgatcagtcgtcaagttatgatgatgatgagtattcaaaaccatgctgtgatctctgcatgtgcacacgctcaatgcctcctcaatgcagctgtgaagatattaggctgaattcatgccactcagattgtaagagctgtatgtgcacacgctcacagtcaggacagtgtcgttgtcttgacaccaacgacttctgctacaaaccttgcaagtccagagatgactagaaaaactaatagc

SEQ ID NO: 256372 - DNA, 368 bp, Glycine max
gacaggtgtgtgcaatactagcgatagctgataagagagataccaacaagaaaagaaaaaaagaagagttgagattccctttgaagaaaagatggcatcccataggcaaagctatgaagctggtcaaactaagggccgaactgaggaaaagacgaaccagacgatgggcaatattggagagaaggctcaagctgcaaaggagaagacccaggaaatggcccaagctgcaaaggagaagacccaacaaacagcccaagctgccaaggacaagacttgcgacacttcccaagcggcaaaggagaagacccaacagaatacaggagctgctcaacaaaagacctcagagatgggccagtccgcgaaggaat

SEQ ID NO: 256373 - DNA, 348 bp, Glycine max
aggcctagaagaccacatacggggatccacacgactaactaagaaagcatttcatagccctactaacatgagctgctccatcatattcgctctataactgatttgagccttcaccaccttatacctaccttaaaacatggcttattataggctcgataatgaacgtaaccctctagaaaacggtcgcacatattatatctcgacagacataacaacatttgatggaatgcgaacagtccaaacgggaaatgcaagatgccctctcactgtggtacagtctagcaatgacgctcgacaaagggattggaacactcatctcgtgaccatatccaatccgcaatatcgacg

SEQ ID NO: 256374 - DNA, 406 bp, Glycine max
  unsure (1)..(406): unsure at all n locations
gacagcaaaaacaattaataaagatgagtttgaagaacaacatggtggtgctaaaggtgtgtttgttgcttcttttccttgtgggggttacagctgcacgcatagaactgagcttcttcaaaagtgatcagtcatcaagttatgatgatgatgagtattcaaaaccatgctgtgatctctgcatgtgcacacgctcaatgcctnctcaatgcagctgtgaagatattaggctgaattcatgccactcagattgtaagagctgtatgtgcacacgctcacagccaggacagtgtcgttgtcttgacaccaacgacttctgctacaaaccttgcaagtccagagatgactagaaaaactaatagctctctcaaatggacgaagcccctttaggctttgtttgttatgt

SEQ ID NO: 256375 - DNA, 389 bp, Glycine max
gactctcatcacattattctatatcaattttggttaagagtcttgaaaaagcaagagaaaaaaaaaataccaaccatggcaaccatttctgatcaacctagagggtcctactcctatggaacctcatatggagcaccctatggaaccacgtatgagaccaacaccagcattaacaacccaccttcacgccaaacagtgaagttcataactgctgccactattggcatcacactcttgctcctgtctgggttgaccctcacaggcactgtcataggtttgatcattgcaacccctcttcttgttatcttcagccccatccttgtccctgctgcgtttgtgctgttcctagttgcttctggctttttgatctctggcggctgtggtgtggc

SEQ ID NO: 256376 - DNA, 389 bp, Glycine max
  unsure (1)..(389): unsure at all n locations
aggacagcaaaaacaattaataaagatgagtttgaagaacaacatggtggtgctaaaggtgtgtttgttgcttcttttccttgtgggggttacagctgcacgcatggaactgagcttcttcaaaagtgatcagtcatcaagttatgatgatgatgagtattcaaaaccatgctgcgatctctgcatgtgcacacgctcaatgcctnctcaatgcagctgtgaagatattaggctgaattcatgccactcagattgtaagagctgtatgtgcacacgctcacaggcaggacagtgtcattgtcttgacaccaacgacttctgctacataccttgcaagttcagagatgactagaaaaactaatagctctctcaaatggacgaagcccctt

SEQ ID NO: 256377 - DNA, 284 bp, Glycine max
gactttgagttcgaactaaacaattcaattcaatctgcctcgatcatggagaggaaaacatttgggtttttgttcttgctcctccttgtcttagcttctgatgtgactgtgaagagagcagaggcgaaagattgcttgacaaggaggcacgggttccagggtagatgcttattcgacaggcaatgtgcacatgtgtgcacgagcgatggtttcatcggtggtcagtgcccaggccctcttcgcaaatgcttttgcagcacgccatgttgatcgaaattactact

SEQ ID NO: 256378 - DNA, 385 bp, Glycine max
gacagcacaaacaattaataaagatgagtttgaagaacaacatggtggtgctaaaggtgtgtttgttgcttcttttccttgtgggggttacagctgcacgcatggaactgagcttcttcaaaagtgatcagtcatcaagttatgatgatgagtattcaaaaccatgctgtgatctccgcatgtgcacacgctcaatgcctcctcaatgcagctgtgaagatattaggctgaattcatgccactcagattgtaagagctgtatgtgcacacgctcacagccaggacagtgtcgttgtcttgacaccaacgacttctgctacaaaccttgcaagtccagagatgactagaaaaactaatagctctctcaaatggacgaagccccttt

SEQ ID NO: 256379 - DNA, 372 bp, Glycine max
gactcactcatacaatagagaccagcttttgcttctttgtgaacatggaaatgaggaaatcatgtggcttcttcttcttgctccttctccttgtctttgcttaccaggtggtggtgcaaaccgagggaagagtgtgtgagtcacaaagccactggttccatggcttgtgtaatagagaccacaactgcgctatggtctgcaagaacgaatgtttctcctgtggcaggtgcaaaggcttccgacgacgatgcttttgcaccaggatttgctgagatctcatccaacactactgttgtcatgccaattaataaatcataactaggccaaataaattgcatctactgtttatccaatagggagctagcttccaca

SEQ ID NO: 256380 - DNA, 373 bp, Glycine max
tggggaagcatttgagacttactattacagagaaaagagaatggctgatacaagtggaggagatgcaatgagaccagtggtgatatgtgataacaagtgtggctgtacacttccatgcactggtgggtacacttgcaggtgcacatgtgctggcactgacgcacgaggtggtgatcacgtgacatgctcgtgcggagagcactgcagatgcaatccatgctcatgtcccaagattgcggctgctgtaagtggttgcagatgtggcacagattgagcatgtgcctgctggcgtacttagtctcacaccttagggcttaaacttcacggcttatcatatgtgttccaatattgaatacgttctctatatattagt

SEQ ID NO: 256381 - DNA, 404 bp, Glycine max
gatgcaactgaataattaagaaaagccatttccatagcagcctaagaaaatgaagagcactagcttgttcgctatctttctactttgcgccttcacctcatacctaccttccgccaccgcccaggacgtgctcgacgtggatggcgatccgattcggaacggtttcatatactacgttttgccggcaataagaggaaacggtggcggaatagaacgagccgcactcgggaaagacacttgccctatcactgtagtgcaatctcccaatccaaactctaaggggttagaaattaagtttgaatctgcataccccgcctattacataaacgaaaccctaattttgcaaataaagttcagttacccacagcagtgtgaaagaaagaatccttggtgggccatttcta

SEQ ID NO: 256382 - DNA, 388 bp, Glycine max
gacagcaaaaacaattaataaagatgagtttgaagaacaacatggtggtgctaaaggtgtgtttgttgcttcttttccttgtgggggttacagctgcacgcatggaactgagcttcttcaaaagtgatcagtcatcaagttatgatgatgatgagtattcaaaaccatgctgtgatctctgcatgtgcacacgctcaatgcctcctcaatgcagctgtgaagatattaggctgaattcatgccactcagattgtaagagctgtatgtgcacacgctcacagccaggacagtgtcgttgtcttgacaccaacgacttctgctacaaaccttgcaagtccagagatgactagaaaaactaatagctctctcaaatggacgaagccccttt

SEQ ID NO: 256383 - DNA, 308 bp, Glycine max
tgtttcacacaactaactaagaaagtcttccatagccccccaaaaatgaagagcaccatcttctttgctctctttctcttttgtgccctcaccacctcatacctaccttcagccatcgctgatttcgtgctcgataatgaaggtaaccctcttgaaaatggtggcacatattatatcttgtcagacataacagcatttggtggaataagagcagccccaacgggaaatgaaagatgccctctcactgtggtgcaatctcgcaatgagctcgacaaagggattggaacaatcatctcgtccccatatcg

SEQ ID NO: 256384 - DNA, 369 bp, Glycine max
gaatctcttcacagaagaaaaaagagaagaagatgggtttgaagaacaacatggtggtgctaaaggtgtgtttggtgctacttttccttggggggggtactactagtgccagcttgaagcttagtgaacttggcctgctcatgaaaagtgatcatcatcaactcttaaatgatgatgactctttaaaaccattctgtgatcaatgcgcatggcacaagtccaacccctgctcaatgccgctgttcagatatgaggctgaattcgtgccattcagcttgcatatcttgtatctgcgcattatcgtatcctgcacagtgtctttgtgttgacataacggatttctgctatgaacctttgcagcccagtgag

SEQ ID NO: 256385 - DNA, 218 bp, Glycine max
gattcacgcggctaaatctgaactgaagagtactgtcttctttgctctctttctaaacagcgccttcaccatctcatacctgccttcagtcaccgctcatgtcgtgctccacactgatgatgatccttttcaaaacggcggcacatactatatgttgccagttatgagaggaaagggcagtggaatagcagttgattccactggaaaagaaatatgcc

SEQ ID NO: 256386 - DNA, 394 bp, Glycine max
ggtgactgaaaaaaggttttagatcgtaaaaactaattactacgaaaacaagagatatcgaagatggctctgcccaaagctaaggagatcgtgtcgtccaattccgtcgtcgttttcagcaaaacctattgccctttctgcgtcgatgtgaagaagctcttcggtgacctcggtgccaattacaaggccatcgaactcgacactgaatccgatggaaaagagcttcaagcagcattagttgagtggacggaccagcgaaccgtgcctaatgcgtttattggtggaaaccacattggtggctgtgactcaacaactgccctgcacactcaggggaagctggttcctctgctgatatctgctggagctgctgccaaatcaactgcttaaaggatct

SEQ ID NO: 256387 - DNA, 405 bp, Glycine max
gatgcaactgaataattaagaaaagccatttccatagcagcctaagaaaatgaagagcactagcttgttcgctatctttctactttgcgccttcacctcatacctaccttccgccaccgcccaggacgtgctcgacgtggatggcgatccgattcggaacggtttcatatactacgttttgccggcaataagaggaaacggtggcggaatagaacgagccgcactcgggaaagacacttgccctatcactgtagtgcaatctcccaatccaaactctaaggggttagaaattaagtttgaatctgcataccccgcctattacataaacgaaaccctaattttgcaaataaagttcagttacccacagcagtgtgaaagaaagaatccttggtgggccatttctaa

SEQ ID NO: 256388 - DNA, 388 bp, Glycine max
ggaagcatttgagactaactcttagagagaaaaaaaatggctgatacaggtggaggagatgcagtgagaccagtggtaatatgtgataacaagtgtggctgcacacttccatgcactggtggttccacttgcaagtctattaagttcatgatttcaacaaagtgcacaagtgctggcactgtcacaggagggggtgatcacgcgacatgctcttgcggagagcactgtggctgcaatccatgctcatgtcccaaaattgctgctgctggaagaggttgcagatgtggcacagattgcgcatgtgcctactgccgcacttagtatcacaccttaaggcttaaacttcacgttttattttatgtcttcaaatcttgaatacgtactctat

SEQ ID NO: 256389 - DNA, 350 bp, Glycine max
taatttgggaattattgctcccatcgccattggtttcattgtcggcgctaacattttgttgggtggggccttctctggagcggccatgaaccccgctgtgacatttgggcctgctgtcgtgagctggacctggaccaaccactggatctactgggccgggcctctcatcggtggtggaatcgctggccttgtttacgaggttgtctttatcagccacacccacgagcagcttcccaccactgactactagagggggggaaatgaaaataaaaaaaaaaaaaattgtgtattattgaatttctctggaatcttcttctgtgtacggttttccttccttgtgttttcttcct

SEQ ID NO: 256390 - DNA, 355 bp, Glycine max
gacacacatacccccaactaacgataattccttcacttgcagaacttagttctctgttgtatcatcatcatcttcattagggttagccctaaacttcaccttcaaccatgaccacagtgccaccacacagtgtccaagtgcacacaacaacacaccgctacgaagccggcgtcgacccgccggctcgttttgaggcgccgcgttacgaagccggcatcaaggcgccctcttccatttaccattccgagagaggtccgacgacctctcaagttctcgcagttgtcgccggccttccggtcggcggcatcctcctgctcctggcaggactgaccctggctggaactctcaccgggct

SEQ ID NO: 256391 - DNA, 280 bp, Glycine max
  unsure (1)..(280): unsure at all n locations
gacagcaaanacaattaataaagatgagtttgaagaacaacatggtggtgctaaaggtgtgtttgttgcttcttttccttgtgggggttacagctgcacgcatggaactgagcttcttcaaaagtgatcagtcatcaagttatgatgatgatgagtattcaaaaccatgctgtgatctctgcatgtgcacacgctcaatgcctcctcaatgcagctgtgaagatattaggctgaattcatgccactcagattgtaagagctgtatgtgcacacgctcaca

SEQ ID NO: 256392 - DNA, 246 bp, Glycine max
  unsure (1)..(246): unsure at all n locations
gacagcaaaaacaattaataaagatgagtttgaagaacaacatggtggtgctaaaggtgtgtttgttgcttcttttccttgtgggggttacggctgcacgcatggaactgagcttcttcaaaagtgatcagtcatcaagttatgatgatgatgagtattcaaaaccatgctgtgatctctgcatgtgcacacgctcaatgcctnctcaatgcagctgtgaagatattaggctgaattcatgccact

SEQ ID NO: 256393 - DNA, 275 bp, Glycine max
gacagcaaaaacaattaataaagatgagtttgaagaacaacatggtggcgctaaaggtgtgtttgttgcttcttttccttgtgggggttacagctgcacgcatggaactgagcttcttcaaaagtgatcagacgtgaagttatgatgatgatgagtattcaaaaccatgctgacatcctttgatgtgcacacgctcaatgcctcctcaatgcagctgtgaagatattgggctgaattcatgccactcagattgtaagagctgtatgtgcacacgc

SEQ ID NO: 256394 - DNA, 176 bp, Glycine max
tcgcccacgcgttcgtagacgacagaaggggacaccaacaccaaaacaaacccactaagatggcttgctttgtatcctttctagtgctgcttcttgcagcccttattctcatgcctcaagggcttgctacttactacaaaccaattaagaagccaccagtgtacaagccttcagtg

SEQ ID NO: 256395 - DNA, 357 bp, Glycine max
  unsure (1)..(357): unsure at all n locations
gacagcaaaaacaattaataaagatgagtttgaagaacaacatggtggtgctaaaggtgtgtttgttgcttcttttccttgtgggggttacagctgcacgcatggaactgagcttcttcaaaagtggtcagtcatcaagttatgatgatgatgagtattcaaaaccatgctgtgatctctgcatgtgcacacgctcaatgcctcctcaatgcagctgtgaagatattaggctgaattcatgccactcanattgtaagagctgtatgtgcacacgctcacagccaggacagtgtcgttgtcttgacaccaacgacttctgctacaaacctttgcagtccagagatgactagaaaaact

SEQ ID NO: 256396 - DNA, 415 bp, Glycine max
gacagcaaaaacaattaataaagatgagtttgaagaacaacatggtggtgctaaaggtgtgtttgttgcttcttttccttgtgggggttacagctgcacgcatggaactgagcttcttcaaaagtgatcagtcatcaagttatgatgatgatgagtattcaaaaccatgctgtgatctctgcatgtgcacacgctcaatgcctcctcaatgcagctgtgaagatattaggctgaattcatgccactcagattgtaagagctgtatgtgcacacgctcacagccaggacaggtgtgttgtcttgacaccaacgacttctgctacaaaccttgcaagtccagagatgactagaaaaactaatagctctcttaaatggacgaagcccctttaggctttgtttgttatgataggggaga

SEQ ID NO: 256397 - DNA, 278 bp, Glycine max
gaaagtttctgtctcacatacattaattgctggaaaaatatcgtacgcatcgatatgaaaagaaaatatttgatacgcgaagacataattgaaattgaaatgaattttttcttgtattcggaaaaaaagatgtttcaaatgaataaaaacttgtttggtggaacttggaataaggcccttctgagtaaagaaagggcatagcccttttttttataggatcttcacaggaacaagaagatttaattggaaatatcgacagattcttagggagtctaaac

SEQ ID NO: 256398 - DNA, 410 bp, Glycine max
acacaactaactaagaaagtcttccatagccccccaaaaatgaagagcaccatcttctttgctctctttctcttttgtgccttcaccacctcatacctaccttcagccatcgctgatttcgtgctcgataatgaaagtaaccctcttgaaaatggtggcacatattatatcttgtcagacataacagcatttggtggaataagagcagccccaacgggaaatgaaagatgccctctcactgtggtgcaatctcgcaatgagctcgacaaagggattggaacaatcatctcgtccccatatcgaatccgttttatcgccgaaagccatcctttgagccttaagttcgattcatttgcagttataatgctgtgtgttggaattcctaccgagtggtctgttgtgggggatct

SEQ ID NO: 256399 - DNA, 435 bp, Glycine max
ggttttctaaaacactatcccttttactgtttattgacaaagagaaacaatcggaggatctgttctgttccataagatggctggacttttaggatataggagccttccacctaaggcaaagaatctggtagttgctgggggtttgacagcttttgtctttggtgcatacttctacaccatgagggctgctggaggcactgatgaactgcaggtagcaattgataagtttgaagctgacaagagcaagaatgagggtgatgccaacatgccatcaaaggtctaaagcttgtacaataaagcaatactttgggtgtattcactgttttggtttgggatcaagctttttacttagtatgagaatgttctaaaaagaatgatattgaatctagttgctaataagtttcaaccagctttatgtactatgactgtgtggta

SEQ ID NO: 256400 - DNA, 307 bp, Glycine max
gattcacacaactaactaagaaagtcttccatagccccccaaaaatgaagagcaccatcttctttgctctctttctcttttgtgccttcaccacctcatacctaccttcagccatcgctgatttcgtgctcgataatgaaggtaaccctcttgaaaatggtggcacatattatatcttgtcagacataacagcatttggtggaataagagcagccccaacgggaaatgaaagatgccctctcactgtggtgcaatctcgcaatgagctcgacaaagggattggaacaatcatctcgtccccatatcg

SEQ ID NO: 256401 - DNA, 389 bp, Glycine max
ggagttcgaactaaacaattcaattcaatctgcctcgatcatggagaggaaaacatttgggtttttgttcttgctcctgcttgtcttagcttctgatgtgacggtgaaaagagcagaagcgaaagattgcttgacaaggaggcacgggttccagggtagatgcttattcgacaggcaatgtgcacatgtgtgcaggagcgatggtttcatcggtggtcagtgccgaagccctcttcgcaaatgcttttgcagtaagccatgttgatcgaaattactactgccaaagaggccatgtaataaacaaacaaaccaattaataaatagctctaaccgacacatatgtacgtagtgtcggggttctagctagctaggtaggtacgtgtgtcttt

SEQ ID NO: 256402 - DNA, 337 bp, Glycine max
aggacagcaaaaacaattaataaagatgagtttgaagaacaacatggtggtgctaaaggtgtgtttgctgcttcttttccttgcgggggttacagctgcacgcatggaactgagcttcttcaaaagtgatcagtcatcaagttatgatgatgatgagtattcaaaaccatgctgtgatctttgcatgtgcacacgctcaatgcctgctcaatgcagctgtgaagatattaggctgaattcatgccactcagattgtaacgagctgtatgtgcacacgctcacagacaggacagtgtcgatgtcttgactccaacgacttctgctacaaaccttgcat

SEQ ID NO: 256403 - DNA, 295 bp, Glycine max
  unsure (1)..(295): unsure at all n locations
gattcacacaactaactaagaaagtcttccatagccccccaaaaatgaagagcaccatcttctttgctctctttctcttttgtgccttcaccacctcatacctaccttcagccatcgctgatttcgtgctcgataatgaaagtaaccctcttgaaaatggtggcacatattatatcttgtcagacataacagcatttggtggaataagagcagccccaacgggaaatgaaagatgccctctcactgtggtgcaatctcgcaatgagctcgacanagggattggaacaatcatctc

SEQ ID NO: 256404 - DNA, 389 bp, Glycine max
acgagaagacgacagagggggcaattaaacccaagcagaaggccatattatttttttttatttgaaataatgtgcgggatcatccacaagattgaggagacccttcatgtgggagggcacatgaaagaggagcacaaaggtgaacaccatggtgagcacaaaggtgaacacaaaggagaacaccatggtgagcacaaaggtgaacacgtaggagaacaacaccatggggagcacaaggagggacttgtggataagatcaaggacaagatccatggtgatggccatgacaagggtgagaaaaagaagaagaaggacaccgaaaagaagggggtggacatgaccattatggtcatagcaacagcagtgaccgggattagatcttatatgtt

SEQ ID NO: 256405 - DNA, 423 bp, Glycine max
gggggcccggtggtgatcacagtggtgctgttcgggctgttaagcccggggcttctgtttcatatgccagccaggggaagggtagcagagtttgggaacatgcaaaccagtggggcctccattttggttcacgccatcatctactttggcctcatcactatcttcctcattgccattggcgttcacatctacactggctaactcctggatctggttcagtttcacccatctatgtttatctctgccttttaattagtctttttagctttacaataatttccttgtttgatctctatgtatcttatgtggggttgggtcatgggtgcccagaaaaaaacaatagattcagataaggatgatgctgctgtgtgtgttttttttttttttatcaagatagtatgggtcatgaacctttttgcttat

SEQ ID NO: 256406 - DNA, 301 bp, Glycine max
gattcacgcaactaaataagaaatgaagagtactatcttctttgctctctttctagtttgtgccttcaccatctcatacctgccttcagccaccgctcagttcgtgctcgacactgatgatgatcctcttcaaaacggtggcacatactatatgttgccagttatgagaggaaagggcggtggaatagaagtagattcaactggaaaagaaatatgccctctcactgttgtgcaatcacccaatgagctcgataaggggattggactagtctttacatctccattacatgccctttttatc

SEQ ID NO: 256407 - DNA, 345 bp, Glycine max
gactttgagttcgaactaaacaattcaattcaatctgcctcgatcatggagaggaaaacatttgggtttttgttcttgctcctccttgtcttagcttctgatgtgacggtgaagagagcagaggcgaaagattgcttgacaaggaggcacgggttccagggtagatgcttattcgacaggcaatgtgcacatgtgtgcaggagcgatggtttcatcggtggtcagtgccgaggccctcttcgcaaatgcttttgcagcaggccatgttgatcgaaattactactgccaaagaggccatgaagtaaacaaacaaacaaataaataaatagctctaaccgacacata

SEQ ID NO: 256408 - DNA, 436 bp, Glycine max
gacagcaaaaacaattaataaagatgagtttgaagaacaacatggtggtgctaaaggtgtgtttgttgcttcttttccttgtgggggttacagctgcacgcatggaactgagcttcttcaaaagtgatcagtcatcaagttatgatgatgatgagtattcaaaaccatgctgtgatctctgcatgtgcacacgctcaatgcctcctcaatgcagctgtgaagatattaggctgaattcatgccactcagattgtaagagctgtatgtgcacacgctcacagccaggacagtgtcgttgtcttgacaccaacgacttctgctacaaaccttgcaagtccagagatgacttgaaaaactaatagctctcttaaatggacgaagcccctttaggctttgtttggtatggtaggggagaccaattaaaccaggaattaaa

SEQ ID NO: 256409 - DNA, 397 bp, Glycine max
tgggagtgcaaaactcacaacacatctaaacaaaaaatcaagaacaatggcttatgctaggcttgctcctatggctgtcttcttgcttgccacttccaccataatgttcccaacgaagatagaagcagcagattgtaatggtgcatgttcacctttcgagatgccaccgtgccgctcacgtgattgtcgttgtgtccctataggactagttgctggtttctgcatacatccaactggactttcatctgttgcgaagatgatcgacgaacatcccaacttatgtcaatctgatgatgaatgcgtgaagaaaggaagtggcaatttttgcgctcgttaccctaataattatatcgattatggatggtgttttgattctgattctgaagcactgaaaggc

SEQ ID NO: 256410 - DNA, 416 bp, Glycine max
gattcacacaactaactaagaaagtcttccatagccccccaaaaatgaagagcaccatcttctttgctctctttctcttttgtgccttcaccacctcatacctaccttcagccatcgctgatttcgtgctcgataatgaaggtaaccctcttgaaaatggtggcacatattatatcttgtcagacataacagcatttggtggaataagagcagccccaacgggaaatgaaagatgccctctcactgtggtgcaatctcgcaatgagctcgacaaagggattggaacaatcatctcgtccccatatcgaatccgttttatcgccgaaagccatcctttgagccttaagttcgattcatttgcagttataatgctgtgtgttggaattcctaccgagtggtctgttgtggaggatcta

SEQ ID NO: 256411 - DNA, 356 bp, Glycine max
  unsure (1)..(356): unsure at all n locations
gacagcaaaaaacaattaataaaagatgagtttgaagaacaacatggtggtgctaaaagtgtgtttggtgcttcttttccttgtgggggttacagctgcacgcatggaactgagcttcttcaaaagtgatcagtcatcaagttatgatgatgatgagtattcaaaaccatgctgtgatctctgcatgtgcacacgctcaatgcctcctcaatgcagctgtgaagatattaggctgaattcatgccactcagattgtaagagctgtatgtgcacacgctcacagccaggacagtgtcgttgtcttgacaccaacgacttctgctacaaaccttgcangtccagagatgactagaaaa

SEQ ID NO: 256412 - DNA, 383 bp, Glycine max
gattgtgtgacagctaaattctcaaaggcaccaattctattgctcagagttcccaaattctccccaagagataaaatgtctctaatcccaaacttcttcggtggccggagaaacaatgtgttcgatcctttctcactggacgtgtgggatcccttcaaggattttcctttcccaaatacgctttcttcagcttccttccctgaattttctcgggaaaattcagcatttgtgagcacccgtgtggactggaaggagaccccagaggcgcacgtgttcaaggcagatattccaggactgaagaaggaggaagtgaaggtgcagattgaagacgataaggttcttcagataagcggagagagggacgttgagaaggaagataagaa

SEQ ID NO: 256413 - DNA, 139 bp, Glycine max
gaagaaagctgctagcagagggaagttctacacttttttgtttggattgatcgagtgtactttttcttttcgagattggcttggtgtgcagtggaaagagggtggaaaagagtggtaagggggagggcggcgcccctag

SEQ ID NO: 256414 - DNA, 466 bp, Glycine max
  unsure (1)..(466): unsure at all n locations
cccacacgttcgtactgcttttatacgacattatggtagaatgtttnttttgtgttatattgtgggtattttttatatatggtggtttattttatttttctcttataatattttatctttcttacttcttaattattatttttttttttttttattatttctttacttttatttgttttttattttttttaaaaataactattatttctttgatttttttatactctaattcttattttatttaattttaaaatataatattttaatttaaattactcttattttttttttcttttttttttatacttttctatcttttatataatttattttttttttttttattattttatttcttttatatttattttttttttttttcatttttaaatattttattatttttcttattttaaaaaaaccattctttctttttttttttttttttttttgtcttattttattt

SEQ ID NO: 256415 - DNA, 360 bp, Glycine max
gattcacacaactaactaagaaagtcttccatagccccccaaaaatgaagagcaccatcttctttgctctctttctcttttgtgccttcaccacctcatacctaccttcagccatcgctgatttcgtgctcgataatgaaggtaaccctcttgaaaatggtggcacatattatatcttgtcagacataacagcatttggtggaataagagcagccccaacgggaaatgaaagatgccctctcactgtggtgcaatctcgcaatgagctcgacaaaaggattggaacaatcatctcgtccccatatcgaatccgttttatcgccgaaggccatcctttgagccttaagttcgattcatttg

SEQ ID NO: 256416 - DNA, 412 bp, Glycine max
gactttgagttcgaactaaacaattcgattcaatgtgcctcgatcatggagaggaaaacatttgggtttttgttcttgctcctccttggcttagcttctgatgtgacggtgaaaagagcagaggcgaaagattgcttgacaaggaggcacgggttccagggtagatgcttattcgacaggcaatgtgcacatgtgtgcaggagcgatggtttcattggtggtcagtgccgaggccctcttcgcaaatgcttttgcagcaggccatgttgatcgaaattactactgccaaagaggccatgaaataaacaaacaaacaaataaattaatagctctaaccgacacatatgtacgtagtgtcggggttctagctagcttggtaggtactggtgtcttttgttatcgatcctaattt

SEQ ID NO: 256417 - DNA, 303 bp, Glycine max
gacagcaaaaacaattaataaagatgagtttgaagaacaacatggtggtgctaaaggtgtgtttgttgcttattttccttgtgggggttacagctgcacgcatggaactgagcttcttcaaaagtgatcagtcattaagttatgatgatgatgagtattcaaaaccatgctgtgatctctgtatgtgcacacgctcaatgcctactcaatgcagttgtgaagatattaggctgaattcatgccactcagattgtaagagctgtatgtgcacacgctcacagttaggacagcgttgttgttttg

SEQ ID NO: 256418 - DNA, 387 bp, Glycine max
gacagcaaaaacaattaataaagatgagtttgaagaacaacatggtggtgctaaaggtgtgtttgttgcttcttttccttgtgggggttacagctgcacgcatggaactgagcttcttcaaaagtgatcagtcatcaagttatgatgatgatgagtattcaaaaccatgctgtgatctctgcatgtgcacacgctcaatgcctcctcaatgcagctgtgaagatattaggctgaattcatgccactcagattgtaagagctgtatgtgcacacgctcacagccaggacagtgtcgttgtcttgacaccaacgacttctgctacaaaccttgcaagtccagagatgactagaaaaactaatagctctctaaatggacgaagccccttt

SEQ ID NO: 256419 - DNA, 420 bp, Glycine max
gacaacttcattagcaaaacaaaagccataggttactactcttcgccttttcctttgcaattgttaccaaacaattcttgcttagcccttacaagcaagcattaacaacaatgaagaaagtagtgttaaaggtgggcttacatgatgatagaatcaagcgaaaagttatgagaacagcatctggtctttcaggggttgaaccagtttctattgacatgaaagacgagaaaatgaccttattagggaacattgatccagtgaatgcagtgggcaagctacgaaagtgttgtcaaactgaaatagttacagttggtccagccaaagaggataaggggaaagggaagggggagccaggaaaagaacctggtcctctcaaactctatgatgcctattcctattattatcaaatgacacccccac

SEQ ID NO: 256420 - DNA, 232 bp, Glycine max
gaagttggagtggaggagcgtgaggtgagtgtctgtctgagaaaaaaataaaaggcaaagaaacaagaaaacaaaggaaagaaaagatgttacagttcccggcgtatatgactcagtacccattgtcgacgaggactattccgacgtcgtttctgctaccctctcagtggcctcagccccaaaacgaagaactccttctcgccatggaagagtccgatttcgaagaaaaatg

SEQ ID NO: 256421 - DNA, 309 bp, Glycine max
ggatccttctacactaactaaagccgagcagcgagagagagaaaccctagcaaaaatgccggctggtcacggtttgagatcccgcaccagagattccttctctcgtcccttcaggaagaagggtaccatcgccctcaccacatacctcagaacctaccacgtcggcgattatgtcgacgtcaaggttaacggcgccgtccacaagggaatgcctcacaagttctaccatggccgcaccggtcgcgtctggaatgtcaccaaacgtgctgttggggtcgaagtcaacaagcaggtcggcaacagaatcat

SEQ ID NO: 256422 - DNA, 264 bp, Glycine max
  unsure (1)..(264): unsure at all n locations
gactacaagcgagtcacatgcgaagtgaaagtgnggaaaaaaaagagaaaaaaaaaaaggcggcgcggctagaggatacgagctaagctaacctacccgggcatgcgatatcatatctatagtgtagcgtaaactaaattcaatggactggccgttacaacacacacgactggaaagaaaaaaccctgacgtaacttaattgaattgcattgcagtacattttcgtttggtgagctaatataatagaggacaggcaccgaccga

SEQ ID NO: 256423 - DNA, 200 bp, Glycine max
gctctgaaaactgaaaagtaaaggcgaaagactttaggtttggaattgggaattagggttgttcgcgtcacgaaaatgatcgaggtggggttgaacgatcgattggggaagaaggtgcgcgtgaagtgcaacgacgatgacaccatcggcgacctgaagaagctggtggcggctcagacgggcacaagagccgacaagat

SEQ ID NO: 256424 - DNA, 113 bp, Glycine max
ggcacaagtgagtttgttgatcgagataactagaaacagtgtggtgaaaatgaaaggccttggtttcttcgttgctacaattttggtagcatggcaatgccctgcgtacgata

SEQ ID NO: 256425 - DNA, 395 bp, Glycine max
gagagatagagagagaaagatgtctaagcgtggtcttggtggttcggcgggtaacatgttccgtatgtcgctgggtcttccagtggcggctacagtgaactgcgccgactacaccgtggcgatgcacctctacatcatttcggtgtaagggatcaatggtcgtttgaaccgccttccctcggcctgcgttggcgacatggtgatggccaccgctaacaacggaaaacccgatcttaggaagaaggtcttgccagctgtcatcgttcgccagcacatgccatggcgccgaaaggacagcgtctacatgtactttgaacataatgctggtgttattgacaatcccaagggagatatgaaaggatctgctatcactggtcccattggaaaagagtgtg

SEQ ID NO: 256426 - DNA, 437 bp, Glycine max
gacagcaaaaacaattaataaagatgagtttgaagaacaacatggtggtgctaaaggtgtgtttgttgcttcttttccttgtgggggttacagctgcacgcatggaactgagcttcttcaaaagtgatcagtcatcaagttatgatgatgatgagtactcaaaaccatgctgtgatctctgcatgtgcacacgctcaatgcctcctcaatgcagctgtgaagatattaggctgaattcatgccactcagattggtagagcttgatttgcacaccctcacagccaggacagtgtcgcttgcttgaccccaacgacttctgctaccaaccttgccaggcccgagatgactagaaaaactaatagctctcttaaattgaccaagcccctttaggctttggttggtatggtagggggggccaattaaaccaggaattaaag

SEQ ID NO: 256427 - DNA, 362 bp, Glycine max
gattcacacaactaactaagaaagtcttccatagccccccaaaaatgaagagcaccatcttctttgctctctttctcttttgtgccttcaccacctcatacctaccttcagccatcgctgatttcgtgctcgataatgaaggtaacccccttgaaaatggtggcacatattatatcttgtcagacataacagcatttggtggaataagagcagccccaacgggaaatgaaagatgccctctcactgtggtgcaatctcgcaatgagctcgacaaagggattggaacaatcatctcgtccccatatcgaatccgttttatcgccgaaagccatcctttgagccttaagttcgattcatttgca

SEQ ID NO: 256428 - DNA, 422 bp, Glycine max
ggttctagtgtgtgattgtttgttgttgtaactcgttcttcttcttttgttgttctgtgtttgtgtttgttttttctctcacctgaaaatgtcttgctgcggtggtaactgtggttgcggaagctcctgcaagtgcggcaacggctgcggaggctgcaagatgtacccagacttgagctacactgagtcaaccaccaccgagaccttggtcatgggagtggcacctgttaaggctcaatttgagggtgctgaaatgggtgtgcccgctgagaacgatggctgcaaatgtggaccaaactgctcctgcaacccctgcacttgcaagtgaggtgttgggagagcaagcttcaagcagagatagcccttaattaggaataatgataaactattaatgtgtagcttaaaacttatgtattatgtct

SEQ ID NO: 256429 - DNA, 307 bp, Glycine max
ggaactgagtcaatcttgcaacgattaacaatggcttcaaccgacaagtcaccggacccaacgccggcgaagggtccggatccaactccggggaagccgatgagtgttggtcagcacgtgatcgacaagagtgcaatgatggtgcagtcgctggaccccattaagcagatgagtcagcacgtgtgctccttcgctatctacagccatgacatgtctcgccagatagagacacatcactactgctccagactccaccagaacttcatacaatgtgctgtctatgattccgatgaatccaaagctcgtc

SEQ ID NO: 256430 - DNA, 447 bp, Glycine max
ggcagacgccgtgactagacactcatctcactcgcgccatcttagggtttctccttttgtttcgcaacatggttgccgctaagaaaactaagaagacccatgagagcatcaacaacaggctcgctcttgtcatgaagagtggcaaattcaccctcggttacaagaccgttctcaaatctcttaggaactccaaaggaaaattgattatcattgctaacaactgcccccctttgagaaagtcagagattgaatactatgctatgttggcaaaagttggagttcatcattacaatgggaacaatgtggatttgggcactgcatgtggaaaatattacagagtgtgctgccttagcattattgatcctggtgattctgatatcatcaagacactgcctggcgaccaagtaaggagtattgaagttccctgcttgatattttctattttta

SEQ ID NO: 256431 - DNA, 321 bp, Glycine max
  unsure (1)..(321): unsure at all n locations
gaatctcttcacagaagaaaaaagagaagaagatgggtttgaagaacaacatggtggtgctaaaggtgtgtttggtgctacttttccttgtggggggtactactagtgccagcttgaggctgagtgagcttggcctgctcatgaaaagtgatcatcatcaacactcaaatgatgatgactcttcaaaaccatgctgtgatcaatgcgcatgcacaaagtcaaaccctcctcaatgccgctgttcagatatgaggctgaattcgtgccattcagcttgcaaatcttgtatttgcgcattatncgatcctgcacagtgttttt

SEQ ID NO: 256432 - DNA, 280 bp, Glycine max
ggtgatccttctacactaactaaagccgagcagcgagagagagaaaccctagcaaaaatgccggccggtcacggtttgagatcccgcaccagagattccttctctcgtcccttcaggaagaagggtaccatcgccctcaccacatacctcagaacctaccacgtcggcgattatgtcgacgtcaaggttaacggcgccgtccacaagggaatgcctcacaagttctaccatggccgcaccggtcgcgtctggaatgtcaccaaacgtgctgctggggtcg

SEQ ID NO: 256433 - DNA, 313 bp, Glycine max
gatagcgcagtttcatttctttggattagaaatttttcccaaagctgatcgagaagccagccaggccagaaagagttgaagaagaatgggaagggggaagatcgaaatcaaaaggattgagaacacaacaaatcggcaagtgaccttctgcaagagaagaaatgggcttctgaagaaagcttatgagctgtcagtgctgtgtgatgcaaaagttgccctcatcgtcttctccagccggggccgtctctatgagtattccaacaacaacataagatccacaattgagaggtacaaaaaggcatgttctgatcac

SEQ ID NO: 256434 - DNA, 291 bp, Glycine max
gacagcaaaaacaattaataaagatgagtttgaagaacaacgtggtggtgctaaaggggtgtttgttgcttcttttccttgtgggggttacagctgcacgcatggaactgagcttcttcaaaagtgatcagtcatcaagttatgatgatgatgagtattcaaaaccatgctgtgatctctgcatgtgcacacgctcaatgcctcctcaatgcagctgtgaagatattaggctgaattcatgccactcagattgtaagggctgtatgtgcacacgctcacagccaggacagt

SEQ ID NO: 256435 - DNA, 333 bp, Glycine max
gacacaccgtttgttctattcttaactcaacttctgctacccactctcttcttccaagtccaaccacgcttttctctacagtcatgggcaaggtcaagatcggaatcaacggatttggaagaattggccgtttggttgccagagtcgctctgcaaagagacgatgtggagctcgttgccgttaacgaccctttcattaccaccgattacatgacatacatgtttaaatacgacagtgttcacggacactggaagcatcacgatgtcaccgttaaggacgagaagacccttctcttctgtgacaagccagtcactgtttttggacacaggaacc

SEQ ID NO: 256436 - DNA, 318 bp, Glycine max
gattcacacaactaactaagaaagtcttccatagccccccaaaaatgaagagcaccatcttctttgctctctttctcttttgtgccttcaccacctcatacctaccttcagccatcgctgatttcgtgctcgataatgaaggtaaccctcttgaaaatggtggcacatattatatcttgtcagacataacagcatttggtggaataagagcagccccaacgggaaatgaaagatgccctctcacttgggtgcaatctcgcaatgagctcgaccaaaggattggaacgatcatctcgtccccatattcaatccctttta

SEQ ID NO: 256437 - DNA, 289 bp, Glycine max
gacagcaaaaacaattaataaagatgagtttgaagaacaacatggtggtgctaaaggtgtgtttgttgcttcttttccttgtgggggttacagctgcacgcatggaactgagcttcttcaaaagtgatcagtcatcaagttatgatgatgatgagtattcaaaaccatgctgtgatctctgcatgtgcacacgctcaatgcctcctcaatgcagctgtgaagatattaggctgaattcatgccactcagattgtaagagctgtatgtgcacacgctcacagccaggaca

SEQ ID NO: 256438 - DNA, 304 bp, Glycine max
gacagcaaaaacaattaataaagatgagtttgaagaacaacatggtggtgctaaaggtgtgtttgttgcttcttttccttgtgggggttacagctgcacgcatggaactgagcttcttcaaaagtgatcagtcatcaagttatgatgatgatgagtattcaaaaccatgctgtgatctctgcatgtgcacacgctcaatgcctcctcaatgcagctgtgaagatattaggctgaattcatgctactcagattgtaagagctgtatgtgcacacgctcacagccaggacagtgtcgttgtcttga

SEQ ID NO: 256439 - DNA, 344 bp, Glycine max
ggaaacagagagtgatttcagggagtgatcggtgttcacttgatctcatcataatcgtcagcgtcaattgaagaagatgccgatcagaaacatcgccgtcggaaggcctgaagaggcgactcaccccgacacgttgaaggcggctttggctgagttcatctcaaccttcatcttcgtgttcgccggctcaggctccggcatcgcctacaacaagctcaccgacaacggcgctgccacccctgccggcctcatcttcgcctccatcgcccatgcattcgccctcttcgtcgccgtctccgtcggcgccaacatctccggcggccacgtcaaccccgccgtcacct

SEQ ID NO: 256440 - DNA, 270 bp, Glycine max
gacagcaaaaacaattaataaagatgagtttgaagaacaacatggtggtgctaaaggtgtgtttgttgcttcttttccttgtgggggttacagctgcacgcatggaactgagcttcttcaaaagtgatcagtcatcaagttatgatgatgatgagtattcaaaaccatgctgtgatctctgcatgtgcacacgctcaatgcctcctcaatgcagctgtgaagatattaggctgaattcatgccactcagattgtaagagctgtatgtgca

SEQ ID NO: 256441 - DNA, 255 bp, Glycine max
gacagcttaaacaattaataaagatgagtttgaagaacaacatggtggtgctaaagagtgtgtttgttgcttcttttccttgtgggggttacaactgcacgcatggaactgatcttcttcaaaagtgatcagtcatcaagttatgatgatgatgagtattcaaaaccatgctgtgatctctgcatgtgcacacgctcaatgtctcctcaatgcagctgtgaagatattaagctgaattcatgccactcatattgt

SEQ ID NO: 256442 - DNA, 363 bp, Glycine max
gactctcatcacattattctatatcagggtgggttaaaagtcctgaaaaagcaagaaaaaaaaaaataccaaccatggcaaccatttctgatcaacctagagggtcctactcctatggaacctcatatggagcaccctatggaaccacgtatgagaccaacaccagcattaacaacccaccttcacgccaaacagtgaagttcataactgctgccactattggcatcacactcttgctcctgtctgggttgaccctcacaggcactgtcataggtttgatcattgcaacccctcttcttgttatcttcagccccatacttgtccctgctgcgtttgtgctgttcctagttgcttctggctttt

SEQ ID NO: 256443 - DNA, 309 bp, Glycine max
aggagatgtggagctacgctatgcgaccctatgggttttggacattcgaacgccacaattctcagcttgcttgggatgcacagattagccaagtggccgggaggagggacccttatgatgatctcctccaacatttctctaccccacctaagtgagtgttgctgaacttgccacaagcattatcggtgaaaaggatgaatttgtcgtaatttccccttgtaatatcctgtcttgttgcatgttgcagagattacaactggattgtgctgttatttcaaaaataaaggttccatataactatgctgtttc

SEQ ID NO: 256444 - DNA, 352 bp, Glycine max
gcgggtatagtttagtggtaaaagtgcgatgggttccatggacccctaaatagttaagggatcccccgtttgattcatattccgatcaaaaactttatttcttacttaaagggaatcctttataccctcaatgaatgatttgcggtataatatacattatcgtaatttgtatacaagaagaatcaattctaaattgacaacttgagttctaaaattatgaaacataagtttttggaattggatctataatccgaatttttttgagtatgacgaaaggatctatggagagatatatagaaagtttctttctaatcgtaactaaatcttccatttttttgtatagtaaagattg

SEQ ID NO: 256445 - DNA, 352 bp, Glycine max
gcttcacagcaaaaacaattaataaagatgagtttgaagaacaacatggtggtgctaaaggtgtgtttgttgcttcttttccttgtgggggttacagctgcacgcatggaactgagcttcttcaaaagtgatcagtcatcaagttatgatgatgatgagtattcaaaaccatgctgtgatctctgcatgtgcacacgctcaatgcctcctcaatgcagctgtgaagatattaggctgaattcatgccactcagattgtaagagctgtatgtgcacacgctcacagccaggacagtgtcgttgtcttgacaccaacgacttctgctacaaaccttgcaagtccagagatgact

SEQ ID NO: 256446 - DNA, 348 bp, Glycine max
gacagcaaaaacaatggataaagatgagtttgaagaacaacatggtggtgctaaaggtgtgtttgttgcttcttttccttgtgggggttacagctgcacgcatggaactgagcttcttcaaaagtgatcagtcatcaagttatgatgatgatgagtattcaaaaccatgctgtgatctctgcgtgtgcacacgctcaatgcctcctcaatgcagctgtgaagatattaggctgaattcatgccactcagattgtaagagctgtatgtgcacacgctcgcagccaggacagtgtcgttgtcttgacaccaacgacttctgctacaaaccttgcaagtccagagatgact

SEQ ID NO: 256447 - DNA, 316 bp, Glycine max
gattgacacaactaactaagaaagtcttccatagccccccaaaaatgaagagcaccatcttctttgctctctttctcttttgtgccttcaccacctcatacctaccttcagccatcgctgatttcgtgctcgataatgaaggtaaccctcttgaaaatggtggcacatattatatcttgtcagacataacagcatttggtggaataagagcagccccaacgggaaatgaaagatgccctctcactgtggtgcaatctcgcaatgagctcgacaaacggattggaacaatcatctcgtccccatatcgaatccgttt

SEQ ID NO: 256448 - DNA, 329 bp, Glycine max
gatgcaactgaataattaagaaaagccatttccatagcagcctaagaaaatgaagagcactagcttgttcgctatctttctactttgcgccttcacctcatacctaccttccgccaccgcccaggacgtgctcgacgtggatggcgatccgattcggaacggtttcatatactacgttttgccggcaataagaggaaacggtggcggaatagaacgagccgcactcgggaaagacacttgccctatcactgtagtgcaatctcccaatccaaactctaaggggttagaaattaagtttgaatctgcataccccgcctattacataaacg

SEQ ID NO: 256449 - DNA, 339 bp, Glycine max
  unsure (1)..(339): unsure at all n locations
gacatcacgggtaaaagtggggtcccaaagaaagagcatctttctcctttctttcatcaccgttggaagagactgagatgggttcaaaaaccaagacttttacctttgaggaggtggctaagcacagtcacaggaaggattgctggattatagtcaaagggaaggtgtatgatgtcaccccatttttggatgatcatccaggaggtgatgaagttttagtgactgcaacagagaaggatgccaccactgattttgaagatattgggcacagtgattcagcaacagagatgatggaaaaatactttgttggtgaggttgacaccaacactcttncagcac

SEQ ID NO: 256450 - DNA, 366 bp, Glycine max
tgggattcacacaactaactaagaaagtcgggcatagccccccaaaaatgaagagcaccatcttctttgctctctttctcttttgtgccttcaccaccgcatacctaccttcagccatcgctgatttcgtgctcgataatgaaggtaaccctcttgaaaatggtggcacatattatatcttgtcagacataacagcatttggtggaataagagcagccccaacgggaaatgaaagatgccctctcactgtggtgcaatctcgcaatgagctcgacaaagggattggaacaatcatctcgtccccatatcgaatccgttttatcgccgaaggccatcctttgagccttaaattcgattcatttgcaa

SEQ ID NO: 256451 - DNA, 329 bp, Glycine max
gatcaagaacgagggcaatatcctagtacaccggattaaagaatttaagatatactatgatgagagcgcggttcccattactgttgctgggagttgctttcctggcatcagtttctgtctcatttggcattgcgtattgggaaaagcagaaccccagtcacaacaagtgcctccgaagttgcaatggcgagaaagactcctacaggaaccaagcatgccacgctcgttgcaacctacttaaggtggaggaagaagaagaatgcgaagaaggtcaaattccacgaccacgaccacaacaccctgagagggaacgtctgcaacacggtgag

SEQ ID NO: 256452 - DNA, 357 bp, Glycine max
gacagcaaaaacaattaataaagatgagtgggaagaacaacatggtggtgctaaaggtgtgtttgttgcttcttttccttgtgggggttacagctgcacgcatggaactgagcttcttcaaaagtgatcagccatcaagttatgatgatgatgagtattcaaaaccatgctgtgatctctgcatgtgcacacgctcaatgcctcctcaatgcagctgtgaagatattaggctgaattcatgccactcatattgtaagagctgtatgtgcacacgctcacagccaggacagtgtcgttgtcttgacaccaacgacttctgctacaaaccttgcaagtgcagagatgactagaaaaact

SEQ ID NO: 256453 - DNA, 348 bp, Glycine max
gacagcaaaaacaattaataaagatgagtttgaagaacaacatggtggtgctaaaggtgtgtttgttgcttcttttccttgtgggggttacagctgcacgcatggaactgagcttcttcaaaagtgatcagtcatcaagttatgatgatgatgagtattcaaaaccatgctgtgatctctgcatgtgcacacgctcaatgcctcctcaatgcagctgtgaagatattaggctgaattcatgccactcagattgtaagagctgtatgtgcacacgctcacagccaggacagtgtcgttgtcttgacaccaacgacttctgctgcaaaccttgcaagtccagagatgact

SEQ ID NO: 256454 - DNA, 351 bp, Glycine max
gattcatgcaactgaataattaggaggggccatttccatagcagcctaagaaaatgaagagcactagcttgttcgctatctttctactttgcgccttcacctcatacctaccttccgccaccgcccaggacgtgctcgacgtggatggcgatccgattcggaacggtttcatatactacgttttgccggcaataagaggaaacggtggcggaatagaacgagccgcactcgggaaagacacttgccctatcactgtagtgcaatctcccaatccaaactctaaggggttagaaattaagtttgaatctgcataccccgcctattacataaacgaaaccctaattttgcaaa

SEQ ID NO: 256455 - DNA, 361 bp, Glycine max
ttgggacagcaaaaacaattaataaagatgagtttgaagaacaacatggtggtgctaaaggtgtgtttgttgcttcttttccttgtgggggttacagctgcacgcatggaactgagcttcttcaaaagtgatcagtcatcaagttatgatgatgatgagtattcaaaaccatgctgtgatctctgcatgtgcacacgctcaatgcctcctcaatgcagctgtgaagatattaggctgaattcatgccactcagattgtaagagctgtatgtgcacacgctcacagtcaggacagtgtcgttgtcttgacaccaacgacttctgctacaaaccttgcaagtccagagatgactagaaaaact

SEQ ID NO: 256456 - DNA, 342 bp, Glycine max
gacacttgacaggaggaacagttaagatgggtttgaagaacaacatggtggtgctaaaggtgtgtttcttggttcttttccttgtgggggttactaatgcacgcatggaactgaacctcttcaaaagtgatcactcatcaagtgatgatgagtcttcaaaaccatgctgtgatctctgcatgtgcacagcctcaatgccacctcaatgccattgtgcagatattaggttgaattcaagtcactcagcttgtgatcgctgtgcgtgcacacgctcgatgccaggccagtgtcgttgccttgacaccaccgacttctgctacaaaccttgcaagtccagtgatg

SEQ ID NO: 256457 - DNA, 352 bp, Glycine max
gacagcaaaaacaattaataaagatgagtttgaagaacaacatggtggtgctaaaggtgtgtttgttgcttcttttccttgtgggggttacagctgcacgcatggaactgagcttcttcaaaagtgatcagtcatcaagttatgatgatgatgagtattcaaaaccatgctgtgatctctgcatgtgcacacgctcaatgcctcctcaatgcagctgtgaagatattaggctgaattcatgccactcagattgtaagggctgtatgtgcacacgctcacagccaggacagtgtcgttgtcttgacaccaacgacttctgctacaaaccttgcaagtccagagatgactagaa

SEQ ID NO: 256458 - DNA, 351 bp, Glycine max
gacacttactagtagtaagcatggggtcgtcaaagatctatgcttacctcttcctctgcatgatctttctctcttccgccactcccattctcggttgtggctactgtggcaaaccccccaaaaagcacaagcctggtaaaacaccaaagacacccaaaacacccgttgttaagccaccagtcaccatccctcccattaatgttcctcccgttgttcttccaccaatagtgaagcccccaggtattctccctccaattccaattattaacccaccaaccacaccagggaagggagggaacactccatgcccaccaccaaagtctcctgcgcaggctacgtgccccattgaca

SEQ ID NO: 256459 - DNA, 313 bp, Glycine max
tggtcatccaaagaactactgaccggggtgtcgcacctgccgcgtgtgtgggaatcctcatggattgatcaggaagtatgggcttatgtgttgcaggcagtgcttccgtagcaatgccaaggaaattggcttcattaagtatcgctgaaggattagtgtccaactgccccattcggtttggattcttgcattaggctgggttgattttactgtctgaagaacctaagaatttttgtgacatttagtgaagttaattatcaaaactcaatttgtggaactaagaatatttttgttttttatataattggtttga

SEQ ID NO: 256460 - DNA, 367 bp, Glycine max
gaagacgacagaagggggaaggagaacgcgatgttgggttgctctttggttcttcgtccccttcccaatcttcaactttagggttcctttaatctcgttattcctcttcactcccaaactccgttcactccaacaacactctgatttagaaatggatggaccggctggtcgaggtggtgctggactggacatgtttctgccaaattataaattgggaaaaacacttgggattggatcttttggcaaggtcaaaattgcagaacatgtattgactggccataaggttgcgatcaagattcttaaccgacgcatgataaagaacgtggaaatggaagaaaaagtgagaagagaaatcaaaattttaaga

SEQ ID NO: 256461 - DNA, 354 bp, Glycine max
ggtacgtgtgaagtgaagaatagtctggtgaatcgcgtaagctctctcaactcaactggatccgggtcacaaccgtcttgaaattaagaccaactgggtcattgatcacaatctcaattggtagcacaacatcaagggaaagtgaaaaaggaaggtatatttgatcagggatatggcaactcgaagatatgagtttggaaggatgaatgaggctagccacccagactccatcagagctgccttggctgaattcctctccacttgcatctttgtctttgctggagaaggctctgcccttgctttgcgacaaatttacaaggaaccagggtcatcagcgggtgagctagtggtaat

SEQ ID NO: 256462 - DNA, 350 bp, Glycine max
gagtctcagtttcagtttcggagctcgctcttctttcacaccaatttccatcatttgaaacatggcagattcaaaatcaggattgaggaaaccagtgttcaccaaggttgatcagctttgcccggggaccagtgggcacactttaactgtgaaggtggtcaatgctaagatggtgatgcagagaggtcgctctgatggtcctcaatctcgtcaaatgcgaattgctgagtgcttggttgctgatgagactggaatgatcatattcaccgccagaaatgatcaagtggatacgatgacagagggagctactgtgatcctgcgtaacgccaaaattgacatgttcaaaggat

SEQ ID NO: 256463 - DNA, 276 bp, Glycine max
ggcggcaaaaacaattaataaagatgagtttgaagaacaacatggtggtgctaaaggtgtgtttgttgcttcttttccttgtgggggttacagctgcacgcatggaactgagcttcttcaaaagtgatcagtcatcaagttatgatgatgagtattcaaaaccatgctgtgatctctgcatgtgcacacgctcaatgcctcctcaatgcagctgtgaagatattacgctgaattcatgccactcagattgctagagctgtatgtgcacacgctcac

SEQ ID NO: 256464 - DNA, 356 bp, Glycine max
gattcacacaactaactaagaaagtcgtccatagccccccaaaaatgaagagcaccatcttctttgctctctttctcttttgtgccttcaccacctcatacctaccttcagccatcgctgatttcgtgctcgataatgaaggtaaccctcttgaaaatggtggcacatattatatcttgtcagacataacagcatttggtggaataagagcagccccaacgggaaatgaaagatgccctctcactgtggtgcaatctcgcaatgagctcgacaaagggattggaacaatcatctcgtccccatatcgaatccgttttatcgccgaaggccatcctttgagccttaagttcgattca

SEQ ID NO: 256465 - DNA, 353 bp, Glycine max
gacacaactaactaagaaagtcttccgtagccccccaaaaatgaagagcaccatcttctttgctctctttctcttttgtgccttcaccacctcatacctaccttcagccatcgctgatttcgtgctcgataatgaaggtaaccctcttgaaaatggtggcacatattatatcttgtcagacataacagcatttggtggaataagagcagccccaacgggaaatgaaagatgccctctcactgtggtgcaatctcgcaatgagctcgacaaagggattggaacaaccatctcgtccccatatcgaatccgttttatcgccgaaggccatcctttgagccttaagttcgattcat

SEQ ID NO: 256466 - DNA, 322 bp, Glycine max
acaaaaaacaaattcttgagattgactcttaaccatttcataccaccaacaccacttttaatcaaaatcttattccttgacatcaaaaacatttccccaacaaactttaaccattcgcaaaaatttttacattttaatcaataacaaaccattcaacattttttaattttccacttacaaaactatcaaacattaacacccaaaatcccacctttttataattgacatattcactcttaaaaaccttcaatatattatcccatcttaccataactatcatccttctcatttcaatctcatttactaccaactcatcaacatc

SEQ ID NO: 256467 - DNA, 301 bp, Glycine max
gcatgcaactgaataattaagaaaagccatttccatagcagcctaagaaaatgaagagcactagcttgttcgctatctttctactttgcgccttcacctcatacctaccttccgccaccgcccaggacgtgctcgacgtggatggcgatccgattcggaacggtttcatatgctacgttttgccggcaataagaggaaacggtggcggaatagaacgagccgcactcgggaaagacacttgccctatcactgtagtgcaatctcccaatccaaactctaaggggttagaaattaagtttga

SEQ ID NO: 256468 - DNA, 326 bp, Glycine max
gatcatcaagaacgggtggaatatcctagtacaccgtattaaagaatttaagatatactatgatgagagcgcggttcccattactgttgctgggagttgctttcctggcatcagattctgtctcatttggcattgcgtattgggaaaagcagaaccccagtcacaacaagtgcctccgaagttgcaatagcgagaaagactcctacaggaaccaagcatgccacgctcgttgcaacctccttaaggtggaggaagaagaagaatgcgaagaaggtcaaattccacgaccacgaccacaacacccggagagggaacgtcatctacac

SEQ ID NO: 256469 - DNA, 341 bp, Glycine max
ggatgcgtgtgatgaccataaccatgtcagacgaggaacaccacttcgagtcaaaggctgatgctggggcatcaaagacatttccccagcaagctggaaccatccgcaaaaatggttacattgtcatcaagaacaggccatgcaaggttgtggaggtttccacttccaaaactggcaagcatggacacgcaaagtgtcactttgttggaattgacatattcactgggaaaaagcttgaggatattgtcccatcttcccataactgtgatgttcctcatgttaatcgcattgactaccagctcatcgacatctcaaaggatgggtttgtgagtctgctgact

SEQ ID NO: 256470 - DNA, 347 bp, Glycine max
gacagcaaaaacaattaataaagaggagtttgaagaacaacatggtggtgctaaaggtgtgtttgttgcttcttttccttgtgggggttacagctgcacgcatggaactgagcttcttcaaaagtgatcagtcatcaagttatgatgatgatgagtattcaaaaccatgctgtgatctctgcatgtgcacacgctcaatgcctcctcaatgcagctgtgaagatattaggctgaattcatgccactcagattgtaagagctgtatgtgcacacgctcacagccaggacagtgtcgttgtcttgacaccaacgacttctgctacaaaccttgcaagtccagagatgac

SEQ ID NO: 256471 - DNA, 294 bp, Glycine max
aagaaggacacatgcagaagtgctgcacagaagtgagcgagctgagaagccccaaatgccagtgcaaagcgctgcagaagataatggagaaccagagcgaggaactggaggagaagcagaagaagaaaatggagaaggagctcattaacttggctactatgtgcaggtttggacccatgatccagtgcgacttgtcctccgatgactaataagttaaaagcaatgttgtcacttgtacgtactaacacatgatgtgatagtttatgctagctagctataacataagctgtctct

SEQ ID NO: 256472 - DNA, 339 bp, Glycine max
  unsure (1)..(339): unsure at all n locations
ggcacgcctccntacggcttctaaattactacacaaggggatcatcaacaaccagttgggtatcctagtacaccgcattaaaaaatttaatatatactatgatcacagcgcggttcccattactgttgctgggagttgttttcctggcatcaaattctgtctcatttggcattgcgtattgggaaaagcagaaccccattcacaacaagtgcctcctaagttgcaatatcgagaaagactcctacaagaaccaatcatgccacgctcgttgcaacctccttaaggtggaggaagaagaacaatgcgaaaaatgtcaaattccacgaccacgaccacaac

SEQ ID NO: 256473 - DNA, 324 bp, Glycine max
gattcacacagctgactaagaaagtcttccatagccccccaaaaatgaagagcaccatcttctttgctctctttctcttttgtgccttcaccacctcatacctaccttcagccatcgctgatttcgcgctcgataatgaaggtaaccctcttgaaaatggtggcacatattatatcttgtcagacataacagcatttggtggaataagagcagccccaacgggaaatgaaagatgccctctcactgtggtgcaatctcgcaatgagctcgacaaagggattggaacaatcatctcgtccccatatcgaatccgttttatcgccg

SEQ ID NO: 256474 - DNA, 329 bp, Glycine max
ggcagcaaaaaacagtgatgaaaattaggttggagaacaacatggtggtgctaaaggtgtgtttgttgcttcttttccttgtgggggttacagctgcacgcatggaactgagcttcttcaaaagtgatcagtcatcaagttatgatgatgatgagtattcaaaaccatgctgtgatctctgcatgtgcacacgctcaatgcctcctcaatgcagctgtgaagatattaggctgaattcatgccactcagattgtaagagctgtatgtgcacacgctcacagacaggacagtgtcgttgtcttgacaccaacgacttctgctacaaacct

SEQ ID NO: 256475 - DNA, 300 bp, Glycine max
gacagcaaaaacaattaataaagatgagttggaagaacaacatgggggcgctaaaggtgtgttcgttgcttcttttccttgcgggggttacagctgcacgcatggaactgagcttcttcaaaagtgatcagtcatcaagttatgacgattatgagtattcaaaaccatgctgtgatctctgcatgtgcacacgctcaatgcctcctcaatgcagctgtgaagatattaggctgaattcatgccactcatattgtaagagctgtatgtgcacactctcacagccagcacagtgtcgttgtc

SEQ ID NO: 256476 - DNA, 362 bp, Glycine max
gacacttactagtagtaagcatggagtcctcaaagatctatgcttacctcttcctctgcatgatctttctctcttccgccactcccattctcggttgtggctactgtggcaaaccccccaaaaggcacaagcctggtaaaacaccaaagacacccaaaacacccgttgtttagccaccagtcaccatccctcccattaatgttcctcccgttgttcttccaccaatagtgaagcccccaggtattctccctccaattccaattattaacccaccaaccacaccagggaagggagggaacactccatgcccaccaccaaagtctcctgcgcaggctacgtgccccattgacacgctcaaactt

SEQ ID NO: 256477 - DNA, 340 bp, Glycine max
gaccatagaagaaggacaaagagaagcattagcactaggagcagcaacaactagtctcagctgaaatggcctcttcagtgatggcatctgtggccctcaaacctgcccctttcactgttgagaagtcctcagtgagaggccttccctctctctcaaggaactcttcttcattcagagttgtggccagtggcaagaagatcaagactgacaaaccttatggaattaatggtggcatggctttgagggatggaactgatgcatctggcaggaaaggaaagggaaagggtgtttaccagtttgtagacaaatacggtgctaatgtcgatgggtacagtcctat

SEQ ID NO: 256478 - DNA, 316 bp, Glycine max
gggattcttgcgtcttaatctgggcgggtcaaaagcatggggcactccaatgtgtggaactctcatccaaagaactactgacctggttctcgcacctggcgtgtgtgtgggaatcctcatggattgatcaggaagtatgggcttatgtgttgcatgcagtgcttgcttcgcaacgccaaagaaattggcttcattaaaaatccctgaatgattagcgtacaactgccccattcagtacggattcttgcattaggctgagccgattgtactgtctgaagaacctaaaaactcctgcgacatttagtgaagctcatta

SEQ ID NO: 256479 - DNA, 328 bp, Glycine max
gacagcaaaaacaattaataaagatgagtttgaagaacaacatggtggtgctaaaggtgtgtttgttgcttcttttccttgtgggggttacagctgcacgcatggaactgagcttcttcaaaagtgatcagtcatcaagttatgatgatgatgagtattcaaaaccatgctgtgatctctgcatgtgcacacgctcaatacctactcaatgcagctgtgaagatattaggctgaattcatgccactcatattgtaagagctgtatgtgcacacgctcacagacaggacagtgtcgttgtcttgacaccaacgacttctgctacaaacc

SEQ ID NO: 256480 - DNA, 293 bp, Glycine max
gacagcaaaaacaatgtaataaagatgagtttgaagaacaacatggtggtgctaaaggtgtgtttgttgcttcttttccttgtgggggttacagctgcacgcatggaactgagcttcttcaaaagtgatcagtcatcaagttatgatgatgatgagtattcaaaaccatgctgtgatctctgcatgtgcacacgctcaatgcctcctcaatgcagctgtgaagatattaggctgaattcatgccactcaaattgtaagagctgtatgtgcacacgctcacagccaggacagtg

SEQ ID NO: 256481 - DNA, 332 bp, Glycine max
gacagcaaaaacaattaataaagatgagtttgaagaacaacatggtggtgctaaaggtgtgtttgttgcttcttttccttgtgggggttacagctgcacgcatggaactgagcctcttcaaaagtgatcagtcatcaagttatgatgatgatgagtattcaaaaccatgctgtgatctctgcatgtgcacacgctcaatgcctcctcaatgcagctgtgaagatattaggctgaattcatgccactcagattgtaagagctgtatgtgcacacgctcacagccaggacagtgtcgttgtcttgacaccaacgacttctgctacaaaccttgc

SEQ ID NO: 256482 - DNA, 305 bp, Glycine max
  unsure (1)..(305): unsure at all n locations
ggagtttgttgatcgagataactagaaacagtgtgatgaaggtgaangtccttgttttcttcgttgctacaattttggtagcatggcaatgccatgcgtacgatatgttccctctccgaatgaacactggctatggtgcccgtactccggaggtgaaatgcgcaagttggaggcttgctgtggaagcacacaacatctttggctttgagaccattcctgaagagtgcgttgaagcaacaaaggaatacatccatggcgaacaatatagatcagactccaaaacagttaaccaacaagcttacttt

SEQ ID NO: 256483 - DNA, 419 bp, Glycine max
gcgagaagacgacagacggggagagaaagagagagaaagatgtcgaagcgtggtcgtggtggttcggcggggaacaagttccgcatgtcgctgggtcttccagtggcggcgacggtgaactgcgccgacaacacgggggcgaagaacctctacatcatttcggtgaaggggatcaaaggccgtttgaaccgtcttccctcggcctgcgttggcgacatggtgatggccaccgtgaagaagggaaaacccgatctgaggaagaaggtcttgccagctgtcatcgttcgccagcgcaagccatggcgccgaaaggactgcgtctacatgtacttcgaagataatgctggtgttattgtcaatcccaagggagaaatgaaaggttctgctatcactggtcccattggaaaagagtgtgctga

SEQ ID NO: 256484 - DNA, 313 bp, Glycine max
tgactccaagaacaacaccacaggatctagaaaagcccttccatcttcaccacccaaaaagaaaataagggcaatggccagtgcaacaacttcagccacaatcactgtgggggcaatttccagggttgccggcccaaaagaaagggagaggaatgtgcacttcatcaaaggtttgaattcctttggagggttgaaggctcaaaacagtgtgacatcactaggtcttcctgtgtgcactgaacagtgtttcgcagatgtggagagcccattgaaatatcaatcatcatctaaggccaaatgtggaggcgctgcc

SEQ ID NO: 256485 - DNA, 321 bp, Glycine max
  unsure (1)..(321): unsure at all n locations
gcatttcgataatcatccatagttactgaagaaaatggcaaccgtctccgctgctatcacgaccccatcgatcacccgcgcatgtctagtgcaaaaacgttctcttgggttctcatcttccgttcttggtttgccagcaatgggtaaggtgggaaaaaggaagtgcttcatggaggaaaagcctcttctgtgaaggaaagcagctcaagcatgttggggatgggggcatctttgatggcagcngncagcgccgcaggcatgtcagggcccagcatggccttgtggatgagagacttagcactgaaggaaccgggctaccct

SEQ ID NO: 256486 - DNA, 382 bp, Glycine max
gaacacgagtgaaagtacaagttgcaggaatggcctcaacctcctcctccacactctctatatcctcttcatccacccttgttgatgccaaggctccaagtccaagacaatccccacaatgtgtctcccctccacctgttcactctccttggaagaccactgctttctgtcgcaggattgcaagcaatgttatggcaatggttaccaccagagaggcacccgcagcagaagttgccacgaccgagctctctgttgccgagacgccagagattgtgaagactattcaagaagcttgtgacaaagttggagacaaatatgcagtgagttcacttgccgtagccggtgtggttgcattggttggctcagctggcatgatctcagc

SEQ ID NO: 256487 - DNA, 416 bp, Glycine max
gacaccaacaccaaaacaaacccactaagatggctgcctttgtatccttcctagtgctgcttcttgcagcccttatcctcatgcctcaagggcttgctacttactacaaaccaattaagaagccaccagtgtacaagcctccagtgtacaagccaccagtgtacaaaccaccggtttataagccaaaaccaccggtttacaagccgaaaccaccggtttacaagccaccatataagaagccaccatacaagaaaccaccttatggaaagtaccctccagtagaggacaacacccatgcctaaagcaagcaatgaggtctattatctacttaataaataagaggaactgctttgtgttttctagcattgtgatttacaacttcgtagcaatgcatattcttgactcttgcatgcact

SEQ ID NO: 256488 - DNA, 256 bp, Glycine max
tgatagaattagcacaaagagaagcattatcaaatgcgggaggaactagtctaagcagagatggcctcttcagtgatggcatttgtggcctctaaacctgccactttcactgttgagaagtcctcagttagaggccttccctccctctcaaggaactcctcttcattcagagttgtggccagtggtggcaagaagatcaagactgacaagccttatggaatttacggtggcatgtctttgaaggcacgattcgatg

SEQ ID NO: 256489 - DNA, 422 bp, Glycine max
gaccgcaaactctctctgtaaagtgcaaagcctctattgtttcttgtgaatttgaaggacgatgagttccacagaggtcgcagccacaacgaagaagggtggaagagggaaacccaagaccacaaagtccgtttcccgttcctccaaagccggccttcagttccccgtcggccgcgtcgctcgctacctcaaggccggtcgctatgcccagcgcgttggttccggttcccctgtttacctatctgcggttctcgaataccttgccgctgaggttttggagcttgccggcaacgctgcgagggacaacaagaagacgaggatcgttcctaggcacattcaacttgcggtgaggaacgatgaggagttgagcaagctgatggggtctgtgaccattgccaatggtggtgttctgcctaacattc

SEQ ID NO: 256490 - DNA, 350 bp, Glycine max
gatctggcagcagaagaacaagtggttgagaactaagaaggagaagcaaatggcttcctcaatgatctcttccccagctgttaccactgtcaaccgtgccggtgccggcatggttgctccattcactggcctcaagtccatggctggcttccccaccaggaagaccaacaatgacattacctccattgctagcaacggtggaagagtgcaatgcatgcaggtgtggccaccagttggcaagaagaagtttgagactctttcctacctgccagaccttgatgatgcacaattggcaaaggaagtagaataccttcttaggaagggatggattccttgcttggaattcgagt

SEQ ID NO: 256491 - DNA, 403 bp, Glycine max
gagggttttgagtgcggcggtccaaacactcttctgtgcagcttttgcctacaactcccttcaccatggctgaacaaaccgagaaagcttttctgaagcaaccaaaagtgtttctcagcacaaagaagactgggaagggaaagagacctggaaaaggtgggaaccgcttttggaagtccattgggcttggatttaagactcccagggaagccatcgaaggaacctatattgacaagaagtgccccttcactggcaatgtttccatccgtggccgtatcttggctggaacatgtcacagtgctaagatgaacaggactattattgttagaaggaattatctccattttatcaagaagtaccagaggtacgagaagaggcactcaaatattcctgctcatatatc

SEQ ID NO: 256492 - DNA, 422 bp, Glycine max
gatctggcagcagaagaacaagtagttgagaactgagaaggagaagcaaatggcttcctcaatgatctcttccccagctgttaccactgtcaaccgtgccggtgccggcatggttgctccattcactggcctcaagtccatggctggcttccccaccagaaagaccaacaatgacattacctccattgctagcaacggtggaagagtgcaatgcatgcaggtgtggccaccagttggcaagaagaagtttgagactctttcctacctgccagaccttgatgatgcacaattggcaaaggaagtagaataccttcttaggaagggatggattccttgcttggaattcgagttggagcacggtttcgtgtaccgtgagcacaacaggtcaccaggatactacgatggacgctactggaccatgt

SEQ ID NO: 256493 - DNA, 379 bp, Glycine max
aacgtcgcatcagaagaacacatagcagtgaactgtggaggagaagcatatggcttcctcaaccatctctgacccagctgttaccagctgtcaaccatgcacaagcagacatagttactacattcactgacctaaagtccaagactgccttaccaaccagaaacaccaacaatgacattacctccattggtagcaacactggaagagtgcacttcatgcaagcgtatccagcacataacaagaacaacactgacactgtttcctacctggcacacctttatgatgcacaatagtcaaaggatgaagaataccttattatgaacggatggatgaattgcttgcaattcaagtaggagcaccgtatctactaccataagca

SEQ ID NO: 256494 - DNA, 201 bp, Glycine max
tgcacaaagtaagttgttgatcgcgataactagaaacagtgtgatgagaatgaatgtccttgctttctatcgtgctacaattttggtagcatggcaatgccatgcgtacgatatgttccctctccgaatgaacactggctatggtgcccgtactccggacgtgaaatgcgcaagttggatgcttgctgtggaagcacacaa

SEQ ID NO: 256495 - DNA, 299 bp, Glycine max
  unsure (1)..(299): unsure at all n locations
gagcacttcttagttctcaatcatcaactatttaaaacaatggtcagaggctaacttctccactagttttctgtgtagagagctctntggacaacaccctctaaaccaatctatcaagtcctgattaatctggtgagcatggagctttgttggctcacaaccatccatggttcttgaagagcttggagagaaaggggtgtgagaggagagggtgctcactcctgacactccctcacttgaaacagtnntgntntggcttagcttntggcttctctgatcaacaagggatgtgttctaac

SEQ ID NO: 256496 - DNA, 395 bp, Glycine max
gacaagtgagttagttgatcgagataactagaaacggtgtgatgaaaatgaaagtccttgttttcttcgatgctacaattttggtagcatggcaatgccatgcgtacgatatgttccctctacgaatgaacactggctatggtgcccgtacttcggaggtgaaatgcgcaagttggaggcttgctgtggaagcacacaacatcttgggctttgagaccattcctgaagagtgcgttgaagcaacaaaggaatacatccatggcgaacaatatagatcagactccaaaacagttaacctacaagcttacttttatgccagagacctcgaagtccatcgcaaggacacatttgtgtacagtataaatggcaccgtactctctaatattgcatactac

SEQ ID NO: 256497 - DNA, 352 bp, Glycine max
ggcacaagtgagtttgttgatcgagataactagaagacagtgtgatgaaaatgaaggtccttgttttcttcggtgctacaattttggtagcatggcaatgccatgcgtacgatatgttccctctgcgaatgaacactggctatggtgcccgtactccggaggtgaaatgcgcaagttggaggcttgctgtggaagcacacaacatctttggctttgagaccattccttgagagtgcgttgaagccacaaaagaatacatccatggcgaacaatttagatcagactccaaaaacggtaacccacaagcttacttttatgccagagacctcgaagtccatcccaaggacacatt

SEQ ID NO: 256498 - DNA, 427 bp, Glycine max
aggaacgccgtcgtcgggatgctgcaacggagtgaagagcctcaatgccgacgccaagaccaccgacgaccgccagacggtgtgcaactgcctcaagtcggacggcagccaaatctacggcttcaacgccaacaacgccggctcgctccccggcaaatgcggagtctccatccactacaagatcagcacctgcaccaactgcgctaccatcaaggtttgaagagaaagtcatggacgcaagaaaccggaaactactcactagtatatgagtagcattattaatattaagaataagatcgaaggtgatgagggctccacttatatgcccctctcctcttgtatgagagatttgcattggatagctttaagttgtgttgcgctggtatctctctgtatgagttacacatagatatatctactgtaatat

SEQ ID NO: 256499 - DNA, 394 bp, Glycine max
gaccacaccgagtcgcagaaggagaaaaaagcgatcatagtttcacttcggccttatccagtttagggtttcggttctctaccctatctttcacgtatcgaaaccttaaatttacgatcaggtctgagcaatctggttggtagaacctttggtcttagtgagtcaagttttatgtctgaattagacgatcaaattcctactgccttcgatccttttgctgatgcaaatgctgatgactcgggtgctgggtcaaaggagtatgtgcatattcgtgtacagcagcgaaatggtaggaaaagcctgacaaccgttcagggattgaaaaaggaattcagctataacaagatacttaaagacgtcaagaaagagttctgttgcaatggaacagttgttc

SEQ ID NO: 256500 - DNA, 359 bp, Glycine max
  unsure (1)..(359): unsure at all n locations
gatacttactgagtgcttgcagttgctgcgtcgcaaggtaccggcggcgacggagagctatcttctcaatttccgatcactgcattggttctgttgacgagggttttgttctacttgacttgcatacttgatggcgtcaaagttgcagaagttgcagtccgcagcatgtcaagcatctcaatttgtatccagtcgtggaactaactactacaggcaattgctggaacagaacaagcaacacattcaggagcctnctacagtagagaaatgcaacctgctggcaaagcaattgttttacacccgccttgctagtattccgggtcgtaatgagtccttttggaaagaacttgattatgtca

SEQ ID NO: 256501 - DNA, 262 bp, Glycine max
cggattcccggtcgaccacgctcgtacgtgcagagacacggaaggggccagtgagttgttgacagatactagaacatggtgtaaaatgaagtccttggtttcttcgttgctacaattttggtagcatggcaatgccatgcgtacgatatgttccctctccgaatgaacactggctatggtgcccgtactccggaggtgaaatgcgcaagttggaggcttgctgtggaagcacacaacatctttggctttgagacccattctg

SEQ ID NO: 256502 - DNA, 236 bp, Glycine max
ggaaacccacatcatgagcacactttgtatggcggaaaatatgaaggaggtggaagttgatgatggatatgtcttgaaagaagagatccatctcacggtgctaaaaacctctctgttcttcgcgggcgatggcttcagcgtctacgattgcaaaggtcaactcgtgttcagagttgactcttatggacccgacactcgcgacatagacgaactcgttctcatggatcctaacggac

SEQ ID NO: 256503 - DNA, 289 bp, Glycine max
gggtggaaaatttgcagagatcaaagaacagaagatggcacaaacgctggcaatgcccgtggcaccttcgctcgctatcatctccaattctcgcctctccaagacactctccgttcccgttctcaacaacccaaagtttcaagggttaagcatcaagtgcgttcgtgttggaggtgtggagattccgaacaacaagcgaatcgagtactcgctgcagtacattcatggagttggcaggaccagagcaaaacagattctgtgtgatatccaaatggataacaaaatcacg

SEQ ID NO: 256504 - DNA, 412 bp, Glycine max
gaacgaaaaaccgtgtttcactcggatcgcgcattcacaaataaggttgaagagggccctgccggaagaagaataataccgtctttcattttccggcgatctcttttttcttccatcacccgtttcccggctatccctaaacccttaacagaaatgacgacatcaagcgccttgggacaggaagtggagaagtttgagaaaaacatcaccaaaagaggatttgtgccagacacaaccactaaaaaggggaaagactaccctgttggcccagtgttgctcggtttcttcgtctttgttgtcattggatcatctctcttccagataatcaggacagcaacgagtggaggcatggcttaaatggagctttattttggattgtgtcatcatctcttagcctcctcgtagaaaatgc

SEQ ID NO: 256505 - DNA, 301 bp, Glycine max
  unsure (1)..(301): unsure at all n locations
gacggttcacgagattgctgcgagctataacctatgttatcgtgcggcgaatatgaactggtgcgatatcactgctgctggattcggtttggtaacatcgacataccatgcngcatgctaccgacggttccctctacgaatgaaaactgactacggagagctgcctttgcaagtagactgcgcaaggtttaggcttgctgtggaagcacacagcatccgatcctttaagaccattccatgggactgcgttgaaccaacaacggactgcattaatggcaaacaatatagatcatactctaat

SEQ ID NO: 256506 - DNA, 378 bp, Glycine max
cttcgagaagcttgctcaggaatgttccagacttgcccgctacaacaagaagcccaccgtcacttcaagggagatccagaccgcggtcaggcttgtgctgcccggtgaactggccaagcacgcccgtttctgagggtaccaaggccgtcaccaagtcaccagctcttgaacaaaatatcttaactgtggttacctcgctcttgttttgcttcatgtgtatctgttaggtctagcgaccctatgtttaggtttgaactggtagctttttggtttttaatctgtaagtgaagaattaggattgggttgatcctctgtgtatggaattggtagaattgatcatataggagcaatttgataaaaggaatggttgtttatgaa

SEQ ID NO: 256507 - DNA, 334 bp, Glycine max
  unsure (1)..(334): unsure at all n locations
cagggacaccaacaccgaaacaaagccactaagatggcttacttgggatccttcctagtgctgctatttgcagcccttatcctcatgcctcaagggcttgctacttactacaaaccaattaagaagccaccactgtacaagcctncagtgtacaagccaccagtgtacaaaccaccggcttataagcccaaaccaccggttcacaagccgaaaccaccgggttacaagccaccatattagaagccaccatacaagaaaccaccttatggaaagtaccctgcagtataggacaacacccatgcctaaaagcagcaatgaggtctattatctactt

SEQ ID NO: 256508 - DNA, 317 bp, Glycine max
gacaagtgagtttgttgatcgagataactagaaacagtgggatgaaaatgaatgttcttggtttcttcgttgctacaattgtggcagcatggcaatgccatgcgtacgatatgttccctctccgaacgaacactggctatggtgcccgtactccggaggtgaaatgcgcaagttggaggctcgctgtggaagcacacaacatctttggctttgagaccattcctgaagagtgcgttgaagcatcaaaggaatacattcatggcgaacaatatagatcagactacaaaacagttaaccaacaagcttactgttatgtc

SEQ ID NO: 256509 - DNA, 405 bp, Glycine max
ggcgcctgatttctcagttctcacactcattccgtgctctaaatctcaaattctagggttagggttcccaatttctccgccaatcagaagatgagttccaccggtggttctaccaagggcggaaggggcaagcccaaagcctccaaatccgtttcaagatcgcagaaagctggtctccaattccccgttggaagaatcgctcgattccttaaggctgggaaatacgctgagcgtgttggtgctggtgctcctgtgtacctctctgcagtgctcgagtatctcgctgctgaggttttggaattggctgggaatgctgctagggataacaagaagaatcgtattgttcctaggcacattcagcttgctgtgaagaacgatgaggagctgagcaagcttttgggatct

SEQ ID NO: 256510 - DNA, 314 bp, Glycine max
  unsure (1)..(314): unsure at all n locations
aggaacgccgtcgtcgggatgctgcaacggagtgaagagcctcaatgccgncgccaagaccaccgncgaccgccagacggcgtgcaactgcctcaagtcggccgccagccaaatctccggcttcaacgccaacaacgccgnctcgctccccggcaaatgcggagtctccatcccctacaagatcagcacctncaccaattgcgctaccatcaaggtttgaagagaaagtcatggacgcaagaaaccggaaactactcactagtatatgagtaagcatattaatattaagaataagatcaagggtgatgagggct

SEQ ID NO: 256511 - DNA, 409 bp, Glycine max
ggcacaatgtcaacctcttccataaccgggtggtgcctgttttgcatctccccagccaaaacctctctcaggaaggccacattacgcccttacgtcttcgcaacccttaacactccttcttctgcttcctcttcatcttactgtccctctctcattcaagacaggcctgtttttgctgcccctgcccacatcatcaccccaactgtgagagaggatatggcacaggaatacgagaaagctattgagaactcacaaattgctgaaggagaagagtgaactcaaagcgacagctgctgaaaaagtggagcagaaacagcttctctagggacatcatcatctgatggcatcccatcatcagaagcctcagacaggatcaaagcttggttcattcacttcaagaaggagaaat

SEQ ID NO: 256512 - DNA, 418 bp, Glycine max
  unsure (1)..(418): unsure at all n locations
gagaagcttcaataagtaagtatcaatggcttccgaagaatcccagaacaagccccccagcgagcagtccactaccgaactcatcacgagcgcgaagctggtggcggaggcggcgcagtcggctctgaagagcgacagcgacaaagtggacaaggccaaggtggctgacgctgccggcgatcttctcgacgcggcggngaagtatggaaaacttgatgacaaacaaggcatagggcaatatgttgacaaggctgctgattatctgcataattaccagggtgataataccactgctccttcacagcctgcagagtctaaaggtgaagaaagtggtggtgggttaggtggtcttgcaaacttggctggaggcttcttcaaaaagtagttacaaagcaactaaataagaccttaattgagt

SEQ ID NO: 256513 - DNA, 291 bp, Glycine max
aagaaggaagctgaagtcatagaagagaagaaggaagtggaagtgacggaagagaagaaggaaattgaagtaacagaagagaagaatgaagctgaagtcatagaagagaagaaggaagtggaagtgacggaagagaagaatgaaattgaagtaacagaagagaagaaggaagcagaagtgaaagaagagaagaaggaaggggaagtgacggaagagaagaaggaagttgaagtgacggaagagaagaaggaagcggaagtgatagtagaagaaaaacaagtgatcgttcat

SEQ ID NO: 256514 - DNA, 239 bp, Glycine max
ggcacaagtgagtttgatgatcgagataactagaaacagtgtgatgaaaatgaaggtccttgttttcttcggtgctacaattttggtagcatggcaatgccatgcgtacgatatgttccctgtccgaatgaacactggctatggtgcccgtactccggaagtgaaatgcgcaagttggaggcttgctgtggaagcacacgacatcgttggctgtgagaccattcctgaagagtgcgttg

SEQ ID NO: 256515 - DNA, 196 bp, Glycine max
ggccattgttgttgctattatcatccgcagctgcttttattcgcaccgcaaacagtgagccatggccgtcggaaagaacaagcgcatcttcaaggggaagaagggtggcaagaagaaggcagctgatccctttgccaagaaggattggtatgacattaaggctccttctggtgttcaagtgaaaaatgttggcaaa

SEQ ID NO: 256516 - DNA, 188 bp, Glycine max
  unsure (1)..(188): unsure at all n locations
gagcgaaacagagagtgatttcagtgagtgatcggtgttcacttgatctcatcataatcgtcagcgtcaattgaagaagatgccgatcagaaacatcgncgtcggaaggcctgaagaggcgactcaccccgacacgttgaaggcggctttggctgagttcatctcaaccttcatcttcgtgttcgccg

SEQ ID NO: 256517 - DNA, 230 bp, Glycine max
ggagaatgggatctggcagcagaaaaacaagtagtttagaactaataagaaggaaatggctttcctcaatgattctcctccccagctgttaccaccgtcaaccgtgccggtgccgcatggttgttccattaaccggcctcaaatccatggctggcttccccacgaggaagaccaacattgactttacctcaatggttagcaccggtgaaagagtacaatgcatgcaggtg

SEQ ID NO: 256518 - DNA, 408 bp, Glycine max
  unsure (1)..(408): unsure at all n locations
catgtaccctgagcttatcttaccaacaatcttccggtacctcttcttgatcggagtttggtactacagatggaggccaaggcacccacctcacatggacactcacctctcccatgcagattctgcgcatcctgatgaactggatgaagagtttgacacattcccaaccaccaagccttcagacatcgtgaggatgcgatacgaccgacttagaagcattgctgggaggatacagactgtggttggtgatttggccactcaaggggagaggctgcagtctttgctcagctggagagatccaagagccactgccctctttgtgattntctgtctggctgctgccattgtactctatgtcactcctttccaaattgtcgcacttttcactggaatctatgtgttgagaca

SEQ ID NO: 256519 - DNA, 224 bp, Glycine max
ggtgcacaagtgagtttgttgatcgagataactaggaacagtgtgatgaaaatgaaggtccttggtttcttcgttactacaattttggtagcatggcaatgccatgcgtacgatatgttccctctccgaattgacactggctattgtgcccgtactccggaaggtgaatgcgcaagtttgaagcttgctgtggaaacacacatcatcttttgcttttagaccct

SEQ ID NO: 256520 - DNA, 390 bp, Glycine max
gatggtgcaacacaacacaaaagtcacaatcacaaatctgagtatagtggagtagggtttttttgcgtttgagagaagcatgagcaggagtttgggaattccggtgaagctgctccacgaggcttcggggcacgtggtgatggtggagctcaagagcggagaactctacagaggcagcatgatcgagtgcgaggacaactggaactgccaactcgagagcatcacctacactgccaaggatggcaaaacatcgcaacttgagcatgtttttattcgaggaagcaaagtcaggtttattgtcgtcccaaacatgctgaagaatgcgcctatgtttaagcgtttggatgcaagaatcaagggcaagggtgcatcacttggtgttggtagggg

SEQ ID NO: 256521 - DNA, 285 bp, Glycine max
  unsure (1)..(285): unsure at all n locations
gaaaagcataactgaagaaaactaagaaaggaaggagggaaggaagaatgaacgtgaaagatgccttcggcgaggctttcagggtcacccaagctcgacgttgctattgacatgggcaatncatttctcaatctcactgttgatggtttccctaagatcggagctgtcgcaggcacgcgatcagctgctgaagatacttatcattatatccgaaacggaatatctcaagtcatgaattcgagaaaacgttgaagaagatgtgtaaagaaggtgtatattggggaa

SEQ ID NO: 256522 - DNA, 220 bp, Glycine max
gactgctattcctcttaagcttgctactgagtttgcacactgcataccttaggtcttccgaattcgaagttaatttgcaagatggctaaagaaaaggctcagatcaacattgtggtggttggtcatgttgaccctgaagaggcatccaccattaacgagcttaagaagcctgttgtggagaatgaagctacagggcatgccatatgagggcatgcacgta

SEQ ID NO: 256523 - DNA, 62 bp, Glycine max
attaccaatgacaaaaaaaaaaaaaaaaaaaaaaaaaaaaaagcggccgttttaaaggatcc

SEQ ID NO: 256524 - DNA, 262 bp, Glycine max
gactcaccaagtgaaccaatatagcccaagccctatacaaccaaaccctaacacacacccatttgattcagtttccatggctagcctcaaggttgcatttttggctgcagtgctctgcatggttgtggtgagtgcacccatggcacatgcagctatcacgtgcgggcaggtgacgagcagcctggccaattgcatcggttacctccagaagggaggaacgccgtcgtcgggatgctgcaacggagtgaagagcctcaatgcc

SEQ ID NO: 256525 - DNA, 367 bp, Glycine max
gatagcagcatcatacaaagcattgaattcaaaaactaagttcatttcttgtgctttgctttattcctcaaaaccaaacatgtcgaacacatgcggcaactgtgactgcgctgacaagactaactgcaccaagggaaacagctatggtgttatagtagagactgagaagagctacatcgagactgttgacatggatgttccagcagctgagcatgatgggaagtgcaagtgtggcactaactgcacttgcacggactgcacttgtggccattaaggaatatgtatgaaaatgtaattgccatgtgtttggcaatacaaatctccaaataatgtaatcttcgtatgaataaatgtgtgctggtatcct

SEQ ID NO: 256526 - DNA, 240 bp, Glycine max
gaatgtcatcacttattcaatccaacggttgtaactggtcagcaaccaatcccctccatttcacaccatcggattagtactacacaaatcacactattatatatagtaagcttgagcagaagcttggatatctggcagcagaagaacaagtagttgagaactaagtacgagaaacatatggcttcctcaatgatctcttacccagctgataccactgtcaacccgtgcggtgccagcatg

SEQ ID NO: 256527 - DNA, 208 bp, Glycine max
aagaaggaagctgaagtcatagaagagaagaaggaagtggaagtgacggaagagaagaaggaaattgaagtaacagaagagaagaaagaagcttgaagtcatagaagagaaagaagaagtggaagtgactgatgagatgaaggaaattgaaataacagatgagaagaagaagcagaagtgaaagaagagaacaatgaaggggaagtga

SEQ ID NO: 256528 - DNA, 284 bp, Glycine max
ggcacaagtgagtttgttgatcgagagaactagaaacagtgtgatgaaaatgaacgtccttgttttcttcgttgctacaattttggtagcatggcaatgccatgcgtacgatatgttccctctccgaatgaacactggctatggtgcccgtacttcggaggtgaaatgcgcaagctggaggcttgctggggaagcacacaacatctgtggctttgagaccattcgtgaagagtgcgtttaagcaacctaggaattcattcatggggaacaatatagatcagact

SEQ ID NO: 256529 - DNA, 415 bp, Glycine max
gaacggtaaagcactggcgcagctaccctgaggcttcgcttctcttctcttctctgtcgtgagtcaccatggtgagggttagtgtgctgaacgatgctctgaagagcatgtacaatgctgagaaaaggggaaagcgccaagtcatgattaggccatcctctaaagtcattatcaaattccttttggtgatgcaaaagcacggatacatcggagagtttgagtatgttgatgaccacagggctggtaaaatcgtggttgaattgaacggtagactgaacaagtgtggggttattagtccccgttttgatgtgggcgtcaaagagattgaaagttggactgctaggcttctcccctcaagacagtttgggtatattgtattgactacctctgctggcatcatggatcatgaagaggc

SEQ ID NO: 256530 - DNA, 372 bp, Glycine max
gattgcaggtgtagcagcagagagtgcggtaggctcttccgagacccgaagcagccatggggatcgatctcaaggccggaggtaagagcaaaaagaccaaaagaacagcacccaagtccaatgatatctatctcaagctcttggtcaagctttatcgcttccttgttcggagaactggcagcaacttcaatgctgttatacttaagagattgttcatgagcaaggttaacaaacccccattgtctttgtcgaagttgattaagtatacgaaggggaaagaagataagattgcagtggtggtggggtctataaccgatgatattcgggtttatgaagttccaccattgaaagttacagcactcaggtttacag

SEQ ID NO: 256531 - DNA, 351 bp, Glycine max
gacacaactgaacaagataagctatccatagcggcgaaagaaatgaagagtaccttgttcgccctctttctactttgtgccctcacctcttacctaccttcagccaccgctggtgatgtggtcgacactgatggtaatcctgttgaaaatggaggcacatactttgtgttgccaactataatattaaacggcggtggaatagaatatgccacatttggaaatgaaacttgccctgtcactgttgcgcaatctcgcgatcagttctgcaagggctttccgataaccatttcatccccagcccgaatccgtcacatcagcgaaggccttagtttgaacattgggttcactttc

SEQ ID NO: 256532 - DNA, 323 bp, Glycine max
ggcacaagtgagtttgttgatcgagataactagaggcagtgtgatgaaaatgaaggtccttgatttcttcgatgctacaattttggtagcatggcaatgccatgcgtacgatatgttccctctccgaatgaacactggctatggtgcccgtactccggatgtgaaatgcgcaagttggaggcttgctgtggaagcacacaacatctttggctttgagaccattcctgaagagtgcgttgaagcaacaaatgaatacatccatggcgaacaatatagatcagactccaaaacagttaaccaacaagcttacttttatgcccgag

SEQ ID NO: 256533 - DNA, 284 bp, Glycine max
gatctggcagcagaagaacaagtagttgagaacgaagaaggagaagcaaatggcttcctcaatgatctcttccccagctgttaccactgtcaaccgtgccggtgccggcatggttgctccattcactggcctcaagtccatggctggcttccccaccagaaagaccaacaatgacattacctccattgctagcaaccgtggaagagtgcaatgcatgcaggtgtggccaccagttggcaagaagaagtttgagactctttcctacctgccagaccttgatgatg

SEQ ID NO: 256534 - DNA, 330 bp, Glycine max
tgccatgcgtacgatatgtgcgctctccgaatgaacactgtctatggtgcccgtactccggaggtgaaatgcgcaagttggaggcttgctgtggaagcacacaacatctttggctctgagaccattcctgatgagtgcgttgaagcatcacaggaatacatccatggcgaacactatacatcagactccgcaacagttaaccgacaagctcactcttatgccagagacctcgaagtccatcccaaggacacatttgtgttcagtatatatggcaccgtactctctaatatgccatactacacaaaacatggatatggggtggagaaattt

SEQ ID NO: 256535 - DNA, 248 bp, Glycine max
accgcttacgacagaacaagtctgttgagtgtagaacgctgctgcctaaacccttccggaggcctaatgtaagtgagtaatcagctgttgagaatggtggataaagccaagggtacaaaggaatgacgtgctacccatgagtacactattaacctgcacactcgctttcatggctgcacatataagatgaaagctcctaaagctatttacgtgatagggaaactctatcaacaggccatgtggaccaa

SEQ ID NO: 256536 - DNA, 390 bp, Glycine max
gacagcagcagagcaaaagaaagaaagaaagaaagtgcaacttcctctgatttgctcccctgtttaagccttatcataagcttagaatggcacacaaggaattttccattgccctagtgactctcattgttctctttgtcaacacgaacctccatggtgccatggctgactatggtggtggttggcagagtgctcatgccactttctatggtgggggtgatgcttctggcacaatgggtggagcatgttggtatggaaatttgtatagccagggatattgaactgacacttgggctctaagcactgctttgttcaacaatggcttaaagctgggatcttgctatgaaatgagatgtgatgatgacccaagatggtgcaaacctggctcta

SEQ ID NO: 256537 - DNA, 319 bp, Glycine max
ggctcacgtcactgtgtcgatcgatatggctagagacagtgtgatgaaaatgaaggtccttgtttgacttgattgctacaattttcctagcatgggaatgccatgcttactatatgttcgcgtctagaatgaacactggctatggtgccacgtactccggatgtgaaacgcgcaagttggatgctcgttctggaagcacacaacatctgacgctttcacaccattcctgaagagtgcgttgaagcaaccaatgaatacatctatggggaacagtatcgatcagactccaaaagagatcgccaacaagcttacttttatg

SEQ ID NO: 256538 - DNA, 392 bp, Glycine max
gatagcagcatcatacagggcgttgaattcaaaaacttaagttcattccttgtgttttgctttcttcctcaaaaccaaacatgtcgaacacatgcggcaactgcgactgcgctgacaagactagctgcaccaagggaaacagctatggtgttattgtagagactgagaagagttacatcgagactgttgtcatggatgttccagcagctgaacatgatgggaagtgcaagtgtggcactaactgcactagcacggactgcacctgttgccattaaagaatatgtatgaaaatgtaattgccatgtgtttggcaatacaaatatccaaataatggaatcttcgtatgaataaatgtgtgtgctggtatcctacttcaggtctgtgtaagcatg

SEQ ID NO: 256539 - DNA, 419 bp, Glycine max
gactgcaactttgctctctgtgaggcttcaatttcgaattagggtttcgcttagagtaaccaataaccatgggagtcttcacctttgtcgtccgcaaatccggcagcgaatggagcgccaagcaacattccggcgacatcgaggcctccgccgattccaccttcgatctccaacggaagctcgtgcaagccgctctcgccgttgattcctccggtggagttcagtcctctttctctcccgtgtctcctacctccgctgtgttccaggtgatagtgagtggtgcagtattcgttggaggtggtggtggtgctgttgcagctgcacctgcaagtggtgctgccgcagctgatgcttgcccagctgctgagaaaaaggaagaaaaggtggaagaaagagtccgatgatgatatgggattggg

SEQ ID NO: 256540 - DNA, 419 bp, Glycine max
gattgcaggtgtagcagcagagagtgcggtaggctcttgggagacccgaagcagccatggggatcgatctcaaggccggaggtaagagcaaaaagaccaaaataacagcacccaagtccaatgatatctatctcaagctcttggtcaagctttatcgcttccttgttcggagaactggcagcaactttaatgctggtatacttaagagattgctcatgagcaaggttaacaaactcccattgtctttgtcgagggtgattaagtatacgaatgggaaggaagataagaatgccagtgttggtgggtctataaccgatgatattcgtgtttatgaagttccaccatagaaaggtacagcactcatgtctacagagactgtccgtgcaagaatcgagaaggcatgctgtgaatgcttgacg

SEQ ID NO: 256541 - DNA, 375 bp, Glycine max
ggcagcagaagaacaagtagttgagaactaagagggagaagcaaatggcttcctcaatgatctcttccccagctgttaccactgtcaaccgtgccggtgccggcatggttgctccattcactggcctcaagtccatggctggcttccccaccaggaagaccaacaatgacattacctccattgctagcaacggtggaagagtgcaatgcatgcaggtgtggccaccagttggcaagaagaagtttgagactctttcctacctgccagaccttgatgatgcacaattggcaaaagaagtagaataccttcttaggaagggatggattccttgcttggaattcgagttggagcacggtttcgtgtaccgtgagcaca

SEQ ID NO: 256542 - DNA, 309 bp, Glycine max
cacacgcgtgcgaatacgagcgaccggtctagaggatgcacgcgtacacaagagctcatggggaggtgcagatggcttcctgagtgatctcttgctaatctattaccactggcaaccgttccggtaccagcatggttgctccattcactggcactaagtccatggctgacttctgcatcaggaataccaacgatgacattaccataattgctagcaacggtgcatgagtgcaatgcatgcatatgtggacacctgttagcatgaagcagattgatactgattcatacctaccagacattgatcatgcac

SEQ ID NO: 256543 - DNA, 91 bp, Glycine max
tgagcgccaatgtttttttagaggagtttcatcttgtaatcaaaagaggttatcttatagtaggaaatcgatgtcttactccattttaagg

SEQ ID NO: 256544 - DNA, 347 bp, Glycine max
  unsure (1)..(347): unsure at all n locations
gaccaagtgaaccaatatagcccaagccctatacagcgcaaaccctaacacacacccatttgattcagtttccatggctagcctcaaggttgcatttttggctgcagtgctctgcatggttgtggtgagtgcacccatggcacatgcagctatcacgtgcgggcaggtgacgagtagcctggccaattgcatcggttacctccagaagggaggaacgccgtcgtcgggatgctgcaacggagtgaagagcctcaatgccgccgccaagaccaccgtcgaccgccagacggcgtgcaactgcctcaagtcggccgncagccaaatctccggcttcaacgccaacaacg

SEQ ID NO: 256545 - DNA, 299 bp, Glycine max
gacacaactgaacaagatgagctatccatagcagccaaagaagttaagagtaccttggtcggcctctttctactttgtgcccttaccttttacctaccttcatccaccgctggtgatgtcgtctacactgatggtaattctgttgaaaatggatgcacatactttgtgttgccaacttttatattaaacggcagtggaatagaatatgccacatttgcaaatgaaacttgccctgtcactgttgcgcaatctcgcgatcagatctgcgatggctttcctgaaaccatttcatttccagc

SEQ ID NO: 256546 - DNA, 109 bp, Glycine max
ggcaagagtttgttgtgagctataagctagtttatcgtgaggagaatatgaagttgcttgttatctttgttgctgcagtagttctggtagcatggccatgccatggcgc

SEQ ID NO: 256547 - DNA, 387 bp, Glycine max
gaccagaagcagcaccagcaccgttctattcttcttgcaaaatgggtatctctcgtgattccatgcacaagaggcgcgccaccggcggcaagaagaaagcttggaggaagaagagaaagtatgagcttgggaggcagccagcaaacacaaagctatcaagcaacaagacggttaggaggattagggttcgcggtgggaacgtgaagtggcgcgctttgaggcttgatactgggaactactcttgggggagtgaagctgcaacccgcaagacaaggattcttgatgtggtgtacaatgcatccaacaatgagcttgttaggactcagacattggtcaagagtgccattgttcaagtcgatgcaacacccttcaagcagtggtatctgc

SEQ ID NO: 256548 - DNA, 247 bp, Glycine max
gaaaaaagctgcttacactgggaagttctacacgatcgagtgtgcattgatcgagtgagcttggtcttttgtagattggatagatgtgcaatggaaagagggtggaaaagagcggtaaggaggagggcggcgcccaaaaaaaaaaaaaaagcggccgatctaaaggatgccggtttacaggatccaagcttacatacgcttgcatgcgaattgatagatctaatatcaagtcacttaacttcaattt

SEQ ID NO: 256549 - DNA, 245 bp, Glycine max
gaagacactacatttcatccaatatttgaacaatattgtaggccggcttgttacgttgatgagcactatttccccaccatgctcaccattcaagcagccaatgtgttggcgaacaggagcataacttgggtggactggtctaggggtggagctcaccctgctacatttggaagaaatgatatcactgaggagtttttcaatcgagttcgcagaggtcacacttgcctatacaacaatagaaactc

SEQ ID NO: 256550 - DNA, 309 bp, Glycine max
gatttagcattataatatcatggtattgaaatcggagacgtagaaacttataattactataataatctctagctcagatattactcactgacaacgagtgactctgactcaacatgtttgcgtacattcactgtcgctatagaccatgtctggcttctttaccagaaagacggacattgacattaattacatggctagccacggattgagagttgcatgcatgcaggcatggactgccaatgacgagttcaactcagagaactcttaatacatgccagacgaggattatgcacaattgtcaaatgatgt

SEQ ID NO: 256551 - DNA, 356 bp, Glycine max
gacacagctattcctcttaagcttgctactgagtttccacactgcataccttaggtcttccgaattcgaagttaatttgcaagatggctaaggaaaaggctcagatcaacattgtggtggttggtcatgtggaccctgaggaggcaaccaccattaacgagctgaagaagcctgttgtggagaaagaagctccagggcatgccatatgagggcatgcacgtacggcctcggaggggaaccagaaaattatgttaacaaaataatctggaaccctaatgtatcagtgtcatcatcagtgtgtagtttaagctagctttgctatggttacgttctttgagatgagagtcttgatgaac

SEQ ID NO: 256552 - DNA, 330 bp, Glycine max
ggatttcatttcgtttgcaattgaatttgaattggcctaggggcttaatatctcccctcacttgtgcctagccttatgtcatagtattatcattcattctcatctttctctcttctctctccacccaaaccctaactcccgaccctgttcccctctcgtatccgtcatgaaaggaggaaagtccaagaccgaatctaagagagccgatcccaaacttgctgtgaataagaagggagccgccaccaaggctaggaaacccgccggcaaggggaaagcagcgaaagaccctaacaagccaaagaggcctccaagtgctctcttcggtttcat

SEQ ID NO: 256553 - DNA, 343 bp, Glycine max
aggcgtccgaacacctccgagaggacatctcatggcgagtgccattgaatgtgaatgggcctagatgcttaatatgtcctctcacttgtgcctagccctatgtcataccatcatcattcattctcacctttctctctgctctctccacccaatccctaactcccgaccctgttcccgtctcgtatccgtcatgaaaggaggaacgttcaagacctcatctaagatagccgatcccaaccttactgtgactaacatggcagacgtcaccaatgctaggaatcccttcggcaacggtaaggctcctcaagaccctaacaagccaaagtggcctccaagtgctttc

SEQ ID NO: 256554 - DNA, 429 bp, Glycine max
  unsure (1)..(429): unsure at all n locations
ggtttcataggctcctttttgattacgaaaatgtggaagagaacgggttttgaagaagaagcagttcaattgatcaactcagatttcagggacctaagtctagctgctaatagactcgcccatcatgccatcaaacttggtggcattggctttggagcctcttttttcggattgtttgctgccattgctgctatttatctgttgattttggatcgtacaaactggaaaacaaatattctcacagcactactcattccatacattttcttcagcttgccttcattaattttcgacgtcttcaggggagagcttggaaaatggattgctgcagttgctgttgtattacgccttttccttccaagacacttncctgattggcttgaattgcctggtgctctgattctttctaatcgtgtaactccttctcta

SEQ ID NO: 256555 - DNA, 251 bp, Glycine max
taatttgggaattattgctcccatcgccattggtttcattgtcggcgctaacattttgttgggtggggccttctctggagcggccatgaaccccgctgtgacatttgggcctgctgtcgtgagctggacctggaccaaccactggatctactgggccgggcctttcatcggtggtggaatcgcttgccttgattacgaggttgtctttattagccacacccacgttctgctttgcaccactgactactaga

SEQ ID NO: 256556 - DNA, 390 bp, Glycine max
gcacaagtgagtttgctgatcgagataactagaggcagtgtgatgaaaatgaaggtccttgttttcttcgttgctacaattttggtagcatggcaatgccatgcgtaccatatgttccctctccgaatgaacactggctatggtgcccgtactccggaggtgaaatgcgcaagttggaggcttgctgtggaagcacacaacatctttggctttgagaccattcctgaagagtgcgttgaagcaacacaggaatacatccatggcgaacaatatagatcagactccaaaacagttaaccaacaagcttacttttatgccagagacctcgaagtccatcccgaggacacatttgtgatcagtatagatggcaccgtactctttaatattcca

SEQ ID NO: 256557 - DNA, 425 bp, Glycine max
gaaaaagagagagagagaaaagcgtgaatcatgtgggacgaagagcatcacttcgattctcagacggatgcgggagcgtccaagacgtatcctcagcaggctggtaccattcgcaagaatggctacatcgtcatcaaatccaggccttgcaaggttgtagaggtctctacgtcaaagacaggcaagcatggacatgcaaagtgtcactttgttgcaattgatatttttaatgggaaaaagcttgaagatattgttccatcatcccacaactgtgatgttccacatgtgaatcgcactgactatcagcttattgatatctctgaagacggctttgtgagtctgttgactgataatggaaataccaaggatgatctgaagcttcctactgatgaggcattgcttgctcagattaaagatggattttc

SEQ ID NO: 256558 - DNA, 417 bp, Glycine max
  unsure (1)..(417): unsure at all n locations
gacagctattcctcttaagcttgctactgagtttccacactgcataccttaggtcttccgaattcgaagttaatttgcaagatggctaaggaaaaggctcagatcaacattgtggtggttggtcatgtggaccctgaggaggcaaccaccattaacgagctgaagaagcctgttgtggagaaagaagctccagggcatgccatatgagggcctgcacgtacggcctcggaggggaaccagaaaattatgttaacaaaataatctggaaccctaatgtatcagtgtcatcatcagtgtgtagtttaagctagctntgctatggttacgttctttgagatgagagtcttgatgaacagtaccattctgatgtattgctttccttngaagttaatgcatgccttctatcttctgtctatt

SEQ ID NO: 256559 - DNA, 340 bp, Glycine max
acgcatgcgtgcaggcgtccgaaagacaccgctattcctatcaagccagctactgagatcccactcttgagtaccttaagtctaacggattcgaagttaaagctcaaaaccgatcacgaaaatgctcagaccaacattgtagtgcactgtcatggataccctgacgaggcaaccaacattaaccagctgaagaagcctgtcgcggacaactaggctccaaggcatgccatatgatggccagcccataccgactacgaaggcaaccagaacattaagctaacacaataatatggaaccctaatgtatcagtgtcatcgtcaatatgtagtttaagctagct

SEQ ID NO: 256560 - DNA, 338 bp, Glycine max
gtgaaaacagacgaccgagacagctattcctcttaagcttgctactgagtttacagactgggtaccttaggtcttgcgaattcgaaggtaatttgcaagatggctaacgaaaaggctcagatcaacattgtggaggttggtcatgtgtaccctgaggaggcaaccaccattaacgagctgaagacgcctgttgtggacaaagaagctacagcgcatgccatatgagggcctgcacgtacggcctctgaggggaaccacaagattatgttaacaaaataatcttgaaccctgatgtatcagtgtcatcatcaatgcgtaatttaagctagctttgctat

SEQ ID NO: 256561 - DNA, 401 bp, Glycine max
gaagcacaaacattattcccaatccttatcctgtttgcttcaatggaagtgatttccgcttcgagcttgaatcccaacgctccgatgttcgtgcctctcgcctatcggacggtggaggatttctccgaccaatggtgggacctcgtccactcctccccctggttccgcgactactggctccgcgagtgcttccaagatccccagtaccaatacgacgacgttttcgacttcgactttgacctagatctccaagataaagatgaaaatgaagggaaggaagggaaagaagtggtgtcgttgggggtgctcaaatggcgaagctgtggaggaggatgggccgaagcgccgaggtatgtggaaaaagcccctaagtttgtgaagcccaaggtgagcccacgggc

SEQ ID NO: 256562 - DNA, 321 bp, Glycine max
cccacgcgtccgaaagacaacggaatggctagcacacacgttaatcccaatcccgagacgggtaccttaaatgtaactgattcccacttcgatctctagatccatcgctacaacgctcaaaccaacagcctatcggacggtcatggataccatgaaccagcaatcagaattaacgaactgaataagcctgttccgcaaatacaagctccacgagatgccatatgatggcctgcacctacagtctcacatgtgaaccagaaaattatgcctacataatcatcttgaaccctaatgtatcagtgtcatcatcaaagagtagtt

SEQ ID NO: 256563 - DNA, 363 bp, Glycine max
ggcacaagtgagtttgttgatcgagataactagaggacagtgtgatgaaaatgaaggtccttgttttcttcgttgctacaattttggtagcatggcaatgccatgcgtacgatatgttccctctccgaatgaacactggctatggtgcccgtactccggaggtgaaatgcgcaagttggaggcttgctgtggaagcacacaacatctttggctttgagaccattcctgaagagtgcgttgaagcaacaaaggaatacatccatggcgaacaatatagatcagactccaaaacagttaaccaacaagcttacttttatgccagagacctcgaagtccattccaaggacacatttgtgttcagta

SEQ ID NO: 256564 - DNA, 410 bp, Glycine max
gagcctcagcagaagcagaacgaggagaagcagaaggagcaaaagcaatggcgccgaagaagccgagaaccacgacaaggaaccctgatttggttagggggattggcaagtattcgaggtcgcagatgtaccacaagaggggcatctgggccatcaaggccaaaaacggtggcgttttgccccgccacgatcccaagcccaagcccgaggccccggcccagaagccgcccaagttctaccccgcggacgatgttaagaagcccctcgtcaacaagcacaagcccaaacccgcgaaactcagggctagcattactccagggactgtgttgatcctgcttgctgggaggttcaagggaaagagggttgttttcctgaagcagctcccatctggattgcttcttgtaactggt

SEQ ID NO: 256565 - DNA, 393 bp, Glycine max
catgtaaaatgatctatttttcttatctatatagatagatctatctgtattctatcatttacagttgaatatatacaaatatcagtatataacaacatatattaaaaaaataacaacatatattaaaaaagtcagaataaaaaaacaaatcctttatagtatttcttgtaataaatgtgatttttggaatagggataaataaaccatggaaaaatctaagcgactctttatgaaatccaagcgatcttttcgtaggcgtttgcccccgatccaatcgggggaccgaattgattataaaaacatgggtttaattagtcgatttattaatgaacaaggaaaaatattatccagacgccgtaatagatggacctttaaacaacaacgattaataac

SEQ ID NO: 256566 - DNA, 294 bp, Glycine max
gatctggcagcagaagaacaagtagttgagaactaagaaggagaagcaaatggcttcctcaatgatctcttccccagctgttaccactgtcaaccgtgccggtgccggcatggctgctccattcactggcctcaagtccatggctggcttccccaccaggaagaccaacaatgacattacctccattgctagcaacggtggaagagtgcaatgcatgcaggtgtggccaccagttggcaagaagaagtttgagactctttcctacctgccagaacttgatgatgcacaattggc

SEQ ID NO: 256567 - DNA, 120 bp, Glycine max
ggcacaagtgagtttgttgatcgagataactagaaacagtgtgatgaaaatgaaaggccttggtttcttcggtgctacaattttggtagcattgcaatgccattcctaccatatggtccc

SEQ ID NO: 256568 - DNA, 378 bp, Glycine max
cgcacgaagaagagcgtggagacctacaagatctacatcttcaaggtcctcaagcaggttcaccccgacattggtatttccagcaaggccatgggcatcatgaacagcttcatcaacgacatcttcgagaagctcgcccaggaagcgtcgcgtttggctcgctacaacaagaagcccaccatcacctcgagggagatccagaccgccgtgcgtctcgtgctccctggtgaattggccaaacacgccgtttctgaagggaccaaggcggttaccaagtttaccagctcttgaattagggtttgttaagcggttgtgttgcagatctagggttttctgtggattttctttcttaaaaaataagttgtagatgtaatgatc

SEQ ID NO: 256569 - DNA, 359 bp, Glycine max
gtactcattcctagaccgagttgtcaacttgggacttcctaggacaagagatttccaaggtgtgaaccccaacagctttgatgggcatgggaactacagcattggcattaaggaccagggtgtcttcccagagatcagagctggtgttgttggtaagcctcggggaatggatatctacatcgcaacaacagctaaaaccgaccaagaagcacacaaattgttggctcttatgggtatgcccttcagagagggaagtggtcccgccaccacaattcggaaaaagaagctcaagtctcatcattttgatgcaaaatcaaagggaagaggaaggaagtgacatagttttgatgcaaaatcat

SEQ ID NO: 256570 - DNA, 436 bp, Glycine max
  unsure (1)..(436): unsure at all n locations
gataagaaagaagatcaaaagaaaaaagagaaacaaatggcagcactgggtggctttaccgacatcaccggagcacagaacagcatcgatatcgaaaatctcgctcgctttgctgttgatgaacacaacaaaaaagagaatgcagttctggagtttgtgagggtgattagtgcaaagaaacaaatggtttctggcaccttgtactatatcactttggaggcaaatgatggtgtgacgaaaaaggtttatgaaactaaggtgttggagaaaccacggttgaacatcaaggaggttcaggaattcaagcccatcactgttgctgttaatcctctttcggtgacggtctagcacatagctaggttatggaagtgactagcttggccgcangagtaataatatgtatgaactgaataaatgtacctattaactctacaaa

SEQ ID NO: 256571 - DNA, 275 bp, Glycine max
gatctggcagcagaagaacaagtagttgagaactgggaaggagaagcaaatggctttctcaatgatctcttccccagctgttaccactgtcaaccgtgccggtgccggcatggttgctccattcactggcctcaagttcatggctggctttgccaccagaaagaccaactttgactttacctgcattgctagcaacggtggaagagtgcaatgcacgcatgtgcggccaccagttgccaagaagtagtttgcgactctttcctacctgtcagacc

SEQ ID NO: 256572 - DNA, 245 bp, Glycine max
gggaggagagcttaaaaaaacaagatgacaaataaagtataagtgcggggggtcaaactgggtgtatataatcggatcattataagacaactctttcttttgaggtttcaaagaatgattttcgaattcgattgaatctaaaacacaaaagaattggtttacaggatagaagaaacccacgtatatgtgataggatattctatatgaactagttatatatgaactaaccatatccatatatatta

SEQ ID NO: 256573 - DNA, 416 bp, Glycine max
  unsure (1)..(416): unsure at all n locations
gattccacacacaagaagactcctcaatcatccatagacatggccaccgtcacttctgcagcagtttctattccctcattcactggcctcaaggcaagcgcaggcaaagtgagtgccgccgcagttaaagtctcagctccccaagccacaaggttctgcggcatcaaggcttccctcaaagacgttggagtcgctgttgtggccactgctgcgagcgcagttctagctagcaacgccatggccattgaagtgccactgngcactgatgacgggtctctggttttctctcccaactctttctccgtggcccctggggaaaagatcgtgttcaagaacaacgcangtttnccccacaacgttgtgttcgacgaggacgagattcctagccgcgtggatgcagggaaaatctncatgag

SEQ ID NO: 256574 - DNA, 356 bp, Glycine max
caacataggtcatcgaaaggatctcgaagacccgccaacgcacgaaagccgggatctttcagaaaatggattcctattcgaagggtgcataaccgcatggataagctcacaccaacccgtcaatttgggatccaattcggttccttaggaggtatcgggaaggaattttggaatgtaataatatcgattcatacagatacagaagaaagggttctctattgattcaaacgctctacctacgagatagggatagagaaagaggaaaaaaccgaggatttcacatagtacttttggtcgaaaaatcgatctgacttttttcgtacttttcgctcaatgatgaaatgggtcagattcta

SEQ ID NO: 256575 - DNA, 332 bp, Glycine max
gatcgcatgacatagcactcaccctcattaccaaggcgagggcatagccaaaacctactttcgaaggctctgattttcctaatggctccggcagaggcagataagaagccaccagagaagaagccagctgcggaaaaagcaccgacggataagaatccgaaagcacgacaagaagatctcggatgaaggaaggcgcgagaagaaaaagacgcgcacgaagaagagcgtggagacctacaagatctacatcgtcaaggtcctgacgcaggttcaccccgacattggtatcaccagcaaggacatgggcatcatgaacagcttcatcatcgaca

SEQ ID NO: 256576 - DNA, 412 bp, Glycine max
ggcctagtcatactctgtatcatttcatttcgatgatcatccatagttactgaagaaaatggcaaccatctccgctgctatcacaaccccatcgatcacccgcgcatgtctagtgcaaaaacgttctcttgggttctcatctcccgttcttggtttgccagcaatgggtaaggtgggaagagtgagttgctccatggaagaaaagccttcttctgtgaaagaaagcagctcaagcatgttggggatgggggcatctttgatggcagcgggcagcgccgcaaccatgtcatgcccaaccatggcccttgtggatgagagacttagcactgaaaggacccggctacccttcggcctcagcaacaaccttctcggttggatcccctgtcgcgtcttcggactcatctgggctctc

SEQ ID NO: 256577 - DNA, 397 bp, Glycine max
caggacaccaactccaaaacaaacccacttagatggcttcctgtggatccttgctagagctgctatttgcaagccttatcctcatgcctcaagggcttgctacttactacaaacccattagaagccaccgtgtcaagccttcgtgtcaagccaccgtgtacaaccaccggttataaaccaaaccaccgtttacagccgaaccaccggttacaagccaccatattagaagccaccattcaagaaaccaccttatggaaagtacccttcagtaggggacaacacccatgcctaaagcaagccatgagggctattatctacttaataaattagaggaactgctttgtggtttctaacattgtgatttacaacttcgtagcaatgcatattcttgactctt

SEQ ID NO: 256578 - DNA, 312 bp, Glycine max
agaaggggacacgtcagtttgttgatcgagataactagctacagtgtgatgcaaatgaatgtccttgatttcttcgttgctacaattttggtagcatggcaatgccatgcgtacgatatgttccctcttctaatgaacactggctattgtgcccgtactcctgaggtgaaatgctcaagttggaggcttgctgctgaagcacacaacatcattcgcttctataccatgattgaagagtgcgttgtatcaacaacggaatacatccatggcgaacaatatatttcatactacttaacagctaatcaacaagct

SEQ ID NO: 256579 - DNA, 380 bp, Glycine max
gacaattgagctagtttcaagtcaccaccatggcacttgttcaaccctttgcttctctttcaatctcttttcgcgatgctcgtgttttcactgcaccaaaatgctctcccaccactcactttcctcatcggaatttggttccaactcgagcatcattcatcgctggttccccactgtcgattcgaagaaatcatggaaggaatggtgcatgcaaagcaatgcctgtttcaatacgatgtgagcacagtacccaggaagggaacagtttagatgtgtggctaggccggctagccatggctgggtctgcagtatccatcactgatgaaattgctaccgccaagggactcctagagaacttttgactcacaagtgcactgtct

SEQ ID NO: 256580 - DNA, 351 bp, Glycine max
ggcacaagtgtttttttttatcgagataactatttgcagtgtgatgaaaatgaaggtcctcgttttcttcgttgctacaattttggtagcatggcaatgccatgcgtacgatatgttccctctccgaatgaacactggctatggtgcccgtactccggaggtgaaatgcgcaagttggaggcttgctgtggaagcacacaacatccttggctttgagaccattcctgaagagtgcgttgaagcaacaaaggaatacatccatggcgaacaatatagatcagactccaaaacagttaaccaacaagcttacttttatgccagagacctcgaagtccatcccaaggacacatt

SEQ ID NO: 256581 - DNA, 341 bp, Glycine max
ggatatattatgcctacaacgtaataataaccaaaacagcagagagaagagaaggtgtagacaaacacaatctctaatggcactcaagatgtgggcttcttccactgccaatgcactcaaagtctcttctacctccagacctcatctcttgcatcctttttctttctccagatgcttgtcttccgtcttggatggacttaagtatgcagattcacacgaatgggtcaagcacgaaggctcagtcgccaccattggtatcactgaccatgcccaggaccatcttggagaggttgtgtatgtggagctgccagaatcaagtggcacagttacccagaagtctg

SEQ ID NO: 256582 - DNA, 158 bp, Glycine max
tcaaacgaagaaaggcttatggtggatacctaggcacccagagacgaggaagggcgtagtaagcgacgaaatgcttcggggagttgaaaataagcgtagatccggggattcccgatataggtcaacctttcgaactgctgctgaatccacgggcagac

SEQ ID NO: 256583 - DNA, 332 bp, Glycine max
acgacaggcgacagaagagacagatggggctagcggcagataaacgggagttgcaagcgggtaagaaggaaatgtcttggcgaatgatctgatcccaaactgataccacggtgaaccgtaccgatgccggcgcgattgcttgattgaccggactaaaatccatggctggattgcgcacgaggtagaccaacactgacattaccttcattgctagcaactgtggaagaactcagtgcatgcaagtgtagtcaccaatcggctagaagaagtctgagacatctttctacttgccagacctcgatgatgcccaattggcaaaagaagtcgaatac

SEQ ID NO: 256584 - DNA, 326 bp, Glycine max
gagccatactctgattcattagtgaagaaaaatggcaaccatcatcgccggcatcccaactacatcgatcactcgcgcaggtcttgtgctcaaacgacctgttggagcctcgtcctctaccgttcttggattgtcagcaatggctaaggcagggaaagtgaggtgctccatggaggaaaagccttcaagcagctcaaatatagggatgggggcatccttgttagcagctgcagttgccgcaaccatgtcaagcccagccatggctttggtggatgagagactcagcactgaaggaaaccgggcttcctttgggcttagcaacaacc

SEQ ID NO: 256585 - DNA, 349 bp, Glycine max
gcacaagtgagtttgttgatcgagataactagaaacagtgtgatgaaaatgaaggtccttgttttcttcgttgctacaattttggtagcatggcaatgccatgcgtacgatatgttccctctccgaatgaacactggctatggtgcccgtactccggaggtgaaatgcgcaagttggaggcttgctgtggaagcacacaacatctttggctttgagaccattcctgaagagtgcgttgaagcaacaaaggaatacatccatggcgaacaatatagatcagactccaaaacagttaaccaacaagcttacttttatgccagagacctcgaagtccattccaaggacacat

SEQ ID NO: 256586 - DNA, 398 bp, Glycine max
gctggcagcagaaaaacaagtagttgagaactaagaagaaggaaatggcttcctcaatgatctcctccccagctgttaccaccgtcaaccgtgccggtgccggcatggttgctccattcaccggcctcaaatccatggctggcttccccacgaggaagaccaacaatgacattacctccattgctagcaacggtggaagagtacaatgcatgcaggtgtggccaccaattggcaagaagaagttcgagactctttcctacttgccagacctcgatgatgcccaattggcaaaggaagtcgaataccttctaaggaaaggatggattccttgcttggaattcgagttggagcacggtttcgtgtaccgtgagcacaacaggtcacctggatactatgat

SEQ ID NO: 256587 - DNA, 367 bp, Glycine max
  unsure (1)..(367): unsure at all n locations
gggccgctgcagcaagggctgaacgcacgcaggaggaggagattgatcgagagaagagaagatgactacacgcttcaagaagaacaggacgaagagaggccacgtgagtgccggccatggccgcatcgggaagcaccggaagcaccctggaggacgcggtaatgccggaggcatgcaccaccaccggatcctctttgacaagtaccaccctgggttcttcggcaaggtcggaatgcgctattttcacaagctgcgtaacaaattctactctccgatcctcaacatcgacaagctctggtccctggttccgcaagaagtgaaggacaatgcctncaaggagaacaaggcgccgctgatcgacgttacg

SEQ ID NO: 256588 - DNA, 302 bp, Glycine max
acatgggggcactcgtgattttgttgatcgggatatctagagactgcgtgatgaaaatgaaagtcctcgtgttcttcgttgctacaattttggtcgcatggcattgccatacgttcgacatgtaccatatgcgaatgaacactgactatggtgcccgctctacgtacgtgaactgcgcaagttggaggcttgttgtggaagtacactacatctttggctctgagaccattcctggagagtgccttggacctgcacaggtatacatgcatggctaacagtacacatcagactgcaaaacagtt

SEQ ID NO: 256589 - DNA, 444 bp, Glycine max
agacgacagaagggggacagcatatcaataatctattttatactatacccacattttgataattatttttctagttgataagccatggctactcgaggaaagcttgaggttgacgttgatctcaagtctaacgcagacaagtactggcaaacctttaggaactccactgaaatattccccaaggccttccccaatgattacaaaagcattgaggttcttgagggtgatggcaaatcacctggttctatccgccacataagttatggtgaaggttcaccacttgtgaagtcatcctttgagaagattgaagctgttgatgaagaaaagaaggtagtgtcgtacactatcattgatggagaacccctccagcactacaaaacattcaagggagacatttctgtgactccagttggcgatggatgcgaggtgaagtggagtgctgtg

SEQ ID NO: 256590 - DNA, 352 bp, Glycine max; identical to SEQ ID NO: 236116

SEQ ID NO: 256591 - DNA, 318 bp, Glycine max
acatggaggcacacgtgattatgttgatcgggatatctagaaactacgtgatgaaaataaaagtcctcgtgttcttctttgctacaatcttggtcgcatggcaatgccataccttcgacatgttccatatgccaatgaacactcactatggtccccactctacgtacgtgaaatgcacaagttggaggcttgttgtggaagtacactacatctatagcatcgagaccattcctgaagagtgccttgaacctgcacaggtatacatgcacggctaacaatacagatcacactccaaaacagttaaccaacaggctatac

SEQ ID NO: 256592 - DNA, 328 bp, Glycine max
  unsure (1)..(328): unsure at all n locations
cagggagaagagcttaggaagctgattaatgcgccagcttacattgaatgcagttcaaaaacacaggagaacgtgaaggcagtctttgatgcagccataagagttgtccttcaaccacctaagcagaagaaaaagaagggtaaagcacaaaaggcctgttcgatattgtgattcactaggtgttaacatttgactgccctttgttctccctgtattaccctccccttctttatttttatcatttccttgctattgaagaagttgtagtttatgtgggtgttcctcagacaaatactctagatctncttgaacataagtggcttaatgc

SEQ ID NO: 256593 - DNA, 334 bp, Glycine max
ggcaagagtttgttgtgagctataagctagtttatcgtgaggagaatatgaagttgtttgttttctttgttgctgcagtaattttggtagcatggccatgccatggcgcatgctaccaaaggttccctctccgaatgaaaactggctatggtgagcgttcttcggaggtaaaatgcgcaagttttaggcttgctgtggaagcacacaacatccgagcctttaaaaccattcctgaagagtgcgttgaaccaacaaaagactacattaatggcgaacaatttagatcagactctaaaacaagtaaccaacaagctttcttttatgctaatgaacg

SEQ ID NO: 256594 - DNA, 353 bp, Glycine max
ggtaggcaaagagagagagagaaaagcgtgaatcatgtcggacgaagagcatcacttcgattctcaggcggatgctggagcgtccaagacgtatcctcagcaggctggtaccattcgcaagaatggctacatcgtcatcaaatccaggccttgcaaggttgtagaggtctctacgtcaaagacaggcaagcatggacatgcaaagtgtcactttgttgcaattgatatttctaatgggaaaaagcttgaagatattgttccatcatcccacaactgtgatgttccacatgtgaatcgcactgactatcagcttattgatatctctgaagacagctttgtgagtctgttgactg

SEQ ID NO: 256595 - DNA, 399 bp, Glycine max
gtccacaaaaacgaagtactactacaagggaagaaaaacttagctactaaggaaggatcaaagagaatggctcaagcaatggcatcaatggctggcttgcgtggttcctctcaggctgtgttggaaggtagccttcaggtgagtggctccacacgcttgaatgtggggagtggaagcagggtggcctcagtcacacgtgcagggttcacagttagagcacaacaacaacaagtgagtggtgaggtacaaagcagccgtaaggcagtgctttcacttgttgctgctggtttggccactggctcttttgttcaagctgtgcttgctgatgccaaatctatcaaagttggaccaccttccccaccttctggtggattgcctggaacgttgaactcagatgaa

SEQ ID NO: 256596 - DNA, 414 bp, Glycine max
ggcatcagaaaaagaaaagccttcaatcatatagcattctaagaaatgaagagccctaccattttcattctctttctactttctgccttctacacctcactcctaccttcagccaccgctcaagtcgtggttgacatggaaggtaatgatcttcaaaatggtgggaaatattatgtgttgccagtaatagagtcatcatatggtggaataagagtagccgcaactggaaaagaaagatgccctctcactgttgtacaatctgccgatccgtatgataaggggattgcaacaattatttcaaccccatatcgagttcctgttatccgcgaaggctttcctttgaacattacgttccgtaattttgcaggtatactgccttgtgtcccccttcgatctgagtggaccgtcgttaat

SEQ ID NO: 256597 - DNA, 439 bp, Glycine max
gacagcagtaaagtgagttaaaagaaccgataataggggttccttcactctccgctctctctgccactgagccaagaagatggcctcacaggtttgcaaatctgcttccagagccgcgaggtcccttctatcctctcgttttcactctcaaggacgtgcgcttggggctgctgcggctgtttcattgagcagcaaagtgcctcttttttacggaaagaacggttctggaaatggatccgcttcttcatcatcaacatcatcatcatggatttcaggagctcttgctcttcctgccgcagcttacatgttccaagatcaggaggtgcaggcagctgagctggagcgcactttcattgccattaagcctgatggagtgcagagaggcctgatttctgagattatatctcgttttgagcggaaagggtacaagcttgtggga

SEQ ID NO: 256598 - DNA, 403 bp, Glycine max
gattgtgattcattagcacatttgcaaagtgttatttttctttttttctcatttgcactgcaaattgcaatggcttccaacaaggttattgccaccatcatggtgctttctctccttgcctactcaacatcattcaccaatgcatgtggcacatgccacccaaaacctaccccttctcctcctcctccatcaggaaagtgccctaaggacacattgaagctaggggtgtgtgcagatattctaggtcttgttactgttgttgttggttcccctgtctccagcaagtgttgtgcattgcttgaaggtttggctgatttggaggctgcactttgcctttgcactgctattaaggccaatgttcttggaatcaacttgaatgtgcctatcacactcagtgtgctac

SEQ ID NO: 256599 - DNA, 339 bp, Glycine max
ggaagcttcaataagtaagtatcaatggcgtgccgaagaatcccagaacaagccccccagcgagcagtccactaccgaactcatcacgagcgcgaagctggtggcggaggcggcgcagtcggctctgaagagcgacagcgacaaagtggacaaggccaaggtggctgacgctgccggcgatcttctcgacgcggcggggaagtatggaaaacttgatgacaaacaaggcatagggcaatatgttgacaaggctgctgattatctgcataattaccagggtgataataccactgctccttcacagcctgcagagtctaaaggtgaagaaagtggtggtgg

SEQ ID NO: 256600 - DNA, 300 bp, Glycine max
gactgctacacctaagcaaacgcggttagatcggtggctaagcatacttcctagcggacatggttgctgcacttatcctcattcctaacggacttggtacgtaactcaaacccactgagacgcaaccagtgtactggcttacatcgttgcaacgaacactgtgcaaaccacagtggtatgctccaacagcaacgggacacaagccgtagccagcgtgctacaagccaccatatcagaagccaccatgcacgagacgaccatatgggaagtaccctccagacgacgacaacacccatgcct

SEQ ID NO: 256601 - DNA, 369 bp, Glycine max
ggagcgaaagagatgtcgttggtttcaagcatgttcgggtgtggagtggtgatggcggcgtcgctagcaatgggaattggaaggagaagcgatggtggattgacgatagtgtgttcgtctaggccgcataagaaagcgactgcgcatgacatgaagactcggcctcggaagactcacgcatgggatagaaaccgcaagcccaccgtctacgatccactccctcctgttactgctgattggaccctcgctattaccgctgacgcttcttctgctcccggtacgcctccgcctccaactgcctctgcctagtcactctctaggtactctctctcgttttcatgtagtcttatctttaattccagcagcttt

SEQ ID NO: 256602 - DNA, 382 bp, Glycine max
  unsure (1)..(382): unsure at all n locations
gaatcctctgttgtttctcagccgcctcggctagggttcggaaacgaagaagggttctgttttcttttcgcgatgagggccaagtggaagaagaagcgtatgaggaggctgaagaggaagcgccgaaagatgagacagagatccaagtagtgcgttaaacctagtttgtttccgttgcttttacaattgcttatgttgtcaaataggacacccagttgttagtggcactggtctctcctttttgatgttttgatacattttgttggattttatttcgtcttatgttcttagctgaaaacaatgctgttactgcgtttgcgaatcaacaggatatcttgtttgcatttctgtttctctctttgcgaaaaaaacaannnnnntt

SEQ ID NO: 256603 - DNA, 382 bp, Glycine max
gatctggcagcagaagaacaagtagttgagaactaagaaggagaagcaaatggcttcctcaatgatctcttccccagctgttaccactgtcaaccgtgccggtgccggcatggttgctccattcactggcctcaagtccatggctggcttccccaccaggaagaccaacaatgacattacctccattgctagcaacggtggaagagtgcaatgcatgcaggtgtggccaccagttggcaagaagaagtttgagactctttcctacctgccagaccttgatgatgcacaattggcaaaggaagtagaataccttcttaggaagggatggattccttgcttggaattcgagttggagcacggtttcgtgtaccgtgagcacaac

SEQ ID NO: 256604 - DNA, 326 bp, Glycine max
gagtgcacaagtgagtttgttgatcgagatagctagaaacagtgtgatgaaaatgaaggtccttgttttcttcgttgctacaattttggtagcatggcaatgccatgcgtacgatatgttccctctccgaatgaacactggctatggtgcccgtactccggaggtgaaatgcgcaagttggaggcttgctgtggaagcacacaacatctttggctttgagaccattcctgaagagtgcgttgaagcaacaaaggaatacatccatggcgaacaatatagatcagactccaaaacagttaaccaacaagcttacttttatgccagag

SEQ ID NO: 256605 - DNA, 433 bp, Glycine max
ggaagtgtatttggtcactgacctatcttggtagagatttgaagtttaaaccttcaaattaatcaaaccattttaatttgcctttagattctgagtcactgctgctatggcgctacgcgtacttcttgtgttggggatgttgctgatgttgtgccttgttaaggtttcatctgatccaaagatagaagaagaaatactggaagcagaagaagaactgcagtttcccgataacgagccacttatcgtgagagacgcgaacagaaggctaatgcaagatatggattgtggtgggttgtgcaagacgaggtgcagtgcacattcgaggcccaacttgtgcactaaggcgtgtggcacgtgctgtgtgaggtgcaagtgtgtcccacctggtacatctggaaatagggaactatgtggaacctgctacactgatatg

SEQ ID NO: 256606 - DNA, 389 bp, Glycine max
  unsure (1)..(389): unsure at all n locations
tgggataccatagaagaagcacaaagagaagcattagcactaggagcagcaacaactagtctcagctgaaatggcctcttcagtgatggcatctgtggccctcaaacctgcccctttcactgttgagaagtcctcagtgagaggccttccctctctctcaaggaactcttcttcattcagagttgtggccagtggcaagaagatcaagactgacaaaccttatggaattaatggtggcatggctttgagggatggaactgatgcatctggcaggaaaggaaagggaaagggtgtttaccagtttgtagacaaatacggtgctaatgtcgatggttacagtcctatctacgacaccaaggactggtctncaacccgtgatgtctacgctg

SEQ ID NO: 256607 - DNA, 381 bp, Glycine max
gaagataaagaaaagagaaatggcaacagagggaaaagtggcagtattaggtggcatcaccgaagtgcagggagctgccaacagcgtcgagatcaacaatctcgctcgctttgctgtagaggaacaaaacaaaagagagaattcagttctggagtttgtgagggtgattagtgcacagcagcaagtggtttctggagtgaattactacataacattggaagcaaaagatggtgagattaaaaatgagtataaagcgaaggtttgggagagggaatcccaagagttgctagaattcatgccaacattaggtgcaggaggcgagatcgaccatctcgctcgctttgctgtagaggaacaaaacataagagagaatgcaaatct

SEQ ID NO: 256608 - DNA, 434 bp, Glycine max
gaagcatagcagcatcatacaaagcattgaattcaaaaacttaagttcattccttgtgttttgctttcttcctcaaaaccaaacatgtcgaacacatgcggcaactgcgactgcgctgacaagactagctgcaccaagggaaacagctatggtgttattgtagagactgagaagagttacatcgagactgttgtcatggatgttccagcagctgagcatgatgggaagtgcaagtgtggcactaactgcacttgcacggactgcacctgtggccattaaggaatatgtatgaaaatgtaattgccatgtgtttggcaatacaaatatccaaataatgtaatcttcgtatgaataaatgtgtgtgctgttatcctacttcaggtctgtgtagtcatgcagtctgaatcatttcaagttcctgtcttagttaatat

SEQ ID NO: 256609 - DNA, 407 bp, Glycine max
gagagttaagttgggaacatggcaatctacaataaacgatgattctcattatctccctcattttttctcttctctctttctcccatgcttctgtcctagatttctgtgttgcagattatgcaggtcctattggacctgcaggatattcctgcaagaagccttcaaaggtcacagcagatgattttgcttacagtggccttggcattgctggtaacacctcaaacattatcaaagctgcagtgacccctgcatttgatgctcagtttgctggtctcaacggtcttggcatttccgcagcacgtttggacttagcagcaggtggagttataccacttcacactcatcctggagcttcagaattacttgttgtaattgaagggagcatcctagctggattcatttcttct

SEQ ID NO: 256610 - DNA, 401 bp, Glycine max
gacgatgagtcgatttgatgactaagatattgttattcgtgatattgatccaatttgatatcatcgaaatccaatttataccattgttgaattaattatcgatgaaagatttatcatctctatgggattaaatcccgaattttttattggaaatttaagagaaataaaacataataaagattatggaagtaaatattcttgcatttattgctactgcactgtttattctagttcctactgcttttttacttataatttacgtaaaaacggtaagtcaaagtgactaatttcactgaaatctgacttgttcatttttatcaatgtaatcaatgattaaaaaaaatgaaaaaggctctcaatttttggtcttagtccaagatcaaccacaaggactcagtgtt

SEQ ID NO: 256611 - DNA, 426 bp, Glycine max
cgacagaagggggcacaagtgagtttgttgatcgagataactagaaacagtgtgatgaaaatgaaggtccttgttttcttcgttgctacaattttggtagcatggcaatgccatgcgtacgatatgttccctctccgaatgaacactggctatggtgcccgtactccggaggtgaaatgcgcaagttggaggcttgctgtggaagcacacaacatctttggctttgagaccattcctgaagagtgcgttgaagcaacaaaggaatacatccatggcgaacaatatagatcagactccaaaacagttaaccaacaagcttacttttatgccagagacctcgaagtccattccaaggacacatttgtgttcagtatagatggcaccgtactctctaatattccatactacaaaaaacatggatatggg

SEQ ID NO: 256612 - DNA, 373 bp, Glycine max
ccacgcgtgccggctagcagacagacgactgattggatatcaaagggcagaaacggcatctgcggcgaatctgctcgtattagctggcgccaccgatacgcttgctgctgccctcggcatctagatcatctatgtcgctcgctttgctgtagaggaacaaaacagatgagagaattcagctgtggagtcatgtgacggtgattagtgcacagaatctagtagtttctggagtgaattactacataacattggaagcaaaagatggtgagattaaaaatgagtatacagcgaaggtttgggagagggaatcccaagagttgctagaattcatgccaacattacgtgcacgatgctagatcgaccatctcgctcg

SEQ ID NO: 256613 - DNA, 360 bp, Glycine max
ggcattatatttgagttcaagcaaatcaaagccatggccacctccaacttctctattgttctctccgtctccctagccttctttttggtgctacttaccaaggcacactcgaccgataccgtttctttcaccttcaacaagttcaacccagtccaaccaaacattatgctccaaaaagatgctagtatttcatcctctggggtgttacaactcaccaaagttggcagcaacggcgtgcccacctcgggatctctcggtcgtgccctttacgctgccccaatccagatttgggacagcgaaaccggcaaggtagccagctgggctacatcctttaaattcaacattttcgcacccaacaaa

SEQ ID NO: 256614 - DNA, 414 bp, Glycine max
ggtttcataggctcctttttgattacgaaaatgtggaagagaacgggttttgaagaagaagcagttcaattgatcaactcagatttcagggacctaagtctagctgctaatagactcgcccatcatgccatcaaacttggtggcattggctttggagcctcttttttcggattgtttgctgccattgctgctatttatctgttgattttggatcgtacaaactggaaaacaaatattctcacagcactactcattccatacattttcttcagcttgccttcattaattttcgacgtcttcaggggagagcttggaaaatggattgctgcagttgctgttgtattacgccttttacttccaagacactttcctgattggctggaattgcctggtgctctgattcttcctaatcgt

SEQ ID NO: 256615 - DNA, 302 bp, Glycine max
ctacaaccctgatgctgttggctggaaggtttggattggctccatcagcaaacaggaaagccactgcagggctaaagctggaggtgagggactcaggcttgcagactggtgaccctgctggcttcacccttgctgacaccttggcctgtggatctgttggccacatcattggggttggggttgttcttggtctcaagaacattggtgccctgtaaaaagcaactatataagtttagtgcttgatgcatctgtaatcaatgttattatgtacttcattttcacatcactctgcagtctttctc

SEQ ID NO: 256616 - DNA, 365 bp, Glycine max
gatctggcagcagaagaacaggtagttgagaactaagaaggagaagcaaatggcttcctcaatgatctcttccccagctgttaccactgtcaaccgtgccggtgccggcatggttgctccattcactggcctcaagtccatggctggcttccccaccaggaagaccaacaatgacattacctccattgctagcaacggtggaagagtgcaatgcatgcaggtgtggccaccagttggcaagaagaagtttgagactctttcctacctgccagaccttgatgatgcacaattggcaaaggaagtagaataccttcttaggaagggatggattccttgcttggaattcgagttggagcacggtttcg

SEQ ID NO: 256617 - DNA, 383 bp, Glycine max
caacgaaggacagagtattcaactatgtgaatcaactgtgtgagagcctgccaagtccatctggagagtcagtgataagctgtaataatctttccaagatgccaaacattacgttcacaattggaaataaaccttctgtcctcacaccagagcagtatattctaagaactggagaaggcattacagaagtctgccttagtgggtttattgcttttgatgttcctgctccaaagggtccattgtggattcttggcgatgttttcatgagggcatatcacaccgtctttgactatggaaatctccaagttggctttgccgaagcagtctaattacgctttctggaggattttctttgtaaatttgttaagcgtgttgtaaataag

SEQ ID NO: 256618 - DNA, 440 bp, Glycine max
ggtgatcacacagaaagagaaagcaatggcttgtctggcaagcttagctgttgttcaaccatctactgtcaagggccttgctggaactaagctctctttcaagccctctcgccagagcttcagacccaagaatttcaggagtggtgccgttgtagcaaagtacggtgacaagagtgtgtactttgatttggaggatctaggcaacactactggtcagtgggacttgtacggctccgatgcaccttcaccctacaaccctcttcagagcaagttcttcgagacattcgccgctccattcacaaagaggggattgttactaaagtttttgatcctgggaggtggttccaccctggcatacttgagtgccacagcgtctggtgacattctaccaatcaagaagggcccacaacttccaccaaagccaggtccccgtggcaaga

SEQ ID NO: 256619 - DNA, 438 bp, Glycine max
ggttctagtgtgtgattgcttgttgttgtaacggggtcttcttcttttggtgctctgtgtttgtgtttgctttttctctcacctgaaaatgtcttgctgcggtggtaactgtggttgcggaagctcctgcaagtgcggcaacggctgcggaggctgcaagatgtacccagacttgagctacactgagtcaaccaccaccgagaccttggtcatgggagtggcacctgttaaggctcaatttgagggtgctgaaatgggtgtgcccgctgagaacgatggctgcaaatgtggaccaaactgctcctgcaacccctgcacttgcaagtgaggtgttgggagagcaagcttcaagcagagatagcccttaattaggaataatgatcaactattaatgtgtagctaaaaacttatgtattatgtctgtgatggttttcgtgc

SEQ ID NO: 256620 - DNA, 448 bp, Glycine max
taccgacaggggttctaccacagcattctattcattcaatcacgcagggcttacaatatgggtgggcagacctaaatacttcaagatccctcatacaaatcagacttcttgcaagtcaacttgacgaaaatccaccctcaagcatcttccaaccaatgctgctcgtctgtatgatccaaccactcttggtgctaacatacctcatcatcatcgtcctcttactgctgctcttcatcacattatgaaataccacacgagcactcttctactaatcatcaagcttcctttcctgaacatgcttcgttacattacccatcatgacatcactgctctaccttttcaaatccatgctgagcttgcatcacacgaagatgcttattcatacctagttgggctcttttatgacactaacttgcttgccattcactccaagcgtgtgactattatt

SEQ ID NO: 256621 - DNA, 388 bp, Glycine max
ggagagaaagagatcacatagcagaatggcttctactcaatgtttcttgcaccaccatgctcttaccacccctgccagatccccatcacaacgcatcatggttagcaccaagcctaaccagcttgtttgcaaggcacagaagcaagaggatattgatgtcagcccaatctctcgccggttagctctaaccgtgctcattggtgctgctgctgttggctccaaagtccaacctgctgatgcagcttatggggaagctgccaatgtgtttggaaagccaaagacagacacagatttcctgccatacaatggagatggattcaaactatcgattccctcaaagtggaacccaagcaaagaggttgagtacacaggtcaggttgttagatat

SEQ ID NO: 256622 - DNA, 349 bp, Glycine max
gaaaacaagtcgtacacgttgaaacggagttctaaatttccggcgagttttcctctctcgaatctgcgacaccgacgaatctcactcaccggaatttcggattcagaaaatggctttaggtggaacagctcccccaagaggaagtgcagcggctactgcaagcatgaggagaaggagaacaaccggtggtgcggcctctggaggagcagctggaactatgctccaattttacacagatgatgcccctggactcaagatctccccaaatgttgttcttgtaatgagcattggcttcatagcatttgttgccatccttcatgtgatgggcaagctgtactttgtgcgtagg

SEQ ID NO: 256623 - DNA, 374 bp, Glycine max
  unsure (1)..(374): unsure at all n locations
gcacacagctattcctcttagagcttgctactgagtttccacactgcataccttaggtcttccgaattcgaagttaatttgcaagatggctaaggaaaaggctcagatcaacattgtggtggttggtcatgtggaccctgaggaggcaaccaccattaacgagctgaagaagcctgttgtggagaaagaagctccagggcatgccatatgagggcatgcacgtacggcctcggaggggaaccagaaaattatgttaacaaaataatctggaaccctaatgtatcagtgtcatcatcagtgtgtagtttaagctagctntgctatggttacgttctttgagatgagagtcttgatgaacagtaccattctgatgt

SEQ ID NO: 256624 - DNA, 367 bp, Glycine max
ggaagtatagattgaacacacacatagaaacgcaacaacaagaatgaagaagatgattctaaccctcttcttcaatatcattttatctctcctctccctctcccacgcctccgtggtggatttctgcgtagcagactacgcaggccccaatggccccgcagggtactcatgcaagagcccagcaaaggtcacggtggacgacttcgtctactccggccttggcaccgtcggcaacacctcaaacatcatcaaagccgcggtgacgccggcgttcgacgcgcaattccccggcgtcaacgggcttggaatctccattgcacgcctagacctagcagccggtggagtcatccctcttcacacgcaccct

SEQ ID NO: 256625 - DNA, 355 bp, Glycine max
gataccaaaaacaaaacacaagccaagtgaaagtgagaaaaaataaaaatcaaagagcataatgtcagggatcattcacaagattggggagacccttcatgtgggagggcacaagaaggaggaggagcataagggtgagcaccatgctggagaatacaaaggggagcaccatggtgaacacagtagtgagtacaaaggagagcatcatggtgaacacaaagctggagagtaccatggtgagcacaagccagagcacaaagaggggttcctagacaaagtcaaggacaagatccatggtgagggcggcgccgccgagggcgagaagaagaagaaggagaagaagaagaatgagcat

SEQ ID NO: 256626 - DNA, 364 bp, Glycine max
ggcttatgaaataaactgcaggcgtaacaaaagttgcgtagccatactctgattcattagtgaagaaaaatggcaaccatcatcgccggcatcccaactacatcgatcactcgcgcaggtcttgtgctcaaacgacctgttggagcctcgtcctctaccgttcttggattgccagcaatggctaaggcagggaaagtgaggtgctccatggaggaaaagccttcaagcagctcaaatatagggatgggggcatccttgttagcagctgcagttgccgcaaccatgtcaagcccagccatggctttggtggatgagagactcagcactgaaggaaccgggcttccctttgggcttagcaacaacc

SEQ ID NO: 256627 - DNA, 425 bp, Glycine max
gatctggcagcagaagaacaagtagttgagaactaagaaggagaagcaaatggcttcctcaatgatctcttccccagctgttaccactgtcaaccgtgccggtgccggcatggttgctccattcactggcctcaagtccatggctggcttccccaccaggaagaccaacaatgacattacctccattgctagcaacggtggaagagtgcaatgcatgcaggtgtggccaccagttggcaagaagaagtttgagactctttcctacctgccagaccttgatgatgcacaattggcaaaggaagtagaataccttcttaggaagggatggattccttgcttggaattcgagttggagcacggtttcgtgtaccgtgagcacaacgggtcaccaagatactacgatggacgctactggaccatgtgga

SEQ ID NO: 256628 - DNA, 418 bp, Glycine max
ggggttttgcgctgttgttgctgctcatcctccgtaacctccgagctctgcaccgaagaacgaagtcatggggaagacacatggaatgggatctgctcgcaagctcaagtcccaccgcaggaggcaaaggtgggctgacaagtcatacaagaaatcacatcttggaaatgaatggaagaaaccttttgctggttcatcccatgccaagggaattgtccttgaaaagataggtattgaggctaagcagcccaactctgccattcgtaagtgtgccagggttcaacttatcaagaatgggaagaagattgccgcttttgtccctaatgacggttgcttgaactacattgaagagaatgacgaagtcttgattgctggatttggacgaaaaggtcatgctgtgggagatattcctggtgtc

SEQ ID NO: 256629 - DNA, 213 bp, Glycine max
gagcgtactgatgagtgtttataccatgcttgtgatatagctcatgatgcaggaagtgcaggaagacaatcattaagcggtggtacacaaaaggggccaccgttttaatcacactggctggtataagagctagctgtcattatgtcactaaactgtggatcgccagtatgtgcacgaattggtgtactacaggggcacgacttcaaaagttca

SEQ ID NO: 256630 - DNA, 337 bp, Glycine max
agaacaaagaagagcgttgagacgtacaagatctacatcttcaaggtgttgaagcaagtgcaccccgacatcgggatctccagcaaggctatggggatcatgaacagtttcataaacgacatcttcgagaagctcgcccaggagtcatcgcgtctcgctaggtacaacaagaagcccaccattacttccagggagatccaaacggcggtgcgtttggtcctccctggggagttggccaagcatgccgtttctgaaggcaccaaggccgtcaccaaattcaccagctcttgattggtttcgtgtgtttatgtcagggttttctgttagcccgatttaa

SEQ ID NO: 256631 - DNA, 400 bp, Glycine max
gatctggcagcagaaaaacaagtagttgagaactaagaagaaggaaatggcttcctcaatgatctcctccccagctgttaccaccgtcaaccgtgccggtgccggcatggttgctccattcaccggcctcaaatccatggctggcttccccacgaggaagaccaacaatgacattacctccattgctagcaacggtggaagagtacaatgcatgcaggtgtggccaccaattggcaagaagaagttcgagactctttcctacttgccagacctcgatgatgcccaattggcaaaggaagtcgaataccttctaaggaaaggatggattccttgcttggaattcgagttggagcacggtttcgtgtaccgtgagcacaacatgtcacctggatactatgat

SEQ ID NO: 256632 - DNA, 337 bp, Glycine max
ggtgattgtttgttgttgcaactcgttcttctgtcttttgttgttctgtgtttgtgtttgttatttctctcacctgaaaatgtcttgctgcggtggtaactgtggttgcggaagctcctgcaagtgcggcaacggctgcggaggctgcaagatgtacccagacttgagctacactgagtcaaccaccaccgagaccttggtcatgggagtggcacctgttaaggctcaatttgagggtgctgaaatgggtgtgcccgctgagaacgatggctgcaaatgtggaccaaactgctcctgcaacccctgcacttgcaagtgaggtgttgggagagcaagc

SEQ ID NO: 256633 - DNA, 389 bp, Glycine max
gtgaaacaataatttgtgaggtagacagacagaggcggcagtaaataagaatggcttcaaatcccaaacctttgacttttgaggaggtggctaatcacaacaacaaaaaggattgctggattattatcaatggaaaggtgtatgatatcacgccatttctggatgagcatcctggaggagatgaagttttggtaacgtcaacagggaaggatgccaccattgattttgaagatgtgggccacagtgattctgccatagaaatgatggaaaaatacttcgtcgggaaggttgacacttccactcttccagcgaaagttaaccatagtctgccacaacctacacaagcaggtggcgctggcaatcaatcttctggatttgttgtaaagatc

SEQ ID NO: 256634 - DNA, 410 bp, Glycine max
gcccctcgtcggcgcgttttgcatgctcagtttgggactctccaatctctacacacccctcaaaacggggtgcgttcaatctctcttacgatccaagttgggtattcgaacccagtcctgcatcagaatggaagggagtaacaccaccgtgcccagcattgttgtctatgtcactgttcccaacaaagatgcaggtaagaagttggctgaaagcatcgtcaaagagaagcttgctgcttgtgtcaacagggtaccgggtattgaatcggtgtaccagtgggagggaaagatccaaactgattctgaggaacttcttataatcaagactaggcaatcccttctggaggcactgacagagcatgtcaaggctaatcatgaatatgatgtgccagaggtgatctccttaccca

SEQ ID NO: 256635 - DNA, 445 bp, Glycine max
  unsure (1)..(445): unsure at all n locations
gatagaagaagcagaaagagaagcattagcaagagcaagaagaactagtctaagcagaaatggcctcttcagtgatggcatctgtggccctcaaacctgcccctttcactgttgagaagtcctcagttagaggccttccctccctctcaaggaactcctcttcattcagagttgtggccagtggtggcaagaagatcaagactgacaagccttatggaattaatggtggcatggctttgagggaaggagttgatgcatctggcaggaaaggaaagggaaagggcgtttaccagtttgtagacaaatacggtgctaatgtcgatggttacagtcctatctacgacaccaaggactggtctccaaccggtgatgtctacgctggcggtacgactggcctggctatctgggctgtgactctactnggtcttcttgctggtggtgcact

SEQ ID NO: 256636 - DNA, 318 bp, Glycine max
agggacaagtgagtttgttgatcgagataactagaaacagtgtgatgaaaatgaaggtccttgttttcttcgttgctacaattttggtagcatggcaatgccatgcgtacgatatgttccctctccgaatgaacactggctatggtgcccgtactccggaggtgaaatgcgcaagttggaggcttgctgtggaagcacacaacatctttggctttgagaccattcctgaagagtgcgttgaagcaacaaaggaatacatccatggcgaacaatatagatcagactccaaaacagttaaccaacaagcttacttttatg

SEQ ID NO: 256637 - DNA, 350 bp, Glycine max
gtcgcatgtgagtctgatgatcgagatatccagaaggggtgttatcaaatttaaggtccttgttttcttaagtgctacaattttgattgcatggctatgccgtgcgtacgatatgttccctcttcgaatgaacactgtctatggtgcccgtactgcggaagttaaatgctcaagttggaggctagctgtggaagcacacatcatctttgactgttagaccattcctgaatagtgcgttgaatcaacatatgtataccttcatggcgatcaatatatatcagacttcaaaacaggtaaccaacaagcttacttttatgccagagacctttaaatccattccaaggacacat

SEQ ID NO: 256638 - DNA, 290 bp, Glycine max
agaagacgacagaatggggggatgaggcggtgaaagactgaaagggaaaatctttttgaacagacgaaggaaaaaaacgcagtgatcacgagcagacatgtatcatccaacaagaggtggcgttcgtggtggtcgagatcaattcacttgggaggatgtgaaagctgataagcatagggagaactatcttggtcacagtatcaaggctcctgttggaagatggcagaaagggaaagatcttttctggtataccagggataaaaagtcccaaaatgcagaaatggaggctg

SEQ ID NO: 256639 - DNA, 346 bp, Glycine max
gtgcagcagaagaacaagtagttgagaactaggaatgggaagcaaatggcttgctcaatgatctcctccccagctgttaccactgtcaaccgtgccggtgccggcatggttgctccattcactggcctcaagtccatggctggcttccacaccaggaagaccaactacgacattacctccattgctagcaacggtggaagagtgcaatgcatgcacgtgcggccaccagttggcaagaagaagtttgagactctttcctacctgccagaccttgatgatgcacaattggcataggaagtagaataccttcttaggaagggatggattccttgcttggaattcgagt

SEQ ID NO: 256640 - DNA, 440 bp, Glycine max
gatagaagaagcagaaagagaagcattagcaaaagcaagaagaactagtctaagcagaaatggcctcttcagtgatggcatctgtggccctcaaacctgcccctttcactgttgagaagtcctcagttagaggccttccctccctctcaaggaactcctcttcattcagagttgtggccagtggtggcaagaagatcaagactgacaagccttatggaattaatggtggcatggctttgagggaaggagttgatgcatctggcaggaaaggaaagggaaagggcgtttaccagtttgtagacaaatacggtgctaatgtcgatggttacagtcctatctacgacaccaaggactggtctccaaccggtgatgtctacgctggcggtacgactggcctggctatctgggctgtgactctacttggtcttctggctggtggt

SEQ ID NO: 256641 - DNA, 451 bp, Glycine max
gagagaagcattagcaaaagcaagaagaactagtctaagcagaaatggcctcttcagtgatggcatctgtggccctcaaacctgcccctttcactgttgagaagtcctcagttagaggccttccctccctctcaaggaactcctcttcattcagagttgtggccagtggtggcaagaagatcaagactgacaagccttatggaattaatggtggcatggctttgagggaaggagttgatgcatctggcaggaaaggaaagggaaagggcgtttaccagtttgtagacaaatacggtgctaatgtcgatggttacagtcctatctacgacaccaaggactggtctccaaccggtgatgtctacgctggcggtacgactggcttggttatctgggctgtgactctacttggtcttcttgcttgtggtgcacttcttgtctacaacacaagtgc

SEQ ID NO: 256642 - DNA, 386 bp, Glycine max
agaaggggactcaccacttcaaaacactcataacacaaagcacaaagcaaagctcatccttgagttaaaaaatggcagcagcttcttccatggctctctcatccccatccttggctggcaaggccgtgaagctgggcccatcagccccagaagtgggaagggtgagcatgaggaagaccgtcaccaagcaggtctcctcaggaagcccatggtacggcccagaccgagtcaagtacttgggcccattctctggcgagcccccgtcctacctaaccggtgagttcccaggcgactacggctgggacactgctgggctttccgcagacccagaaaccttcgccaagaaccgtgaactcgaagtgatccactccaggtgggccatgctc

SEQ ID NO: 256643 - DNA, 338 bp, Glycine max
accactcgtacgtgccctgcgagaggaccacgaatggggagctggctgtagacgaacaagtcgttgagagcttataaggagaagcgaatggcttgctgaatgatctcttccgcagctgttaccactgtcaaccgtgccggtgccgacatggctgcttcattcactggcctgaatgtcatgactggcttccccaccaggaagaccaacgatgacagcaccttcattgctcgcaccggatgcagagcgcaatgcctgcacgtgtagacaccagttggccagcagaagtctgagactatggcctacctgtcagaccttgctgatgcacaattggccaacga

SEQ ID NO: 256644 - DNA, 366 bp, Glycine max
acagaaaggggcttatatttgcagtaacaacagctaacgtgcaagttccaaggcagagagaacaataatggccaccacctcggagagggatatggagaacaagagtgatcaagaagaactgaaacatcttgggtttgtgaagattgcggcaattaaagcctttgtgtgtgtgtcgaatctctacgacttcgcaaagcaaaactcgggacctttgagatctgctgttggaaccgtggaagacactgtaaccaccgttctgggtcccgtctaccaccaattcaaggctgtccccaaccaccttctcctttttgccgacaacaaggtggatgaagctgctcacaaattcgatgagcatgcaccttcttt

SEQ ID NO: 256645 - DNA, 347 bp, Glycine max
ggaaatgtcttgtttaaagctagtaaatatgcaagagcttccaaaagatatgaacaggtcgtgaagtacatagaatatgattcctcctttggtgaggaggagaaaaagcaggccaagaccttgaaggttgcctgcaatctgaacaatgctgcttgcatgttgaagtttaaagactacaacgaagcacagaaattgtgtactaacgtgtaggaccttgagagtacacatgtgaaagccctgtatagaagggcccacgcacatatgcagttgactaacttggatttggctgaacttgacattaagaaagctcttgacattgacccttacaacaaggatgtcaaattgga

SEQ ID NO: 256646 - DNA, 277 bp, Glycine max
  unsure (1)..(277): unsure at all n locations
ggtcacaaattttccactcttcctcaccgattgctagaatggaatttcgatgctcagtcatctcttttaccattctcttctctcttgctcttgcaggagagagccatgtccatgcatcgctacctgaggaagattattgggaagctgtttggccaaacactcccattcccactgcactgcgagagcttctaaagcctctccctgcnaggtgtgaaatcgatgaactccctaagcaaattgatgatacacagtacccaaaaaccatcttctataagga

SEQ ID NO: 256647 - DNA, 397 bp, Glycine max
ggcacaagtgagtttgttgatcgagataactagaaacagtgtgatgaaaatgaaggtccttgttttcttcgttgctacaattttggtagcatggcaatgccatgcgtacgatatgttccctctccgaatgaacactggctatggtgcccgtactccggaggtgaaatgcgcaagttggaggcttgctgtggaagcacacaacatctttggctttgagaccattcctgaagagtgcgttgaagcaacaaaggaatacatccatggcgaacaatatagatcagactccaaaacagttaaccaataagcttacttttatgccagagacctcgaagtccatcccaaggacacatttgtgttcagtatagatggcaccgtactctctaatattccatactac

SEQ ID NO: 256648 - DNA, 413 bp, Glycine max
cagtatataacaacatatattaaaaaaataacaacatatattaaaaaagtcagaataaaaaaacaaatcctttatagtatttcttgtaataaatgtgatttttggaatagggataaataaaccatggaaaaatctaagcgactctttatgaaatccaagcgatcttttcgtaggcgtttgcccccgatccaatcgggggaccgaattgattataaaaacatgggtttaattagtcgatttattagtgaacaaggaaaaatattatccagacgcgtaaatagattgaccttaaaacaacaacgattaataacaattgctataaaacaagctcgtattttatctttgttaccttttcttaataatgaaaaacaatttgaaaaaagcgagtcaaccgctagaactactactttaag

SEQ ID NO: 256649 - DNA, 329 bp, Glycine max
ggttctagtgtatgtgattgatgtgactcgtgcttcttcgtcgctatcttcttcttttgttgtttgtgtgtttgcatttctctcacctgaaaatgtcttgctgcggtggtaactgtggttgcggaagcgcctgcaagtgctgcaacggctgcagaggctgcaagatgtacccagacttgatctacaccgagtcaaccaccaccgagaccttggtcatgggagtggcaccaggtaaggctcaattcgagagtgctgaaatgggtgctcccgctgagaacgatggctgcaaatgtggatctaactgcacctgcaacccctgcactcgcaag

SEQ ID NO: 256650 - DNA, 387 bp, Glycine max
gataccaaaaacaaaacaagccaagtgaaagagagaagaaaagtcaaagacaatgtcagggatcattcacaagattgaggagacccttcatgtgggaggccacaagaaggaggaggagcacaagggtgagcagcaccatggtggagaatacaaaggggagcatcatggtgaacacagtactgaatacaaaggagagcatcatgttggtgagcacaagccggagcaccatggaggagaagagcacaaagaggggttcctagacaagatcaaggacaagatccacggcgaggagggtggcaccgctgagggcgagaagaagaagaagaagaaggagaagaggaagcatgaacatggccatgacagcagcagcagcagtgacagtgatta

SEQ ID NO: 256651 - DNA, 333 bp, Glycine max
  unsure (1)..(333): unsure at all n locations
gaacaccaaaacaaacccactaagatggcttcctttgtatccttcctagtgctgcttcttgcagcccttatcctcatgcctcaagggcttgctacttacttcaaaccaattaagaagccaccagtgtacaagcctacagtgtacaagccaccagcgtacaaaccaccggtttataagccaaaaccaccggtttacaagccgaaaccaccggtttacaagccaccatataagaagccaccatacaagacaccaccttatggaaagtaccctncagtagaggacaacactcatgcctcaagcaagcaatgaggtctagtatctacttaataaata

SEQ ID NO: 256652 - DNA, 210 bp, Glycine max
ggacgtttctcttcaaaaccctagttagcctctgtttgtctcccctgcaatcaacggcaccccccacaaaaatgacaggagagacagtgaacccaaaagcttaccctttggccgatgcgcaactcgcaataacaatcttggatcttgtgcaacaggctgtcaactacaagcacctaaaaaaggtgcctaatgaaccgactaaaaccctga

SEQ ID NO: 256653 - DNA, 325 bp, Glycine max
  unsure (1)..(325): unsure at all n locations
ggtgcacaagtgagtttgttgatcgagataactagaaacagtgtgatgaaaatgaaggtccttgttttcttcgttgctacaattttggtagcatggcaatgccatgcgtacgatatgttccctctccgaatgaacactggctatggtgcccgtactccggaggtgaaatgcgcaagttggaggcttgctgtggaagcacacaacatctttggctttgagaccattcctgaagagtgcgttgaagcaacaaaggaatacatccatggcgaacaatatagatcagactccanaacagttaaccaacaagcttacttttatgccagag

SEQ ID NO: 256654 - DNA, 366 bp, Glycine max
  unsure (1)..(366): unsure at all n locations
aggaacgccgtcgtcgggatgctgcaacggagtgaggagcctcaatgccgccgccgagaccaccgccgaccgccagacggcgtgcaactgcctcaagtcggccgccagccaaatctccggcttcaacgccaacaacgccgnctcgctccccggcaaatgcggagtctccatcccctacaagatcagcaccttcaccaactgggctaccatcaagggttgaagagaaagtcatggacgcaggaaaccggaaactactcactagtatatgagtagcattattaatattaagaataagatcgagggtgatgaaggctccacttatatgcccctcttctcttgtatgagagatttgcattggatagcttt

SEQ ID NO: 256655 - DNA, 407 bp, Glycine max
  unsure (1)..(407): unsure at all n locations
ggcacaggtgagtttggtgatcgagataactagaaacagtgtgatgaaaatgaaagtccttggtttcttcgttgctacaattttggtagcatggcaatgccatgcgtacgatatggttcctcttcgaatgaacactggctatggtgcccgtacttcggaggtgaaatgcgcaagttggaagcttgctgtggaagcacacaacatctttggctttgagaccattcctgaagagtgcgttgaagcaacanaggaatacatncatggcgaacaatatagatcagactccaaaacagttaaccaacaagcttacttttatgccagagacctcgaagtccatcccaaggacacatttgtgttcagtatagatggcaccgtactctctaatattccatactacanaaaacatg

SEQ ID NO: 256656 - DNA, 418 bp, Glycine max
  unsure (1)..(418): unsure at all n locations
ggcctcattttctagcttccaaaccctaacacttgtcttcctcttcgatcatcacctctccattaaggagattctcggaacatgcgtttcggttggttgcaccgttgatggaaaggatccaaaggacttgcagcaggagatttccgatggtgatgttgaggtccctctcgattgaggaagaagactttgtttctctctctttttccttctctcttatgtttgtttcgtgttttttaaatataaatctggggaaactattgaacgttttgtttaaggctattttactgttttggataatttagatgatggtttcgagaggtattattatgggctgattagtttatttctctgctcacagtatgatatgttttttgatataattttgccaatggatttttaacaaanaaaaatnnnnant

SEQ ID NO: 256657 - DNA, 394 bp, Glycine max
ggggttattggacacattcttcagcgactgcgtttttggatcggaacctcttctgcggcgtagcaatgggacactccaacgtttggaactctcacccaaaaaactacggtcctggttctcgcacttgccgtgtgtgtgggaatccacatggactgatcaggaagtatggccttatgtgctgcaggcagtgcttccgtagcaatgccaaggaaattggcttcatcaagtatcgctaaaagagcagttgtcaactacggaccaatattgtgttctggcactaggatgttttgaggatgttatgtttgaagaaacttgagactttcttttttcatctaattaattatcagacgtaatttgtggtactaagaatacttttatataaattgttttgaat

SEQ ID NO: 256658 - DNA, 349 bp, Glycine max
ggctgtgagtgagacaccgatagatagagagcgcggcataacctaaacctatctttcttctctctctgtgtgtgcgcttcaacggcaaccagaagcagccatggccactgcaaggactgtgaaggatgtttcacctcatgagttcgttaaggcgtactcctctcacctcaagcgatccggcaagatggagctgccagagtggactgatattgtgaaaactgcaagatttaaggagttggctccttatgatcctgactggtactatgtcagagctgcttccatggcaagaaagatctacttgagaggaagacttggtgttggtgcctttcagaggatttatggtgggagc

SEQ ID NO: 256659 - DNA, 402 bp, Glycine max
cccacgcgtccgttgcggaagacgacagaaggggcagtgatagagcaataacctaagaagagaaagagagagtatgagtaacgtgacagagaaattgggcatcaagattgagaggaaccctcctgaagacaagctcactcaacttggtgttaggcaatggcccaaatggggttgtcctctaagcaaattcccgtggacatatgaatctaaagagacctgctatctcttggaaggaaaagtgaaggttacccctagtggggcaaatgagtcagtagaaattgctgctggtgattttgttgagtttccaaaagggatgagttgcacttgggatgtgtcagttgctgttgacaagcactataactttgaataaaatcctacaagggatattcctaatgaatgaaa

SEQ ID NO: 256660 - DNA, 330 bp, Glycine max
  unsure (1)..(330): unsure at all n locations
ggtagacaaattggaatattcactctatatttaagtattattcagcattggaaaaacaaatgaatgcgcgaattttgttctcagatactgagcaatgggaaatacaagagcgttgttcatcgagctgtggtgaacacgaaaggcattaggttttccgttggtatagcacacgggcccgagcttgacaccattgtggggcccgcaccggagcttgttggtgatgatgatcctgctgcataccgtgccatcaaatatagagattacatgcagcttcagcanaaccatgaactcgacggtnagtcatgcttggatcgtattcgaatttgaatc

SEQ ID NO: 256661 - DNA, 352 bp, Glycine max
ggcacaagtgagtttgttgatcgagataactagaaacagtgtgatgaaaatgaaggtccttgttttcttcgttgctacaattttggtagcatggcaatgccatgcgtacgatatgttccttctccgaatgaacactggctatggtgcccgtactccggaggtgaaatgcgcaagttggaggcttgctgtggaagcacacaacatctttggctttgagaccattcctgaagagtgcgtcgaagcaacaaaggaatacatccatggcgaacaatatagatcagactccaaaacagttaaccaacaagcttacttttatgccagagacctcgaagtccatcccaaggacacattt

SEQ ID NO: 256662 - DNA, 315 bp, Glycine max
cggacaccaacaccaagacaaacccactaagatggcttcctttgtatccttcctagcgctgcttattgcagcccttatgctcatgtctcaggggcttgctacttactacaaaccaattaagaagccaccagtgtacaagcctgcagtgtaaaagccaccagtgtacaaaccaccggtttataagccaaaaccaccggcttacaagccgataccaccggtttacaagccaccatataagaagccaccatacaagaaaccaccttatggaaagtacccttcaatagaggacaacacccatgcctaaagcaagcaatg

SEQ ID NO: 256663 - DNA, 431 bp, Glycine max
ggcacaagtgagtttgttgatcgagataactagaaacagtgtgatgaaaatgaaggtccttgttttcttcgttgctacaattttggtagcatggcaacgccatgcgtacgatatgttccctctccgaatgaacactggctatggtgcccgtactccggaggtgaaatgcgcaagttggaagcttgctgtggaagcacacaacatctttggctttgagaccattcctgaagagtgcgttgaagcaacaaaggaatacatccatggcgaacaatatagatcagactccaaaacagttaaccaacaagcttacttttatgccagagacctcgaagtccattccaaggacacatttgtgttcagtatagatggcaccgtactctctaatattccatactacaaaaaacatggatatggggtggagaaatttaact

SEQ ID NO: 256664 - DNA, 438 bp, Glycine max
  unsure (1)..(438): unsure at all n locations
ggcttatgaaataaactgcaggcgtaacagaagttgcgtagccatactctgattcattagtgaagaaaaatggcaaccatcatcgccggcatcccaactacatcgatcactcgcgcaggtcttgtgctcaaacgacctgttggagcctcgtcctctaccgttcttggattgccagcaatggctaaggcagggaaagtgaggtgctccatggaggaaaagccttcaagcagctcaaatatagggatgggggcatccttgttagcagctgcagttgccgcaaccatgtcaagcccagccatggctttggtggatgagagactcagcactgaaggaaccgggcttccctttgggcttagcaacaacctncttggttggatcctgtttggtgtcttcggtcttatatgggctctctactttgcctacgcttncacccttgaa

SEQ ID NO: 256665 - DNA, 380 bp, Glycine max
ggtagccgctgcatctgaacgaaacacagagggagagagagtgagagaagcagtaattcatcacaatgggtaaggttcacggatctctcgcacgtgcggggaaagtgagaggacaaactcccaaagtggcgaagcaagacaagaagaagaagccacgcggacgtgctcacaagagaatgcaatacaaccgccgattcgtcaccgccgtggtgggattcggaaagaagcgtggaccaaactcgtcggagaagtgagggaggcgtttggaagatgatggtttttcttagtttgcgaaatgtatcacctctttttatttgattgatgaactcaaactttgatagttctgattaagcttcaatgaaggagttttttgctagttg

SEQ ID NO: 256666 - DNA, 426 bp, Glycine max
gaccaacacaaacaatagtgcatagcgtttttcattgcgcattattcaatggccaccacagcagctctatccggaaccatggtgagcacctccttcatgaggaagcaacctatgacgaccaagagcctaaagacattccccaacgctctttttggtctgaaaggtggacgaggtggtcgtgtaacttgcatggccccgtacaaggtgaagctcataaccccagaaggagaagtggagtttgaatgcccagatgatgttttcattgttgacaaggctgaggaagaaggcattgaacttccctactcgtgcagggctggttcttgcgtttcatgtgttgggaaaattgtgaaaggtgacgtggaccagtcagatggtagcttccttgatgatgaacaaatagaaagtggatgggttctcacctgtgct

SEQ ID NO: 256667 - DNA, 158 bp, Glycine max
cttgtgctgctcctgccaatgattaacttgccaaggggtatggtcctgacagaaggaacttcttgccttaaggtctcttggaccgatccgaaattccagaatacttgaccggaaaagttccttgagactattggtatgacccatttggtcttaaccag

SEQ ID NO: 256668 - DNA, 366 bp, Glycine max
agaagggggtgtgcactgctagggttgtgtccaaggctgtgatcactggctacaaagatgggttcaaccagattaagtccttggttgatgttggaggtggcattggagggtctctttcggagattgttagggcttatcctcatatcaatgccatcaactttgacttgcctcatgtggttgccactgctcctaagttcgatgggatcacccatgttggaggtgacatgttcgtgtccattcctagtgctgatgctatttacatgaagtggattctgcatgactggagcgacgagcactgcatcaagatcttgaagaactgcaggaaggcaacaccagagaagacaggaaaagtcataatcgtggatc

SEQ ID NO: 256669 - DNA, 294 bp, Glycine max
gatctggcagcagaagaacaagtagttgagaactaagaaggagaagcaaatggcttcctcaatgatctcttccccagctgttaccactgtcaaccgtgccggtgccggcatggttgctccattcactggcctcaagtccatggctggcttccccaccagaaagaccaacaatgacattacctccattgctagcaacggtggaagagtgcaatgcatgcaagtgtggccaccagttggcaagaagaagtttgagactctttcctacctgccagaccttgatgatgcacaattggc

SEQ ID NO: 256670 - DNA, 401 bp, Glycine max
ggaaaacgattatttctagtcccaaagagctaacacgagattcaagaccggcatggctaatgaagaggaacagaaaaaccacctcttcggcatcaaagatctcggtcacaagactctccttcagagtgatgcactctatcagtatatacttgaaaccagtgtctatccaagagagcacgagtgcttgaaagagatacgcaagatgactgcaaaacacccactgaacatcatggcaacaccagcagacgaaggacaacttctgagcatgcttgttaagctcacgaattcaaagaacgccttggaaattggtgtattcactggttactctctgctctccactgccctggctcttccccctgatggaaagatcttggctttggatgtgaatcgcgaatactatg

SEQ ID NO: 256671 - DNA, 380 bp, Glycine max
gacatttcaacgtttatttatttttgttgaaagaagagaagcaacaaatcaatctcacacttagtgttgttacgatggaatcaccgttcaaaccagagattctgaaggggaaggttgctctaatcactggtggagcctccggaatcggattcgaaatttccacccaattcggtaaacatggagcctctgttgcgctcatgggtcgccgcaaacaagtccttcagtccgctgtctccgttctccaatccctcgtcattcccgctgttgggtttgagggggatgtacggaagcaagaggatgccgcaagggtggtggaatccacgttcaagcattttggaaggattgatatactcgtcaatgctgcagctgggaactttctc

SEQ ID NO: 256672 - DNA, 436 bp, Glycine max
gacacaactgaacaagataagctatccatagcggccaaagaaatgaagagtaccttgttcgccctctttctactttgtgccctcacctcttacctaccttcagccaccgctggtgatgtggtcgacactgatggtaatcctgttgaaaatggaggcacatactttgtgttgccaactataatattaaacggcggtggaatagaatatgccacatttggaaatgaaacttgccctgtcactgttgcgcaatctcgcgatcagttctgcaagggctttccgataaccatttcatccccagcccgaatccgtcacatcagcgaaggccttagtttgaacattgggttcactttcgcatccccgtgttcccccgcttctgagtggaccattgtgaaggatcaaccagaaggactcgctgttaaactcactgggtttaaaa

SEQ ID NO: 256673 - DNA, 386 bp, Glycine max
ggcacaagtgagtttgctgatcgagatagcgagaaacagcgtgatgaaaatgaaggtgcttggtttcttcgttgctacaatcatggtagcatggcaatgccatgcgtacgatatggtccctctctgaatgaacactgtctatggtgcccgtactcccgaggtgaaattcccaagttggacgctctctgtggaagcacacaacatctttggctgtaagaccattcctgaagagtgcgttgaagcaacatatgaatacatgcatggcgaacaatatagatcagactccagaacagttaaccagcaggcttactcttatgccatagaccgtcaagtccattccaatgacacatttgagttcagtatagatggcaccgtactgtataata

SEQ ID NO: 256674 - DNA, 392 bp, Glycine max
tttactacagacggggacgatgagtcaattggatgctaacatataggtgtgggtgatattgatccaatttgatatcatcgaaatccaatttataccattgatgaattaattatctatgaaagatttatcatctctatgggattaaatcccgaattttttattggaaatttaagacaaataaaacataataaagattatggaagtaaatattcttgcatttattgctactgcactgcttattctagctcctactgcttttttacttataatttacgtaaaaaccgtaagtcaaagtgactaatttcactgaaatctgacttcttcatttatatcaatgtaatcaatgattaatataaatgaaaaaagtttccaatttttggtcttatttcaaa

SEQ ID NO: 256675 - DNA, 441 bp, Glycine max
gacacacactctgcacctccattgagttgagtgcaaaactctgttctttcctccatgaattcaatttctttaggttccttcatcctcacaccatgcaagttccgcccttttcttcaaaccaaacaccaacccatattccgcactctctccccaattcccctgacacaaaaacccacttttcttcgagccacagactcgaacatcgacgcccccatttccctccccgagggcgcgtccttcgtttccatcccagaaatcatcgagaaggactggtccgtgcttgattgcgcctaacaccgaaccactgaccgcattatagcttccggaaacatcgaacagagttcgagggttttggtctcaattgggtcagaagactttgttgattccttagcgggtttaactacctctgtgtttgttgttcatgactcgcttctgacactg

SEQ ID NO: 256676 - DNA, 331 bp, Glycine max
  unsure (1)..(331): unsure at all n locations
gaaggtgcaagagtttgttgtgagctataagctagtttatcgtgaggagaatatgaagttgtttgttttctttgttgctgcagtagttttggtagcatggccatgccatggcgcaggctaccaaaggttccctctccgaatgaaaactggctatggtgagcgttcttcggaggtaaaatgcgcaagttttaggcttgctgtggaagcacacaacattcgagcctttaaaaccattcctgaagagtgcgttgaaccaacanaggactacattaatggcgaacaatttagatcagactctaaaacaggtaaccaacaagctttcttttatgct

SEQ ID NO: 256677 - DNA, 366 bp, Glycine max
  unsure (1)..(366): unsure at all n locations
ggtcaccaacacaaacaatagtgcatagcgtttttcattgtgcattattcaatggccaccacagcagctctatccggaaccatggtgagcacctccttcatgaggaagcaacctatgacgaccaagagcctaaagacattccccaacgctctttttggtctgaaaggtggacgaggtggtcgtgtaacttgcatggtctcgtacaaggtgaagctcataaccccagaaggagaagtggagtttgaatgcccagatgatgttttcattgttgacaaggctgatgaagaaggcattgaacttncctactcgtgcagggctggttcttgcgtttcatgtgttgggaaaaatgtgaaaggtgacgtggac

SEQ ID NO: 256678 - DNA, 340 bp, Glycine max
  unsure (1)..(340): unsure at all n locations
gagcgccaatgtttttttcagaggagtttcatgttgtaatcaaaagagtttatcttatagtaagaaatcgatgtcttactccattttaaggaacaaaacaagagaacaatagcctgacaaagggtttagccataaaatcgaatccatcattgatttgagatattgataaggtgaatactcatttctcgtcaatgctaggcataatgcgggtatagggacctaaaaaagattatcttttcttcctatcttatgaactttaaggtgtatgaagtgtcatttcctatcttagattntaattntagtaggtagataaagagtccatttaacttaagttgatcta

SEQ ID NO: 256679 - DNA, 435 bp, Glycine max
  unsure (1)..(435): unsure at all n locations
gaacctttgcattctattcattcaagattcagcaagtgcgttttggaagcagagaccgaaatacttcgagatggcccgtacaaagcaaactgctcgtaagtcaactggaggaaaagcccccaggaagcagcttgcaaccaaggctgcacgtaagtctgcaccaacaactggtggtgtgaagaagcctcatcgttatcgccctggaactgttgctcttcgtgagattaggaaataccagaagagcactgagctcctaatcaggaagcttcctttccagaggttggttcgtgaaattgcccaggatttcaagactgatctgcgtttccagagccatgctgtgcttgcattgcaagaggctgctgaggcataccttgttgggctctttgaggacactaactngtgtgccattcacgccaagcgtgtgactattatgcc

SEQ ID NO: 256680 - DNA, 394 bp, Glycine max
  unsure (1)..(394): unsure at all n locations
acaccaacaccaaaacaaacccactaagatggcttcctttgtatccttcctagtgctgcttcttgcagcccttatcctcatgcctcaagggcttgctacttactacaaaccaattaagaagccaccagtgtacaagcctccagtgtacaagccaccagtgtacaaaccaccggtttataagccaaaaccaccggtttacaagccgaaaccaccggtttacaagccaccatataagaagccaccatacaagaaaccaccttatggaaagtaccctccagtagaggacaacacccatgcctaaagcaagcaatgaggtctattatctacttaataaataagaggaacttgcttgtngtttctagcattgtgatttacaacttcgtagcaatgcata

SEQ ID NO: 256681 - DNA, 389 bp, Glycine max
gaagtcgccgtgttttcttttcgttcgcatcttccctctctctcagaaagatgaaggtggtcgccgcgtatttgctcgccgtcctcggtggcaacaacagcccctccgccgatgtcatcaaggaaatccttggctccgttggagtagaagcagatgaagataggattgaatcgtttttgtctgaagttaagggtaaggatatagttgagcttattgctgccggtagggaaaagttggcctcggttccttctggtggtggtgccgttgccgtcgccgcagctcctgggggaggtgctgctgctgctgctcctgctgctgaggcaaaagaagaggaaaaggtggaggagaaagaggaatctgatgatgatatgggtttcaggctcttcgat

SEQ ID NO: 256682 - DNA, 369 bp, Glycine max
  unsure (1)..(369): unsure at all n locations
ggtgagaagtagagtgaaagaaagagagagagagagagaaagagaagagagagaagcagcgattcatcacaatgggtaaggttcacggatctctcgcacgtgcgggtaaagtgagaggacaaactcccaaagtggcgaagcaagacaagaagaaaaagccacgcggacgcgctcacaagagaatgcaatacaaccgccgattcgtcaccgccgtggtgggattcggaaagaagcgtggaccaaactcctcggagaagtgagggaggcgtgttgaagatcatggtttttcttagtttgtgaaatgtatcacttggtttgatttgattgatgaactcanacttttatgatagttcttattatggttcaatg

SEQ ID NO: 256683 - DNA, 183 bp, Glycine max
gggcagcagaagaacaagtagttgagaactaagaaagagaaacaaatggctttcttaatggatcttttcccaacttgtaccaattgcaaacgtgcccgttcccggattggtggttcattcaattgccttaaattcattgcttgctttcccaacaagaagaaccaccattaccttaccttcatt

SEQ ID NO: 256684 - DNA, 351 bp, Glycine max
gaagaagaagaaggagcatggccatgagcatggccatgacagcagcagcagcagtgacagtgattaaactgctgcatcacctatatatttaaaaggtttatgggaccatagtagcgagggctgtgccttaatttctctctcactctctctctctctctctctctctttttcctttttccctatcttgtgatctatttatgagtgagaaaaacaaaagtgagaaattgtgcgtgtatctggttgctaattcgagtgctattagtctgtggtttggttggtttgtaaccccgctacttgggttatgtttgattgtatattatcctagagaaataaaaattttaaattatcaac

SEQ ID NO: 256685 - DNA, 388 bp, Glycine max
  unsure (1)..(388): unsure at all n locations
gactctgcagcagcacctttaaacgccgaaggttcatccaatctccgaaggccttcaccggattgcaaccatgtcgaggagaaaggttagagagccaaaggaggaaaacgtgactctgggcccagctgttagagatggtgaacatgtttttggagtcgctcgcatctttgcctccttcaatgacaccttcattcatgtcactgatctgtctgggagggaaacacttgtccgcatcactggcgggatgaaggttaaagctgacagagatgaatcatctncatatgctactatgcttgctgcgcangatgttgctgctagatgcaaggaacttggcataactgctcttcatatcaggctccgtgccacatgtggaaacantgacaaaaca

SEQ ID NO: 256686 - DNA, 431 bp, Glycine max
gacttcaaaacactcataacacaaagcacagagcaaagctcatccttgagttaaaaaatggcagcagcttcttccatggctctctcatccccatccttggctggcaaggccgtgaagctgggcccatcagccccagaagtgggaagggtgagcatgaggaagaccgtcaccaagcaggtctcctcaggaagcccatggtacggcccagaccgagtcaagtacttgggcccattctctggcgagcccccgtcctacctaaccggtgagttcccaggcgactacggctgggacactgctgggctttccgcagacccagaaaccttcgccaagaaccgtgaactcgaagtgatccactccaggtgggccatgctcggagccctgggctgcgtcttcctcgagttgctgtcccgcaacggggtgaagttcggaga

SEQ ID NO: 256687 - DNA, 399 bp, Glycine max
gatagcagcatcatacaaagcattgaattcaaaaacttaagttcattccttgtgttttgctttcttcctcaaaaccaaacatgtcgaacacatgcggcaactgcgactgcgctgacaagactagctgcaccaagggaaacagctatggtgttattgtagagactgagaagagttacatcgagactgttgtcatggatgttccagcagctgagcatgatgggaagtgcaagtgtggcactaactgcacttgcacggactgcacctgtggccattaaggaatatgtatgaaaatgtaattgccatgtgtttggcaatacaaatatccaaataatgtaatcttcgtatgaataaatgtgtgtgctggtatcctacttcacgtctgagtagtcatgcaatctg

SEQ ID NO: 256688 - DNA, 427 bp, Glycine max
gaggtggtcgtgtaacttgcatggcctcgtacaaggtgaagctcataaccccagaaggagaagtggagtttgaatgcccagatgatgttttcattgttgacaaggctgaggaagaaggcattgaacttccctactcgtgcagggctggttcttgcgtttcatgtgttgggaaaattgtgaaaggtgacgtggaccagtcagatggtagcttccttgatgatgaacaaatagaaagtggatgggttctcacctgtgttgctctacctaggtcagacgttgtcattgagacacacaaggatggagagatcgaatgatcgatatatatcataatgtaatcttgtccattgctcttctaatgccatctatctatgtcgtgttttgattttgttagagtgatttggcattggctagttagctagctgaaatc

SEQ ID NO: 256689 - DNA, 418 bp, Glycine max
ggggggaagaatagaatgggatctggaagtggaaaacacactggagagttcttcaggagaagggatgcatggaggaagcatccgatgctcaccaatcagctccgccacgccacccctggccttggcatcgccgtcgtcgccttcggtatctacctcgtcggcgaacaagtctacaataggctctatgctcccgatcctcattcgatttcccacgtgaaagccggggatcaccactaaacgtttggacggacgcactccattccatcatcacttaataagcttgctagcatgttctcgcagcctttaatgtttaaatttcagaccgtgttcgcttctttggcactcactatgttgtcttgtatgcctacattgtatggccttcaattgcattcacaatgaaactcaatttactttactt

SEQ ID NO: 256690 - DNA, 440 bp, Glycine max
gatcgggcagcagaagaacaagtagttgagagctaagaaggagaagcaaatggcttcctcaatgatctcttccccagctgttaccactgtcaaccgtgccggtgccggcatggttgctccattcactggcctcaagtccatggctggcttccccaccagaaagaccaacaatgacattacctccattgctagcaacggtggaagagtgcaatgcatgcaggtgtggtcaccagttggcaagaagaagtttgagactctttcctacctgccagaccttgatgatgcacaattggcaaaggaagtagaataccttcttaggaagggatggattccttgtttggaattcgagttggagcacggtttcgtgtaccgtgagcacaacaggtcaccaggatactacgatggacgctactggaccatgtggaagctgcctatgtttg

SEQ ID NO: 256691 - DNA, 435 bp, Glycine max
  unsure (1)..(435): unsure at all n locations
ggtgtggaagtattcgcagaactttgtttccgaagttccattgcctccgcttccacctcgcaaccatgatcatcccggagaagaaccgcaaggagatctgcaaatacctcttccaagagggagtttgcttcgcgaagaaggacttcaatttggccaagcaccctgagatcgacgtgccgaatctgcaggcgattaagctgatgcagagtttcaagtctcgcgagtacgtgagagaaacttttgcttggatgcactattactggttcctcaccaacgatggcatcgagtttctcagaacttaccttaaccttccttccgaaattgtccctgctactttgaagaagcaagccaagccacctggcaggccctttggaggcccatccggtgatcgccctagaggtccaccacgctttgaaggggagcgtanngttggtg

SEQ ID NO: 256692 - DNA, 444 bp, Glycine max
  unsure (1)..(444): unsure at all n locations
gagctcgtagttgtatcacattggtttaggttgaaaccctaaagtttgcccccttacacgttttttgtcttcttttttctcccatctttgtttcgagaagcatttgacgaagagaagagacagtgaatcgcggtttcaattcaacccacttcatctcaggtgtttgaagttgagataaaaatgagcggaacagagaaagcaggatcaggaaccaccaaaacccccgccgatttcctcaaatccattcgtgggaggccggttgtcgtcaagctcaattctggtgttgattacagaggtatacttgcttgtctagatggctatatgaatattgcaatggagcagacagaggagtacgtcaatggacaactgaagaacangtatggtgacgctttcatccgacggaataatgttctatacatcagtgcctcaaagaggactctagca

SEQ ID NO: 256693 - DNA, 266 bp, Glycine max
gaaggtcacggcgagacgagccgtttctaattaatgataggtgtcaagtggaagtgcagtgatgtatgcagctgaggcatcctaacagaccgatagactcattctagtatcagtaatctagtgtttgcttgcatgcttgtttagtctgtagattacttctgatattcctattgtggtgttttcttgtttttccacatgtatactaacgtacaatcttaagctaataacgaactttgattttatgtaaaaaaaataaaataaaataa

SEQ ID NO: 256694 - DNA, 339 bp, Glycine max
ggttctagtgtatgtgattgttgtgactcgttcttcttcgtcgttatcttcttcttttgttgtttgtgtgtttgttttttctctcacctgaaaatgtcttgctgcggtggtaactgtggttgcggaagcgcctgcaagtgcggcaacggctgcggaggctgcaagatgtacccagacttgagctacaccgagtcaaccaccaccgagaccttggtcatgggagtggcaccagttaaggctcaattcgagagtgctgaaatgggtgttcccgctgagaacgatggctgcaaatgtggagctaactgcacctgcaacccctgcacttgcaagtgaggtgtt

SEQ ID NO: 256695 - DNA, 317 bp, Glycine max
ggcacaagtgagtttgttgatcgagataactagaaacagtatgatgaaaatgaaggtccttgttttcttcgttgctacaattttggtagcatggcaatgccatgcgtacgatatgttccctctccgaatgaacactggctatggtgcccgtactccggaggtgaaatgcgcaagttggaggcttgctgtggaagcacacaacatctttggctttgagaccattcctgaagagtgcgttgaagcaacaaaggaatacatccatggcgaacaatatagatcagactccaaaacagttaaccaacaagcttacttttatg

SEQ ID NO: 256696 - DNA, 309 bp, Glycine max
tgggttgagtgtagaacgctgctgccaaaacccttccggaaccctaaggtaagtgagtaatcagtggttgagaatggtggagaaggcgaagggtacaaaggaggaggcggctacccgtgagtacaccattaaccttgacaagcgcctccatggctgcacatttaagaagaaagctcctaaagctatcacggagatgaggaaatttgcccaaaaggccatggggaccaatgatgtcagggtggatgtgaagttgaacaagttcgtctggagccagggaatcaagagtgttccaaggaggattagagtaag

SEQ ID NO: 256697 - DNA, 367 bp, Glycine max
  unsure (1)..(367): unsure at all n locations
gaatatttagaaaaaaaatatatatatataaaatcgtggttggggaggttatagtagcaagagccatcggaattttttttttatacattggaagaatccatttttgttattaatagactagtaagaagaaaagaataactgaaaaatcaaatagttattcatcaaagtctcaattattcaatgaccagaattaaacgaggatatatagctcggaaacgaaggacaaaaattcgtttatttacatcaagttttcgaggagctcattcaagacttactcgaacgattactcaacagaaaataaaagctttggtttcggctcatcgggatagagatagcataaaaaaaaagtgnaagaaaaataaaaagc

SEQ ID NO: 256698 - DNA, 335 bp, Glycine max
gacttgtattgtctcaagcaaccatggcaatggcaacccaagcctctctcttaaccccacccctctccggtctcaaagccagcgaccgcgcctccgtgccatggaagcaaaactccagcctctccttctccagcccgaagcccctcaagttctccagaacaatcagagcagcagccgccgacgagaccacagaggcaccagcaaaagtagaggctgcaccggtcgggttcaccccaccagaacttgacccaaacaccccttccccgatcttcgggggcagcaccggcgggctcctgcgcaaggcacaggtggaggagttttatgtcattacgtgg

SEQ ID NO: 256699 - DNA, 358 bp, Glycine max
  unsure (1)..(358): unsure at all n locations
gaatcctctgttgtttctcagccgcctcggctaggattcggaaacgaagaagggttctgttttcttttcgcgatgagggccaagtggaagaagaagcgtatgaggaggctgaagaggaagcgccgaaagatgagacagagatccaagtagtgcgttaaacctagtttgtttccgttgcttttacaattgcttatgttgtcaaataggacacccagttgttagtggcactggtctctcctttttgatgttttgatacattttgttggattttatttcgtcttatgttcttagctgaaaacaatgctgttactgcgtttgcgaatcaacaggatatcttggttgctaaaaaaaaaaanan

SEQ ID NO: 256700 - DNA, 397 bp, Glycine max
  unsure (1)..(397): unsure at all n locations
gaccaagtgaaccaatatagcccaagccctatacaaccaaaccctaacacacacccatttgattcagtttccatggctagcctcaaggttgcatttttggctgcagtgctctgcatggttgtggtgagtgcacccatggcacatgcagctatcacgtgcgggcaggtgacgagtagcctggccaattgcatcggttacctccagaagggaggaacgccgtcgtcgggatgctgcaacggagtgaagagcctcaatgccgtcgncaagaccaccgtcgaccgccagacggcgtgcaactgcctcaagtcggccgccagccaaatctccggcttcaacgccaacaacgccgtctcgctccccggcaaatgcggagtctccatcccctacaagatcagca

SEQ ID NO: 256701 - DNA, 94 bp, Glycine max
caatttgggaattattgctcccatcgccattggtttcattgttggcgctaacattttgttgggtggggccttctccggagcagccatgaaccct

SEQ ID NO: 256702 - DNA, 349 bp, Glycine max
  unsure (1)..(349): unsure at all n locations
gaaagctacgcgaaattagggttgatcgaggaagaagaagaagatgtcgtacctgttgcctcacttgcactctgggtgggcggttgatcaagcaatcctggcagaagaggagcgtctggtcgtgatccgtttcgggcacgactgggacgaaacctgcatgcagatggacgaggtgttggcgtcggtggcggagacgataaagaactttgcggtgatatacctggttgacataacggaggtgccggatttcaacaccatgtacgagctctacgacccttccacggtgatgttcttcttcaggaacaagcacatcatgattgatctgggaaccggtnacaacaacaagatc

SEQ ID NO: 256703 - DNA, 385 bp, Glycine max
  unsure (1)..(385): unsure at all n locations
gagactcaacaagcattccactcacacctcatcgtttctctctctagatctctgtttcttctttttctccaaccttcgtttcaccaccacacttacattactttgtcgaaatggctccaccaattgagaccccaaacaaggtttccagctatcaacagtccccaaaccctcgtcttaacgagaggattctttcatccatttccaggagacacgttgctgcacacccgtggcacgatcttgagataggacccgaagctccaaagatcttcaactgtgtggtcgaaataaggaaaggaagcaaggtgaaatatgaacttgtcaaaagaactggacttattatggttgatcgtatactttactcatcangttgttatcctcacaacta

SEQ ID NO: 256704 - DNA, 371 bp, Glycine max
ggtatctacccacttctcaaccaacaatggcaatggcaacccaagcctctctcttcaccccacccctctccggtctcaaacccagcgaccgagccaccgcgccatggaaacaatcctccaccctctccttctccacctcgaagcccctcaagttctcgcgaacaatcagagcagcagccaccgaccagaccacagaggcaccggttgggttcaccccaccggaactggacccaaacaccccttccccgatcttcggaggcagcaccggcgggctcctgcgcaaggcccaagtggaggagttttatgtcatcacatgggactccccgaaagaacagatctttgaaatgcccactggcggcgctgccatcatg

SEQ ID NO: 256705 - DNA, 324 bp, Glycine max
gaattcaccgttaacctaagaaagagaagtagctgtagtaataggaagaggatgatcggcgtcggaaagatcaagcagtacagtaacgtcctcgacaagcccctcaccaagcgcaagcaagaggttagtttgagtgcattcgcgttcttgttctcggagcttgttcagtacaaccaaacgcaggtcgacaacattggcgagctcgaacgaagactggaggatgctggatatgcggttggggctcgagttcttgagctgctttgccacagagataagggaaacagaagagagacacggctggtgaatattctttcttttgtacac

SEQ ID NO: 256706 - DNA, 346 bp, Glycine max
gatagtgtgttaagcctcgccgactcggttgctatcagcgagtgagagtgagtgagtggttctcttgcagcaacaaggtttagtgacaccaaacagactggaaatgggtcgtggggtcagtgctggtggtggacagagttccttggattatctctttggcagtggggtacctgccagcagtgcaaatggtgctcgcactcaaaatgcaagtgctccttcaccaccggttgataagcaaagtccagcaccagcagcagcagcagcacctgcacctgcagcagcagcagcaccagcacctgcaccagcaccagcaccagcaccagctgataagcaaattccagctgga

SEQ ID NO: 256707 - DNA, 338 bp, Glycine max
  unsure (1)..(338): unsure at all n locations
ggacactcgtcgcgatggaacgtgtagctgaatgcgagcgaactctgtacccatacgtgactggatcctctgtagtcgctatcaaatacaaagatgggattctaatggccgctgacatgggaggttcgtatggatctaccctgcggtacaagagtgttgagcgtatcaagcctattggaaagcattctcttcttggtgctagcggngagataagtgactttcaggagattctgcgttaccttgatgagcttatcctatatgacaacatgtgggatgatgggaattctctagggccgaaggaggtgcataattatntaacccgtgtgatgtataataga

SEQ ID NO: 256708 - DNA, 363 bp, Glycine max
actcagcagtagcaaacaaaattcttcgtatttgcttcttgcttttttctttttgaaccacaaaatggccgacgacagcacagctacctgcatcgacatcctccttgccatcatcctccctcctctcggtgtcttcctcaagtatggatgcaaggtagagttctggatctgtttggtgcttactctttttggttacattcctggaattatctatgctgtctatgctatcaccaagtgatcatattcatcacctcttgtagacaatgaataatttgtcaaagtacaacggttatgcatgtttctcaactccagcattgatataatcgtttgatctcagaacaatgtgattcttttttggtttct

SEQ ID NO: 256709 - DNA, 360 bp, Glycine max
taatttgggaattattgctcccatcgccattggtttcattgtcggcgctaacattttgttgggtggggccttctctggagcggccatgaaccccgctgtgacatttgggcctgctgtcgtgagctggacctggaccaaccactggatctactgggccgggcctctcatcggtggtggaatcgctggccttgtttacgaggttgtctttatcagccacacccacgagcagcttcccaccactgactactagagggggggaaatgaaaataaaaaaaaaaaaaattgtgtattattgaatttctctggaatcttcttctgtgtatggttttccttccttgtgttttcttcctaattcacttt

SEQ ID NO: 256710 - DNA, 377 bp, Glycine max
gagggaaaataaatatctgaacaacataatctatattctttccctgggggcctcagaatccttaacagaacaagttgcagggatggcctccactctctctatatcctcttcatccacccttgttgatgccaagcctccaactccaagacaatgcgtcacccttcccactcttccccctccaccttttcactctcagactcgtccttggaagaccactgctttctgtcgtaagcttgctcgcaattttatggcaatggccaccacaagagaggcagccgcagcagaagttgccgccacaactgacctctctattgccgagacgccagagattgtgaagactattcaagaagcttgggacaaagttgaaagataatatg

SEQ ID NO: 256711 - DNA, 398 bp, Glycine max
  unsure (1)..(398): unsure at all n locations
gaactgctcggtttttatcagaagcttgtgatttagtttttgatgcagcaagtgagggaaaacaattcttaattgttggtacaaaaaaaaagcagcggatttagtagcacgggctgcaataagagctcggtgtcattatgttaataaaaagtggctcggcggtatgttaacgaattggtatactacagaaacacgacttcaaaagttcagggacttgagaatgcaacaaaagacggggagactcaatagttttccaaaaagagatgccgctatattgaagagacatttagttcatttggaaacatatcttggcggcattaaatatatgacggngttacctgatattgtaataatcgtcgatcaacaagaagaatatacggctcttcgagaatgtataa

SEQ ID NO: 256712 - DNA, 405 bp, Glycine max
agagtgagagagagagaaggcaagatgtcgaagagaggacgcggtggttcggcggggaacaagttccggatgtcgctgggtctgccggtggcggcgacggtgaactgcgccgacaatacgggggcgaagaacctctacatcatatcggtgaaagggatcaaagggcgtttgaaccgtctcccctcggcttgcgttggcgacatggtgatggccaccgtgaagaaggggaaacccgatctgaggaagaaggttttgccagctgtcattgttcgccagcgcaagccatggcgccgaaaggacggcgtctacatgtatttcgaagataatgctggtgttattgtcaatcccaaaggagaaatgaaaggttctgctatcactggtcccattggaaaagagtgtgctgat

SEQ ID NO: 256713 - DNA, 397 bp, Glycine max; identical to SEQ ID NO: 234774

SEQ ID NO: 256714 - DNA, 226 bp, Glycine max
taatttgggaattattgctcccatcgccattggtttcattgtcggcgctaacattttgttgggtggggccttctctggagcggccatgaaccccgctgcgacatttgggcctgctgtcgtgagctggacctggaccaaccactggatctactgggccgggcctctcatcggtggtggaatcgcttgccttggttacgaaggttgctttatcagccacacccacgag

SEQ ID NO: 256715 - DNA, 300 bp, Glycine max
gaatgatgcatgctaccatcaaatcattagccattggctaagcactcatgcaattgttgagccatttgtcatagcaacaaacaggcaactgagtgtggttcaccctatttacaaacttctgtttcctcactaccgtgacaccatgaatattaattcacttgcccggaaagccctggtcaatgcagatggtattatagagaaaacattcttgtggggtaggtactctatggaaatgtccgctgtcatttacaaagactgggttttcactgatcaagcattacctaatgatcttgtaaagag

SEQ ID NO: 256716 - DNA, 406 bp, Glycine max
gatccctgcgtgtcttagtcttaattaagactctcacccttcttagtctctctttgaaaatgaagacctcatatgcaacattgtgcatcatgcttactttgcttcttctaggtcagagtgagttgttgtgtatggcagcagtgacgtgtaacgcgttgcagctgagtgcatgtgccagcgccatcacgtcctcaactcctccttcagctctttgctgtagcaaactgaaggaacaaaggccttgcctttgccagtatttgaaagaccccaacctcaagaagcttgttaactctcctaatgctaggatggtagctaatgcatgtggttccccattccccacctgctagaaagaattcagtatttcactagtctctctcaatccaaccactatataggagcatcttat

SEQ ID NO: 256717 - DNA, 295 bp, Glycine max
gatatctggcagcagaagaacaagtagttgagaactaagaaggagaagcaaatggcttcctcaatgatctcttccccagctgttaccactgtcaaccgtgccggtgccggcatggttgctccattcactggcctcaagtccatggctggcttccccaccaggaagaccaacaatgacattacctccattgctagcaacggtggaagagtgcaatgcatgcaggtgtggccaccagttggcaagaagaagtttgagactctttcctacctgccagaccctgatgatgcacaaattg

SEQ ID NO: 256718 - DNA, 269 bp, Glycine max
agaaggggactcacaaggcaatcaatcaatcttctgagagtgtttggttgaaagtagcaaagatgtttcctttcgggcaaaagggtcaaaagataaaggggactatggtggttatgcagaagaatgtgttggatatcaacagcatcaccagtgttggagggatcgttgaccaaggcttaggcttcataggcagtgcagtcgatgcacttacttttgcagccaccaaaatctccatccagttgattagtgctaccaaagctgatggtggg

SEQ ID NO: 256719 - DNA, 368 bp, Glycine max
gaaagtgcacaagtgagtttgttgatcgagataactagaaacagtgtgatgaaaatgaaggtccttgttttcttcgttgctacaattttggtagcatggcaatgccatgcgtacgatatgttccctctccgaatgaacactggctatggtgcccgtactccggaggtgaaatgcgcaagttggaggcttgctgtggaagcacacaacatctttggctttgagaccattcctgaagagtgcgttgaagcaacaaaggaatacatccatggcgaacaatatagatcagactccaaaacagttaaccaacaagcttacttttatgccagagacctcgaagtccatcccaaggacacatttgtgttcagtat

SEQ ID NO: 256720 - DNA, 346 bp, Glycine max
gatcctaccattcattcccatttttcacaccaccaagccaacagaagatgtttccccacattgttttcctcctttcccttctctcatccacttcccatgccactgtccaagacttctgtgtggcagaccttaagggtgcagacaccccttcaggctacccctgcaagccacctgcaaatgtaacttcagatgactttgtgtacacaggcttagctgaagctgcaaatgtcacaaacataatcaatgctgctgtgaccccagcttttgttgctcaattcccaggtctcaatggccttgacctctctgcagcaagattagaccttggtcctggtggtgttatcccact

SEQ ID NO: 256721 - DNA, 396 bp, Glycine max
gatagcaagtagcaaggagactagttctgtattcagattacattgcaaaaatggcatcattcaccatgacagcttctatctttggctgcccagctgtcaccaaacggtcggcagtggctgcgcagaggagattactcgtagtgagtgctgccaaagctgaaggggaaaaggtcagttatgacaacaatgatagcaatggaaggaggaacttgatgttcgctgtggctgctgctgctgttttctctgttgctgggatggcagtggcagatgagcctaaaccaggaacctcagaagccaagaaaaagtatgccccggtttgtgtcaccaatcctacagctagcatttgtcgcaattgaggatctcctgtttcattttacctctgatgatcggaaatgt

SEQ ID NO: 256722 - DNA, 402 bp, Glycine max; identical to SEQ ID NO: 234890

SEQ ID NO: 256723 - DNA, 394 bp, Glycine max
gccttcccaaaaccaaaccacaggccaggtgaaggtgaaaaaaattaaaattcaaagaccttaatgtcagggatcattcacaggaattggggagacccttcatgtgggagggcacaagaaggaggaggagcataagggtgagcaccatgctggagaatacaaaggggagcaccatggtgaacacagtagtgagtacaaaggagagcatcatggtgaacacagagctggagagtaccatggtgagcacaagccagagcacaaagaggggttcctagacaaagtcaaggacaagatccatggtgagggcggcgccgccgagggcgagaagaagaagaaggagaagaagaagaaggagcatggccatgagcatggccatgacagcagcagcagcagt

SEQ ID NO: 256724 - DNA, 215 bp, Glycine max
  unsure (1)..(215): unsure at all n locations
gatctggcagcagaagaacaagtagttgagaactaagaaggagaagcaaatggcttcctcaatgatcccttccccagctgttaccactgtcaaccgtgccggtgccggcatggttgctccattcactggcctcaagtccatggctggcttccccaccagaaagaccaacaatgacattacctncattgctagcaacggtggaagatgcaatgcat

SEQ ID NO: 256725 - DNA, 378 bp, Glycine max
aagaaggaagctgaagtcatagaagagaagagggaagtggaagtgacggaagagaagaaggaaattgaagtaacagaagagaagaaggaagctgaagtcatagaagagaagaaggaagtggaagtgacggaagagaagaaggaaattgaagtaacagaagagaagaaggaagcagaagtgaaagaagagaagaaggaaggggaagtgacggaagagaagaaggaagttgaagtgacggaagagaagaaggaagcggaagtgatagtagaagagaagaaggaagttgaagtgacggaagagaagaaggaagtggaagtgaccgaaggaaagaaagaagtggaagtgatcgaagagaagaaggaaacagaagtgacagaa

SEQ ID NO: 256726 - DNA, 400 bp, Glycine max
caacataggtcatcgaaaggatctcgaagacccaccaacgcacgaaagccgggatctttcagaaaatggattcctattcgaagggtgcataaccgcatggataagctcacactaacccgtcaatttgggatccaattcggttccttaggaggtatcgggaaggaattttggaatgtaataatatcgattcatacagatacagaagaaagggttctctattgattcaaacgctctacctacgagatagggatagagaaagaggaaaaaaccgaggatttcacatagtacttttggtcgaaaaatcgatctgatttttttcgtacttttcgctcaatgatgaaatgggtcagattctacaggaccaaaccttgtgggagttaaggaatgatggaagaaaaga

SEQ ID NO: 256727 - DNA, 403 bp, Glycine max
gaaggtgcaagagtttgttgtgagctataagctagtttatcgtgaggagaatatgaagttgtttgttttctttgttgctgcagtagttttggtagcatggccatgccatggcgcaggctaccaaaggttccctctccgaatgaaaactggctatggtgagcgttcctcggaggtaaaatgcgcaagttttaggcttgctgtggaagcacacaacatccgagcctttaaaaccattcctgaagagtgcgttgaaccaacaaaggactacattaatggcgaacaatttagatcagactctaaaacagttaaccaacaagctttcttttatgctagtgaacgcgaagtccatcacaacgacatatttatattcggcatagataacaccgtactctctaatatccca

SEQ ID NO: 256728 - DNA, 393 bp, Glycine max
gacatcaaggtttgtgaagcatctaagtgagatacatagtagttaggtagcaagcataagtgtctaaccttagaaacatatctgctacatatcgtgtgcattttggaattgtgccactaaaattctattcatctatggctgcctcatcttatgctatgcaatcaatccttgcaaaccctatgatccgcatttccagcgggtctagggagaaccattttggtgttcctgcttatcacatgagaaggaatgttggcctgagagttaggtccatggctgaggaagagcaaccaagtcagcctgcgacctcagttacaccaccaccagcagaacccaaaccacagccagtctctactccttgaccaaaggtgagcaccaagtttctgatgtgttggc

SEQ ID NO: 256729 - DNA, 362 bp, Glycine max
gacaccaacaccaaaacaaacccactaagatggcttcctttatatccttcctagtgctgcttcttgcagcccttatcctcatgcctcaagggcttgccacttactacaaaccaattaagaagccaccagtgtacaagcctccagtgtacaagccaccagtgtacaaaccaccggtttataagccaaaaccaccggtttacaagccgaaaccaccggtttacaagccaccatataagaagccaccatacaagaaaccaccttatggaaagtaccctccagtagaggacaacacccatgcctaaagcaagcaatgaggtctattatctacttaataaataagaggaactgctttgtgttttcta

SEQ ID NO: 256730 - DNA, 418 bp, Glycine max
gaaggtgcaagagtttgttgtgagctataagctagtttatcgtgaggagaatatgaagttgtttgttttctttgttgctgcagtagttttggtagcatggccatgccatggcgcaggctaccaaaggttccctctccgaatgaaaactggctatggtgagcgttcttcggaggtaaaatgcgcaagttttaggcttgctgtggaagcacacaacatccgagcctttaaaaccattcctgaagagtgcgttgaaccaacaaaggactacattaatggcgaacaatttagatcagactctaaaacagttaaccaacaagctttcttttatgctagtgaacgcgaagtccatcacaacgacatatttatattcggcatagataacaccgtactctcttatatcccatactttgaaaacatg

SEQ ID NO: 256731 - DNA, 426 bp, Glycine max
  unsure (1)..(426): unsure at all n locations
aggaacgccgtcgtcgggatgctgcaacggagtgaagagcctcaatgccgccgccaagaccaccgccgaccgccagacggcgtgcaactgcctcaagtcggccgccagccaaatctccggcttcaacgccaacaacgccgcctcgctccctggcaaatgcggagtctccatcccctacaagatcagcacctgcaccaactgcgctaccatcaaggtttgaagagaaagtcatggacgcaggaaaccggaaactactcactagtatatgagtagcattattaatattaagaataagatcgagggtgatgagggctccacttatatgcccctctcctcttgtatgagagatttgcatcggatagctntaagttgtgttgccgttgtatttctctgtatgacgtacacataggtatatctactttaata

SEQ ID NO: 256732 - DNA, 350 bp, Glycine max
ggtatgtgattgttgtgactcgttcttcttcgtcgttatcttcttcttttgttgtttgtgtgtttgttttttctctcacctgaaaatgtcttgctgcggtggtaactgtggttgcggaagcgcctgcaagtgcggcaacggctgcggaggctgcaagatgtacccagacttgagctacaccgagtcaaccaccaccgagaccttggtcatgggagtggcaccagttaaggctcaattcgagagtgctgaaatgggtgttcccgctgagaacgatggctgcaaatgtggagctaactgcacctgcaacccctgcacttgcaagtgaggtgttggagagctaaagcttcaag

SEQ ID NO: 256733 - DNA, 405 bp, Glycine max
ggcacttagccagttcggtccctcacttaagccactgtgtggaactaacaacaacacaaggccatcatcatggcagctgcttctcctatggcaagccaactcaagtccaccttcactaaaactcttgtagctcccaagggcctctctgcctcttcaccactccacctcctgccttctaagaggcaatttagcttcactgttagggccatccaatcagaaaagccaacctatcaagtgattcaaccaatcaacggtgatcccttcattggaagccttgaaaccccagttacatccagccccttgattgcatggtacttatcgaacctccccgcatacaggaccgcagtgagcccactactaagagggatcgaggtgggcctggcccatggctaccttctggtgggc

SEQ ID NO: 256734 - DNA, 383 bp, Glycine max
gacaacacagcacacagagagagtttgaggaagaaatcatcatggcttcagcagcatctgggtttgtgctgtctcttaatgttgcagcttccaccacaaactcaagggtggtcttgttcaacacaaagaaccacgcttctaggcttcttgtgagggcttcagacgagcctgcagcggcggcacccgcaaccaccacccctccagctgaagctgaagcaaagccaaaaccaccacctattggccccaagagaggtgctaaggtgaagattcttaggaaggaatcctactggtacaaaggcactggtgcagtggttgctgttgatcaggaccccaacactcgctaccctgttgtggttcgattcaacaaagtcaactatgccaat

SEQ ID NO: 256735 - DNA, 391 bp, Glycine max
gaggtttttagggtttacactgaggaggcacaccttcaggagcagtcatggttctcaaaaccgagctgtgccgattcagcggtgccaagatctacccagggaaaggcatcagatttgttcgtggtgattctcaggttttcctgtttgctaactcaaaatgtaagaggtatttccacaacaggttgaagccgtcaaagctcacgtggactgcaatgtaccgaaagcagcataagaaggatattgctcaagaagctgtgaagaagagaagacgtgctaccaaaaaaccttactctaggtctattgttggtgctactttagaagttatccagaaaaagagaaccgagaagccagaagttcgagatgcagctagggaagcacagcttcgtgaaat

SEQ ID NO: 256736 - DNA, 269 bp, Glycine max
gaaggtgcaggagttggtggtaagctttaagggagttaatcgtaaggggattttgaagtggttggtttccttggtggctgcagtagttttggaagcatggccatgccatggcccaggttaccaaaggttccttctccgaatgaaacctgcttatggtgagcgttcttcggaggtaaaatgcgcaagtttaaggctggctgtggaagcacacaacatccgagcttttaaaaccatccctgaagagtgcgttgacccaacaggggtctact

SEQ ID NO: 256737 - DNA, 308 bp, Glycine max
gagatcccgtcgtcgcaggcgcagagtagaggagcacagaagagggaaaacggcaccgccgccgtagaagaaaacaaccatggtgcacgtctccttttacaggaactatgggaagacattcaagaagccgcgtcgtccgtacgagaaggagcgtctcgacgcggagttgaagctggttggtgagtacgggcttcggtgcaagagagagctgtggagggtgcagtacgcgctcagtcgtatccgcaacaacgcgcggaaccttctcaccctcgacgagaagaactcgcgctggatctttgagggagagg

SEQ ID NO: 256738 - DNA, 392 bp, Glycine max
gaaggaaggaaggaaggaaggaagagtgagcgtgaaagatgccttcggcgaggctttcagggtcaccaaggctcgacgttgctattgacatgggcaatccatttctcaatctcactgttgatggtttccttaagatcggagctgtcgcagccacgcgatcagctgctgaagatacttatcatattatccgaaacgggaatatctcaagtcatgatttcgagaaaacgttgaagaagatgtgtaaagaaggtgtatattggggaactttagctggtgtttatcttggaatggaatatggggtagagaggatccgtggcaccagagattggaagaatgccatgattgggggtgcagtaactgcgactctgttatctgttgccaccaccaacaac

SEQ ID NO: 256739 - DNA, 398 bp, Glycine max
ttttggcacaagtgagtttgttgatcgagataactagaaacagtgtgatgaaaatgaaggtccttgttttcttcgttgctacaattttggtagcacggcaatgccatgcgtacgatatgttccctcttcgaatgaacactggctatggtgcccgtactccggaggtgaaatgcgcaagttggaggcttgctgtggaagcacacaacatctttggctttgagaccattcctgaagagtgcgttgaagcaacaaaggaatacatccatggcgaacaatatagatcagactccaaaacagttaaccaacaagcttacttttatgccagagacctcgaagtccatcccaaggacacatttgtgttcagtatagatggcaccgtactctctaatattccatac

SEQ ID NO: 256740 - DNA, 400 bp, Glycine max
ggttctagtgtgtgattgtttgttgttgtaactcgttcttcttcttttgttgttctgtgtttgtgtttgttttttctctcacctgaaaatgtcttgctgcggtggtaactgtggttgcggaagctcctgcaagtgcggcaacggctgcggaggctgcaagatgtacccagacttgagctacactgagtcaaccaccaccgagaccttggtcatgggagtggcacctgttaaggctcaatttgagggtgctgaaatgggtgtgcccgctgagaacgatggctgcaaatgtggaccaaactgctcctgcaacccctgcacttgcaagtgaggtgttgggagagcaagcttcaagcagagatagcccttaattaggaataatgataaactattaatgtgtagc

SEQ ID NO: 256741 - DNA, 314 bp, Glycine max
gttgttagggcaaaaactttctatgctgggaaagccaatgttccagttgctggtgttaatgtacctgttgtgggtggccatgcaggcattactattctgccattattttctcaagccacaccaaaagccaatcttgatgatgatgtcattaaggctcttacaaagaggacacaagatggaggaacagaagttgtagaagctaaggctggaaagggttctgcaactttgtcaatggcctatgctggtgccctatttgctgatgcttgccttaaaggcctcaatggagtcccagatgttgtggagtgctcattcgt

SEQ ID NO: 256742 - DNA, 392 bp, Glycine max
gaatagaaatagaactgtcttttcatatagatatcccttcaacacaacataggtcatcgaaaggatctcgaagacccaccaacgcacgaaagccgggatctttcagaaaatggattcctattcgaagggtgcataaccgcatggataagctcacactaacccgtcaatttgggatccaattcggttccttaggaggtatcgggaaggaattttggaatgtaataatatcgattcatacagatacagaagaaagggttctctattgattcaaacgctccacctacgagatagggatagagaaagaggaaaaaaccgaggatttcacatagtacttttggtcgaaaaatcgatctgatttttttcgtacttttcgctcaatgatgaaatgggtc

SEQ ID NO: 256743 - DNA, 324 bp, Glycine max
gacacaactgaacaagataagctatccatagcagccaaagaaatgaagagtaccttgttcgccctctttctactttgtgccctcacctcttacctaccttcagccaccgctggtgatgtggtcgacactgatggtaatcctgttgaaaatggaggcacatactttgtgttgccaactataatattaaacggcggtggaatagaatatgccacatttggaaatgaaacttgccctgtcacttgtgcgcaatctcgcgatcagttctgcaagggctttccgatagccatttcatccccagcccgaatccgtcacatcagcgaaggc

SEQ ID NO: 256744 - DNA, 366 bp, Glycine max
gacacacacttttttcaaggcataggattggtgaggcaaacttgaattgaagtgaagaaggagatggctgcaacctcttccttgtgctcatcgaccctccaatcccagatcaatggattcttccttcacaaaacctctctttcccatactccttccctcactttctccaggaggaaaatttcaaccacagtgagggctacatctcgagtcgacaagttttcaaaaagcgatatcattgtctctccgtccattctttctgcaaacttttcaaaattgggagagcaagtgaaagcagtagaattggctggttgtgattggattcacgttgatgtaatggatggtcgctttgttccaaatattacaatt

SEQ ID NO: 256745 - DNA, 364 bp, Glycine max
gccacgcgtcgggagaagacgacgagggggaagctcataagtaagtatcaatggcttccgaagaatcccagaacaagccccccagcgagcagtccactaccgaactcatcacgagcgcgaagctggtggcggaggcggcgcagtcggctctgaagagcgacagcgacaaagtggacaaggccaaggtggctgacgctgccggcgatcttctcgacgcggcggggaagtatggaaaacttgatgacaaacaaggcatagggcaatatgttgacaaggctgctgattatctgcataattaccagggtgataataccactgctccttcacagcctgcagagtctaaaggtgaagaaagtggtggtgg

SEQ ID NO: 256746 - DNA, 371 bp, Glycine max
actgcaactttgctctctgtgaggcttcaatttctaattagggtttcgcttagagtaaccaataaccatgggagtcttcacctttgtcgtccgcaaatccggcagcgaatggagcgccaagcaacattccggcgacatcgaggcctccgccgattccaccttcgatctccaacggaagctcgtgcaagccgctctcgccgttgattcctccggtggagttcagtcctctttctctcccgtgtctcctacctccgctgtgttccaggtgatagtgggtggtgcagtattcgttggaggtggtggtggtgctgttgcagctgcacctgcaggtggtgctgccgcagctgatgctgccccagctgctgagaaaa

SEQ ID NO: 256747 - DNA, 413 bp, Glycine max
  unsure (1)..(413): unsure at all n locations
gaaaaccacaagtaaaagaaagaagctttcttgagttgagttaacagcatggagagggaggaagatgttaaggttggagcacagaaattctcagagaggcaagcattggggacaggagctcagggtgacaaggactacaaggaggcaccaccagcacccttgtttgagccaggggagttaaagtcatggtctttttacagagctgggattgcagagtttgtggccacattcttgttcctctacatcactgtcttgactgtcatgggtgtcaacagggcacccaacaagtgctcctctgttggcattcaaggaattgcatgggctttcggtggcatgatctttgccctcgtctactgcactgcttgaatatcangtgggcacataaattcggcagtgacgttcggttggttctg

SEQ ID NO: 256748 - DNA, 394 bp, Glycine max
gaaggtgcaagagtttgttgtgagctataagctagttgatcgagaggagaatatgaagttgttaggtttctttgatgctgcagtagttttggtagcatggacatgccatggcgcaggctaccaaaggttccctcttcgaatgaaaactggctatggtgagcgttcttcggaggtcaaatgctcatgttttatgcttgctgcggaagtacacaacatccgagcctttaaaaccattactgaagagtgcgttgaaccaacaaaggactacatgaatggctaacaatctagatcatactctaaaacagttgaccaacaagctttcttgtatgctagtgaacgcagaatccatcacaacgacatatttatattcggcatagataacaccgcactctct

SEQ ID NO: 256749 - DNA, 407 bp, Glycine max; identical to SEQ ID NO: 237149

SEQ ID NO: 256750 - DNA, 292 bp, Glycine max
gatctggcagcagaagaacaagtagttgagaactaagaaggagaagcaaatggcttcctcaatgatctcttccccagctgttaccactgtcaaccgtgccggtgccggcatggttgctccattcactggcctcaagtccatggctggcttccccaccaggaagaccaacaatgacattacctccattgctagcaacggtggaagagtgcaatgcatgcaagtgtggccaccagttggcaagaagaagtttgagactctttcctacctgccagaccttgatgatgcacaattg

SEQ ID NO: 256751 - DNA, 404 bp, Glycine max
  unsure (1)..(404): unsure at all n locations
gagagttaagttgagaacataccaatctacaataaacgatgattctcattatctccctcattttatctcttctctctttctcccatgcttctgtcctagatttctgtgttgcagattatgcaggtcctattggacctgcacgatattcctgcacgaagccttcaaaggtcacagcagatgattttgcttacagtggccttggcattgctggtaacacctcanacattatcaaagctgcagtgacccctgcatttgatgctcagtttgctggtctcaacggtcttggcatttccgcagcacgtttggacttagcagcangtggagttataccacttcacactcatcctgtagcttcagaattaccttgtcgtaatgaagggagcatnctagctggattcatttct

SEQ ID NO: 256752 - DNA, 378 bp, Glycine max
gagaagaacaagtagttgagaactaagaaggagaagcaaatggcttcctcaatgatctcttccccagctgttaccactgtcaaccgtgccggtgccggcatggttgctccattcactggcctcaagtccatggctggcttccccaccaggaagaccaacaatgacattacctccattgctagcaacggtggaagagtgcaatgcatgcaggtgtggccaccagttggcaagaagaagtttgagactctttcctacctgccagaccttgatgatgcacaattggcaaaggaagtagaataccttcttaggaagggatggattccttgcttggaattcgagttggagcacggtttcgtgtaccgtgagcacaacaggtca

SEQ ID NO: 256753 - DNA, 380 bp, Glycine max
gatctggcagcagaagaacaagtagttgagaactaagaaggagaagcaaatggcttcctcaatgatctcttccccagctgttaccactgtcaaccgtgccggtgccggcatggttgctccattcactggcctcaagtccatggctggcttccccaccagaaagaccaacaatgacattacctccattgctagcaacggtgaaagagtgcaatgcatgcaggtgtggccaccagttggcaagaagaagtttgagactctttcctacctgccagaccttgatgatgcacaattggcaaaggaagtagaataccttcttaggaagggatggattccttgcttggaattcgagttggagcacggtttcgtgtaccgtgagcaca

SEQ ID NO: 256754 - DNA, 272 bp, Glycine max
gaagcctccatttataaaacatcgtgtgcgcactctctcttctcctaggtttcactcccatcaacagcagcgatggtgcagaggctcacttatcgcaagcgccatagctatgctaccaaatccaaccagcaccgggttgttaagacccctggtgggaagttggtgtaccagaccactaagaagagagcaagtggacctaagtgccctgtcactggcaagaggatccaagggattccacacttaagacctgctgaatacaagaggtctagatt

SEQ ID NO: 256755 - DNA, 352 bp, Glycine max
gagaccacaattttttttgcaactacattatagcaattcacacaacacaacacagattaatggggaggttgtttgtggtgaatctggaagggaagatctatagctgcaaacactgccatacccatcttgcgctttacgatgacatctactccaggacattccattgcagacatgggaaagcttatctcttcaataaggttgtgaatgtttctattggcgaaatggaggacagaccgatgatgactgggttacataccgtggctgacattttctgtgtgggttgtggatcaatcgtgggttggaaatatgagactgcctatgaaaaaaaccagaagtacaaggaaagaaaatc

SEQ ID NO: 256756 - DNA, 358 bp, Glycine max
caacataggtcatcgaaaggatctcgaagacccaccaacgcacgaaagccgggatctttcagaaaatggattcctattcgaagggtgcataaccgcatggataagctcacactaacccgtcaatttgggatccaattcggttccttaggaggtatcgggaaggaattttggaatgtaataatatcgattcatacagatacagaagaaagggttctctattgattcaaacgctctacctacgagatagggatagagaaagaggaaaaaaccgaggatttcacatagtacttttggtcgaaaaatcgatctgatttttttcgtacttttcgctcaatgatgaaatgggtcagattctaca

SEQ ID NO: 256757 - DNA, 396 bp, Glycine max
gaatcctctgttgtttctcagccgcctcggctagggttcgggaacgaagaagggttctgttttcttttcgcgatgagggccaagtggaagaagaagcgtatgaggaggctgaagaggaagcgccgaaagatgagacagagatccaagtagtgcgttaaacctagtttgtttccgttgcttttacaattgcttatgttgtcaaataggacacccagttgttagtggcactggtctctcctttttgatggtttgatacattttggtggattttatttcgtcttatggtcctagctgaaaacaatgctggtactgcgtttgcgaatcaacgggatatcttgtttgcacaaaaaaaaaaaaaaaaaaactaaaaaaaaaggcggccgttctaaaggatcc

SEQ ID NO: 256758 - DNA, 409 bp, Glycine max
ggtagccgctgcatctgaacgaaacacagagggagagagagagagagagagtgagagagaagcagttgttcatcacaatgggtaaggttcacggatctctcgcacgtgcggggaaagtgagaggacaaactcccaaagtggcgaagcaagacaagaagaagaagccacgcggacgtgctcacaagagaatgcaatacaaccgccgattcgtcaccgccgtggtgggattcggaaagaagcgtggaccaaactcgtcggagaagtgagggaggcgtttggaagatgatggtttttcttagtttgcgaaatgtatcacctctttttatttgattgatgaactcaaactttgatagttctgattaagcttcaatgaaggagttttttgctagttaatatcaaaccacatttt

SEQ ID NO: 256759 - DNA, 402 bp, Glycine max
  unsure (1)..(402): unsure at all n locations
ggaaaaagaaanaaaaagattctganagaaatataanctaatattctgttagaataatcaataaagaatattcaaattcaaataacattttagatagaaaaaagacttaaaaaggaggatttgaaatgcgagatctaaaaacatgtctttccgtggcaccagtagtaagtactctatggttcggggctttggcgggtctcttgatagagatcaatcgtttttttccagatgcattgatattccctttgtttcattctagttattgacacggaaaggggtgaagaagattatagatccaattaagtattaaatatatgtaattaatatgtaattaatctcctcttctttatttcgtcttttatttcttcttttttttacaattggaatagaataagttagcat

SEQ ID NO: 256760 - DNA, 424 bp, Glycine max
  unsure (1)..(424): unsure at all n locations
gaccctcaaacacgtaactactatttcgaactccgccatggctgccaccaccgccaccgccacgtcatacttttttggcacccgcctcaacaacccgacaaccttaaacaacggaagattccacgcgctcctcaacttcggcaaaaagaaggcggcggcgccgccaccgaagaaaaaggaagtgaaagtgaaaccctccggcgaccggctggtgtggtttcctaatgcggagccgccggagtggctcgacggaagcatgatcggcgaccgcgggttcgacccgttcggtttcgcgaagcccgcggagtacctgcagttcgacctggactcgctggaccagaacctcgcgaagaacgtcgccggcgatgtgatcggaaccagngtggaggtcgccgacgttaaaccgacgccgtttcagccctac

SEQ ID NO: 256761 - DNA, 419 bp, Glycine max
ggctgtgggaagaggaaccctagctagggtttggaagaagctgatccgagaagatggtgcagcgtctcacctaccgcaaacgccacagctatgctaccaaatccaaccagcacagagtcgtcaagactcccggtggcaagcttgtttatcagaccacgaagaagagggccagcggacccaagtgccctgtcactggaaagaggattcaagggattccacatttaaggccagcagagtataatagatcaaggttacacagaaaccgaaggactgtgaaccgtgcatatggtggtgtgttgtctggcagtgctgttagagaaagaatcattcgagctttcttggttgaagagcaaaagattgtgaaaaaggtcttgaagatccaaaagacataggaaaaacaagctttgaagggctgagtt

SEQ ID NO: 256762 - DNA, 408 bp, Glycine max
ggagacacaaactcacacactttgtactctccgtccttccttcttcgatccagatctctctccttctccctcaaatggcttcccttctgcaatgttccatgcccctcgtctctctttccaatcgagctctggtacccggtaccaggatctccaacccaagttcagtttccctttcaattaagggaagaagtttcccatccgttacattgcagcccagagggcgtcggtttcagcttagatgtgcggcaaaaccagagacagtgaagaaggtgtgtgacatagtcaagaagcaattggcactgccagatgaatcagctgttactggagagtctaaatttgctgcacttggagctgattctcttgacacggttgagattgtgatgggacttgaggaggaatttggtatta

SEQ ID NO: 256763 - DNA, 392 bp, Glycine max
tgcgcatgcgaaaagccgacagatggctactgatacggaaagacgactgactgcttcagtgatcagatgaccacctgatgctactgttgacagagcacgagccagcgttactgctgcattaactggactgaaggctatggctgccttacgaccacggaaggctaccgctgacataacatgacttgctgggctcgttgtatgatcagcaatgcatgcaggtgtggccaccagttggcaagaggtctatagggactatgttttagttggcatacctgcaacatgctcaatctgctaaggaggcacaaaacttaattaagtgggcatggatttacagcttggaatctgagataacgcacgcgttaccgtactgagagcacttgaggtaaatacga

SEQ ID NO: 256764 - DNA, 312 bp, Glycine max
gacacaccacaagcttctccttcttttgggaaaagattaacaataaaagtgtggagtactgttgatagcaaagatgtttgggatcttcgacaaggggcaaaagataaaggggacagtggtgttgatgccaaagaatgtgttggacttcaacgccataacctccatcggtaaaggtggtgttattgacacagccaccggcatcttaggccaaggcgtcagcttagttggtggagtaattgatactgccacttccttcttaggccgtaatatctccatgcaattgatcagtgctactcagactgatggcagtgg

SEQ ID NO: 256765 - DNA, 335 bp, Glycine max
gctaccacaccgcacttcaccggcggtcgtttcttcacactctgccgtgctctttcggcgcaggtcaagagattcgcaatagaaagtgagaaaaaaaatgagtcgaggaagtgcaactgctgcgaagggcaagaagaagggtgcgacattcaccattgactgcgcgaagccggtggaggacaagatcatggacattgcgtctctcgagaagttccttcaagagaggattaaggttggtggcaaggccggtgctctcggcgacttcattaacggtcgtacgtgagaagaccaaaatcattgttacttccgacagcaacttctccaaacggtaccct

SEQ ID NO: 256766 - DNA, 396 bp, Glycine max
gctcaagtgagtttgttgatcgagataactagaaacagtgtgatgaaaatgaaggtccttgttttcttcgttgctacaattttggtagcatggcaatgccctgcgtacgatatgttccctctccgaatgaacactggctatggtgcccgtactccggaggtgaaatgcgcaagttggaggcttgctgtggaagcacacaacatctttggctttgagaccattcctgaagagtgcgttgaagcaacaaaggaatacatccatggcgaacaatatagatcagactccaaaacagttaaccaacaagcttacttttatgccagagacctcgaagtccatcccaaggacacatttgtgttcagtatagatggcaccgtactctctaatattccatactac

SEQ ID NO: 256767 - DNA, 410 bp, Glycine max
gaagggtttcaagttattgtgagcaaagaaagatagtgagtgaagtaactgaagagaagaaaaaatgccgtgcctcaacctcagcaccaacgtgtccctcgaaggcgtcgacacctcttccatcctcgccgaagccacctcctccgtcgccagcataatcggcaaacccgaagcctatgtgatgattgtactgaaaggatcagtacccatagcttttggtgggaatgagcagccagcagcttatggagaattggtttccattggtggtcttaaccctagtgtaaacaaggaacttagtgctgcaattgcttcaattctggaaaccaaattgtcagtgccgaagtcgcggttcttcttgaaattctatgacaccaagggttccaacttcggatggaatggatctacattct

SEQ ID NO: 256768 - DNA, 420 bp, Glycine max
  unsure (1)..(420): unsure at all n locations
ggttctagtgtgtgattgtttgttgttgtaactcgttcttcttcttttgttgttctgtgtttgtgtttgttttttctctcacctgaaaatgtcttgctgcggtggtaactgtggttgcggaagctcctgcaagtgcggcaacggctgcggaggctgcaagatgtacccagacttgagctacactgagtcaaccaccaccgagaccttggtcatgggagtggcacctgttaaggctcaatttgagggtgctgaaatgggtgtgcccgctgagaacgatggctgcaaatgtggaccaaactgctcctgcaacccctgcacttgcaagtgangtgttgggagagcaagcttcaagcagagatagcccttaattagaataatgataaactattaatgtgtagctaaaaacttatgtattatgtc

SEQ ID NO: 256769 - DNA, 272 bp, Glycine max
gactcacaaggcaatcaatcaatcttctgagagtgtttggttgaaagtagcaaagatgtgtcctttcgggcaaaagggtcaaaagataaaggggactatggtggttatgcagaagaatgtgttggatatcaacagcatcaccagttgttgaagggatcgttgaccaaggcttaggcttcataggcagtgcagtcgatgcacttacttttgcagccaccaaaatctccatccagttgattagtgctaccaaggttgatggtgggaaaggaaaa

SEQ ID NO: 256770 - DNA, 350 bp, Glycine max
gactcacaaggcaatcaatcaatcttctgagagtgttgggttgaaagtagcaaagatgtgtcctttcgggcaaaagggtcaaaagataaaggggactatggtggttatgcagaagaatgtgttggatatcaacagcatcaccagtgttggagggatcgttgaccaaggcttatgcttcataggcagtgcagtcgatgcacttacttttgcagccaccaaaatctccatccagttgattagtgctaccaaggctgatggtgggaaaggaaaaattggaaagagtacaaatttaagaggaaagataacattaccaaccttgggagctggcgaacaagcatacgatgtttttt

SEQ ID NO: 256771 - DNA, 313 bp, Glycine max
ctcagttaatttggtgatccaaaatactagggacggtgttaataaatgaaagtcctgtgtttctttcgttgctacaattttggtagcatggcaatgccatgccttacgatatgttccctctccgaatgaacactggctatggtgcccgtactctggaagtgaaatgcgcaagttggaagcttgctgtggaagcacacaacatctttggctttgagaccattcctgaagagtgcgttgaagcaacaaaggaatacattcatggcgaacaatatagatcagactccaaaacagttaaccaacaagcttactttta

SEQ ID NO: 256772 - DNA, 291 bp, Glycine max
gctcatagtgtgtgattgatcggatgttgctaaggcgcggcttctatctaaaggaaggctgtggttgtgttcgttgctacatctcacctgacaatgcattgctgtggcggcaactgtggtcctggtagcttgtacacttgctataacggctgcactctctacgtgatatgcccagacttgaggttcactgagtcaacccacaccgtgaccttgttcatgacaattgctcctgagtacgctgaatctgcagatgcttacatgcatgtgcaccattataactcaggctgcaaa

SEQ ID NO: 256773 - DNA, 426 bp, Glycine max
gacacaactgaacaagataagctatccatagcagccaaagaaatgaagagtaccttgttcgccctctttctactttgtgccctcacctcttacctaccttcagccaccgctggtgatgtggtcgacactgatgataatcctgttgaaaatggaggcacatactttgtgttgccaactataatattaaacggcggtggaatagaatatgccacatttggaaatgaaacttgccctgtcactgttgcgcaatctcgcgatcagttctgcaagggctttccgataaccatttcatccccagcccgaatccgtcacatcagcgaaggccttagtttgaacattgggttcactttcgcatccccgtgttcccccgcttctgagtgaaccattgtgaaggatcaaccagaaggactcgctgttaaactcact

SEQ ID NO: 256774 - DNA, 401 bp, Glycine max
ggacaacgcgaatatattccgttaatgaaaaagcggtagccgctagagcaggagattgaagggcgaaaaagaagactgagagaagagagatgggcgtgacgaaggaagaagttgaatcatccttgaaggccaaactgaacccttctcatcttgaagtggttgatacatctggagggtgcggtgcaagttttgtggtggagattgtatcagaacaatttgaaggcaaaaggctacttgagaggcatcgaatggtgaatgctgccttagaggaggaaatgaaacaaatccatgctctctctattaagaaagctgttaccccagaccagtggaaacaacagcaagaatccaaccaatcaaatcctgctgcctaaagcatatgtttcggttataaaataagaaat

SEQ ID NO: 256775 - DNA, 57 bp, Glycine max
atatgctggtgtcgaacaaaaaaaaaataaagctggaaaaaaaaaagccggccgttt

SEQ ID NO: 256776 - DNA, 353 bp, Glycine max
gatcaccactcggacgcaaaaatggcacctgcgacactgtctctgtctctccttctactgctctcactcaacattgacgtaaccgtcagatagagcgactacgactactattgactgtacactgcatacgttggaaccgattcagtgctggaaggccaaacgtactctaagatcgggctgaagctgtacgacaagtacggtcactacatctacattaaaaacctctacgcatggcgcagcttgatgagcatgggctacgactacttccagcgcggcaacctcgacatcttcagcaggaagagaccctgtattgacggacccatatgtgccgttaaagttacttctagctgatc

SEQ ID NO: 256777 - DNA, 421 bp, Glycine max
gaccacaccgagtcgcagaaaaagacaaaagcgatcatagtttcacttcggccttatccagtttagggtttcggttctctaccctatctttcacgtatcgaaaccttaaatttacgatcaggtctgagcaatctggttggtagaacctttggtcttagtgagtcaagttttatgtctgaattagacgatcaaattcctactgccttcgatccttttgctgatgcaaatgctgatgactcgggtgctgggtcaaaggagtatgtgcatattcgtgtacagcagcgaaatggtaggaaaagcctgacaaccgttcacggattgaaaaaggaattcagctataacaagatacttaaagacgtcaagaaagagttctgttgcaatggaacagctgctcaggacccagaactaggacaggttattc

SEQ ID NO: 256778 - DNA, 329 bp, Glycine max
gacacataaaccaagtactacaagggaagaagaactgagctacaagctaaggaaggatcaaagagaatggctcaagcaatggcatcaatgactagctaacgtggttcctctaaggctgtgttgaaaggtagccttggctcaaaacccttgaatgtgggaagtggaagcagggtggcctaagtcacacgtgcagggttcacagttgaagcccagaaccaccagttgaatgttgttaaggtccaaattacccgtagggcatggctttaactggttgctgctggtttgaccactggctctttggttcaagctgtgcttgctgatgccaaacc

SEQ ID NO: 256779 - DNA, 337 bp, Glycine max
gatctggcagcagaagaacaagtagggtgagaactaagaaggagaagcaaatggcttcctcaatgatctcttccccagctgttaccactgtcaaccgtgccggtgccggcatggttgctccattcactggcctcaagtccatggctggcttccccaccaggaagaccaacaatgacattacctccattgctagcaacggtggaagagtgcaatgcatgcaggtgtggccaccagttggcaagaagaagtttgagactctttcctacctgccagaccttgatgatgcacaattggcaaaggaagtagaataccttcttaggaagggatggattccttg

SEQ ID NO: 256780 - DNA, 393 bp, Glycine max
gcacatgtgagtttgttgatcgagataactagaaacagtgtgatgaaaatgaaggtccttgttttcttcgttgctacaattttggtagcatggcaatgccatgcgtacgatatgttccctctccgaatgaacactggctatggtgcccgtactccggaggtgaaatgcgcaagttggaggcttgctgtggaagcacacaacatctttggctttgagaccattcctgaagagtgcgttgaagcaacacaggaatacatccatggcgaacaatatagatcagactccaaaacagttaaccaacaagcttacttttatgccagagacctcgaagtccatcccaaggacacatttgtgttcagtatagatggcaccgtactctctaatattccatac

SEQ ID NO: 256781 - DNA, 426 bp, Glycine max
ggttctagtgtatgtgattgttgtgactcgttcttcttcgtcgttatcttcttcttttgttgtttgtgtgtttgttttttctctcacctgaaaatgtcttgctgcggtggtaactgtggttgcggaagcgcctgcaagtgcggcaacggctgcggaggctgcaagatgtacccagacttgagctacaccgagtcaaccaccaccgagaccttggtcatgggagtggcaccagttaaggctcaattcgagagtgctgaaatgggtgttcccgctgagaacgatggctgcaaatgtggagctaactgcacctgcaacccctgcacttgcaagtgaggtgttggagagctaaagcttcaagcagagatggcccttagaaataatgataaaaactatatgtagtttcaaaacttcaaaattatgtagtat

SEQ ID NO: 256782 - DNA, 314 bp, Glycine max
gaaggtcacggcgagacgagccgtttctaattagtgataggtgtcaagtggaagtgcagtgatgtatgcagctgaggcatcctaacagaccgatatggacttgaaataaaataaattattgtccaaataaataatggttaatttacttaaaaaaaaaaaaaaaaaaaaaaaaaaaaaaaaaaaaaaaaaaaaaaaaaaaaccaaaaaaaaaaaaaaaaaaaaaaaaaaaaaagcggccgttttaaaggatccaagtttacgtacgcgtgcttgcaacgtcatagcttttttatagggccacctaaattaaatta

SEQ ID NO: 256783 - DNA, 426 bp, Glycine max
  unsure (1)..(426): unsure at all n locations
ggtacaagtgagtttgttgatcgagataactagaaacagtgtgatgaaaatgaaggtccttgttttcttcgttgctacaattttggtagcatggcaatgccatgcgtacgatatgttccctctccgaatgaacactggctatggtgcccgtactccggaggtgaaatgcgcaagttggaggcttgctgtggaagcacacaacatctttggctttgagaccattcctgaagagtgcgttgaagcaacaaaggaatacatccatggcgaacaatatagatcagactccaaaacagttaaccaacaagcttacttttatgccagagacctcgaagtccatcccaaggacacatttgtgttcagtatagatggcaccgtactctctaatattccatactacaaaaaacatggatatggngtggagaaatt

SEQ ID NO: 256784 - DNA, 250 bp, Glycine max
  unsure (1)..(250): unsure at all n locations
gacatttgtctctcatctttcaatttcaatcaacggttatacccttttctatttgagcatcatcatgtccaccgcagcgcagcccaaggccaagaaaacggcgtcgtccaagaagcccctctcccatcctaccttcgccgtgatgatagcggaggcgatagcgagtctgaaggagagaaccggttcgagccaatacgcgataaccaaattcatcgaaggcaagcacaaggagttgcctncaacctacaag

SEQ ID NO: 256785 - DNA, 433 bp, Glycine max
agaaggggacaccaacaccaaaacaaacccactaagatggcttcctttgtatccttcctagtgctgcttcttgcagcccttatcctcatgcctcaagggcttgctacttactacaaaccaattaagaagccaccagtgtacaagcctccagtgtacaagccaccagtgtacaaaccaccggtttataagccaaaaccaccggtttacaagccgaaaccaccggtttacaagccaccatataagaagccaccatacaagaaaccaccttatggaaagtaccctccagtagaggacaacacccatgcctaaagcaagcaatgaggtctattatctacttaataaataagaggaactgctttgtgttttctagcattgtgatttacaacttcgtagcaatgcatattcttgactcttgcatgcacttcaatccttc

SEQ ID NO: 256786 - DNA, 347 bp, Glycine max
gaaggtgcaagagtttgttgtgagctataagcgagtggatcgtgaggagaatatgaagttgtttgttttctttgttgctgcagtagttttggtagcatggccatgccatggcgcatgctaccaaaggttccctctccgaatgaaaactggctatggtgagcgttcttcggaggtaaaatgcgcaagttttaggcttgctgtggaagcacacaacatccgagcctttaaaaccattcctgaagagtgcgttgaaccaacaaaggactacattaatggcgaacaatttagatcagactctaaaacagttaaccaacaagctttcttttatgctagtgaacgcgaagtcc

SEQ ID NO: 256787 - DNA, 347 bp, Glycine max
gatagaagaagcacaaagagaagcatgagcactaggagcagcagcaactagtctcagctgaaatggcctcttcagtgatggcatctatggccctcaaacctgcccctttcactgttgagaagtcctcagtgagaggccttccctctctctcaaggaactcttcttcattcagagttgtggccagtggcaagaagatcaagactgacaaacctcatggaattaatggtggcatggctttgagggatggaactgatgcatctggcaggaaaggaaagggaaagggtgtttaccagtttgtagacaaatacggtgctaatgtcgatggttacagtcctaatctttttaaa

SEQ ID NO: 256788 - DNA, 272 bp, Glycine max
gagagaagggctacacaaacacaatctctaatggcactcaggatgtgggcttcttccactgccaatgcactcaaactctcttctgtctccagacctcatctcttgcctcctttttctttctccagatgcttatcttccgtcttggatggacttaagtacgctgattcacatgaatgggtcaagcacgaaggctcagtcgccaccattggtatcactgaccatgcccaggaccatcttggagaggttgtgtatgtggagctgccagaaccagg

SEQ ID NO: 256789 - DNA, 412 bp, Glycine max
  unsure (1)..(412): unsure at all n locations
ggttctagtgtgtgattgtttgttgttgtaactcgttcttcttcttttgttgttctgtgtttgtgtttgttttttctctcacctgaaaatgtcttgctgcggtggtaactgtggttgcggaagctcctgcaagtgcggcaacggctgcggaggctgcaagatgtacccagacttgagctacactgagtcaaccaccaccgagaccttggtcatgggagtggcacctgttaaggctcaatttgagggtgctgaaatgggtgtgcccgctgagaacgatggctgcaaatgtggaccaaactgctcctgcaacccctgcacttgcaagtgaggtgttgggagagcaagcttcaagcagagatagcccttaattaggaataatgataaactattaatgtgtagctaanaacttatg

SEQ ID NO: 256790 - DNA, 394 bp, Glycine max
caacataggtcatcgaaaggatctcgaagacccaccaacgcacgaaagccgggatctttcagaaaatggattcctattcgaagggtgcataaccgcatggataagctcacactaacccgtcaatttgggatccaattcggttccttaggaggtatcgggaaggaattttggaatgtaataatatcgattcatacagatacagaagaaagggttctctattgattcaaacgctctacctacgagatagggatagagaaagaggaaaaaaccgaggatttcacatagtacttttggtcgaaaaatcgatctgatttttttcgtacttttcgctcaatgatgaaatgggtcagattctacaggaccaaaccttgtgggagttaaggaatgatggaag

SEQ ID NO: 256791 - DNA, 402 bp, Glycine max
gaacgcagggaacaaaagaaaatcctgaccgattctcttcgtagccaagcactctgaaattctcagatatgtcgtggcaagcgtatgtggatgatcacctactgtgtgaaatctgaaggtgaccacctaactcacgccgatatcataggccaagacggaagcgttggggctcagagcaccaactgccctcagttcaaacctgaggaaataactgccatcaataatgactataatgagcctggatcacttgctccaactggattgtatatcggtggcaccaaatacatggtcatccagggtgagcctggtgctgtcattcgagggaagaagggtcctggtggtgttactgtgaagaagaccggtgcggccttgatcattggcatttatgatgaaccaatgact

SEQ ID NO: 256792 - DNA, 442 bp, Glycine max
acgacagaaggggcagatagatctgcttcttgttgttggaaagaaaccctagcaagcggaacaatggcagacgttgaggtcgatgtggcggctgcagcagcagcagggcagccgaagaagagaacgttcaagaagttcagtttcaggggcgtggatctcgatgcgcttctggacatgtccaccgatgaactcgtgaagatgttcagtgctcgcgcacgtagaaggttccagagaggcctcaccagaaagcccatggccttgatcaagaagcttcgcaaagcgaaaagagaagctccaccaggtgagaagccagaacctgtccgcacccacctccgcaacatgattattgtgcctgagatgattggtagcattattggagtgtacaatggcaagacctttaatcaggttgaaatcaaacctgagatgattgggcattatctgg

SEQ ID NO: 256793 - DNA, 426 bp, Glycine max
gatctggcagcagaagaacaagtagttgagaactaagaaggagaagcaaatggcttcctcaatgatctcttccccagctgttaccactgtcaaccgtgccggtgccggcatggttgctccattcactggcctcaagtccatggctggcttccccaccaggaagaccaacaatgacattacctccattgctagcaacggtggaagagtgcaatgcatgcaggtgtggccaccagttggcaagaagaagtttgagactctttcctacctgccagaccttgatgatgcacaattggcaaaggaagtagaataccttcttaggaagggatggattccttgcttggaattcgagttggagcacggtttcgtgtaccgtgagcacaacaggtcaccaggatactacgatggacgctactggaccatgtggaa

SEQ ID NO: 256794 - DNA, 333 bp, Glycine max
gagcttcaataagtaagtatcgatgggttccgaagaatcccagaacaagccccccagagagcagtccactaccgaactcatcacgagcgcgaagctggtggcggaggcggcgcagtcggctctgaagagcgacagcgacaaagtggacaaggccaaggtggctgacgctgccggcgatcttctcgacgcggcggggaagtatggaaaacttgatgacaaacaaggcatagggcaatatgttgacaaggctgctgattatctgcataattaccagggtgataataccactgctccttcacagcctgcagagtctaaaggtgaagaaagtggtgg

SEQ ID NO: 256795 - DNA, 347 bp, Glycine max
ctttgctccaggagtgtctcagatggagccagtaggtctttgtttgcgtgatgttctcaacatcctgcacaatcttcaaggcgcttttgttgctggagacgtggtcgaatttaacccgcaacgtgataccgttgatggaatgactgccatggtagctgctaagctggtcagagaactggctgcaaagatttctaaatgatgatctcctgcctccccctgatctatacttcaacccacccgttccctaaaatgcacctgaaaggataactttccagaatggcatccaattttcactacatttaatttggagcattcatagacgaacatggtttataaaattttttttt

SEQ ID NO: 256796 - DNA, 394 bp, Glycine max
gctcctttagattcttcagcaactgcgattttggatcggaacctcttctgcggcgtagcaatgggacactccaacgtttggaattctcacccaaaaaactacggtcctggttctcgcacttgccgagtgtgtgggaatccacatggattgatcaggaagtatggccttatgtgctgcaggcagtgcttccgtagcaatgccaaggaaattggcttcatcaagtatcgctaaaagagctgttgtcacctacggaccaatattatgttctggcactaggatgttttgaagatgttatgtttgaagaaacttgagacttgtttttttttcatctattttattatcagacataatgtgtggaacgaagaatacttttatataaattgttttgcacaaa

SEQ ID NO: 256797 - DNA, 422 bp, Glycine max
gagcgcaaaacaatgggcagtgcattttctgccctattcggccgcgggtccaccgtcgccgaagggtcgtcggagagtttacacgtgttgccgttccactcgtcggaacgctggcagctacacttcaacgaggtcaaagagacctctaagctcgttgtgatagatttcacggcgtcgtggtgcggcccttgtagattcatagctccggtatttaacgagatggccaagaagtttagcaacgctgagtttgtcaagatcgatgtcgacgaattacctgatgtggctaaggattttaaggtggaggcgatgccgacgtttgtgttgtgtaagaaaggaaaagaagttgatagggttgtgggcgccaggaaggacgagctccagaacaagattcagaaacattatcaataaaacgtggaatcaat

SEQ ID NO: 256798 - DNA, 426 bp, Glycine max
gatagcgtttttcattgtgcattattcaatggcgaccacagcagctctatccggaaccatggtgagcacctccttcatgaggaagcaacctatgacgaccaagagcctaaagacattccccaacgctctttttggtctgaaaggtggacgaggtggtcgtgtaacttgcatggcctcgtacaaggtgaagctcataaccccagaaggagaagtggagtttgaatgcccagatgatgttttcattgttgacaaggctgaggaagaaggcattgaacttccctactcgtgcagggctggttcttgcgtttcatgtgttgggaaaattgtgaaaggtgacgtggaccagtcagatggtagcttccttgatgatgaacaaatagaaagtggatgggttctcacctgtgttgctctacctaggtcagacgt

SEQ ID NO: 256799 - DNA, 395 bp, Glycine max
gatctggcagcagaagaacaagtagttgagaactaagaaggagaagcaaatggcttcctcaatgatctcttccccagctgttaccactgtcaaccgtgccggtgccggcatggttgctccattcactggcctcaagtccatggctggcttccccaccagaaagaccaacaatgacattacctccattgctagcaacggtggaagagtgcaatgcatgcaggtgtggccaccagttggcaagaagaagtttgagactctttcctacctgccagaccttgatgatgcacaattggcaaaggaagtagaataccttcttaggaagggatggattccttgcttggaattcgagttggagcacggtttcgtgtaccgtgagcacaacaggtcaccaggat

SEQ ID NO: 256800 - DNA, 425 bp, Glycine max
gatctggcagcagaaaaacaagtagttgagaactaagaagaaggaaatggcttcctcaatgatctcctccccagctgttaccaccgtcaaccgtgccggtgccggcatggttgctccattcaccggcctcaaatccatggctggcttccccacgaggaagaccaacaatgacattacctccattgctagcaacggtggaagagtacaatgcatgcaggtgtggccaccaattggcaagaagaagttcgagactctttcctacttgccagacctcgatgatgcccaattggcaaaggaagtcgaataccttctgaggaaaggatggattccttgcttggaattcgagctggagcacggtttcgtgtaccgtgagcacaacaggtcacctggatactatgatggacgctactggaccatgtggaagc

SEQ ID NO: 256801 - DNA, 395 bp, Glycine max
  unsure (1)..(395): unsure at all n locations
ggatacgattcctttggtttgcagtaatgggtgctctggatcacatatcggaactctttgactgctccagtggcagttccaagcacaagaagcgcaagcaattgcagacggtggaggtgaaagtgaagatggactgcgaaggatgcgagaggaaagtgaggaaggcggtggaggggatgaaaggcgtgaaccaggtggatgtggagcgtaaggccaacaaagtcactgtggtcggctacgtcgaggcctctaaggtggtcgcccgcatcgctcaccgcaccggcaagaaagcagagctctggccctacgtnccctacgacgtcgttgctcacccctacgcacccggagtctacgacaagaaagccccctccggttatgtccgcaacaccgatgat

SEQ ID NO: 256802 - DNA, 336 bp, Glycine max
gagccacagaaaggccaatccattcacccaccctataaaaaacactctgcaattttgattgattcccctattccacacacaagaagactcctcaatcatccatagacatggccaccgtcacttctgcagcagtttctattccctcattcactggcctcaaggcaagcgcaggcaaagtgagtgccgccgcagttaaagtctcagctccccaagccacaaggttctgcggcatcaaggcttccctcaaagacgttggagtcgctgttgtggccactgctgcgagcgcagttctagctagcaacgccatggccattggagtgttactggggggggggg

SEQ ID NO: 256803 - DNA, 339 bp, Glycine max
gaagactgtctctaaggaggaagcgtctgccatgaaggctgctgggaaagcatggtatcacactatggtgtcagattctgattatacagaattcgacagcttttctaagtggttgggtgtttcacagtaaacttcatgatttattttttcgtattagaattttgttttttatgctcatcagaactaaatatccttatctttggtttttttgttttgcgggttaaggttgtcatcataattatgcagacaatgtggaaattttgtttgctggattttagtgcaaattctggttcttatacaaaaaagcacaacgtaaaaaacaaaaaaaagcggccgctc

SEQ ID NO: 256804 - DNA, 404 bp, Glycine max
  unsure (1)..(404): unsure at all n locations
gtagcgggtatagtttagtggtaaaagtgcgattcgttccatggacccctaaatagttaagggatcccccgtttgattcatattccgatcaaaaactttatttcttacttaaagggaatcctttataccctcaatgaatgatttgcggtataatatacattatcgtaatttgtatacaagaagaatcaattctaaattgacaacttgagttctaaaattatgaaacataagtttttggaattggatctataatccgaatttttttgagtatgacgaanggatctatggagagatatatagaaagtttctttctaatcgtaactaaatcttccatttttttgtatagtagagattgaagcanaatagctattaaacgattcttttagtttactagagacacctac

SEQ ID NO: 256805 - DNA, 419 bp, Glycine max
  unsure (1)..(419): unsure at all n locations
gaacggataacagtagagtaagagtagcaggagcagaaagaaagaaagaacgaaaatggcgagcggcgcctcaccgcaactgcaaatgaggttgaagtcctctttcatcggagatcgtctcttacgctgttcaacttcaaggcaccaacctcttcctcaactattccgttacaaccctggaaccaagcatgtttcgatgcagttatctagaacactttctggcttgaccaatctcttttttaatagaagaaatttggatgaattgcctaacagcaagcgtaaacgtctgagacctgngaaagtttctccgcggcgacaggtgccgaagaatataccgaggcctccgtatgtgaattctatgattcctccagggattgccagtggagctgaagtgcatgacaagaaagggatagaatgca

SEQ ID NO: 256806 - DNA, 389 bp, Glycine max
gatttcgataatcatccatagttactgaagaaaatggcaaccatctccgctgctatcacaaccccatcgatcacccgcgcatgtctagtgcaaaaacgttctcttgggttctcatctcccgttcttggtttgccagcaatgggtaaggtgggaagagtgagttgctccatggaggaaaagccttcttctgtgaaggaaagcagctcaagcatgttggggatgggggcatctttgatggcagcggccagcgccgcagccatgtcaggcccagccatggccttggtggatgagagacttagcactgaaggaaccgggctacccttcggcctcagcaacaaccttctcggttggatcctgttcggcgtcttcggactcatctgggctctcta

SEQ ID NO: 256807 - DNA, 426 bp, Glycine max
gagtgaagctctaaaccattgtcaagtatggcagtttcttcgtgctctttgagctggatttcaccctgcttatcccataagctaaacttaccacatacaaattgtttgccacgcaacactgcaacttcctcttccaacactgtcttttgtgcattggagacaaaccccagaggagaaatcttctgccagagaagaccgctactgttgggcgttggagcattaactgcaaatttacaaccaataaatttggtctttgctcaagaaaaaccagacagataccgagcttttgtggactatgaagatggatattcttacgtatatcccattgattggaaggaatttgacttcagggctcatgattctgcattcaaagacagatatctacagttacagaatgtaagggtgagatttataccaactgagaag

SEQ ID NO: 256808 - DNA, 324 bp, Glycine max
gattatatgtgagttcaaacaaatcaaagccatggccacctccaacttctctattgttctctccgtctccctagccttctttttggtgctacttaccaaggcacactcgaccgataccgtttctttcaccttcaacaagttcaacccagtccaaccaaacattatgctccaaaaagatgctagtatttcatcctctggggtgttacaactcaccaaagttggcagcaacggcgtgcccacctcgggatctctcggtcgtgccctttacgctgccccaatccagatttgggacagcgaaaccgccagggaaccaacttggcttcc

SEQ ID NO: 256809 - DNA, 348 bp, Glycine max
  unsure (1)..(348): unsure at all n locations
gacccccaaactctgcatcggaagaaaccctagccacgctcccggcgtcacgatgcagatcttcgtgaaaaccctaacgggtaaaacgatcacgttggaggtggagtcttcggacaccatcgacaacgtgaaggccaagatccaggacaaggaaggcatccctccggaccagcagcgcctcatcttcgccgggaagcagctggaggacggccgcaccctcgccgactacaacatccagaaggagtccacgcttcacctcgtcctccgncttcgtggcggcgccaagaagcgtaagaagaagacctacaccaagcccaagaagatcaagcacaagcacaagaaggtcaa

SEQ ID NO: 256810 - DNA, 355 bp, Glycine max
  unsure (1)..(355): unsure at all n locations
gcacaagtgagtttgttgatcgagataactagaaacagtgtgatgaaaatgaaggtccttgttttcttcgttgctacaattttggtagcatggcaatgccatgcgtacgatatgttccctctccgaatgaacactggctatggtgcccgtactccggaggtgaaatgcgcaagttggaggcttgctgtggaagcacacaacatctttggctttgagaccattcccgaagagtgcgttgaagcaacaaaggaatacatccatggcgaacaatatagatcagactccaaaacagttaaccaacaagcttacttttatgccagagacctcgaagtccatcccaaggacacantttttt

SEQ ID NO: 256811 - DNA, 347 bp, Glycine max
ggttgcattgcagtatcatcagaatcagagttgagttgaccccttcattccattaactatcactcttaacaatgcaagcagcaattgcagccatggccgcccacactattctcttttcttccttcccagctcctcaatccattgcccttcccgccactaccaagaaagccgttgcaatcctcaagggcaattcctccgtccatggccttgtcactctaacccaacaacaagacaacggcccaacaactgttactgttcgtgtttctggtcttactcctgggcctcatggttttcatctccatgagtttggtgatataacaaatgggtgcatatcaactgggccacat

SEQ ID NO: 256812 - DNA, 429 bp, Glycine max
gatagcatcatcatacaaagcattgaattcaaaaactgaagttcattccttgtgttttgctttcttcctcaaaaccaaacatgtcgaacacatgcggcaactgcggctgcgctgacaagactagctgcaccaagggaaacagctatggtgttattgtagagactgagaagagttacatcgagactgttgtcatggatgttccagcagctgagcatgatgggaagtgcaagtgtggcactaactgcacttgcacggactgcgcctgtggccattaaggaatatgtatgaaaatgtaattgccatgtgtttggcaatacaaatatccaaataatgtaatcttcgtatgaataaatgtgtgtgctgttatcctacttcaggtctgtgtagtcatgcagtctgaatcatttcaagttcctgtcttagttaata

SEQ ID NO: 256813 - DNA, 393 bp, Glycine max
  unsure (1)..(393): unsure at all n locations
gataccaaaggcaaaacacaagccaagtgaaagtgagaaaaaataaaaatcaaagagcataatgtcagggatcattcacaagattggggaggcccttcatgtgggagggcacaagaaggaggaggagcataagggtgagcaccatgctggagaatacaaaggggagcaccatggtgaacacagtagtgagtacaaaggagagcatcatggtgaacacaaagctggagagtaccatggtgagcacaagccagagcacanagaggggttcctagacaaagtcaaggacaagatccatggtgagggcggcgccgncgaaggcgagaagaagaagaaggagaagaagaagaaggagcatggccatgagcatggccatgacagcagcagcagcagtga

SEQ ID NO: 256814 - DNA, 389 bp, Glycine max
gaatagaaatagaactgtcttttcatatagatagcccttcaacacaacataggtcatcgaaaggatctcgaagacccaccaacgcacgaaagccgggatctttcagaaaatggattcctattcgaagggtgcataaccgcatggataagctcacactaacccgtcaatttgggatccaattcggttccttaggaggtatcgggaaggaattttggaatgtaataatatcgattcatacagatacagaagaaagggttctctattgattcaaacgctctacctacgagatagggatagagaaagaggaaaaaaccgaggatttcacatagtacttttggtcgaaaaatcgatctgatttttttcgtgcttttcgctcaatgatgaaatgg

SEQ ID NO: 256815 - DNA, 422 bp, Glycine max
ggcgagatagaagcgtaagcagcggctaccctaacctcgtcttcctctctactaatttcagctatggccgacgaagctgtggctgttccagatcccacccagatcgatgtcaagctctttaaccgctggagcttcgaggatattgaggttactgacatttcactggctgattacattggagttgcggcatccaagcacgccacatatgttcctcacaccgccggaaggtactccgtgaagcggttcaggaaggcgcagtgccccattgttgagaggctcaccaactctctcatgatgcacggtagaaacaatggcaagaaactcttggctgttaggatcatcaagcatgctatggagattattcatttgttgactgaccagaaccccattcaggttattgttgatgctgtcatcaacagtgg

SEQ ID NO: 256816 - DNA, 415 bp, Glycine max
  unsure (1)..(415): unsure at all n locations
gacacaccaaaccaaagtaagagtgagcaacttccaacaccatagtgaaatggcttccaaggctgcacttctcttgtgtttcaatgttctcttcttcaccgtggttagctccacatatgtgccatgcaacccaccccccaaaactccaaaacacccacctgtcccaaagccaccttccccaaagcaagcaagttgccccaaagacactattaagtttggtgtgtgtgctgatgtgttaggtttgatcaacgtgcaacttgggaagccaccaaagaccccatgctgcaacctcattgacggtctcgctgatcttgaagctgcagtgtgcctctgcactgctctcaaagctaatgtgttgggcatcaacctcaatgttccagtgaacttgagctngctactcaactactgtggaaag

SEQ ID NO: 256817 - DNA, 336 bp, Glycine max
agaagaagaagaaggagcatgggcatgagcatggccatgacagcagcagcagcagtgacagtgattaaactgctgcatcacctatatatttaaaaggtttatgggaccatagtagcgagggctgtgccttaatttctctctctctctctctctctccctctctctctctctctctttttcctttttccctatcttgtgatctatttatgagtgagaaaaacaaaagtgagaaattgtgcgtgtatctggttgctaattcgagtgctattagtctgtggtttggttggtttgtaaccccgctacttgggttatgtttgattgtatattatcctagag

SEQ ID NO: 256818 - DNA, 342 bp, Glycine max
gacacaccaacaccaaaacaaacccactaagatggctggctttgtatccttcctagtgctgcttcttgcagcccttatcctcatgcctcaagggcttgctacttactacaaaccaattaagaagccaccagtgtacaagcctccagtgtacaagccaccagtgtacaaaccaccggtttataagccaaaaccaccggtttacaagccgaaaccaccggtttacaagccaccatataagaagccaccatacaagaaaccaccttatggaaagtaccctccagtagaggacaacacccatgcctaaagcaagcaatgaggtctattatctacttaataaataag

SEQ ID NO: 256819 - DNA, 317 bp, Glycine max; identical to SEQ ID NO: 235644

SEQ ID NO: 256820 - DNA, 314 bp, Glycine max
  unsure (1)..(314): unsure at all n locations
ggcacaagtgagtttgttgatcgagataactagagacagtgtgatgaaaatgaaggtccttgttttcttcgttgctacaattttggtagcatggcaatgccatgcgtacgatatgttccctctccgaatgaacactggctatggtgcccgtactccggaggtgaaatgcgcaagttggaggcttgctgtggaagcacacaacatctttggctttgagaccattcctgaagagtgcgttgaagcaacanaggaatacatncatggcgaacaatatagatcagacttcaaacagtttaccaacaagcttactttta

SEQ ID NO: 256821 - DNA, 243 bp, Glycine max
ggaaccactcgcatcttgttcctccgctcaacagctatgataacatctttctctctccgaacagatcacactatggccacctcaagcgtcaaatcagtccatgatttcaccgttaaagatgccaagggaaatgatattaatcttggtgactacaaaggaacgggccttatcaattgcaatggtgccttacaatggggcttgacttattcaaattacactgggctcagtcaggtgtatgagaaa

SEQ ID NO: 256822 - DNA, 328 bp, Glycine max
  unsure (1)..(328): unsure at all n locations
gaccgtattccttacgctctctcactcacaaacacacactgaactaaaaaacatcaaaagagacatggctgagcaaaccttcatcatgatcaagcctgatggcgtccaaagaggccttattggcgagatcattagcagatttgagaagaaaggtttctacttgaaaggtttgaaacttgttactgtggaccgtccttttgctgagaagcactatgctgatctgtctgccaagcctntctttagtggtttggtggattacattatctctggccctgttgttgccatgatcttggagggcaagaatgttgttacgactggccgaaagata

SEQ ID NO: 256823 - DNA, 296 bp, Glycine max
  unsure (1)..(296): unsure at all n locations
gactacgttccaaaacacaaacacatacattgtagtatcacttttgtctcggaatttgttcttttgagttatggcaagcttaaaggttgcatgtgtggttttgatgtgcatggctgtgatgagtgcaccaatgatggtgcaagccgtgtcatgcaatgatgtttctgtgaacctagcaccgtgcctatcttacctgatgcagggtggagatgttccagaatcgtgctgtagcggagtgaggaacattctgggttctgccagcaccacctttgacanacaaaccgtgtgcaaatgtc

SEQ ID NO: 256824 - DNA, 414 bp, Glycine max
gggaaagtgcaaacggtggtgtagtctgtgagtgtcattgtgaagctggagacaatgttagcttcttctctctccttcctccattcttgttcatcttcctctttcttattgtcaatttcactatctaatcccaaaccctctcattccctacctttcgtgctcgaagccaaatacaggacccgtacggaagacaggtccgcgcgccacactcgcatcagatagaaggtcgaagggacacccgagaggccgaggctgtccgtgttccggtcgaacaagcatctctctgtgcaggtgatagatgacaccaagatgcacacgctcgcttcgatttcgacaatgcagaggacggttgctgaagagttcaactacttcgctggccctacacttgaagtagcagagaggatgggtgagatc

SEQ ID NO: 256825 - DNA, 412 bp, Glycine max
agaatatgaaaaagaaaaaaaagattctaaagaaatggaactagtattctttagaataatcaaaaagaatattaaattcaaataaattttagatagaaaaaagacttaaaaaaggaggatttgaaatgcgagatctaaaaacatatctttccgtggcaccagtagtaagtactctatggttcggggctttggcggatctcttgatagagatcaatcgtttttttccagatgcattgatattcccttttttttcattctagttattgacccggaaaggggtgaagaagattatagatccaattaagtataaaatatatgtattaaatatgtaataaatctctcttcttaattcggcttttattctttcttcttttacaattggtataagataaggtaggaaagagaaagaaat

SEQ ID NO: 256826 - DNA, 415 bp, Glycine max
  unsure (1)..(415): unsure at all n locations
cccacgcgtccgagacgacagaagggggagtttgttgatcgagataactagaaacagtgtgatgaaaatgaaggtccttgttttcttcgttgctacaattttggtagcatggcaatgccatgcgtacgatatgttccctctccgaatgaacactggctatggtgcccgtactccggaggtgaaatgcgcaagttggaggcttgctgtggaagcacacaacatctttggctttgagaccattcctgaagagtgcgttgaagcaacanaggaatacatccatggcgaacaatatagatcagactccaaaacagttaaccaacaagcttacttttatgccagagacctcgaagtccatcccaaggacacatttgtgttcagtatagatggcaccgtactctctaatattccatactac

SEQ ID NO: 256827 - DNA, 390 bp, Glycine max
ggtgtgattgtttgttgttgtaactcgttcttcggcttttgttgttctgtgtttgtgtttggtttttctctcacctgaaaatgtcttgcttccgtggttacctgtggttccgaaacttcttgcaattccggcaccggttgcgaaggctgcaagatgtccccagacttgagctacactgagtcaaccaccaccgagaccttggtcatgggagtggcacctgttaaggctcaatttgagggtgctgaaatgggtgtgcccgctgagaacgatggctgcaaatgtggaccaaactgctcctgcaacccctgcacttgcaagtgaggtgttgggagagcaagcttcaagcagagatagcccctaattaagaataatgataaactattaatgtgt

SEQ ID NO: 256828 - DNA, 427 bp, Glycine max
ggcacaagtgagtttgttgatcgagataactagaaacagtgtgatgaaaatgaaggtccttgttttcttcgttgctacaattttggtagcatggcaatgccatgcgtacgatatgttccctctccgaatgaacactggctatggtgcccgtactccggaggtgaaatgcgcaagttggaggcttgctgtggaagcacacaacatctttggctttgagaccattcctgaagagtgcgttgaagcaacaaaggaatacatccatggcgaacaatatagatcagactccaaaacagttaaccaacaagcttacttttatgccagagacctcgaagtccatcccaaggacacatttgtgttcagtatagatggcaccgtactctctaatattccatactacaaaaaacatggatatggggtggaagaaatt

SEQ ID NO: 256829 - DNA, 323 bp, Glycine max
gtagcgggtatagtttagtggtaaaagtgcgattcgttgcattggacccctaataggttaagggatcccccgttggattaatattccgatcaaaaactttatttcttacttaaagggaatcctttataccctcaatgaatgatttgcggtataatatacattatcgtaatttgtatacaagaagaatcaattctaaattgacaacttgagttctaaaattatgaaacataagtttttggaattggatctataatccgaatttttttgagtatgacgaaaggatctatggagagatatatagaaagtttctttctaatcgtaac

SEQ ID NO: 256830 - DNA, 195 bp, Glycine max
catctggcagcagacgaccgagtgggatatatggcagcaggaggaccagttggcgtgctctatgatcgattagccaactgctaccactgtgaactgttcccgagctggtatcactgttaactgtactggcgtcaacatcattgctggattcactgacctgaagaccatcgctggctttacctccattgatagcaa

SEQ ID NO: 256831 - DNA, 291 bp, Glycine max
gatctggcagcagaagaacaagtagttgagaactaagaaggagaagcaaatggcttcctcaatgatctcttccccagctgttaccactgtcaaccgtgccggtgccggcatggttgctccattcactggcctcaagtccatggctggcttccccaccagaaagaccaacaatgacattacctccattgctagcaacggtggaagagtgcaatgcatgcaggtgtggccaccagttggcaagaagaagtttgagactctttcctacctgccagaccttgatgatgcacaatt

SEQ ID NO: 256832 - DNA, 420 bp, Glycine max
  unsure (1)..(420): unsure at all n locations
gaaagggctgaaagagaagatcgaggagaaaagagagggtgatcatcatcatcacaaggatgaggacacaagtgtccctgttgagaaagttgaggttgttgaaacagcacatgctgaggaaaagaaggggttcctcgacaagattaaggagaagctaccagggcacatgaagacagaggaggccacagctactactcctcctccaccaccacctgttgcatcattggagcatggtgaaagtgctcatcatgaaggagaggccaaggagaagaaaggtatattagaaaagattaaagagaagcttcctggttatcactccaagacagaggaggaaaaggaaaaggaaaaggagagtggtgctcattgatatttaagattgagacaaggcttttntgttggttggagatgcatgattgtggt

SEQ ID NO: 256833 - DNA, 238 bp, Glycine max
ggtgcacaagtgagtttgttgatcgagataactagaaacagtgtgatgaaaatgaaggtccttgttttcttcgttgctacaattttggtagcatggcaatgccatgcgtacgatatgttccctctccgaatgaacactggctatggtgcccgtactccggaggtgaaatgcgcaagttggaggcttgctgtggaagcacacaacatctttggctttgagaccattcctgaagagtgcg

SEQ ID NO: 256834 - DNA, 371 bp, Glycine max
  unsure (1)..(371): unsure at all n locations
gatgcgcatgagagagagtagatcggggtaactagaaactgagcattgtgattgcaaggatcaggacacatgtgtgcttcaattgaaagagcatggtgatgccatagcacatgcttaggaaactatcgggttgatcactgagattagtgccaatactccagagctcaagagcacaaattaggggattgctactactgctcatacaatatcatctgtttgatacatatgcatcatggagagcgtngctcatcacgaaggaatacgtccatgagaaacaatgtatatagaactgctaaacgagtaacttactggctatcacttatggacaaaacatgaaaaggcatacgaaggacacattggtgctcattgat

SEQ ID NO: 256835 - DNA, 404 bp, Glycine max
gatctggcagcagaagaacaagtagttgagaactaagaaggagaagcaaatggcttcctcaatgatctcttccccagctgttaccactgtcaaccgtgccggtgccggcatggttgctccattcactggcctcaagtccatggctggcttccccaccaggaagaccaacaatgacattacctccattgctagcaacggtggaagagtgcaatgcatgcaggtgtggccaccagttggcaagaagaagtttgagactctttcctacctgccagaccttgatgatgcacaattggcaaaggaagtagaataccttcttaggaagggatggattccttgcttggaattcgagttggagcacggtttcgtgtaccgtgagcacaacaagtcaccaaggatactacgat

SEQ ID NO: 256836 - DNA, 319 bp, Glycine max
ggtgcacaagtgagtttgttgatcgagataactagaaacagtgtgatgaaaatgaaggtccttgttttcttcgttgctacaattttggtagcatggcaatgccatgcgtacgatatgttccctctccgaatgaacactggctatggtgcccgtactccggaggtgaaatgcgcaagttggaggcttgctgtggaagcacacaacatctttggctttgagaccattcctgaagagtgcgttgaagcaacaaaggaatacatccatggcgaacaatatagatcagactccaaaacagttaaccaacaagcttacttttatg

SEQ ID NO: 256837 - DNA, 379 bp, Glycine max
  unsure (1)..(379): unsure at all n locations
gacacaactgaacaagataagctatccataggggccaaagaaatgaagagtaccttgttcgccctctttctactttgtgccctcacctcttacctaccttcagccaccgctggtgatgtggtcgacactgatggtaatcctgttgaaaatggaggcacatactttgtgttgccaactataatattaaacggcggtggaatagaatatgccacatttggaaatgaaacttgccctgtcactgttgcgcaatctcgcgatcagttctgcaagggctttccgataaccatttcatccncagcccgaatccgtcacatcagcgaaggccttaatttgaacattgggttcactttcgcatccccgtgttcccccgcttctgagt

SEQ ID NO: 256838 - DNA, 343 bp, Glycine max
cgacatatgtcatcgaaagggtctcgatgacccacgatggcacgaaagccgggatctttcacaaaatggattcctattccaagggtgcataacctcatggataaactgacacttaccccacgatttgggatccaattacgtgccttaggatgtatctctaacgaactttggaatgcaataatatctattgatacagatacagaagaatgggttctctattgattcaaacgctctacctacgtgatcgggatagaataagaggcagaaaccgatgatttcacatagatctttaggtcaaacaatcgatctgaggatgatcgaactattagctcaatgatcaaat

SEQ ID NO: 256839 - DNA, 422 bp, Glycine max
gacagaaaagaaaaaggaaaccctagctggataggtcaaacatcatcatgtcggacgaagagcaccatttcgagtccaaggcagacgccggtgcctccaaaacctaccctcagcaagccggtaccattcgcaagaacggctacatcgtcatcaaaggacgcccctgcaaggttgtggaagtttcgacttccaaaactggaaagcacggtcacgccaagtgccactttgttggaattgatattttcactgccaagaaacttgaggatattgtgccctcttctcacaactgtgatgttcctcatgtgaatcgtactgattaccagctcattgatattgctgaggatggatttttgagtctgcttactgaaaatgggaacaccaaggatgaccctcaagcttccactgatgagagtctgctcact

SEQ ID NO: 256840 - DNA, 410 bp, Glycine max
gacaccaacaccaaaacaaacccactaagatggcttcctttgtatccttcctagtgctgcttcttgcagcccttatcctcatgcctcaagggcttgctacttactacaaaccaattaagaagccaccagtgtacaagcctccagtgtacaagccaccagtgtacaaaccaccggtttataagccaaaaccaccggtttacaagccgaaaccaccggtttacaagccaccatataagaagccaccatacaagaaaccaccttatggaaagtaccctccagtagaggacaacacccatgcctaaagcaagcaatgaggtctattatctacttaataaataagaggaactgctttgtgttttctagcattgtgatttacaacttcgtagcaatgcatattcttgactcttgca

SEQ ID NO: 256841 - DNA, 426 bp, Glycine max
ggtctaaggggtgccctgagatcacattgaacaatggtgaaggctgtggccgttcttggcagcagtgagggtgtcactggaactattcacttcgttcaggagggaagtggtccaaccaccgtaactggatctcttgctggtcttaagcctggtctccatggtttccatgtccatgccttgggggacactaccaatggttgcctctcaactggatcacatttcaatcctaataacaaggagcatggtgcccctgaggatgagaatcgtcatgctggtgatcttgggaatgttgatgtcggtgatgatggtactgtcagcttcactattactgacagccagattcctctcactggaccaaacaacatcataggaagggcggttgttgtccatgctgatcctgatgatcttgggaaaggtggtcatgag

SEQ ID NO: 256842 - DNA, 429 bp, Glycine max
gtgcgacttgaaagacatgattagattagctgtggattcttacatccgccattttttctagtatatagaaatgaacatgctcttgactcgacatcgtttgttctgttccactagaacttattgttttggggacgggaaagcagttgatgatgtaagttgatgatgtaaatagtacatgatggagctcgagtttattcatttatcaggggcaagtatctaaggttagtaaaaattaataagttagaaaaacttcgtaagtttatttttgatagaaaaatagaaaggatccaatttgagcaaggttcaaaaaaatggttggaattagtaaaactgttttgatcaaaagtgtagccgcaagaattaaccttctatttgtatgattctttcatagaaaggaaaaaatggtatgtttgcttgcaatttttgaaa

SEQ ID NO: 256843 - DNA, 357 bp, Glycine max
gcctgtagctatgccatatctggtgcagcatgctccgagctcaatgggaaggtcacttccgtggcctctgttgcatcctctggctacaagttgccattgatcaaatgtgaggccagagttcccaaagccaaagaatctgaaggaaggagaggtgcccttgttctcttggcagctacccttttcatctctgcagcctccaattcttctgccaatgctgggatcattgatgattaccttgagaggagcaaggctaacaaggaattgaatgacaagaagaggttagctactactggagcaaactttgcaagagcatacaccgtggaattcggtagttgcaagttccctgagaacttcact

SEQ ID NO: 256844 - DNA, 402 bp, Glycine max
gacacactgctattgctcttaagcttgctactgagtttccacactgcataccttaggtcttccgaattcgaagttaatttgcaagatggctaaggaaaaggctcagatcaacattgtggtggttggtcatgtggaccctgaggaggcaaccaccattaacgagctgaagaagcctgttgtggagaaagaagctccagggcatgccatatgagggcatgcacgtacggtctcggaggggaaccagaaaattatgttaacaaaataatctggaaccctaatgtatcagtgtcatcatcagtgtgtagtttaagctagctttgctatggttacgttctttgagatgagagtcttgatgaacagtaccattctgatgtattgctttccttgaaagttaatgcatgc

SEQ ID NO: 256845 - DNA, 224 bp, Glycine max
acgacagaagggggcacaagtgagtttgttgatcgagataactagaaacagtgtgatgaggatgaacgtccttgttttcttcgttgctacaattttggtagcatggcaatgccatgcgtacgatatgttcccttctccaaatgaacactggtatggtgcccgtactccgaaggggaaatgcccagttggaggcttgctgtggaaacacacaacatctttgggtt

SEQ ID NO: 256846 - DNA, 412 bp, Glycine max
agaagacagaagggcaacataggtcatcgaaaggatctcgaagacccaccaacgcacgaaagccgggatctttcagaaaatgggatgcctattcgaagggtgcataaccgcatggttaagctcacactaacccgtccaattgggatccaattcggttccttaggaggtatcgggaaggaattttggaatgtaataatatcgattcatacagatacagaataaagggttctctattgattcaaacgctctacctacgagatagggatagacatagaggaaaaaaccgaggatttcacatagtactttttggtcgaaaaatcgatctgattttcttcgtacttttcgctcaatgatgaaatgggtcagattctacaggaccaaaccttgtgggagttaaggaatgatggatgaa

SEQ ID NO: 256847 - DNA, 407 bp, Glycine max
ggtgcacaagtgagtttggtgatcgagataactagaaacagtggtgtgaaaaataaaggccttggtttctttggtggttccattttgggtagattggaattgccttgctaccaaatggtcccttttcggatggacaattggttttggggccggacttccgaaggggaatggcccagtttgaaggttggttgtgaaacccaacacaatttttgcttttaaaacatttcttgaaaatgccttgaaaccaccaagggattcattcattgggaaccattttgatcagacttccaaacaggtaacccacaaggttacttttatggccgagaccttgaagttcattccaaggacacatttgtggtcaatatagattggaccgtactttttaatatttcatacttcaaaaaaca

SEQ ID NO: 256848 - DNA, 423 bp, Glycine max
gacattactcacagaaagagaaagtgagagacagagagatgatggagttgaagaaggtggcattggtgaaggtagctttgttgcttttcctgttagggttcagtgcaaccactgcagatgctactcgcttcgacccacgttccttcattactcatgtgctccccaacaattactatgtaaaaatcaaatccacagccactgcatgtcgtgatctttgtctttgcacataatcaaaccctcctcagtgccaatgtgtagatgggagcgagacaggctgccactcatgttgcagaaattgcatttgcaataagaaatttcctcggacgtgtttttgtggagatataaccaacttctgctatgacaaatgtaactcaactgaagccaattaaagctcactagctaggaatatgaatgagcatgttt

SEQ ID NO: 256849 - DNA, 418 bp, Glycine max
gacaccaacaccaaaacaaacccactaagagggcttcctttgtatccttcctagtgctgcttcttgcagcccttatcctcatgcctcaagggcttgctacttactacaaaccaattaagaagccaccagtgtacaagcctccagtgtacaagccaccagtgtacaaaccaccggtttataagccaaaaccaccggtttacaagccgaaaccaccggtttacaagccaccatatacgaagccaccatacaagaaaccaccttatggaaagtaccctccagtagaagacaacacccatgcctaaagcaagcaatgaggtctattatctacttaataaataagaggaactgctttgtgttttctagcattgtgatttacaacttcgtagcaatgcatattcttgactcttgcatgcacttc

SEQ ID NO: 256850 - DNA, 421 bp, Glycine max
gaaggtgcaagagtttgttgtgagctataagctagtttatcgtgaggagaatatgaagttgtttgttttctttgttgctgcagtagttttggtagcatggccatgccatggcgcaggctaccaaaggttccctctccgaatgaaaactggctatggtgagcgttcttcggaggtaaaatgcgcaagttttaggcttgctgtggaagcacacaacatccgagcctttaaaaccattcctgaagagtgcgttgaaccaacaaaggactacattaatggcgaacaatttagatcagaccctaaaacagttaaccaacaagctttcttttatgctagtgaacgcgaagtccatcacaacgacctatttatattcggcatagataacaccggactctctaatatcccatactatgaaaaacatgga

SEQ ID NO: 256851 - DNA, 429 bp, Glycine max
ggttcccacaaagcaaggtatagctcaatggcatgatcatttgtgggtactttattacccaaccacttcacacaaaccaaacactcagctgttcctgcaagtagatcaggtgctccaagaaggaggagagtgcacttagcaacaacaagagcagagaccatgactactgtcatagaaaaactgggcattaagattgagaggaaccctcctgagtccaagctcactcaactgggtgttaggcaatggcccaaatggggttgccctccaagtaagttcccatggacatatgaagccaaagagacttgctatcttctggaaagaaaagtgaaggtctttcctagtgggtcgaatgagtcagttgaaattgctgctggtgacttggctgtgtttcccaaagggatgagttgcacttgggatgtgtctgttggt

SEQ ID NO: 256852 - DNA, 430 bp, Glycine max
gcacaagtgagtttgttgatcgagataactagaaacagtgtgatgaaaatgaaggtccttgttttcttcgttgctacaattttggtagcatggcaatgccatgcgtacgatatgttccctctccgaatgaacactggctatggtgcccgtactccggaggtgaaatgcgcaagttggaggcttgctgtggaagcacacaacatctttggctttgagaccattcctgaagagtgcgttgaagcaacaaaggaatacatccatggcgaacaatatagatcagactccaaaacagttaaccaacaagcttacttttatgccagagacctcgaagtccatcccaaggacacatttgtgttcagtatagatggcaccatactctctaatattccatactacaaaaaacatggatatgggggtggagaaaatttaa

SEQ ID NO: 256853 - DNA, 387 bp, Glycine max
gaccaagtgaaccaatatagcccaagccctatacaaccaaaccctaacacacacccatttgattcagtttccatggctagcctcaaggttgcatttttggctgcagtgctctgcatggttgtggtgagtgcacccatggcacatgcagctatcacgtgcgggcaggtgacgagtagcctggccaattgcatcggttacctccagaagggaggaacgccgtcgtcgggatgctgcaacggagtgaagagccccaatgccgccgccaagaccaccgtcgaccgccagacggcgtgcaactgcctcaagtccgccgtcagccaaatctacggcttcaacgccaacaacgccgtctcgctccccggcaaatgccgaatcttcatcccctac

SEQ ID NO: 256854 - DNA, 368 bp, Glycine max
agaagacgacagaagggggagtggcaatggaatccagaaacttgggcagactgggcatagcatccacgctttaatcgaccactgcttcttctacttttctttcctcaaggttttggcgggagtcgtcgtcgtcattgaatcagccatgcctcggtactactgtgactactgcgacacctatttgacccacgattctccatctgttagaaagcagcacaatgcaggttacaaacacaaggcaaatgtgaagacctactaccagcaatttgaagaacaacatacacaaagtttaattgatcaaaggatcaaagaacatcttgggcaagctgcaacgtttcagcaggttggtgtggcttataatcatctaa

SEQ ID NO: 256855 - DNA, 408 bp, Glycine max
  unsure (1)..(408): unsure at all n locations
gatccgcgcatattctcatctgaatttgcatttgcatttcatttggcgttttgtttctttctggaagcttcacttcggcatccatggcgtcgttcgaagaagctcctcccggaaactccaagaacggcgagaagatcttcaagaccaggtgcgctcagtgccacaccgtggacaaaggtgccggtcacaaacaaggacccaatctgaatggtttgtttggaaggcaatctggcacaactcctggatattcctattctactgctaacaaaaacatggctgtgatttgggaggaaaagaccttgtatgattacttgctcaaccccaaanagtatattccagggacaaagatggtgtttcccggtcttaagaaaccttaggaacgtgccgatcttattgcatatcttaaag

SEQ ID NO: 256856 - DNA, 52 bp, Glycine max
  unsure (1)..(52): unsure at all n locations
gagacctcatgtcaggcggngctacccgctgagtttaagcatatcaataagc

SEQ ID NO: 256857 - DNA, 399 bp, Glycine max
gatctggcagcagaagaacaagtagttgagaactaagaaggagaagcaaatggcttcctcaatgatctcttccccagctgttaccactgtcaaccgtgccggtgccggcatggttgctccattcactggcctcaagtccatggctggcttccccaccaggaagaccaacaatgacattacctccattgctagcaacggtggaagagtgcaatgcatgcaagtgtggccaccagttggcaagaagaagtttgagactctttcctacctgccagaccttgatgatgcacaattggcaaaggaagtagaataccttcttaggaagggatggattccttgcttggaattcgagttggagcacggtttcgtgtaccgtgagcacaacaggtcaccaggatacta

SEQ ID NO: 256858 - DNA, 315 bp, Glycine max
gactcaagaagactcctcaatcatccatagacatggccaccgtcacttctgcagcagtttctatgccctcattcactggcctcaaggctagcgcaggcaaagtgagtgccgtcgcagttaaagtctcagctctccaagccacaagggtctgcggcatcaaggctaccctcaaagacgttggagtcgctgctgtggccactgctgcgagcgcatgtctagctagcaacgccatggccattgaagtgttactgtgcactgatgactgatctctggatctctatgacaactctttctccgaggcccctggggaaaaga

SEQ ID NO: 256859 - DNA, 419 bp, Glycine max
gaacgtgcaagagtttgttgtgagctataagctagttgatcgtgaggagaatatgaagttgtttgttttctttgctgctgcagtagttttggtagcatggccatgccatggcgcaggctaccaaaggttccctctccgaatgaaaactggctatggtgagcgttcttcggaggtaaaatgcgcaagttttaggcttgctgtggaagcacacaacatccgagcctttaaaaccattcctgaagagtgcgttgaaccaacaaaggactacattaatggcgaacaatttagatcagactctaaaacagttaaccaacaagctttcttttatgctaatgaacgcgaagtccatcacaacgacatatttatattcggcatagataacaccgtactctctaatatcccatactatgaaaaacatg

SEQ ID NO: 256860 - DNA, 347 bp, Glycine max
gaagacacacaacacaacacagacacacagagttagaggagaaatcatcatggcatcagcagcatctgggtttgtgttgtcacttaatgttgcagctgccaccacaaactcaagggtggtcatgttcaacacaaagaacaacgcttctaggcttgttgtaagggcttcagatgagcctgcagcggcggcacccgccaccgacacacccccagctgaagctgaagctaaaccaaagccaccacctattggccccaagagaggtgctaaggtgaagattcttaggaaggaatcttactggtacaaaagcacttgttcagtggttgcttgtgatcaagaccccaacactc

SEQ ID NO: 256861 - DNA, 388 bp, Glycine max
  unsure (1)..(388): unsure at all n locations
gagagcgaaagagatgtcgttggtttcaagcatgctcgggtgtggagtggtgatggcggcgtcgcaagcaatgggaattggaaggagaagcgatggtggattgacgatagtgtgttcgtctaggccgcagaagaaagcgacggcgcatcacatgaagactcggcctcggaagacgcaggcatgggatagaaaccgcaagcccaccgtctacgatccactccctactcttcctcctgattggaccctcgttattcccgctgacgcttcttctgcttccgttacgccttcgacttcaaccccctctgcctagtcactctctcggtactctctctcngttacatgtagtcttatctttaattccggcagcttttctttcatgttttcatct

SEQ ID NO: 256862 - DNA, 312 bp, Glycine max
  unsure (1)..(312): unsure at all n locations
gacagcggaaacaattaataaagatgagtttgaagaacaacatggtggtgctaaaggtgtgtttgttgcttcttttccttgtgggggttacagctgcacgcatggaactgagcttcttcaaaagtgatcagtcatcaagttatgatgatgatgagtattcaaaaccatgctgtgatctctgcatgtgcacacgctcaatgcctnctcaatgcaactgtgaagatattaggctgaattcatgccactcagattgtaagagctgtatgtgcacacgctcacagccaggacagtgtcngtgtcttgacaccaacg

SEQ ID NO: 256863 - DNA, 425 bp, Glycine max
  unsure (1)..(425): unsure at all n locations
ggtgcacaagtgagtttgttgatcgagataactagaaacagtgtgatgaaaatgaaggtccttgttttcttcgttgctacaattttggtagcatggcaatgccatgcgtacgatatgttccctctccgaatgaacactggctatggtgcccgtactccggaggtgaaatgcgcaagttggaggcttgctgtggaagcacacaacatctttggctttgagaccattcctgaagagtgcgttgaagcaacaaaggaatacatccatggcgaacaatatagatcagactccaaaacagttaaccaacaagcttacttttatgccagagacctcgaagtccatcccaaggacacatttgtgttcagtatagatggcaccgtactctctaatattccatactacananaacatggatatgggggtggaga

SEQ ID NO: 256864 - DNA, 404 bp, Glycine max
gagggttttgtgctgttgtcgctgttcatcctccgtaacctccgagctctacaccgaagaacgaagccatggggaagacacatggaatgggagctgctcgcaagctcaagtctcaccgcaggaggcaaaggtgggctgataagtcatacaagaaatcccatctcgggaatgaatggaagaaaccttttgccggttcatcccatgccaagggaattgtccttgaaaagataggtattgaagctaagcagcccaactctgctattcgtaagtgtgccagagttcaacttatcaagaatgggaagaaaattgcagcttttgtccctaatgatggttgcttgaactacattgaagagaatgacgaagtcttgattgctggatttggacgaaagggtcatgctgtggga

SEQ ID NO: 256865 - DNA, 397 bp, Glycine max
gagtgcacaagtgagtttgttgatcgagataactagaaacagtgtgatgaaaatgaaggtccttgttttcttcgttgctacaattttggtagcatggcaatgccatgcgtacgatatgttccctctccgaatgaacactggctatggtgcccgtactccggaggtgaaatgcgcaagttggaggcttgctgtggaagcacacaacatctttggctttgagaccattccttgaaaatgcgttgaagcaacaaaggaatacatccatggcgaacaatatagatcagactccaaaacagttaaccaacaagcttacttttatgccagagacctcgaagtccatcccaaggacacatttgtgttcagtatagatggcaccgtactctctaatattccatac

SEQ ID NO: 256866 - DNA, 282 bp, Glycine max
gagggttacacgccgtcgtcgctgtggttgtgtgtcgcttcttcgtaggtgcagctgcaatggtgaagggacgccaaggagaacgtgtcagactctacgtgaggggtacaatccttggatacaaaaggtccaagtcaaaccagtatccaaatacatccctgatccaaattgagggtgtgaatgccaaagaagaagtagcatggtatgctggcaagaaaatggcctatatctacaaggctaaggtgaagaagaatggaagccattaccgctgcatatggggca

SEQ ID NO: 256867 - DNA, 259 bp, Glycine max
agaggcctacagcagagaacagaagaagatggcacaaacgctggcaatgcccgtggcaccttcgctagctatcatctccaattctcgcctctccaacacactgtccgttaccgttctgaacaaaccaaatgttcaagggccaagcatcaagtgcgttcgtgtttgcagtgcagagattgcgaacaacaagcgaatcgagtactcactgcaatacattcatggagctggcaggaccatagcgaaacagattctctgtgat

SEQ ID NO: 256868 - DNA, 286 bp, Glycine max
ttacaggacaaacgtgaagaagcctgatactgacgtttgaattttacaagtgatgatgttgtagctttgagattggtgtgtgtactcgcgaagttaaatatacagtgaagggggtacatttctagaggaatcacgatcatgagaaatgatgcaatgtttctgtttcttgttgacctttcatcttattttgtaatttagattatttaatttactaaatatattaattgtggaagcttaatgttgagttcgtactgcatgtctgattttcaaaactaatatgggtgac

SEQ ID NO: 256869 - DNA, 336 bp, Glycine max
ggtgcagttcaaagcgaagaaagattcgaaacgaagaaagaaagcgttgtgaagaatggcggaagagggacaagtgatcggcgtccacagcgtagaggagtggaaggaacatctcaagaagggagaagagtccaagaaattgattgtggtggattttactgcttcttggtgcggtccatgccgtttcatttgcccaattcttgcagagtttgctaaaaagttgccgaatgtcaccttcctcaaggtggatgtggatgaattggagactgtttccaaggagtggggaattgaggctatgccaaccttcctgttcttgaaagaaagcaagctggtgga

SEQ ID NO: 256870 - DNA, 338 bp, Glycine max
  unsure (1)..(338): unsure at all n locations
gggattcagcccaaagttcattcactggatttggggttccctaagcacaccattattttattatgaatgagtggcaatagcagcaacaacaacaatataagtaaaagaatctctgtgttgtcatcacacttcgctagatccagccccatcatggcttcagagaagcaagcggctcttgccgtcactccctctgatgctgatgctcctaccatatttgacaagatcatcaataaggagattccttctactgtggtttatgaggatgacaaggtgcttgccttcagggacataactnctcaagctcctacacatattcttatcattcctaaattcaaaga

SEQ ID NO: 256871 - DNA, 407 bp, Glycine max
gaaggtgcaagagtttgttgtgagctataagctagtttatcgtgaggagaatatgaagttgtttgttttctttgttgctgcagtagttttggtagcatggccatgctatggcgcaggctaccaaaggttccctctccgaatgaaaactggctatggtgagcgttcttcggaggtaaaatgcgcaagttttaggcttgctgtggaagcacacaacatccgagcctttaaaaccattcctgaagagtgcgttgaaccaacaaaggactacattaatggcgaacaatttagatcagactctaaaacagttaaccaacaagctttcttttatgctagtgaacgcgaagtccatcacaacgacatatttatattcggcatagataacaccgtactctctaatatcccatact

SEQ ID NO: 256872 - DNA, 349 bp, Glycine max
ggcacaagtgagtttgttgatcgagataactagaaacagtgtgatgaaaatgaaagtccttgttttcttcgttgctacaattttggtagcatggcaatgccatgcgtacgatatgttccctctccgaatgaacactggctatggtgcccgtactccggaggtgaaatgcgcaagttggaggcttgctgtggaagcacacaacatctttggctttgagaccattcctgaagagtgcgttgaagcaacaaaggaatacattcatggcgaacaatatagatcagactccaaaacagttaaccaacaagcttacttttatgccagagacctcgaagtccatcccaaggacaca

SEQ ID NO: 256873 - DNA, 374 bp, Glycine max
taccattcattcccacattcccattgttcacaccaccaacacaagatgtttctccacattgtgttcctccttttccttctctcatccacttcccatgccactgtccaagacttctgtgtggcagacctcaaaggtgcagacacccctgcaggctacccctgcaagccacctgctaatgtcacttcagatgactttgtgtacactggcttagctgaagctgcaaatgtcacaaacataatcaatgctgctgtgaccccagcttttgttgctcaattcccaggtctcaatggccttgaactatctgcagcaaggttggaccttggtcctagtggtgttatcccactccacactcatccccgtgccaatgaactact

SEQ ID NO: 256874 - DNA, 431 bp, Glycine max
ggcacaagtgagtttgttgatcgagataactagaaacagtgtgatgaaaatgaaggtccttgttttcttcgttgctacaattttggtagcatggcaatgccatgcgtacgatatgttccctctccgaatgaacactggctatggtgcccgtactccggaggtgaaatgcgcaagttggaggcttgctgtggaagcacacaacatctttggctttgagaccattcctgaagagtgcgttgaagcaacaaaggaatacatccatggcgaacaatatagatcagactccaaaacagttaaccaacaagcttacttttatgccagagacctcgaagtccatcccaaggacacatttgtgttcagtatagatggcaccgtactctctaatattccatactacaaaaaacatggatattgggtggaagaaatttaac

SEQ ID NO: 256875 - DNA, 330 bp, Glycine max
gaaggacaagtggctataacactacttgcattgagttagactttgatagtttgattagctctaataaggttaaggaccagagaaagagagaaagaaacagaatttggaagaaaaaaagcacaagatgggttattggaagtctaaggttcttcccaagatcaagaaggtttttgagaagaatagcaccaagaaagctgctgctgctgaggccaccaagtcctttgatgagtcaaaggaggaatacaacaaagcctttgaagaaaagaagactgaacttcaaactaaagtagttgaaatatacgaggcttcatcaactgaaatcaaaagttt

SEQ ID NO: 256876 - DNA, 357 bp, Glycine max
ggcgtacacagcctcaacaaccctaacgcgtgcagagcagagagagacgcagccatggggcgaagacccgcgaggtgttataggcaaattaagaacaaaccataccccaagtcacggttttgccgtggtgttcctgatcccaagatcaggatttacgatgttggtatgaagaagaagggtgtcgatgaattgcctttctgtgtccatctggttagttgggagaaggaaaacgtttctagtgaggccctggaagctgctcgtatcgcttgcaacaagtacatggcccaatttgctggaaaggatgctttacacttgagagtcaaggtgcacccattccatgttcttaggatcaacaag

SEQ ID NO: 256877 - DNA, 341 bp, Glycine max
gcagagagcgagcgagcgagcagtttcaaagagaggatttgggattgggaaggccagggattgcgctgcgtctcttcctcttctctttcgatccatccctcattcataatcttccaatccaacaacctcagcctcacactcacacatacacacatctgaacgcgtatcgaccctgccatggcttcaaagcgcatcctcaaggagctcaaggacttgcagaaagacccaccaacttcttgcagcgctggtccagtaactgaagacatgttccattggcaagcaacgattatgggtcctgctgatagtccttatgctggacgtgtattcctagtcactattca

SEQ ID NO: 256878 - DNA, 234 bp, Glycine max
gacgatgagtcgatttgatagctaatgtattgttattcgtgatattgatccaatttgatatcatcgaaatccaatttataccattgttgaattaattatcgatgaaagatttatcatctctatgggattaaattccgcatattttattgcataatagaacataccatggcttaaaaagcacgccgtcgatgtataagatccaagcttacgtgcgcgtgcatgcgactgcatagc

SEQ ID NO: 256879 - DNA, 425 bp, Glycine max
gcattcgataagaagcagtttgttaccttcatgaagaggtttatcaagaatttgactcccaagctcgatgcagagcaacaggagttgtttaagaagcacatcgagggagcaactaaatacctgctctctaagattaaagatttccaattttttgttggtgagagcatgggtgatgatgcttgcttggtctttgcctactacaaggacggcgctgctgatccaacattcctgtactttgcatatgccttaaaggaggtcaagtgctaagtgacttaatgtaccgagctatctactcattttatctagtttttttttacgttctgtcctaagttacttgaaactttgacctggtattttgattttaatggtgagacgtgtgctactgctacatcataattcccatcaaatttaattatcgatgggtt

SEQ ID NO: 256880 - DNA, 422 bp, Glycine max
ggttctagtgtgtgattgtttgttgttgtaactcgttcttcttcttttgttgttctgtgtttgtgtttgttttttctctcacctgaaaatgtcttgctgcggtggtaactgtggttgcggaagctcctgcaagtgcggcaacggctgcggaggctgcaagatgtacccagacttgagctacactgagtcaaccaccaccgagaccttggtcatgggagtggcacctgttaaagctcaatttgagggtgctgaaatgggtgtgcccgctgagaacgatggctgcaaatgtggaccaaactgctcctgcaacccctgcacttgcaagtgaggtgttgggagagcaagcttcaagcagagatagcccttaattgggaataatgataaactattaatgtgtagctaaaaacttatgtattatgtct

SEQ ID NO: 256881 - DNA, 469 bp, Glycine max
gaagacgacagaaggggatctggcagcagaagaacaagtagttgagaactaagaaggagaagcaaatggcttcctcaatgatctcttccccagctgttaccactgtcaaccgtgccggtgccggcatggttgctccattcactggcctcaagtccatggctggcttccccaccagaaagaccaacaatgacattacctccattgctagcaacggtggaagagtgcaatgcatgcaggtgtggccaccagttggcaagaagaagtttgagactctttcctacctgccagaccttgatgatgcacaattggcaaaggaagtagaataccttcttaggaagggatggattccttgcttggaattcgagttggagcacggtttcgtgtaccgtgagcacaacaggtcaccaggataccacgatggacgctactggaccatgtggaagctgcctatgtttggttgcactgatgc

SEQ ID NO: 256882 - DNA, 376 bp, Glycine max
ggcctcaaaaaacgaaaatcattcccttagagaaaacaaaagcacagaatcgaaagaagagttattttttgagagagattgggatggcttcgacgaagaagatcacactgaagagttcggacggcgaggccttcgaggtggaggaggcggtggcggtggagtcccagacgatcaagcacatgatcgaggacaactgcgccgacagcggaattcctctccccaatgttaccagcaagattctggccaaggttatcgagtattgcaagaagcacgttgaggccaattgcgctgatgagaagcccagtgaggatgaactcaaggcttgggacgctgatttcgtcaagggtgatcaggccacactctttgatctcattct

SEQ ID NO: 256883 - DNA, 370 bp, Glycine max
gatagcagcatcatacaaagcattgaattcaaaaacttaagttcattccttgtgttttgctttcttcctcaaaaccaaacatgtcgaacacatgcggcaactgcgactgcgctgacaagactagctgcaccaagggaaacagctatggtgttattgtagagactgagaagagttacatcgagactgttgtcatggatgttccagcagctgagcatgatgggaagtgcaagtgtggcactaactgcacttgcacggactgcacctgcggccattaaggaatatgtatgaaaatgtaattgccatgtgtttggcaatacaaatatccaaataatgtaatcttcgtatgaataaatgtgtgtgctggtatctt

SEQ ID NO: 256884 - DNA, 431 bp, Glycine max
gacaacacagaacaaaaacaaagaaagaaaaaacccttagccaacacaaccatcatggccacctctgctattcagcaatcagcattcactggtcaaactgctctgaagcagctcaatgagttcgtccgcaagaccggtggcgccggcaaaggtcgcactaacatgcgccgcaccgtcaagagtgctcctcagagcatttggtatggccctgaccgtcccaagtacttgggtccattctcggagcagattccatcatacctgaccggagaattccctggtgactacggatgggacactgctggattatcagctgacccggaaaccttcgccaggaaccgggagctggaggtgattcacagcagatgggcaatgcttggtgcccttggctgcaccttcccagagatccttgagaagaatggtgtcaaattcgg

SEQ ID NO: 256885 - DNA, 374 bp, Glycine max
  unsure (1)..(374): unsure at all n locations
ggagatacagaaaagaaaaaggaaaccctagctggataggtcaaacatcatcatgtcggacgaagagcaccatttcgagtccaaggcagacgccggtgcctccaaaacctaccctcagcaagccggtaccattcgcaagaatggctacatcgtcatcaaaggacgcccctgcaaggttgtggaagtttcgacttccaaaactggaaagcacggtcacgccaagtgccactttgttggaattgatattttcactgccaagaaacttgaggatatngtgccctcttctcacaactgtgatgttcctcatgtgaatcgtactgattaccagctcattgatattgctgaggatggatttttgagtctgcttactgaaa

SEQ ID NO: 256886 - DNA, 245 bp, Glycine max
ggcacaagtgagtttgttgatcgagataactagaaacagtgtgatgaaaatgaaggtccttgttttcttcgttgctacaattttggtagcatggcaatgccatgcgtacgatatgttccctctccgaatgaacactggctatggtgcccgtactccggaggtgaaatgcgcaagttggaagcttgttgtggaagcacacaacatctttggctttgagaccattcctgaagagtgcgttgaagcaa

SEQ ID NO: 256887 - DNA, 243 bp, Glycine max
gattatatttgagttcaaacaaatcaaagccatggccacctccaacttctctattgttctctccgtctccctagccttctttttggtgctacttaccaaggcacactcgaccgataccgtttctttcaccttcaacaagttcaacccagtccaaccaaacattatgctccaaaaagatgctagtatttcatcctctggggtgttacaactcaccaaagttggcagcaacggcgtgcccacctc

SEQ ID NO: 256888 - DNA, 391 bp, Glycine max
gactgatacaggaacagctagcagagaaacaaggttacaagtaaagtaaattaagaagatcattaatggcttctcttgcaaccttagctgctgttcaaccagctgcgctcaatggccttgctggaagttccctctctggaactaagctctctttcaagccctctcgccacactgtcaaatccaagaacttcaggagtggtgccgtggtagcaaagtatggtgacaagagtgtgtactttgatttggaggatctgggcaacactacggggcagtgggacttgtatggctcagatgcaccttcaccctacaaccctcttcagagcaagttcttcgagacatttgctgctccattcacaaagaggggattgttactcaagtttctgatattggg

SEQ ID NO: 256889 - DNA, 401 bp, Glycine max
ggtcgccgtttgttttcttttcgttcgcatcttctctctcagaaagatgaaggtggtcgccgcgtatttgctcgccgtcctcggtggcaacaacagcccctccgccgatgtcatcaaggaaatccttggctccgttggagtagaagcagatgaagataggattgaatcgtttttgtctgaagttaagggtaaggatatagttgagcttattgctgccggtagggaaaagttggcctcggttccttctggtggtggtggtgccgttgccgtcgccgcagctcctgggggaggtgctgctgctgctgctcctgctgctgaggcaaagaaggaggaaaaggtggaggagaaagaggaatctgatgatgatatgggtttcagtctcttcgattaattggtgtagt

SEQ ID NO: 256890 - DNA, 376 bp, Glycine max
  unsure (1)..(376): unsure at all n locations
gattccacacacaggaagactcctcaatcatccatagacatggccaccgtcacttctgcagcagtttctattccctcattcactggcctcaaggcaagcgcaggcaaagtgagtgccgccgcagttaaagtctcagttccccaagccacaaggttctgcggcatcaaggcttccctcaaagacgttggagtcgctgttgtggccactgctgcgagcgcagttctagctagcaacgccatggccattgaagtgttactgggcactgatgacgggtctctggttttctctcccaactctntctccgtggcccctggggaaaagatcgtgttcaagaacaacgcaggtttcccccacaacggtgtgttcgacgaggacg

SEQ ID NO: 256891 - DNA, 250 bp, Glycine max
atctcctcggaggccacagaggcgaaagcaggacctttaagcttcctaatcccctgtactacattcagtagttccttcacctctcaacaatctagcttgctcctatctatctatatgtaataagatgcgttcaaataggggcactagcttcactttatgttgtttcagctgtgtgtcaacaagtcatgtaagagacttcactatgttgttttctctttcgtggctttaataaattatgcgcccttgttcc

SEQ ID NO: 256892 - DNA, 414 bp, Glycine max
gagggtacaatacaaacacaaagtcagaaacacaaatctgggtatagtggagtagtagggtttttgcgtttgagagagaagaagcatgagcaggagtttgggaattccggtgaagctgctccacgaggcttcggggcacgtggtgacggtggagctcaagagcggagaactctacagaggaagcatgatcgagtgcgaggacaactggaactgtcaactcgagagcatcacctacactgccaaagatggcaaaacatcgcaacttgagcatgtgtttattcgaggcagcaaagtcaggtttatggtcatccctgacatgctgaagaatgctcctatgtttaagcgtttggatgcaagaatcaagggtaagggtgcatcacttggtgttggtaggggcagagcagttgcaatgcg

SEQ ID NO: 256893 - DNA, 416 bp, Glycine max
  unsure (1)..(416): unsure at all n locations
gaaaaacaagtgtttcgaatagattatcctaagtctttgggaatagtgctgcaatggcttcaagtcaggaagaggtgacccttttgggagctactggaagcccatttgtgtgcagggttcatattgccctcaagttgaaaggagttcaatacaaatatgtcgaaaaaaatttgaagaacaagagtgaactgcttctcaaatccaacccagttcacaagaaagttccagtgtttattcacaatgagaagcccatagcagagtctcttgtgattgntgaatacattgatgagacatgngagaacaatcccatcttgccttctgatccttaccagagagccttggctcgtttctggtccaaattcattgatgataagggttttggtgctgcatggaaaatcgttttcacagctgatgag

SEQ ID NO: 256894 - DNA, 423 bp, Glycine max
gggaggtagagcttaaaaaaacaagataacaaataaagtataagtgcggcgggtcaaactgggtgtatataatcggatcactataagacaactatttcttttgaggtttcaaagaatgattttcgaattcgattgaatctaaaacacaaaagagttggtttacaggatagaagaaacccacgtatatgtgataggatattctatatgaactagttatatatgaactaaccatatccatatatattatataaaataactaatattttatatctaaaattgccccgctactactgtaaatttcgatagggattaaaaaacatagcctttccgtttcatctcgaattgtgaattgaatattcaatgaccaaataaaattaaaggaaaaggttaaaaaaagcggccgatctagaggatccaagctta

SEQ ID NO: 256895 - DNA, 413 bp, Glycine max
gatctggcagcagaagaacaagtagttgagaactaagaaggagaagcaaatggcttcctcaatgatctcttccccagctgttaccactgtcaaccgtgccggtgccggcatggttgctccattcactggcctcaagtccatggctggcttccccaccaggaagaccaacaatgacattacctccattgctagcaacggtggaagagtgcaatgcatgcaggtgtggccaccagttggcaagaagaagtttgagactctttcctacctgccagaccttgatgatgcacaattggcaaaggaagtagaataccttcttaggaaaggatggattccttgcttggaattcgagttggagcacggtttcgtgtaccgtgagcacaacaagtcaccaagatactacgatggacgctact

SEQ ID NO: 256896 - DNA, 395 bp, Glycine max
gaggcctcagaagcagaacaacaatggccactgccactgtttcaatttcaacactatgcgctaccttcggaacccattgcgccatttcccacgaccctaaacctcttttttctcaacctttcagtctcaatcgctttccttccacctcttacaagctcactttatcacctcgctcacctatttcaacccttcctaaggtctctgaatccgcggttgccgaaaccgaaaccggttcgtccgagcccgaaccggaccaaattgtcccggctcagcctccctcctgggaacccggtctcttcgctgtcgtaatgattggtggacgccaatatattgttcacccggggcgacatcttactgttcagaggttgaaaggtgctaatgttaatgataagatt

SEQ ID NO: 256897 - DNA, 402 bp, Glycine max
ggagttggttggtatttgtttttgttgttggctgtgcgatcactcatctcacctcttctcatcaacgctgcgaaagacaatggagctgacaccccagcagctgagccaatacaacggcacggacccatcgaagccgatctacgtggcggtgaagggccgcgtctacgacgtcaccaccggaaaatccttttacggccccggcggcccctacgccatgttcgccggcaaagacgccagcagagccctggcgaagatgagcaagaacgacgacgacatcttcccctccctcgacggcctctccgacaaggagatcggcgttctcaacgactgggagaacaaattccaagctaagtaccctgtcgttgctcgtgttctcaattaatcatatgataacctaagtgt

SEQ ID NO: 256898 - DNA, 389 bp, Glycine max
gaaggtgcaagagtttgttgtgagctataagctagtttatcgtgaggagaatatgaagttgtttgttttctttgttgctgcagtagttttggtagcatggccatgccatggcgcaagctaccaaaggttccctctccgaatgaaaactggctatggtgagcgttcttcggaggtaaagtgcgcaagttttaggcttgctgtggaagcacacaacatccgagcctttaaaaccattcctgaagagtgcgttgaaccaacaaaggactacattaatggcgaacaatttagatcagactctaaaacagttaaccaacaagctttcttttatgctagtgaacgcgaagtccatcacaacgacatatttatattcggcatagataacaccgtac

SEQ ID NO: 256899 - DNA, 429 bp, Glycine max
gatctggcagcagaagaacaagtagttgagaactaagagggagaagcaaatggcttcctcaatgatcttttccccagctgttatcactgtcaaccgtgccggtgccggcatggttgctccattcactggcctcaagtccatggctggcttccccaccagaaagaccaacaatgacattacctccattgctagcaacggtggaagagtgcaatgcatgcaggtgtggccaccagttggcaagaagaagtttgagactctttcctacctgccagaccttgatgatgcacaattggcaaaggaagtagaataccttcttaggaagggatggattccttgcttggaattcgagttggagcacggtttcgtgtaccgtgagcacaacaggtcaccaggatactacgatggacgctactggaccatgtggaagct

SEQ ID NO: 256900 - DNA, 427 bp, Glycine max
gacacaattctctctcatcatctttgctattacctctgttgccaaactctaaaaatttttagttccacaaaaccaaaccaaaatggcagcagcctcggcctcatccaccatgatatcaacaccagccttatctccaagcacaagcatccaaaagcaccatcatttgaagccatccaacgtgtgctttcaaggccttagacccctcacaaggttcacaaccaaagtgagcagcaccaccaaaagggttattccaaagggtggtgtcggtgttagagctgaactcaactcagcacttgtcataagcctcagcactgggctctccctcttcttggggaagtttgtgttcttcaacttccaaagggagaacgtggcaaagcaagtgcctgagcagaacggactcacacactttgaggctggtgacacacgt

SEQ ID NO: 256901 - DNA, 373 bp, Glycine max
  unsure (1)..(373): unsure at all n locations
ggtctcgtggaagtgtaagcaagcaggaccctagcggcgcctgctttctttgttcgtgttttgcatcaggatggagtctcaggtgaagcacgcacttgttgtcaaagttatgggtcgtactggatccagaggacaagtgacccaggttagagtgaagtttttggatgatcagaaccgtcacatcatgaggaatgtgaaaggacctgtgagagaaggagacattctcaccctactcgagtctgaaagggaagcaagaagattgcgctagatggtctctttattttggcttgcctccaaattcgaacaaaagcaatatttntcttgatatttatggtagttagtcggtgctaaaggggttatagcaccctatctt

SEQ ID NO: 256902 - DNA, 373 bp, Glycine max
  unsure (1)..(373): unsure at all n locations
ggcaccgtactctctaatattccatactacaaaaaacatggatatggggtggagaaatttaactcgaccttgtatgatgaatgggttaacaagggcaatgcaccggcactgcccgagactcttaagaattacaacaagctggtgtctcttggcttcaagattatattcttgtcaggaagaacactggacaaacaggccgtaacagaagcaaacttaaagaaggctggctaccacacatgggaaaaattaattctcaaggatccacangatccttccactccaaatgcagtttcatacaaaacagcagcgagagagaaactgataaggcagggatacaacattgttgggatcattggaaaccaatggagcgatc

SEQ ID NO: 256903 - DNA, 391 bp, Glycine max
gatagcagcatcatacaaagcattgaattcaaaaacttaggttcattccttgtgttttgctttcttcctcaaaaccaaacatgtcgaacacatgcggcaactgcgactgcgctgacaagactagctgcaccaagggaaacagctatggtgttattgtagagactgagaagagttacatcgagactgttgtcatggatgttccagcagctgagcatgatgggaagtgcaagtgtggcactaactgcacttgcacggactgcacctgtggccattaaggaatatgtatgaaaatgtaattgccatgtgtttggcaatacaaatatccaaataatgtaatcttcgtatgaataaatgtgtgtgctgttatcctacttcaggtctgtgtagtcat

SEQ ID NO: 256904 - DNA, 402 bp, Glycine max
gggttgaagggagcttaccttacctgaagatggctgcggtgtcctttgccgtgggacttttaccttacgcttcagttcgatttcccgtattgagcaacgccaactcactgaaactcagttcctcagctagcatctctactccaattcctcagcaaaagctctgctctcttctttcccccctccctctaagccctcgccctcgccctctcaccattgtatccgctaagggctacaaaatgaaaacccacaaggcatctgcaaagcggtttagggtgaccggacgaggcaaaatagtgcgtaggagagctggcaagcagcatttgctcgtcaagaagaataccaagcgcaaatcccgactctccaaaatgcacgcggtcagcaggagcgactatgacaacgtaa

SEQ ID NO: 256905 - DNA, 379 bp, Glycine max
gacagctattcctcttaagcttgctactgagtttccacactgcataccttagatcttccgaattcgaagttaatttgcaagatggctaaggaaaaggctcagatcaacattgtggtggttggtcatgtggaccctgaggaggcaaccaccattaacgagctgaagaagcctgttgtggagaaagaagctccagggcatgccatatgagggcatgcacgtacggcctcggaggggaaccagaaaattatgttaacaaaataatctggaaccctaatgtatcagtgtcatcatcagtgtgtagtttgagctaactttgctatggttacgttctttgagatgagagtcttgatgaacagtaccattctgatgtattgctttc

SEQ ID NO: 256906 - DNA, 332 bp, Glycine max
acagaagggggcccgaactccttcgacgaccgtcttccccaatcgcctgcgtctctctctgaattgacaagcttaaagacaaagtcttaaatggctggtccaaggattgcccatgctaccttgaaaggtccgagtgtggttaaggagataataattggaataacacttggcttagctgctggtagcgtgtggaagatgcaccactggaatgaacagaggaaaaccaggaccttttacgatttactggaaaagggtgaaatcagggttgttgcaaaggaccagtgaaaatgttctggtttggtggcctatgctctcacattatatagcgcttt

SEQ ID NO: 256907 - DNA, 188 bp, Glycine max
ggtgtgagtgaagaagcagagggagtagcggcattaaaaatgcagatcttcgtgaaaactctgacagggaagactataaccctcgaggtcgagagcagcgacaccatcgacaatgtcaaggccaagattcaagacaaggaaggcattcctccggatcagcagcgtttgattttcgccggaaagcagct

SEQ ID NO: 256908 - DNA, 386 bp, Glycine max
  unsure (1)..(386): unsure at all n locations
ggcacaagtgagtttgttgatcgagataactagaaacagtgtgatgaaaatgaaagtccttggtttcttcgttgctacaattttggtagcatggcaatgccatgcgtacgatatggtccctctccgaatgaacactggctatggtgcccgtactccggaagtgaaatgcgcaagttggaagcttgctgtggaagcacacaacatctttggctttgagaccattcctgaagagtgcgttgaagcaacaaaggaatacattcatggcgaacaatatagatcagactccanaacagttaaccaacaagcttacttttatgccagagaccttcgagtccatcccaaggacacatttgtgttcagtatagatggcaccgtactctctaata

SEQ ID NO: 256909 - DNA, 418 bp, Glycine max
ggcatagcatattccagtgtttttcatttcatcgtgcattcaatggccaccacagcagctctatccggaaccatggtgagcacctccttcatgaggaggcaacctatgaccaccacaagcctaaagacattccccaacgttggtgaagctctttttggtctgaaaagtggacgaggtggtcgtgtcacttgcatggcctcgtacaaggtgaagctcataaccccagaaggagaagtggagtttgaatgcccagatgatgttttcattgttgacaaggcagaggacgaaggcattgaacttccctactcgtgcagggccggttcttgcgtttcctgtgttggcaaaattgtggaaggtaacgtggaccagtcagatggtagcttccttgatgatgagcaaatagatagtggctgggttc

SEQ ID NO: 256910 - DNA, 139 bp, Glycine max
gagcactggttagctctcaatcatcaactatttaaaacaatggtcagaggctaacttctccactagttttctgtgtcgagagctctttggacaacaccctctaaaccaatctatcaagtcctgattaatcttgacagcc

SEQ ID NO: 256911 - DNA, 417 bp, Glycine max
  unsure (1)..(417): unsure at all n locations
ggcagcagaaaagcaagtagttgagaactaagaagaaggaaatggcttcctcaatgatctcctccccagctgttaccaccgtcaaccgtgccggtgccggcatggttgctccattcaccggcctcaaatccatggctggcttccccacgaggaagaccaacaatgacattacctccattgctagcaacggtggaagagtacaatgcatgcaggtgtggccaccaattggcaagaagaagttcgagactctntcctacttgccagacctcgatgatgcccaattggcaaaggaagtcgaataccttctaaggaaaggatggattccttgcttggaattcgagttggagcacggtttcgtgtaccgtgagcacaacaagtcacctggatactatgatggacgctactggaccatgtgga

SEQ ID NO: 256912 - DNA, 396 bp, Glycine max
ggtagccgctgcatctgaacgaaacacagagggagagagagagagagagagtgagagagaagcagttgttcatcacaatgggtaaggttcacggatctctcgcacgtgcggggaaagtgagaggacaaactcccaaagtggcgaagcaagacaagaagaagaagccacgcggacgtgctcacaagagaatgcaatacaaccgccgattcgtcaccgccgtggtgggattcggaaagaagcgtggaccaaactcgtcggagaagtgagggaggcgtttggaagatgatggtttttcttagtttgcgaaatgtatcatctctttttatttgattgatgaactcaaactttgatagttctgattaagcttcaatgaaggagttttttgctagttaatat

SEQ ID NO: 256913 - DNA, 311 bp, Glycine max
gagcacttcttagctctcaatcatcaactatttaaaacaatggtcagaggctaacttctccactagttttctgtgtagagagctctttggacaacaccctctaaaccaatctatcaagtcctgattaatctggtgagcatggagctttgatggctcacaaccatccatgggtcttgaagagcttggagagaaaggggtgttagaagagagggtgctcactcctcacactccctaacttaaaacagtttgctttggcttaactttggcttctctgatcaacaagggatgtgttctaacattctttcttgagt

SEQ ID NO: 256914 - DNA, 321 bp, Glycine max
gacttcatcgatttcgtcgattatgccaagtcctaattggccagctgataagattaagggagaagagtgttggacggaccttgaatactgcaagcaaaaggggttgtattatcccattgcaaagactctagcagagaaagcgggttgggactttgcgaaggagacaggttttgatgttgtcatgataaaccctggtacagcattgggccctctgcttcctccaagaatcaattcaagcatggctgtgcttggtagtgttctcaaagggggcaaagagacctacgaggacttctttatgggaacggctcacttcaaagacat

SEQ ID NO: 256915 - DNA, 397 bp, Glycine max
ggcacaagtgagtttgttgatcgagataactagaaacagtgtgatgaaaatgaaggtccttgttttcttcgttgctacaattttggtagcatggcaatgccatgcgtacgatatgttccctctccgaatgaacactggttatggtgcccgtactccggaggtgaaatgcgcaagttggaggcttgctgtggaagcacacaacatctttggctttgagaccattcctgaggagtgcgttgaagcaacaaaggaatacatccatggcgaacaatatagatcagactccaaaacagttaaccgacaagcttacttttatgccagagacctcgaagtccatcccaaggacacatttgtgttcagtatagatggcaccgtactctctaatattccatactac

SEQ ID NO: 256916 - DNA, 388 bp, Glycine max
gatagctcaatggcatcatcatttgtgggtactttattacccaaccacttcacacaaaccaaacactcagctgttcctgcaagtagatcaggtgctccaagaaggaggggagtgcacttagcaacaacaagagcagagaccatgactactgtcatagaaaaactgggcattaagattgagaggaaccctcctgagtccaagctcactcaactgggtgttaggcaatggcccaaatggggttgccctccaagtaagttcccatggacatatgaagccaaagagacttgctatcttctggaaggaaaagtgaaggtctttcctagtgggtcgaatgagtcagttgaaattgctgctggtgacttggttgtgtttcccaaagggatgagtt

SEQ ID NO: 256917 - DNA, 401 bp, Glycine max
ggttctagtgtgtgattgtttgttgttgtaactcgttcttcttcttttgttgttctgtgtttgtgtttgctttttctctcacctgaaaatgtcttgctgcggtggtaactgtggttgcggaagctcctgcaagtgcggcaacggctgcggaggctgcaagatgtacccagacttgagctacactgagtcaaccaccaccgagaccttggtcatgggagtggcacctgttaaggctcaatttgagggtgctgaaatgggtgtgcccgctgagaacgatggctgcaaatgtggaccaaactgctcctgcaacccctgcacttgcaagtgaggtgttgggagagcaagcttcaagcagagatagcccttaattaggaataatgataaactattaatgtgtagct

SEQ ID NO: 256918 - DNA, 387 bp, Glycine max
gagtattcagattattatacattgcaaaaatggcatcatgcaccatgacagcttccatccttggctgcccagccgtcaccaaccggtcggcagcgacgcagaggagatcagtggtagtgaatgcagccagcaaatctgttgaaggggaaaaggtcagttatgacaacaatggtagcaatgcaaggaggaacttgatgttcgccacggcggcggctgctgtttgctcttttgctgcagggatggcattggcagatgagccctaaccaggaccctcagaagccaagaaaaagtgtgccccggtttgggtcaccaatcctacagttaggatttgccgcaatggaggacctttttggtttaacttttggaatttggaaatgtccaaggaat

SEQ ID NO: 256919 - DNA, 393 bp, Glycine max
  unsure (1)..(393): unsure at all n locations
ggctcaaactctcttatctccctcttacacacccaagcgctactactactactttctttctagatatgggttctggtgctgtgcaactgtttctgatcttggggctcttggctagctcatgcttagcccaagccccaggtgctgcaccgtcacaaccacccactacaaccccatcaccaccaccacccagatcagcacctgcaccagcacccaccagaccagcaacccgaccaccagcaaccctaccaccagcagcaactccaccaccagcagcaactccaccaccagcagcaacaccaacaccagcaccagcaccaccaacggctgcacctacacctgcttcctctcctgcagcctctcctncttcaccttctnctacagtgacaccaagcc

SEQ ID NO: 256920 - DNA, 415 bp, Glycine max
  unsure (1)..(415): unsure at all n locations
aggaacgccgtcgtcgggatgctgcaacggagtgaagagcctcaatgccgccgccaagaccaccgccgaccgccagacggcgtgcaactgcctcaagtcggccgccagccaaatctccggcttcaacgccaacaacgccgcctcgctccccggcaaatgcggagtctccatcccctacaagatcagcacctccaccaattgcgctaccatcaaggtttgaagagaaagtcatggacgcaggaaaccggaaactactcactagtatatgagtagcattattaatattaagaataagatcgagggtgatgagggctccacttatatgcccctctcctcttgtatgagagatttgcattggatagctntaagttgtgttgcgttgttatttctctgtatgagttacacatagttatat

SEQ ID NO: 256921 - DNA, 418 bp, Glycine max
  unsure (1)..(418): unsure at all n locations
gggtgtggcactcaaacattgtttgttgtaggaagaggaatcttgagaaatggcaggggacagcaagagcaagattctgttcatcggagggactggttacatcggaaaattcatcgtggaagccagcgccaaagctggccacccaactttccttttggtgagggagtccactctctccaaccccgcanaatcacccctcatcgacaatttcaaaggcctcggtgtcaatcttgttttaggagatctatacgatcaccaaagtttggtgagtgctataaagcaggtcgatgtggtaatttctactgtangacacctgcaactagctgatcaaggatagatcatttctgcaattaaagaagcaggaaatgttaagaagttctatccatctgagtttggaaatgatgtggaccggactcat

SEQ ID NO: 256922 - DNA, 368 bp, Glycine max
ggcacaagtgagtttgctgatcgagataactaggggcagtgtgatgaaaatgaaggtccttgttttcttcgttgctacaattttggtagcatggcaatgccatgcgtacgatatgttccctctccgaatgaacactggctatggtgcccgtactccggaggtgaaatgcgcaagttggaggcttgctgtggaagcacacaacatctttggctttgagaccattcctgaagagtgcgttgaagcaacgaaagaatacatacatggcgaacaatatagatcagactccaaaacagtttaccaacaagcttacttttatgccagagaccctcaagtccatcccaaggacacatgtgtgttcagtatagatg

SEQ ID NO: 256923 - DNA, 401 bp, Glycine max
ggcccgaactccttcgacgaccgtcttccccaatcgcctgcgtctctctctgaattgacaagcttaaagacaaagtcttaaatggctggtccaaggattgcccatgctaccttgaaaggtccgagtgtggttaaggagataataattggaataacacttggcttagctgctggtagcgtgtggaagatgcaccactggaatgaacagaggaaaaccaggaccttctacgatttactggaaaagggtgagatcagtgttgttgcagaggaacagtgaaaatgttcttgttttgttgcctatgctctccatttataggctttttttcccatgctatattcaattggctcttcaactgtaaatgagccaacttactattagattgaaaagaataagtttcttac

SEQ ID NO: 256924 - DNA, 394 bp, Glycine max
gacggcactcgttttcgttctcgttctggtttatagatctttgcgaaggaggtttacagcgctcaaccaaagatgcagaacgaggaaggacagatcactgagctttacattcctaggaagtgctccgccacaaacagattgattaccgctaaggaccatgcttcggttcagatcaacattgggcatgtggatgagaatggcgtctacaatggccatttctccacttttgccctctgcggattcatccgtgctcagggtgatgctgacagtgctctagaccgcttgtggcagaagaagaaagttgaagttaagcaacagtagacacccatgatagtttgttacctcgttatgtattaatttctactcttgctagagatatttgagtactatgatt

SEQ ID NO: 256925 - DNA, 315 bp, Glycine max
ggcacaagttatgtttgacgatcgagataactagaatcagagtgaggataatgaaagaactcgtgtgatacgttgctacaatattcggtagcttggatgtactgggctcatcagataatccatcttggaatccatagccaaatctggccacataactttgcttttgatgagggagttcactctctccaacctcgcaaaatcacccatcatcgacaatttcaaaggcctcggtgtcaatcttgctttatgagatctatacgatcaccaaagcttgcttagtgctatatagcaggtcgatgtggtaatttctactgt

SEQ ID NO: 256926 - DNA, 436 bp, Glycine max
  unsure (1)..(436): unsure at all n locations
gaaggtgcaagagtttgttgtgagctataagctagtttatcgtgaggagaatatgaagttgtttgttttctttgttgctgcagtagttttggtagcatggccatgccatggcgcaggctaccaaaggttccctctccgaatgaaaactggctatggtgagcgttcttcggaggtaaaatgcgcaagttttaggcttgctgtggaagcacacaacatccgagcctttaaaaccattcctgaagagtgcgttgaaccaacaaaggactacattaatggcgaacaatttagatcagactctaaaacagttaaccaacaagccttcttttatgctagtgaacgcgaagtccatcacaacgacatatttatattcggcatagataacaccgtactctctaatatcccatactatgaaaaacatggatatggngtggaggaa

SEQ ID NO: 256927 - DNA, 157 bp, Glycine max
tcaaacgaagaaaggcttatggtggatacctaggcacccagagacgaggaagggcgtagtaagcgacgaaatgcttcggggagttgaaaataagcgtagatccggggattcccgatataggtcaacctttcgaactgctgctgaatccacgggcagc

SEQ ID NO: 256928 - DNA, 402 bp, Glycine max
gagagttaagttgggaacataccaatctacaataaacgatgattctcattatctccctcattttttctcttctctctttctcccatgcttctgtcctagatttctgtgttgcggattatgcaggtcctattggacctgcaggatattcctgcaagaagccttcaaaggtcacagcagatgattttgcttacagtggccttggcattgctggtaacacctcaaacattatcaaagctgcagtgacccctgcatttgatgctcagtttgctggtctcaacggtcttggcatttccgcagcacgtttggacttagcagcaggtggagttataccacttcacactcatcctggagcttcagaattacttgttgtaattgaagggagcatcctagctggattcattt

SEQ ID NO: 256929 - DNA, 350 bp, Glycine max
gactggaaggaagggagggaagaatacaatgggatctcggagtggttaacacactggagagctcttcacgagaagggatgcatggaggaagcatccgatgctcaccaatcagctgcgtcacgccacccctggccttggcatcgccgtcgtcgccttccgaatctacctggtcggcgaacatgtctacaacacgctctatgctcccgatcctcattcgatttctcacgtgagaggcaaggatcaccactaaacgtttggacggacgcactacattccatcatcacttaataagcttgctagcatgttctcgcagcctttaatgtgtaaatttcaaaccgtgttcacttctt

SEQ ID NO: 256930 - DNA, 383 bp, Glycine max
ggaacgcagccaaagaaaagaaaatcctcaattttctgagcagccaaacactctctctctgtctctcgaaaattctcagtttgcagagaaaatctgaatcatgtcgtggcaagcgtatgtcgacgatcaccttctgtgtgacatcgaaggtaaccacctcgctcacgctgctatcatcggccaagacggcagcgtttgggctcagagtaccgacttccctcagttcaaacctgaggagataactgccatcatgaatgactttaatgagcctggatcacttgctccaactggattggatctcggtggcaccaaatatatggtcatccagggtgaacccggtgctgtcattcgagggaagaagggtcctggtggtgttactgtga

SEQ ID NO: 256931 - DNA, 423 bp, Glycine max
ggaaggaagggagggaagaatagaatgggatctggaagtggaaaacacactggagagttcttcaggagaagggatgcatggaggaagcatccgatgctcaccaatcagctccgccacgccacccctggcctcggcatcgccgtcgtcgccttcggtatctacctcgccggcgaacaagtctacaataggctctatgctcccgatcctcattcgatttctcacgtgaaagccggggatcaccactaaacgtttggacggacgcactccattccatcatcacttaataagcttgctagcatgttctcgcagcctttaatgtttaaatttcagaccgtgttcgcttctttggcactcactatgttgtcttgtatgcctacattttatgccttcaatttgcatccacaatgaaactcaatttactcc

SEQ ID NO: 256932 - DNA, 308 bp, Glycine max
gatctggcagcagaagaacaagtagttgagaactaagaaggagaagcaaatggcttcctcaatgatctcttccccagctgttaccactgtcaaccgtgccggtgccggcatggttgctccattcactggcctcaagtccatggctggcttccccaccaggaagaccaacaatgacattacctccattgctagcaacggtggaagagtgcaatgcatgcaggtgtggccaccagttggcaagaagaagtttgagactctttcctacctgccagaccttgatgatgcacaattggcaaagggaagtagaa

SEQ ID NO: 256933 - DNA, 360 bp, Glycine max
agggaagagtgcaagagtttgttgtgagctataagctagtttatcgtgaggagaatatgaagttgtttgttttctttgttgctgcagtagttttggtagcatggccatgccatggcgcaggctaccaaaggttccctctccgaatgaaaactggctatggtgagcgttcttcggaggtaaaatgcgcaagttttaggcttgctgtggaagcacacaacatccgagcctttaaaaccattcctgaagagtgcgttgaaccaacaaaggactacattaatggcgaacaatttagatcagactcttaaacagttaaccaaccagcctttctttatgctagtgaacgcgaagtcccttacaacg

SEQ ID NO: 256934 - DNA, 432 bp, Glycine max
ggcacaagtgagtttgttgatcgagataactagaaacagtgtgatgaaaatgaaggtccttgttttcttcgttgctacaattttggtagcatggcaatgccatgcgtacgatatgttccctctccgaatgaacactggctatggtgcccgtactccggaggtgaaatgcgcaagttggaggcttgctgtggaagcacacaacatctttggctttgagaccattcctgaagagtgcgttgaagcaacaaaggaatacatccatggcgaacaatatagatcagactccaaaacagttaaccaacaagcttacttttatgccagagacctcgaagtccatcccaaggacacatttgtgttcagtatagatggcaccgtactctctaatattccatactacaaaaaacatggatatggggtggagaaatttaactc

SEQ ID NO: 256935 - DNA, 399 bp, Glycine max
gattatatttgagttcaaacaaatcaaagccatggccacctccaacttctctattgttctctccgtctccctagccttctttgtggtgctacttaccaaggcacactcgaccgataccgtttccttcaccttcaacaagttcaacccagtccaaccaaacattatgctccaaaaagatgctagtatctcatcctctggggtgttacaactcaccaaagttggcagcaacggcgtgcccacctacggatctctcagtcgtgccctttacgctgccccaatccagatttgggacagcgaaaccggcaaggtaaccagctgggctacatcctttaaattcaacatcttcgcacccaacagatcaaactcagctgacgggcttgccttcttattggcacccgt

SEQ ID NO: 256936 - DNA, 406 bp, Glycine max
gagaaagagaagcattagcaaaagcaagaagaactagtctaagcagaaatggcctcttcagtgatggcatctgtggccctcaaacctgcccctttcactgttgagaagtcctcagttagaggccttccctccctctcaaggaactcctcttcattcagagttgtggccagtggtggcaagaagatcaagactgacaagccttatggaattaatggtggcatggctttgagggaaggagttgatgcatctggcaggaaaggaaagggaaagggcgtttaccagtttgtagacaaatacggtgctaatgtcgatggttacagtcctatctacgacaccaaggactggtctccaaccggtgatgtctacgctggcggtacgactggcttggctatctgggctgtgactc

SEQ ID NO: 256937 - DNA, 365 bp, Glycine max
gacaccaacaccaaaacaaacccactaagatggcttcctttgtatccttcctagtgctgcttcttgcagcccttatcctcatgcctcaagggcttgctacttactacaaaccaattaagaagccaccagtgtacaagcctccagtgtacaagccaccagtgtacaaaccaccggtttataagccaaaaccaccggtatacaagccgaaaccaccggtttacaagccaccatataggaagccaccatacaagaaaccaccttatggaaagtaccctccagtagaggacaacacccatgcctaaagcaagcaatgaggtctattatctacttaataaataagaggaactgctttgtgttttctagca

SEQ ID NO: 256938 - DNA, 354 bp, Glycine max
gaagaagaagaaggagcatggccatgagcatggccatgacagcagcagcagcagtgacagtgattaaactgctgcatcacctatatatttaaaaggtttatgggaccatagtagcgagggctgtgccttaatttctctctctctctctctctctctctctctctctctctctctttttcctttttccctatcttgtgatctatttatgagtgagaaaaacaaaagtgagaaattgtgcgtgtatctggttgctaattcgagtgctattaatctgtggtttggttggtttgtaaccccgctacttgggttatgtttgattgtatattatcctagagaaataaaaattttaaatta

SEQ ID NO: 256939 - DNA, 420 bp, Glycine max
gaaggtgcaagagtttgttgtgagctataagctagtttatcgtgaggagaatatgaagttgcttgttttctttgttgctgcagtagttttggtagcatggccatgccatggcgcaggctaccaaaggttccctctccgaatgaaaactggctatggtgagcgttcttcggaggtaaaatgcgcaagttttaggcttgctgtggaagcacacaacatccgagcctttaaaaccattcctgaagagtgcgttgaaccaacaaaggactacattaatggcgaacaatttagatcagactctaaaacagttaaccaacaagctttcttttatgctagtgaacgcgaagtccatcacaacgacatatttatattcggcatagataacaccgtactctctaatatcccatactatggaaaacatgg

SEQ ID NO: 256940 - DNA, 408 bp, Glycine max
gacacatactcatacactgcacactctctctacttaaacttcagcctttgcatatctctctctcttcatcattgtgctctagtaatcacactagtagtcagtagcagtagtacttgtacccataacataacaaccatggctaatgtgtcccttctccttttccttttgttcttgtctctctcatcaggagggaatttgatcatggctaatgggcagaaaacttggtgtgtggcaaagccttcatcagatcaagcaacccttttggccaacctcaattatgcctgttctcaagttgattgcaggattcttcagaaaggatgcccctgctcttaccctgacaatctcatgaaccatgcttccatagccatgaatctctattacccaatccagggaaaaaaccactggaat

SEQ ID NO: 256941 - DNA, 122 bp, Glycine max
aaagtgcaagagtttgttgtgagctataagctagtttatcgtgaggagaatatgaagttgttaggtttctttgttgctgcagtaattatggtatcatggccatgccagtgcgcatgctacca

SEQ ID NO: 256942 - DNA, 262 bp, Glycine max
gacacagagttgcaagagaaagataaaagaagatggcgactcttgattccgacgtgcctatggttcccgccggcgagccctcgagcagcgccggtccttcttccaagaagcccaagcgcttcgagatcaagaagtggaacgccgtcgctctctgggcttgggacatcgttgtcgataactgtgctatctgccggaaccacatcatggatctctgcatcgagtgccaagccaaccaggctagcgccactagcgaggaatgcac

SEQ ID NO: 256943 - DNA, 317 bp, Glycine max
taatttgggaattattgctcccatcgccattggtttcattgtcggcgctaacattttgttgggtggggccttctctggagcggccatgaaccccgctgtgacatttgggcctgctgtcgtgagctggacctggaccaaccactggatctactgggccgggcctctcatcggtggtggaatcgctggccttgtttacgaggttgtctttatcagccacacccacgagcagcttcccaccactgactactagagggggggaaatgaaaataaaaaaaaaaaaaattgtgtattattgaatttctctggaatcttcttct

SEQ ID NO: 256944 - DNA, 227 bp, Glycine max
ggcggcgcgtagctgatcagtctgcttattgcgattaccgcacacccccatcacgcatcgtgaacgttgcgaacacaaaggatacacacctggctagtgaagactgcaggaagcacacccgtgaccacgttacccagtacaaaagagagcatgatagcgttcgcgcccatggaaaacgccgttgcgatcgcaaaccatatggctatggggggcaaactaaccccgtc

SEQ ID NO: 256945 - DNA, 378 bp, Glycine max
ggaagcttcaataagtaagtatcaatggcttccgaagaatcccagaacaagccccccagcgagcagtccactaccgaactcatcacgagcgcgaagctggtggcggaggcggcgcagtcggctctgaagagcgacagcgacatagtggacaaggccaaggtggctgacgctgccggcgatcttctcgacgcggcggggaagtatggaaaacttgatgacaaacaaggcatagggcaatatgttgacaaggctgctgattatctgcataattaccagggtgataataccactgctccttcacagcctgcagagtctaaaggtgaagaaagtggtggtgggttaggtggtcttgcaaacttggctggaggcttcttcaaa

SEQ ID NO: 256946 - DNA, 356 bp, Glycine max
gaccatagcaagtagcaaggagactagttctgtattcagattacattgcaaaaatggcatcattcaccatgacagcttctatctttggctgcccagctgtcaccaaacggtcggcagtggctgcgcagaggagattactcgtagtgagtgctgccaaagctgaaggggaaaaggtcagttatgacaacaatgatagcaatggaaggaggaacttgatgttcgctgtggctgctgctgctgttttctctgttgctgggatggcagtggcagatgagcctaaaccaggaacctcagaagccaagaaaaagtatgccccggtttgtgtcaccaatcctacagctagcatttgtcgcaat

SEQ ID NO: 256947 - DNA, 390 bp, Glycine max
gatatctggcagcagaagaacaagtagttgagaactaagaaggagaagcaaatggcttcctcaatgatcccttccccagctgttaccactgtcaaccgtgccggtgccggcatggttgctccattcactggcctcaagtccatggctggcttccccaccaggaagaccaacaatgacattacctccattgctagcaacggtggaagagtgcaatgcatgcaggtgtggccaccagttggcaagaagaagtttgagactctttcctacctgccagaccttgatgatgcacaattggcaaaggaagtagaataccttcttaggaagggatggattccttgcttggaattcgagttggagcacggtttcgtgtaccgtgagcacaacatgtca

SEQ ID NO: 256948 - DNA, 406 bp, Glycine max
ggcacaaatgagtttgttgatcgagataactagaaacagtgtgatgaaaatgaaggtccttgttttcttcgttgctacaattttggtagcatggcaatgccatgcgtacgatatgttccctctccgaatgaacactggctatggtgcccgtactccggaggtgaaatgcgcaagttggaggcttgctgtggaagcacacaacatctttggctttgagaccattcctgaagagtgcgttgaagcaacaaaggaatacatccatggcgaacaatatagatcagactccaaaacagttaaccaacaagcttacttttatgccagagacctcgaagtccatcccaaggacacatttgtgttcagtatagatggcaccgtactctctaatattccatactacaaaaaacat

SEQ ID NO: 256949 - DNA, 398 bp, Glycine max
gacaccaacaccaaaacaaacccactaagatggcttcctttgtatccttcctagtgctgcttcttgcagcccttatcctcatgcctcaagggcttgctacttactacaaaccaattaagaagccaccagtgtacaagcctccagtgtacaagccaccagtgtacaaaccgccggtttataagccaaaaccaccggtttacaagccgaaaccaccggtttacaagccaccatataagaagccaccatacaagaaaccaccttatggatagtaccctccagtagaggacaacacccatgcctaaagcaagcaatgaggtctattatctacttaataaataagaggaactgctttgtgttttctagcattgtgatttacaacttcgtagcaatgcatattc

SEQ ID NO: 256950 - DNA, 401 bp, Glycine max
gatccttaataagtcagaactttgtcacaactttttcccatcactttgtggaaagatattcattctaagggaaaaatgacagaggagcaatccaaaaaggtggctgagactgagagttttccctctaatcctgcacctgaacctgttgttgttccaaaggaggatgtggcagaggagaaatctgtaattccacaaccctctccctctcctgctgatgagtccaaagctcttgtcatagttgagaagactagtgaagttgctgaagagaaaccgattgaggggtctgtgaaccgagatgctgtgcttgcaagagttgcaaccgagaagaggctgccactaatcaaagcatgggaagaaagtgaaaagtccaaagcagataacaagtcttacaaaaagctttc

SEQ ID NO: 256951 - DNA, 241 bp, Glycine max
actgcgctgacaagactaactgcaccaagggaaacagctatggtgttatagtagagactgagaagagctacatcgagactgttgacatggatgttccagcagctgagcatgatgggaagtgcaagtgtggcgctaactgcacttgcacggactgcacttgtggccattaaggaatatgtatgaaaatgtaattgccatgtgtgtggcaatacaaatctccaaataatgtaatcttcgtatg

SEQ ID NO: 256952 - DNA, 428 bp, Glycine max
ggttttcatctgcggaaactcctccgttctcaaaaccctaacccgacgccaccattcatccgatccaatgagttcgagaggagccagcgcgctgctatctcgagccagcaggattcgctcgaagcttcaaacggcgctggaagccaccgttttggaggtggacgacgtgtcgtaccagcacgcgggccacgccgccgtgaagggaagttccgacaaagaaacccacttcaacgtgaagatcgtatcgcccaagttcgagggccagagcctcgtcaaacgacaccgtctcgtctacgacctcctcgccgaggagctccagagcggcctccacgccctctctatcgtcgccaaaacgctccacgaaacaaaccctaataagtgacgcgtcgggagtgtcaaagttcgaggcttttccgcctttcattcaa

SEQ ID NO: 256953 - DNA, 355 bp, Glycine max
aggggggcacaagtgagtttgttgatcgagataactagaaacagtgtgatgaaaatgaaagtccttgttttcttcgttgctacaattttggtagcatggcaatgccatgcgtacgatatgttccctctccgaatgaacactggctatggtgcccgtactccggaagtgaaatgcgcaagttggaggcttgctgtggaagcacacaacatctttggctgtgagaccattcctgaagagtgcgttgaagcaacaaatgaatacatccatggcgaacaatatagatcagactccaaaacagttaaccaacaagcgtacttttatgccagagacctcgaagtgcatcccaagggacaca

SEQ ID NO: 256954 - DNA, 351 bp, Glycine max
gggttgggggataaatggagggatacacatcacattttctcaaagtaatttattaattaataaataaatggcggcggcggcggcagtgacggtgctactcccacctaggattccgaccgccaccaacgttacccgctgctctgctttgccttctctgcctcctcgcggcaccaacactaaaaccactttgctcttatcttccctcaaccacttctcagtgtcccgaaaatcttctctgcttcagaccagagcttcttcagaggaatcatcctcagtagatgccaatgaggtgttcacagatttgaaggaaaagtgggatgctctttgaaacaagtccacagtactttttta

SEQ ID NO: 256955 - DNA, 414 bp, Glycine max
  unsure (1)..(414): unsure at all n locations
gacaagtgagtttgttgatcgagataactagaaacagtgtgatgaaaatgaaggtccttgttttcttcgttgctacaattttggtagcatggcaatgccatgcgtacgatatgttccctctccgaatgaacactggctatggtgcccgtactccggaggtgaaatgcgcaagttggaggcttgctgtggaagcacacaacatctttggctttgagaccattcctgaagagtgcgttgaagcaacaaaggaatacatccatggcgaacaatatagatcaggctccaaaacagttaaccaacaagcttacttttatgccagagacctcgaagtccatcccaaggacacatttgtgttcagtatagatggcaccgtactctctaatattccatactacanaaaacatggatatgggg

SEQ ID NO: 256956 - DNA, 383 bp, Glycine max
gaactacctttgaatttctctctcttctgctctcactctcactctctctcacttggggttgaagatgagaatttgtggagcagcaatcagcagcagctacaccaccacgtccaattcccttttagtgtttgcttcctcttccctctccagtcctgcaaaaaccaagttcctgccctcactttctagattttctgtcaagcgtccgtacttcctttcccaaacttatccgcgcattgctgtgaacaagccctccatgaacctgttgaacagactcgggtttggcagcgcaagagcaacagagaacatggattcatccattcctcagggtccagatgatgacataccagcaccaggccagcagtttgccgagtttggtgctggct

SEQ ID NO: 256957 - DNA, 371 bp, Glycine max
gagatcccgtcgtcgcaggcgcagagtagagcagcacagaagagggaaaacggcaccgccgccgtagaagaaaacaaccatggtgcacgtctccttttacaggaactatgggaagacattcaagaagccgcgtcgtccgtacgagaaggagcgtctcgacgcggagttgaagctggttggtgagtacgggcttcggtgcaagagagagctgtggagggtgcagtacgcgctcagccgcatccgcaacaacgcgcggaacctcctcaccctcgacgagaagaacccgcgccggatcttcgagggagaggcgctgctccgaaggatgttccgttacggtctcctcgatgagacacagaacaagcttgattacg

SEQ ID NO: 256958 - DNA, 158 bp, Glycine max
tcaaacgaagaaaggcttatggtggatacctaggcacccagagacgaggaagggcgtagtaagcgacgaaatgcttcggggagttgaaaataagcgtagatccggggattcccgatataggtcaacctttcgaactgctgctgaatccacgggcaggc

SEQ ID NO: 256959 - DNA, 335 bp, Glycine max
agggcacaagtgagtctgttgatcgagataactagaaacagtgtgatgaaaatgaaggtccttggtttcttcgttgctacaattttggtagcatggcaatgccatgcgtacgatatgttccctctccgaatgaacactggctatggtgcccgtactccggacgtgaaatgcgcaagttggacgcttgctgtggaagcacacaacatctttggctttgagaccattcctgaagagtgcgttgaatccacaaaagaatacatccatggcgaacaatatagatcagacttcaataacagctaacaacaggcttacttttatgccagagacctcgaagt

SEQ ID NO: 256960 - DNA, 305 bp, Glycine max
ggcaagatgggaaagcacagtttgttttcattgggtgctgatcggaacaaacagggaatagaagagaggagaagatgggtttcataatggaatttgcggagaacttggtattaaagttgatggaagatccgaaggaaagggatcggaggttcatggagcacgtttatagagtgaaggacaggtgcgagaagacgaatgagatgtggagctaccctatgcgaccctatgggttttggacattcgaacgccacaattctcagcttgcttgggatgcacagattagccaagtggccgggaggagggac

SEQ ID NO: 256961 - DNA, 375 bp, Glycine max
gacttcaaaacactcataacacaaagcacaaagcaaagctcatccttgagttaaaaaatggcagcagcttcttccatggctctctcatccccatccttggctggcaaggccgtgaagctgggcccatcagccccagaagtgggaagggtgagcatgaggaagaccgtcaccaagcaggtctcctcaggaagcccatggtacggcccagaccgagtcaagtacttgggcccattctctggcgagcccccgtcctacctaaccggtgagttcccaggcgactacggctgggacactgctgggctttccgcagacccagaaaccttcgccaagaaccgtgaactcgaagtgatccactccaggtgggccatgctcgga

SEQ ID NO: 256962 - DNA, 399 bp, Glycine max
ggttctagtgtgtgattgtttgttgttgtaactcgttcttcttcttttgttgttctgtgtttgtgtttgttttttctctcacctgaaaatgtcttgctgcggtggtaactgtggttgcggaagctcctgcaagtgcggcaacggctgcggaggctgcaagatgtacccagacttgagctacactgagtcaaccaccaccgataccttggtcatgggagtggcacctgttaaggctcaatttgagggtgctgaaatgggtgtgcccgctgagaacgatggctgcaaatgtggaccaaactgctcctgcaacccctgcacttgcaagtgaggtgttgggagagcaagcttcaagcagagatagccccttattaggaaataatgataaactattaatgtgta

SEQ ID NO: 256963 - DNA, 396 bp, Glycine max
taatttgggaattattgctcccatcgccattggtttcattgtcggcgctaacattttgttgggtggggccttctctggagcggccatgaaccccgctgtgacatttgggcctgctgtcgtgagctggacctggaccaaccactggatctactgggccgggcctctcatcggtggtggaatcgctggccttgtttacgaggttgtctttatcagccacacccacgagcagcttcccaccactgactactagagggggggaaatgaaaataaaaaaaaaaattgtgtattattgaatttctctggaatcttcttctgtgtatgggtttccttccttgtgttttcttcctaattcactttcgagggttgtacttgttccttttcgtttaaatccttgga

SEQ ID NO: 256964 - DNA, 389 bp, Glycine max
gagaagaacgagtagttgagaactaagaaggagaagcaaatggcttcctcaatgatctcttccccagctgttaccactgtcaaccgtgccggtgccggcatggttgctccattcactggcctcaagtccatggctggcttccccaccaggaagaccaacaatgacattacctccattgctagcaacggtggaagagtgcaatgcatgcaggtgtggccaccagttggcaagaagaagtttgagactctttcctacctgccagaccttgatgatgcacaattggcaaaggaagtagaataccttcttaggaagggatggattccttgcttggaattcgagttggagcacggtttcgtgtaccgtgagcacaacaggtcaccaggatacta

SEQ ID NO: 256965 - DNA, 339 bp, Glycine max
ggttctagtgtgtgattgtttgttgttgtaactcgttcttcttcttttgttgttctgtgtttgtgtttgttttttctctcacctgaaaatgtcttgctgcggtggtaactgtggttgcggaagctcctgcaagtgcggcaacggctgcggaggttgcaagatgtacccagacttgagctacactgagtcaaccaccaccgagaccttggtcatgggagtggcacctgttaaggctcaatttgagggtgctgaaatgggtgtgcccgctgagaacgatggctgcaaatgtggaccaaactgctcctgcaacccctgcacttgcaagtgaggtgttgggag

SEQ ID NO: 256966 - DNA, 104 bp, Glycine max
cgtagtaagcgacgaaatgcttcggggagttgaaaataagcgtagatccggggattcccgatataggtcaacctttcgaactgctgctgaatccacgggcagac

SEQ ID NO: 256967 - DNA, 322 bp, Glycine max
aaaccaacccccttagaagggcttccttggattccttccaagggctgcttcttgcagcccttatcctcatgcctaaagggcttgctacttactacaaaccaattaagaagccaccagtgtacaagccttcagtgtacaagccaccagtgtacaaaccaccggtttataagccaaaaccaccggtttacaagccgaaaccaccggtttacaagccaccatataagaagccaccatacaagaaaccaccttatggaaagtaccctccagtagaggacaacacccatgcctaaagcaagcaatgaggtctattatctacttaata

SEQ ID NO: 256968 - DNA, 341 bp, Glycine max
atcttttcaaaaatggattcctattcgaagggtgcataaccgcatggataagctcacactaacccgtcaatttgggatccaattcggttccttaggaggtatcgggaaggaattttggaatgtgataatatcgattcatacagatacagaagaaagggttctctattgattcaaacgctctacctacgagatagggatagagaaagaggaaaaaaccgaggatttcacatagtacttttggtcgaaaaatcgatctgatttttttcgtacttttcgctcaatgatgaaatgggtcagattctacaggaccaaaccttgtgggagttaaggaatgatgggag

SEQ ID NO: 256969 - DNA, 329 bp, Glycine max
gcagcatgttagttctaggaaccctagaattgagaaatgtagttctatgttagataatcttgtgggctcacttgatcttcctaaggttaaaaattctgccaaaggaaaggttttgatgcaagctatgtatggagttaaggtggagactgtatttatttgcagggtgtttactgcagcattctctggctcgtcaaagaagttatcagacttgaatgtggccgacatacattcatgggctccagattttagaaggttgcaggatcttgtaaatgaggaaattagagttagattttctggtggtaaatttactgtattgaatgagttggaag

SEQ ID NO: 256970 - DNA, 404 bp, Glycine max
gactgctattcctcttaagcttgctactgagtttccacactgcataccttaggtcttccgaattcgaagttaatttgcaagatggctaaggaaaaggctcagatcaacattgtggtggttggtcatgtggaccctgaggaggcaaccaccattaacgagctgaagaagcctgttgtggagaaagaagctccagggcatgccatatgagggcatgcacgtacggcctcggaggggaaccagaaaattatgttaacaaaataatctggaaccctaatgtatcagtgtcatcatcagtgtgtagtttaagctagctttgctatggttacgttctttgagatgagagtcttgatgaacagtaccattctgatgtattgctttcctttgaagttaatgcatgcttctta

SEQ ID NO: 256971 - DNA, 347 bp, Glycine max
ggtggaaaatttgcagagatcaaagaacagaagatggcacaaacgctggcaatgcccgtggcaccttcgctcgctatcatctccaattctcgcctctccaagacactctccgttcccgttctcaacaacccaaagtttcaagggttaagcatcaagtgcgttcgtgttggaggtgtggagattccgaacaacaagcgaatcgagtactcgctgcagtacattcatggagttggcaggaccagagcaaaacagattctgtgtgatatccaaatggataacaaaatcacgaaggaactcactgaggaggagctcatcactctcagggacgaagtctcaaatatatgatt

SEQ ID NO: 256972 - DNA, 390 bp, Glycine max
gctttttggaaattccttttcctcgtgaacgatcggctcactctcgctctccctagatcgcgcactttcgctctccctcgtcgcgtgctcgttctcgctatcgtgctctcgcgctctctcggatctaactctgtgtagtctgtaatcatgtcaggcaagtatatcgtttctgctattcttggatcatttggagttgcatgggtttgtgattattatgtttcagaaaaaaagctatttggaggtactacccctggcactattacaaacaatgagtgggcagaagagaccgacaaaaaattacaggcatggcctcgtactgcccgtccaccagtggtcatgaatcccataagtcgccaaaatttcattgtgaagtctcgccctgagtaatat

SEQ ID NO: 256973 - DNA, 334 bp, Glycine max
gaagaagaagaaggagcatggccatgagcatggccatgacagcagcagcagcagtgacagtgattaaactgctgcatcacctatatatttaaaaggtttatgggaccatagtagcgagggctgtgccttaatttctctctctctctctctctctctctctctctctctctctttttcctttttccctatcttgtgatctatttatgagtgagaaaaacaaaagtgagaaattgtgcgtgtatctggttgctaattcgagtgctattagtctgtggtttggctggtttgtaaccccgctacttgggttatgtttgattgtatattatcctagaga

SEQ ID NO: 256974 - DNA, 373 bp, Glycine max
gggaaggtccaggagtttgttgtgagctataagctagtttatcgtgaggagaatatgaagttgtttgttttctttgttgctgcagtagttttggtagcatggccatgccatggcgcatgctaccaaaggttccctctccgaatgaaaactggctatggtgagcgttcttcggaggtaaaatgcgcaagttttaggcttgctgtggaagcacacaacatccgagcctttaaaaccattcctgaagagtgcgttgaaccaacaaaggactacattaatggcgaacaatttagatcagactctaaaacagttaaccaacaagctttcttttatgctagtgaacgcgaagtccatcacaacgacatatttatattcg

SEQ ID NO: 256975 - DNA, 346 bp, Glycine max
gaggagtctttaccaaacgaaccgtagataacgtcgcgtttggttgttaagttgttccctttcaaccatggtggagaacaatcccttcgaggatatctttagggtcgaaaaattaaaccccgatgacaaaaaattattcgataaagtcactcgcattgaagcaagaagtgaaaagtttgacatgtttatgcacctggacattaattctgaggtatatccattaaaggtgggtcagaagtttgctcttgtgcttgtttcatcgcttaatcctgatggaacaccagacactggctattatacccagatcagtcgacaatcactgggcaacaatttttgatatgtcatg

SEQ ID NO: 256976 - DNA, 287 bp, Glycine max
  unsure (1)..(287): unsure at all n locations
gacaatagagactagagaagagagaggtgttggtgccctaatcgtgagaagaaaggaaagggaaaagaggaaaatggtgtgcataaggaaggcgacggtgaaggaccttctggcgatgcaggcgtgcaacctgttctgcctccctgagaactaccagatgaagtactacctctatcacatcctctcctggccccagctcctctacgtcgccgaagactacaacggccgcatcgtcggctacgtcctcgccaagatggtggaagaaaccaccgactgccacggncaca

SEQ ID NO: 256977 - DNA, 327 bp, Glycine max
ggttctagtgtgtgattgtttgttgttgtaactcgttcttcttcttttgttgttctgtgtttgagtttgttttttctctcacctgaaaatgtcttgctgcggtggtaactgtggttgcggaagctcctgcaagtgcggcaacggctgcggaggctgcaagatgtacccagacttgagctacactgagtcaaccaccaccgagaccttggtcatgggagtggcacctgttaaggctcaatttgagggtgctgaaatgggtgtgcccgctgagaacgatggctgcaaatgtggaccaaactgctgctgcaacccctgcacttgcaagtg

SEQ ID NO: 256978 - DNA, 400 bp, Glycine max
ggtaagtagcctagtcatactctgtatcatttcatttcgataatcatccatagttactgaagaaaatggcaaccatctccgctgctatcacaaccccatcgatcacccgcgcatgtctagtgcaaaaacgttctcttgggttctcatctcccgttcttggtctgccagcaatgggtaaggtgggaagagtgagttgctccatggaggaaaagccttcttctgtgaaggaaagcagctcaagcatgttggggatgggggcatctttgatggcagcggccagcgccgcagccatgtcaggcccagccatggccttggtggatgagagacttagcactgaaggaaccgggctacccttcggcctcagcaacaaccttctcggttggatcctgttcggcgtctt

SEQ ID NO: 256979 - DNA, 353 bp, Glycine max
cattcctgagaagtacctggatgagaagaccatcttccaccttaacccttctggccgttttgtcattggtggccctcatggtgatgctggtctcactggaagaaagatcatcattgatacctatggtgggtggggtgctcatggtggaggtgccttttcaggaaaggaccctaccaaggttgacagaagtggtgcctatatcgtgaggcaggctgcaaagagtgttgtggcaaatggccttgccagaaggtgcattgtccaagtttcctatgccattggtgtccctgagcccttgtcagtgtttgtggacacttatggaactgggaagattcctgacaaggagattcttcaaa

SEQ ID NO: 256980 - DNA, 355 bp, Glycine max
caccaacatggacttgaccctttccccttcttcttcttcttcttctttagtaatctcgagaccttcttactcttcatcctcttccaccttgtccttcttggccaccaactcaattctctctaggaaagctagaatcagcaccagaagaagcaaggctctaacttgcaacgcattgttcggattgtgcgttcccgaactcgtcgttattgctggagttgctgtcctcgctttcggacctaagaatttcccccaagtgggtcgctccatcggcaaaaccattaagagcttccaacaggcagcaaaggagtttgagtccgagattaaaaaggaacctgattccacagaagagaaccct

SEQ ID NO: 256981 - DNA, 358 bp, Glycine max
caacataggtcatcgaaaggatctcgaagacccaccaacgcacgaaagccgggatctttcaaaaaatggattcctattcgaagggtgcataaccgcatggataagctcacactaacccgtcaatttgggatccaattcggttccttaagaagtatcgggaaggaattttggagtgtaataatatcgattcatacagatacagaagaaagggttctctattgattcaaacgctctacctacgagatagggatagagaaagaggaaaaaaaccgaggatttcacatagtacttttggtcgaaaaatcgatctgatttttttcgtacttttcgctcaatgatgaaatgggtcagattctac

SEQ ID NO: 256982 - DNA, 296 bp, Glycine max
gatatctggcggctgaagagcatgtcgttgagaactaagaacgcgaagcgcatggcttcctcaatgatctcttccccagctgttaccactgtcaaccgtgccggagcccgcatggttgctccattcactgacctcaagtccatggctgggttgcccaccaaaaagaccaacaatgacattaccttcattgctagcaacggcggaagagtgcaatgcatgcaggtgtggccaccatttggcaagaagaagtttgagactctttgctacctgccagaccttgatgatgcacatttggc

SEQ ID NO: 256983 - DNA, 381 bp, Glycine max
  unsure (1)..(381): unsure at all n locations
gacagcatatcaataatctattttatactatacgcacattttgataattatttttctagttgataagccatggctactcgaggaaagcttgaggttgacgttgatctcaagtctaacgcagacaagtactggcaaacccttaggaactccactgaaatattccccaaggccttccccaatgattacaaaagcattgaggttcttgagggtgatggcaaatcacctggttctatccgccacataagttatggtgaaggttcaccacttgtgaagtcatcctttgagaagattgaggctgttgatgaagaaaagaaggtagtgtcgtacactatcattgatggagaactcctncagcactacaaaacattcaagggagacatt

SEQ ID NO: 256984 - DNA, 320 bp, Glycine max
agggacaactgaacaagataagctatccatagcagccaaagaaatgaagagtaccttgttcgccctctttctactttgtgccctcacctcttacctaccttcagccaccgctggtgatgtggtcgacactgatggtaatcctgttgaaaatggaggcacatactttgtgttgccaactataatattaaacggcggtggaatagaatatgccacatttggaaatgaaacttgccctgtcactgttgcgcaatctcgcgatcagttctgcaagggctttccgataaccatttcatccccagcccgaatccgtcacatcagcg

SEQ ID NO: 256985 - DNA, 381 bp, Glycine max
gatctggcagcagaagaacaagtagttgagaactaagaaagagaagcaaatggcttcctcaatgatctcttccccaactgttaccactgcaaaccgtcccggtgccggcttggttgttcaattaattggcttaaattcattggttgctttcccaccctaaagacccaccatgacattaccttcattgctagcaacggtggaagagtgcaatgcatgccagtgtggccaccagttggcaagaagaagtttgagactctttcttacctgccagaccttgatgatgcacaattggcaaaggaagtagaataccttcttatgaagggatggattccttgcttggaattcgagttggagcacagtttcctgtaccgtgagcacaac

SEQ ID NO: 256986 - DNA, 347 bp, Glycine max
gaacgcagccaagaaaagaaaatcctcacccattttcttcgtagccaaacactctgaaattctcagttatgtcgtggcaagcgtatgtggatgatcacctactgtgtgaaatcgaaggtaaccacctcactcacgccgctatcatcggccaagacggaagcgtttgggctcagagcaccaacttccctcagttcaaacctgaggaaataactgccatcaataatgactttaatgagcctggatcacttgctccaactggattgtatatcggtggcaccaaatacatggtcatccagggtgagcctggtgctgccattcgagggaagaagggtcctggtggtgttact

SEQ ID NO: 256987 - DNA, 388 bp, Glycine max
  unsure (1)..(388): unsure at all n locations
gatctcacagcagggcaaaagaaagaaactgcaacttcctctgttttgctcccctgtttaggccttttcataagcttagaatgacacacaaggaattttccattgctctagtgactctcattgctgttctctttgtcaacatgaacatccaaggtgccactgctgactatggtagttggcagagtgctcacgccactttttatggcggcggtgatgcttctggcacaatgggtggagcatgtgggtatggaaatctgtatagccagngctatggaactgacactgtggctctaagcactgctttgttcaacaatggcttaagctgtggatcttgctatgaaatgagatgtgatgatgacccaagatggtgcaaacctggctccattac

SEQ ID NO: 256988 - DNA, 392 bp, Glycine max
ggcacaagtgagtttgtcgatcgagataactagaaacagtgtgatgaaaatgaaggtccttgttttcttcgttgctacaattttggtagcatggcaatgccatgcgtacgatatgttccctctccgaatgaacactggctatggtgcccgtactccggaggtgaaatgcgcaagttggaagcttgctgtggaagcacacaacatctttggctttgagaccattcctgaagagtgcgttgaagcaacaaaggaatacatccatggcgaacaatatagatcagactccaaaacagttaaccaacaagcttacttttatgccagagacctcgaagtccatcccaaggacacatttgtgttcagtatagatggcaccgtactctctaatattccat

SEQ ID NO: 256989 - DNA, 402 bp, Glycine max
gacttatctaaaagtagatggtccagattagtaccacaaaaatggagaaatagaataactgaatatcgtatagctcaaaataaagatttaaccaaatgcaattcatatgaaaaaagccaattaattctttacaaagaacaacaagtaaacgcattaaaaaaaaaaattagaaaacaatatagatacgatcttttatcctataattttatcaattatgcagataagaaagactcatatatttatggatatagatccctatttcaagtaaaaaaaaaccaagtgatttcttctaattacaacacgtataaaaaagaattattggatatcatagataatctctttatcaagaattatatatcggaagatgcgattctagatatggaaaaaaatatgtatagaaag

SEQ ID NO: 256990 - DNA, 405 bp, Glycine max
aggaacgccgtcgtcgggatgctgcaacggagtgaagagcctcaatgccgccgccaagaccaccgccgaccgccagacggcgtgcaactgcctcaagtcggccgccagccaaatctccggcttcaacgccaacaacgccgcctcgctccccggcaaatgcggagtctccatcccctacaagatcagcacctccaccaactgcgctaccatcaaggtttgaagagaaagtcatggacgcaggaaaccggaaactactcactagtatgtgagtagcattattaatattaagaataagatcgaaggtgatgagggctccacttatatgcccctctcctcttgtatgagagatttgcattggatagcttttaagtgtgttgcgttgttatttctctgtatgagttacac

SEQ ID NO: 256991 - DNA, 386 bp, Glycine max
agaaaaagataatagaaaaaaaaaaaaaagcgggcgatctaaacgatccatgttgacgatccaatgtttcctacgcgttcattctactatatagctacctaatagcgataccttggtcgaatttactgaacgtcgtgattgaaaaaaccgtgtgggaaaaccatttagttacccagcttaatatccttgtttcacatgctggtttagtcagctggaggcctagccaaaaggcccttaccaatagttgttcacaacagatgggcaatgtgaatggccattgggacgcgcattgtacccgggcattaagctcggtacgcgcagcgggtacgctcaacttgaccgctacatttggcagggtcctatcgctcgcttcctttgctttcttg

SEQ ID NO: 256992 - DNA, 396 bp, Glycine max
ggggtttcagagtggtggggcgtgcagaagagcgtcgcagttgtaaccctaatcagaagaagcgcagcttcaagcgagtgacagccaccagccatgggtcgtatgcacagccgcggtaagggtatatcctcttctgctttgccctacaaaaggacacctcctagctggctcaagatctcttcgcaagatgtcgaagaaaatgtatgcaagtttgcgaagaaaggtttgaccccgtctcagattggtgtcattctcagagattctcacggtattgctcaggtcaatagcgtcactggcagcaaaatccttcgcatcctcaaagctcacggacttgcgcctgaaattccagaggatctgtaccatttgattaagaaggcagtttcaattaggaagcat

SEQ ID NO: 256993 - DNA, 382 bp, Glycine max
gacacaactgaacaagagaagctatccatagcagccaaagaaatgaagagtaccttgttcgccctctttctactttgtgccctcacctcttacctaccttcagccaccgctggcgatgtggtcgacactgatggtaatcctgttgaaaatggaggcacatactttgtgttgccaactataatattaaacggcggtggaatagaatatgccacatttggaaatgaaacttgccctgtcactgttgcgcaatcccgcgatcagttctgcaagggctttccgataaccatttcatccccagcccgaatccgtcacatcagcgaaggccttagtttgaacattgggttcactttcgcatccccgtgttcccccgcttctgagtgga

SEQ ID NO: 256994 - DNA, 366 bp, Glycine max
gacagccattcctcttaagcttgctactgagtttccacactgcataccttaggtcttccgaattcgaagttaatttgcaagatggctgaggaaaaggctcagatcaacattgtggtggttggtcatgtggaccctgaggaggcaaccaccattaacgaactgaagaagcctgttgtggagaaagaagctccagggcatgccatatgagggcatgcacgtacggcctcggaggggaaccagaaaattatgttaacaaaataatctggaaccctaatgtatcagtgtcatcatcagtgtgtagtttaagctagctttgctatggttacgttctttgagatgagagtcttgatgaacagtaccattctg

SEQ ID NO: 256995 - DNA, 393 bp, Glycine max
gaaggtgcaagagtttgttgtgagctataagctagtttatcgtgaggagaatatgaagttgcttgttttctttgttgctgcagtagttttggtagcatggccatgccatggcgcaggctaccaaaggttccctgtccgaatgaaaactggctatggtgagcgttcttcggaggtaaaatgcgcacgttttacgcttgttgtcgaagcacacaacatccgagcctttaaaaccattcctgaagagtgcgttgaaccaacaaaggactacattaatggcgaacaatttagatcagactctaaaacagtgcaccaacaagctttcttttatgctagtgaacgcgaagtccatctcaacgacatatttatattcggcatagatcacaccgtactctc

SEQ ID NO: 256996 - DNA, 403 bp, Glycine max
acacacaagaagactcctcaatcatgcatagacatggccaccgtcacttctgcagcagtgtctattccctcattcactggcctcaaggcaagcgcaggcaaagtgagtgccgccgcagttaaagtctcagctccccaagccacaaggttctgcggcatcaaggcttccctcaaagacgttggagtcgctgttgtggccactgctgcgagcgcagttctagctagcaacgccatggccattgaagtgttactgggcactgatgacgggtctctggttttctctcccaactctttctccgtggcccctggggaaaagatcgtgttcaagaacaacgcaggtttcccgcacaacgttgtgttcgacgaggacgagattcctagcggcgtggatgcagggaaaatct

SEQ ID NO: 256997 - DNA, 403 bp, Glycine max
ggaagaaggaaagaaggatgagcgtgaagttgaattgcgtgggtggtggcgagactcacaacgtcttcgtttaccgtagtctgttaaccgatgagggtgtacataccctattgaagcgcgtaccttcaaccgcacccgccattctttacgactatcacaggtttcagatcaaaggtcccgtttatcccgctattatgcccgtacagaacatcaacgttaatggcagggtgcttcttgatatctccggagtagaactagatatgttacatgagttcgaggatgatgagtatactacaactgatgttgacgttgccttgaatgacaagtctgaagagttacaagtgtgcgcttatgtttggagcaacccatatgatcctaacttagatgcatagtgggattttga

SEQ ID NO: 256998 - DNA, 381 bp, Glycine max
ggcagaaaaagaaaaaagcgatcatagtttcacgtcggccttatccagtttagggtttcggttctctaccctatctttcacgtatcgaaaccttaaatttacgatcaggtctgagcaatctggttggtagaacctttggtcttagtgagtcaagttttatgtctgaattagacgatcaaattcctactgccttcgatccttttgctgatgcaaatgctgatgactcgggtgctgggtcaaaggagtatgtgcatattcgtgtacagcagcgaaatggtaggaaaagcctgacaaccgttcagggattgaaaaaggaattcagctataacaagatacttaaagacgtcaagaaagagttctgttgcaatggaacagttgttc

SEQ ID NO: 256999 - DNA, 368 bp, Glycine max
  unsure (1)..(368): unsure at all n locations
cccacgcgtccgacgacagaaggggacactctctctcaccaaagccttcctagaacgaagaagaaagaagagcaattttcgctcaccaaagaagaagaagcaaacaatggccgatcaacttaccgatgaacagatctccgagttcaaggaagccttcagcttgttcgacaaggacggcgatggttgcatcacaaccaaggagcttggaactgttatgcgttcattggggcaaaacccaactgaggcagagctccaggacatgatcaatgaagtggatgctgatgggaatggtaccattgacttccctgagttcctaaatctcatggccaggaagatgaaggacactgattctgangaggagctgaaag

SEQ ID NO: 257000 - DNA, 370 bp, Glycine max
gaataaaaaaatcaaataatgattaataaaaagaaaaaagtggaaatcaaatagaaatttataaaatctatgatcctagagtagttccctagacaaaatagaagtaagttcacaaacaagattcaagaataagattctctgatgaaaggagagaaatatgtctgaggatccgctgggtataaggagtgaaagaggggatcatttgtttcttgaacagttcttttaaaaaaaattttctattggatttttgagtcataggagattttatgatttatgacttggaggatttttaagaatagaaaggaataactacattgagttcatcgatttgccctagatatcaatagactcataaattattttttattcg

SEQ ID NO: 257001 - DNA, 371 bp, Glycine max
gacagctattcctcttaagcttgctactgagtttccacactgcataccttaggtcttccgaattcgaagttaatttgcaagatggctaaggaaaaggctcagatcaacattgtggtggttggtcatgtggaccctgaggaggcaaccaccattaacgagctgaagaagcctgttgtggagaaagaagctccagggcatgccatatgagggcatgcacgtacggcctcggaggggaaccagaaaattatgttaacaaaataatctggaaccctaatgtatcagtgtcatcatcagtgtgtagtttaagctagctttgctatggttacgttctttgagatgagagtcttgatgaacagtaccattctgatgta

SEQ ID NO: 257002 - DNA, 325 bp, Glycine max
ctgtgtctcaacacggcacatctagacatatggagggggaaaacaagattgctttaaccatatattaggatgcactctctatcagagcaacttaccgatccacagacttacgacttcactgaagccttactcttatcatacatgctcgactttcggtgcatcacatccaaggaactttgaactgttatacgttcattcggacaaaccccaactgaagcatatctccacgacatcatcaatccactggattctgatgagaatcgtacgctagacttcactgagttgctaactctcatggccattacgatgaatgacactgattctg

SEQ ID NO: 257003 - DNA, 426 bp, Glycine max
acgacagaaggggagcgccaatgtttttttcagaggagtttcatcttgtaatcaaaagagtttatcttatagtaagaaatcgatgtcttactccattttaaggaacaaaacaagagaacaatagcctgacaaagggtttagccataaaatcgaatccatcattgatttgagatattgataaggtgaatactcatttctcgtcaatgctaggcataatgcgggtatagggacctaaaaaagattatcttttcttcctatcttatgaactttaaggtgtatgaagtgtcatttcctatcttagattttaattctagtaggtagataaagagtccatttaacttaagttgatctaggccagaagcagacctacgtcaagataatccttctttgaaacactttggtagtgctcttagattgtaatccaaa

SEQ ID NO: 257004 - DNA, 405 bp, Glycine max
gaccacctctcatccttgctcttgtttgttcctttgatggtttctttcttgatcatgtcgcttgttggtaaaattagtactgaaattggggttcatgcaactgctgcaaagtggttcaacctctttgcaacgcagctccatcatgttcaaaaccttactgatagagtgcatgaaaccaagctgcatcatggtgatgactggcatcacaacgagtcgatcaaacactggacttgtacaatagatggtaagattacaacatgtctggagagtattgaatccgttgatgaaccgaacataacaatcacctacaagctcttcggaggagatattggtcataagtataaagtctttaagctcatttttcaagctattgacaccgatcatgggggtgttattatcaaatgg

SEQ ID NO: 257005 - DNA, 380 bp, Glycine max
gactcaccacttcaaaacacggcataacacaaagcacaaagcagagctcatccttgagttaaaaaatggcagcagcttcttccatggctctctcatccccatccttggctggcaaggccgtgaagctgggcccatcagccccagaagtgggaagggtgaccatgaggaagaccgtaaccaagcaggtctcctcaggaagcccatggtccggcccagaccgagtcaagtacttgggcccattctctggcgagcccccgtcctacctaaccgggaagttccaaggcaattacggttggaaacctgttggcctttccgaatacccagaaaccttggccaagaaccgtgaactcgaagtgatccactccaggtgggccatgctc

SEQ ID NO: 257006 - DNA, 393 bp, Glycine max
gacagacacgcacgctgcttgattcaaaagtagtacatacaagattcttcgctcatagggtttatactccaacatcatctgtttttccatggcgaccgaacccaaagcagtcactgaggacgtcaagatcgatctcttcgaagacgatgatgagtttgaagagtttgaaatcaatgaagagtgggatgacaaagaggaaggaaaagaagtgactcagcagtgggaggatgattgggatgatgatgatgttagtgatgatttctctctccagttgaaaagggagttggagagcaacactaataagaattaaatcacctgctagttattattgcttgatataacatgttatatgactggggtgtttaagctctatgaaggaaatgaaaattatgc

SEQ ID NO: 257007 - DNA, 391 bp, Glycine max
tgacacaacacaacacaaagagagagtttggggaagaaatcatcatggcttcagcagcatctgggtttgtgctgtctcttaatgttgcagcttccaccacaaactcaagggtggtcttgttcaacacaaagaacaacgcttctagacttcttgtgagggcttcagatgagcctgcagcggcggcacctgccaccgccacacccccagctgaagctgaagccaaaccaaaaccaccaccaattggtcccaagagaagtgctaaggtgaaaattcttaggaaggaattctactggtacaaaggcactggttcagtggttgctggtgatcaggaccccaacactcgctaccctgttgtggtccgattcaacaaagtcaactatgccaatgtatc

SEQ ID NO: 257008 - DNA, 373 bp, Glycine max
ggcatagcgtttttcattgtgcattattcaatggccaccacagcagctctatccggaaccatggtgagcacctccttcatgaggaagcaacctatgacgaccaagagcctaaagacattccccaacgctctttttggtctgaaaggtggacgaggtggtcgtgtaacttgcatggcctcgtacaaggtgaagctcataaccccagaaggagaagtggagtttgaatgcccagatgatgttttcattgttgacaaggctgaagaagaaggcattgaacttccctactcgtgcaaggctggttcttgcgtttcatgtgttaggaaaattgtgaaaggtgacgtggaccagtcagatggtagcttccttgatgatg

SEQ ID NO: 257009 - DNA, 387 bp, Glycine max
gaggcacgaagttgtattttggcatccccgtggcttcaagaagagaatctcaatggaggcccaggagctgaagcgcgtgctccagatgttcgaccgcaacggcgacgggagaataacgaagaaggagctgaacgactcgctggagaacctgggcatcttcatctctgacaaggacctgagccaaatgatccagaggatcgacgtcaacggcgacggttgcgtggacatggacgagtttggggagctgtatcagaccataatggacgagcgcgacaatgaggaggacatgagggaggccttcaacgtcttcgaccagaacgccgacagcttcatcaccgtcgacgagttgaggaccgtcttgtcctccctcggcttgaagcatggaag

SEQ ID NO: 257010 - DNA, 389 bp, Glycine max
gtttcacatgattagcctgacgcagtgacttggccaaacctataagtcgacggcatacgctgtctacttctttgtatcaacaacaacaatggcaacagccaataaaaccatatatacccatgacaccataaacaactcgctcgatcttgtcatgaatagtagaaaattcaacctcatttactatacggctatcaaatcacttaagatctacaaagggaaattgattatcatagctaacaactacccccatttgaagaaatcaataattgaatactatgctatgttagacaaggttggagttcatcattacaatgttaacaatgtaaatttgtgcacttcatgtgtaaaatattacagagtgtgctgccttaacattaatgatcctggtt

SEQ ID NO: 257011 - DNA, 353 bp, Glycine max
gataccaaaaacaaaacaagccaagtgaaagagagaagaaaagtcaaagacaatgtcagggatcattcacaagattgaggagacccttcatgtgggaggccacaagaaggaggaggagcacaagggtgagcagcaccatggtggagaatacaaaggggagcatcatggtgaacacagtactgaatacaaaggagagcatcatgttggtgagcacaagccggagcaccatggaggagaagagcacaaagaggggttcctagacaagatcaaggacaagatccacggcgaggagggtggcaccgctgagggcgagaagaagaagaagaagaaggagaagaagaagcatgaacatg

SEQ ID NO: 257012 - DNA, 389 bp, Glycine max
gagggtttggttattagggttttcgctcaccggtgtgcagtcgagcccccgaagaaaaagcgaaaatgccgtcgcacaagacattcagaatcaagaagaagttggcgaagaagatgaggcagaacaggcctatcccctactggatccgcatgaggaccgacaacaccatcaggtacaacgcgaagcgccgtcactggcgtcgcaccaagcttggattctgaggtgcttgctttgcctcggttctgtttatccaattaattagtgttttattttcttgagccaaaaacaatgctttggagattttaatattttgcattttgttccaagactatattgtgtaaggaacttattgtagttcagactaatggtggtgttggtcaccttttttt

SEQ ID NO: 257013 - DNA, 383 bp, Glycine max
  unsure (1)..(383): unsure at all n locations
aggaacgccgtcgtcgggatgctgcaacggagtgaagagcctcaatgccgccgccaagaccaccgtcgaccgccagacggcgtgcaactgcctcaagtcggccgccagccaaatctccggcttcaacgccaacaacgccgcctcgctccccggcaaatgcggagtctccatcccctacaagatcagcacctccaccaactgcgctaccatcaaggtttgaagagaaagtcatggacgcaggaaaccggaaactactcactagtatatgagtagcattattaatattaagaataagatcgagggtgatgagggctccacttatatgcccctctcctcttgtatgagagatttgcattggatagctntaagttgtgttgcgttgc

SEQ ID NO: 257014 - DNA, 361 bp, Glycine max
gtgaatcagcaccacattcacctgagctttttgtgaggattccaaagcatggcttcccttgcagcatccactgctgctgcttcccttggcatgtcagaaatgcttggaaaccccatcaacctcagtggtgccacaaggccagctccatctgcctctagccctgcctccttcaagactgtggctcttttctccaaaaagaaggctgcacctccaaaaaaagctgcagctgctgctcctgccaatgatgagcttgccaagtggtatggtcctgacagaaggatcttcttgcctgagggtctcttggaccgatctgagatcccagagtacttgaccggagaagtccccggagactatggttatg

SEQ ID NO: 257015 - DNA, 395 bp, Glycine max
  unsure (1)..(395): unsure at all n locations
ggcacaccaacaccaaaacaaacccactaagatggcttcctttgtatccttcctagtgctgcttcttgcagcccttatcctcatgcctcaagggcttgctacttactacaaaccaattaagaagccaccagtgtacaagcctccagtgtacaagccaccagtgtacaaaccaccggtttataagccaaaaccactggtttacaagccgaaaccaccggtttacaagccaccatataagaagccaccatacaagaaaccaccttatggaaagtaccctccagtagagggcaacacccatgcctaaagcaagcaatgaggtctattatctacttaataaataagaggaactgctttgngttttctagcattgtgatttacaacttcgtaacaatgca

SEQ ID NO: 257016 - DNA, 402 bp, Glycine max
gaccgtattccttacgctctctcactcacaaacacacactgaactaaaaaacatcaaaagagacatggctgagcaaaccttcatcatgatcaagcctgatggcgtccaaagaggccttattggcgagatcattagcagatttgagaagaaaggtttctacttgaaaggtttgaaacttgttactgtggaccgtccttttgctgagaagcactatgctgatttgtctgccaagcctttctttagtggtttggtggattacattatctctggccctgttgttgccatgatctgggagggcaagaatgttgttacaactggccgaaagattatcggagccacaaacccagctcaatctgagcctggaactatccgtggtgactttgccattgacattggaaggaa

SEQ ID NO: 257017 - DNA, 352 bp, Glycine max
ggcacaagtgagtttgttgatcgagataactagaaacagtgtgatgaaaatgaaggtccttgttttcttcgttgctacaattttggtagcatggcaatgccatgcgtacgatatgttccctctccgaatgaacactggctatggtgcccgtactccggaggtgaaatgcgcaagttggaggcttgctgtggaagcacacaacatctttggctttgagaccattcctgaagagtgcgttgaagcaacaaaggaatacatccatggcgaacaatatagatcagactccaaaacagttaaccaacaagcttacttttatgccagagacctcgaagtccatgccaaggacacattt

SEQ ID NO: 257018 - DNA, 94 bp, Glycine max
gaagaaagctgctagcagagggaagttctacacttttttgtttggattgatcgagtgtactttttcttttcgagattggcttggtgtgcagtgc

SEQ ID NO: 257019 - DNA, 394 bp, Glycine max
ggtgtctgctcactcgctcttctccgccacttctgaatctattgaatcaacaatcatgtcggacgaagagcaccatttcgagtccaaggccgacgccggagcctccaaaacctaccctcagcaagccggtaccatccgcaagaacggctacatcgtcatcaaaggccgcccctgcaaggttgtggaagtttcgacttccaaaactggaaagcacggtcacgctaagtgtcactttgttggaattgatattttcactgccaagaaacttgaggatattgtgccctcttctcacaactgcgatgttcctcatgtgaatcgtactgattaccagctcattgatattgctgaggatggatttttgagtctgcttactgaaaatggtaacactaaggat

SEQ ID NO: 257020 - DNA, 392 bp, Glycine max
gagtgcagcgatagagataagaaaatgtggcttgtgcagctctcaaccccatttctgaacggacatggtcattccaccacccttctctgcaagcacagttcggcggtgactcagacccactgggccccaccgagtttcctgcctcagatcaatgcgatgaatacaatgcatgggagagtggtgtgctccaccagcgacaagacggtggcagtggaggtggtgcggctggcccctcacccaaagtacaagaggcgcgtgaggaagaagaagaagtaccaggcccacgaccccgataaccaattcaaagtcggcgacatcgtccagctccagaagaccaggcccatcagcaatgaccaaggcctttctcgcactccccgttcccaaaaggccct

SEQ ID NO: 257021 - DNA, 412 bp, Glycine max
agaaggggagcgccaatgtttttttcagaggagtgtcatcttgtaatcaaaagagtttatcttatagtaagaaatcgatgtcttactccattttaaggaacaaaacaagagaacaatagcctgacaaagggtttagccataaaatcgaatccatcattgatttgagatattgataaggtgaatactcatttctcgtcaatgctgggcataatgcgggtatagggacctaaaaaagattatcttttcttcctatcttatgaactttaaggtgtatgaagtgtcatttcctatcttagattttaattttagtaggtagataaagagtccatttaacttaagttgatctaggccagaagcagacctacgtcaagataatccttctttgaaacactttggtagtgctcttagatcg

SEQ ID NO: 257022 - DNA, 412 bp, Glycine max
attaggagagctcagcacattttgcgaaatgaggggcatctggtaatctcatgagcgctactaattgcaataaattccaacatgactccattctaaataactggccatgacactactagcctactgaacagcattacccctatgcatgagtcacttgtcaactatagactaccctaacgcctactcttacatctcgaaagtgctctaaatacacattgtatctagacctgcgtgcgattattataggtctcgatactgttaacgttaatgcctctgaattcagcttgcatagcgcatagcttgatggtatggcttacataaaggctgcacttagcctttgcactgctattaaagacaatgatcttggaatcaacttgaatgtgcctatcacactcagtgtgctactcagagc

SEQ ID NO: 257023 - DNA, 402 bp, Glycine max
atggcaggaaagtacaagaacataccaatattgcggcatctacgtacaactaccaccaagaggatggaagcaattgaaagagagatacgagattcaattgagggtatcataaaaaaacgagagaaagccatggagaatggtgaaacctctaatgaagatttattaagcatacttttggaatcaaatcacaaggaaatccagggacatggaaacagtagggctgttggaatgaccaagcaagaagtaattgaggaatgcaagctattttacctggcagggcaagagaccacttcatctctgctgggttggacaatggtcttattggctaagtatccagaatggcaagcacgagcaagggacgaagtttttcaagtttttggaaaccaaaatccaaacactgat

SEQ ID NO: 257024 - DNA, 398 bp, Glycine max
ggctcaagtgagtttgttgatcgagataactagaaacagtgtgatgaaaatgaaggtccttgttttcttcgttgctacaattttggtagcatggcaatgccatgcgtacgatatgttccctctccgaatgaacactggctatggtgcccgtactccggaggtgaaatgcgcaagttggaggcttgctgtggaagcacacaacatctttggctttgagaccattcctgaagagtgcgttgaagcaacaaaggaatacatccatggcgaacaatatagatcagactccaaaacagttaaccaacaagcttacttttatgccagagacctcgaagtccatcccaaggacacatttgtgttcagtatagatggcaccgtactctctaatattccatactaca

SEQ ID NO: 257025 - DNA, 402 bp, Glycine max
gaataagaagaaggagcatggccatgagcatgggcatgacagcagcagcagcagtgacagtgattaaactgctgcatcacctatatatttaaaaggtttatgggaccgtagtagcgagggctgtgccttaatttctctctctctctctctctctctctctctctctctctctttttcctttttccctatcttgtgatctatttatgagtgagaaaaacaaaagtgagaaattgtgcgtgtatctggttgctaattcgagtgctattagtctgtggtttggttggtttgtaaccccgctacttgggttatgtttgattgtatattatcctagagaaataaaaattctaaattatcaaaaaaaaaaaaaaaattgaacaaaaaaaagcggccgctctagaggat

SEQ ID NO: 257026 - DNA, 401 bp, Glycine max
ggtgcacaagtgagtttgttgatcgagataactagaaacagtgtgatgaaaatgaaggtccttgttttcttcgttgctacaattttggtagcatggcaatgccatgcgtacgatatgttccctctccgaatgaacactggctatggtgcccgtactccggaggtgaaatgcgcaagttggaggcttgctgtggaagcacacaacatctttggctttgagaccattcctgaagagtgcgttgaagcaacaaaggaatacatccatggcgaacaatatagatcagactccaaaacagttaaccaacaagcttacttttatgccagagacctcgaagtccatcccaaggacacatttgtgttcagtatagatggcaccgtactctctaatattccatactacaa

SEQ ID NO: 257027 - DNA, 373 bp, Glycine max
ggaatggacgcagatagtgattgagaattgggaattgcgatggatgggagaaacggaagcggaagcaggaggagtggggaagcaggaggaatggggaaggcgataatcgcgttggtaattgggggtcttgtgtactatcactgtgcctaccgcaattctacccttgtctctcttttttccgatgtcttcatcgtccttctctgctccctcgccattctcggtcttctattccgacaaatgggcatccaggttcctgttgatccccttgagtggcaaatatctcaggagagtgcgaacgcgatcgtggcatggttggccaatacgattggtggcgccgagtcagtgttcaaggtggcggctactgggcacgaca

SEQ ID NO: 257028 - DNA, 352 bp, Glycine max
gaaagaaaagagaaatggcaacagaaacaaaagtgcaagaattaggtggcatcaccgatgtgcatggagctgccaacagcgtcgagatcaacaatctcgctcgctttgctgtagaggaacaaaacaaaagagggaattcagttctggagtttgtgagggtgattagtgcaaagcagcaagtggttgctggagtgaattactacataacattggaagcaaaagatggtttgattaaaaatgagtatgaaacgaaggtttgggtgagggaatggttgaactccaaagagttgctagaattcaagccagtcaatgtttctagcacaccaataggtggcattaccgatgtgactgc

SEQ ID NO: 257029 - DNA, 326 bp, Glycine max; identical to SEQ ID NO: 234615

SEQ ID NO: 257030 - DNA, 385 bp, Glycine max
gatatctggcagcagaagaacaagtagttgagaactaagaaggagaagcaaatggcttcctcaatgatctcttccccagctgttaccactgtcaaccgtgccggtgccggcatggttgctccattcactggcctcaagtccatggctggcttccccaccaggaagaccaacaatgacattacctccattgctagcaacggtggaagagtgcaatgcatgcaggtgtggccaccagttggcaagaagaagtttgagactctttcctacctgccagaccttgatgatgcacaattggcaaaggaagtagaataccttcttaggaagggatggattccttgcttggaattcgagttggagcacggtttcgtgtaccgtgagcacaaca

SEQ ID NO: 257031 - DNA, 295 bp, Glycine max
ggttcacattcaggaatcgttttcttcagaaaatttgccatcgttgagggaagcgcgagagccttcgttgttcaagatgagagctaagtggaagaagaagcgcatgaggaggttgaagaggaagcgccgaaagatgagacaaagatctaagtaggtgcttgaacaaggagtggagatgatgtgcttttccatctgctaccagcttcatgacattttatgctgtcatggctcttatgatgatcttgaggtctagtggcgaggggagcttccatcttgactttagtttagctttact

SEQ ID NO: 257032 - DNA, 400 bp, Glycine max
aaggcgagcgtggagaagacgaagaggaggttcgacaactacgcgaagcaggggttgctgtgcggcggcgatgggttgccgcacctgatcgtgagcggagaccagaggcactggggtgagttcatcacacccggaatactattcctgtacatctcgggatggatcggctgggtgggtcggaactacctgattgcgatcagggacgagaagaaacccaccatgaaggagatcatcatcgatgttcctctggcttctcgcttgctcttcaggggtttcagctggcccgttgctgcctacagagaactcatcaacggcgacctcattgccaaggatgtctagataagagagggtggatggctacattggaggaaagcctggagaatttgtatgtggatgggat

SEQ ID NO: 257033 - DNA, 392 bp, Glycine max
ccacactcttcgtagttgagctctttttcattggttgggccgagggtagaaggtgggctgatatcatcaagccaggctgtgtcaacactgaccctatctttcccaacaacaagctcacaggaactgatgttgggtacccaggtgggctttggtttgatccacttgactggggaagtggttctcctgagaagatcaaggagttgagaacaaaggagatcaagaatggggggttggccatgttggctgtgatgggggcatggttccagcgcatttacactggcactggtcctattgacaacctctttgctcaccttgcagatcctggtcatgctactatttttgctgctttcactcccaagtgagaagggttggaacaactctatgattgcaag

SEQ ID NO: 257034 - DNA, 390 bp, Glycine max
taatttgggaattattgctgccatcgccattggtttcattgtcggcgctaacattttgttgggtggggccttctctggagcggccatgaaccccgctgtgacatttgggcctgctgtcgtgagctggacctggaccaaccactggatctactgggccgggcctctcatcggtggtggaatcgctggccttgtttacgaggttgtctttatcagccacacccacgagcagcttcccaccactgactactagagggggggaaatgaaaataaaaaaaaaaaaattgtgtattattgaatttctctggaatcttcttctgtgtatggttttccttccttgtgttttcttcctaattcactttcgagggttgtacttgttcctttcgtcttaaa

SEQ ID NO: 257035 - DNA, 395 bp, Glycine max
gatattccagtgtttttcatttcatcgtgcattcaatggccaccacagcagctctatccggaaccatggtgagcacctccttcatgaggaggcaacctatgaccaccacaagcctaaagacattccccaacgttggtgaagctctttttggtctgaaaagtggacgaggtggtcgtgtcacttgcatggcctcgtacaaggtgaagctcataaccccagaaggagaagtggagtttgaatgcccagatgatgttttcattgatgacaaggcagaagacgaaggcattgaacttccctactcgtgcagggccggttcttgcgtttcctgtgttggcaaaattgtggaaggtaacgtggaccagtcagatggtagcttccttgatgatgagcaaata

SEQ ID NO: 257036 - DNA, 385 bp, Glycine max
gacacaactgaacaagataagctatccatagcagccaaagaaatgaagagtaccttgttcgccctctttctactttgtgccctcacctcttacctaccttcagccaccgctggtgatgtggtcgacactgatggtaatcctgttgaaaatggaggcacatactttgtgttgccaactataatattaaacggcggtggaatagaatatgccacatttggaaatgaaacttgccctgtcactgttgcgcaatctcgcgatcagttctgcaagggctttccgataaccatttcatccccagcccgaatccgtcacatcagcgaaggccttagtttgaacattgggttcactttcgcattcccgtgttcccccgcttctgagtggacca

SEQ ID NO: 257037 - DNA, 315 bp, Glycine max
tgatatataataataccaaaacagcaggagaaagaagggctcccgggacaatctctaatggcactaaggatgtggcctctttcaactgccatgccattaaacttttttctggcttcaaaacttatctcttggcctcctttttctttctccaaatgctaatcttccgtttggattggactaaagtcccctattcacatgaatgggtcaagcaacaaaggttcagtcgccaccattggaataactgacattgccaagaacatttttgacaagttgggtatgttgagctgcccagaaccagttggcccagtttcacaa

SEQ ID NO: 257038 - DNA, 411 bp, Glycine max
gatcaccagtagccattctcttcagttttaagttacatggtttttcattgctttacttaatctacaatggctgcttcaacaatggctctctcttcatcatcattggctggccaagctatcaagcttgccccctccacccctgagcttggtgttggaagggttagcatgaggaaaacagcctccaaaactgtttcctcaggaagcccatggtacggcccagaccgtgtcaagtacttgggcccattctcaggtgagcccccatcctatctcactggtgaattcccaggtgactatggttgggacactgctgggctttctgctgacccagagacttttgccaaaaaccgtgaactggaagtcatccactccagatgggccatgttgggagccttgggctgtgttttccctgaa

SEQ ID NO: 257039 - DNA, 402 bp, Glycine max
gacagcatatcaataatctattttatactatgcccacattttgataattatttttctagttgataagccatggctactcgaggaaagcttgaggttgacgttgatctcaagtctaacgcaggcaagtactggcaaacccttaggaactccactgaaatattccccaaggccttccccaatgattacaaaagcattgaggttcttgagggtgatggcaaatcacctggttctatccgccacataagttatggtgaaggttcaccacttgtgaagtcatcctttgagaagattgaggctgttgatgaagaaaagaaggtagtgtcgtacactatcattgatggagaactcctccagcactacaaaacattcaagggagacatttctgtgactccagttggcgat

SEQ ID NO: 257040 - DNA, 352 bp, Glycine max
ggcacaagtgagtttgttgatcgagataactagaaacagtgtgatgaaaatgaaggtccttgttttcttcgttgctacaattttggtagcatggcaatgccatgcgtacgatatgttccctctccgaatgaacactggctatggtgcccgtactccggaggtgaaatgcgcaagttggaggcttgctgtggaagcacacaacatctttggctttgagaccattcctgaagagtgcgttgaagcaacaaaggaatacatccatggcgaacaatatagatcagactccagaacagttaaccaacaagcttacttttatgccagagacctcgaagtccatcccaaggacacattt

SEQ ID NO: 257041 - DNA, 406 bp, Glycine max
gattgtgtattcattagcacatttgcaaagtgttattgttctttttttctcatttgcactgcaaattgcaatggcttccaacaaggttattgccaccatcatggtactttctctccttgcctactcaacatcattcaccaatgcatgtggcacatgccacccaaaacctaccccttctcctcctcctccatcaggaaagtgccctaaggacacattgaagctaggggtgtgtgcagatattttaggtcttgttactgttgttgttggttcccctgtctccagcaagtgttgtgcattgcttgaaggtttagctgatttggtggctgcactttgcctttgcactgctattaaagccaatgttcttggaatcaacttgaatgtgcctatcacactcagtgtgctactc

SEQ ID NO: 257042 - DNA, 406 bp, Glycine max
ggtgctctctgaagattcatgcaattaccaaagaatgggaacccacaaaggttgtgcctcaggctgatagagttcttattcgtttggaggagctttcagataaaacagttggcggagttttgctgcctaaatcagctgttaaatttgagcgctatcttgtgggagaaatcctaactgttggtgctgaagctggagaactaaaggctggaacaaaggtactattcactgacatgaatgcttatgaggtggatttggggactgatgcaaaacactgcttctgtaaagcaagtgacttattggccgttgtggagtaaggttttggccattgaacgagacaaaaagggagcaatcttttttggatatctttgataagtgtattttagtagaataaaccatttttttcatt

SEQ ID NO: 257043 - DNA, 418 bp, Glycine max
  unsure (1)..(418): unsure at all n locations
tgtattataagcagcaattcttatttatttcagattaatacttgataacctaaacaatatatctatatatagaatatagatagatatatatacaatagaacgtaaaaaaaaaagaataataaatagaaaaaggagcatgttgattatatagaaagtaaagggcaacaatcatttttgtttaccatgggtaaggacaccatcgctgacataataacctatataagaaatgctgacatgaataaaaaaggaatggttcaaataccatttactaacataacaganaacattgtaaaaatacttttacgcgagggttatagtgaaaacgatagaaaacatagagaaaacgacacatatttttaagtttactctacggtatagaagaaatagaaaggatcatataaaagtttttaaattaaaa

SEQ ID NO: 257044 - DNA, 383 bp, Glycine max
gacgatggcccgacgacagtttctgttcgcatcactggccttactccggggcttcatggttttcacctacatgagtatggtggtacgacaaatgggtgtatttctacgggagcacattttaatcctaataaattgacacatggtgctcctgaggatgaagtccgtcatgcgggtgacctgggaaacatagttgctaatgcagagggggttgcagaggctacaattgtggataatcagataccactctctggccccaattcagtagttggaagagccttgagggtacatgagcttgaagatgaccttggaaagggtgggcatgaactcagtttgacaactggaaatgctggtggaagattagcatgtggtgtggctggtttgac

SEQ ID NO: 257045 - DNA, 158 bp, Glycine max
ttggcctaacgaagaaaggcttatggtggatacctaggcacccagagacgaggaagggcgtagtaagcgacgaaatgcttcggggagttgaaaataagcgtagatccggggattcccgatataggtcaacctttcgaactgctgctgaatccacgggt

SEQ ID NO: 257046 - DNA, 348 bp, Glycine max
ggctgacacaggaaagaaagatcgaggtttctctgcactcatccttcgccctagctgcgtatccctaccaccgttctagacaggacctacaaacatagaaaatagatgggattgtcgaatgcttctgaggatttgtcatcagagatggaggttgatgcctttagacgcctttttccacttcgatattttgagcgtcatcttgctgaatctataaggccagatggtagaccacttggaaaagctagagaaacaagtatttttcttggtgctgttgcgtctgctaatgggtcggctcttgtgaagattggatcaactactatgttgactgctattaaaatggaagtcatg

SEQ ID NO: 257047 - DNA, 358 bp, Glycine max
  unsure (1)..(358): unsure at all n locations
ggcactnatccagttcggtccctcacttaagccactgtgtggaactaacaacaacacaaggccatcatcacggcagctgcttctcctatggcaagccaactcaagtccaccttcactaaaactcttgtagctcccaagggcctctctgcctcttcaccactccacctcctgccttctaagaggcaatttagcttcactgttagggccatccaatcagaaaagccaacctatcaagtgattcaaccaatcaacggtgatcccttcattggaagccttgaaaccccagttacatccagccccttgattgcatggtacttatcgaacctncccgcatacaggaccgcaatgagcccactac

SEQ ID NO: 257048 - DNA, 158 bp, Glycine max; identical to SEQ ID NO: 256582

SEQ ID NO: 257049 - DNA, 284 bp, Glycine max
gatttggcagcagaagaacaagtagttgagaacgaagaaggagaagcaaatggcttcctcaatgatctcttccccagctgttaccactgtcaaccgtgccggtgccggcatggttgctccattcactggcctcaagtccatggctggcttccccaccaggaagaccaacaatgacattacctccattgctagcaacggtggaagagtgcaatgcatgcaagtgtggccaccagttggcaagaagaagtttgagactctttcctacctgccagaccttgatgatg

SEQ ID NO: 257050 - DNA, 380 bp, Glycine max
gattcaaacagaacaagaaaaataaagcgttccatagcctcccataaaaatgaagaatactatcttctctgctctctttctactttgtgccttcaccacctcatacctaccttcaaccaccgcggtggtcgataccaacggtgatattcttcagaatcctggcacatactttatcttgtccgtttttcgacccggcggcggagtagaattcgccgccactggaaacgaaacttgccctctcactgttgtgcagactctcttcgggaggggatttccagtaatcttatcgtcccagttactaatgcctatcatcggcgaaggacaactcttcagcatcctgttccgtattgtgccatggtgcgccaccactccttctaagt

SEQ ID NO: 257051 - DNA, 279 bp, Glycine max
  unsure (1)..(279): unsure at all n locations
attgngttgccccccaggataacaacataatgctgtggaatgctgtcatatttggtcctgatgatactccatgggatggaggcacgttcaagttgacactccaatttactgaggactatccaaataaaccaccgactgtacgatttatgtctcgcatgtttcatccaaatatttatgctgatggaagtatttgtttggatatattacaaaatcagtggagtcctatttatgatgtggctgctatactcacatctatccagtcattgctttgtgatccca

SEQ ID NO: 257052 - DNA, 436 bp, Glycine max
  unsure (1)..(436): unsure at all n locations
tgtgggattcaccacttcaaaacactcataacacaaagcacaaagcaaagctcatccttgagttaaaaaatggcagcagcttcttccatggctctctcatccccatccttggctggcaaggccgtgaagctgggcccatcagccccagaagtgggaagggtgagcatgaggaagaccgtcaccaagcaggtctcctcaggaagcccatggtacggcccagaccgagtcaagtacttgggcccattctctggcgagcccccgtcctacctaaccggtgagttcccaggcgactacggctgggacactgctgggctttccgcagacccagaaaccttcgccaagaaccgtgaactcgaagtgatccactccaggtgggccatgctcggagccttgngctgcgtcttcccgaattgctgtcccgcaacggggtgaagtc

SEQ ID NO: 257053 - DNA, 442 bp, Glycine max
  unsure (1)..(442): unsure at all n locations
ggcgctcttctattggagtctctgcctgaagatggcaagccttcagttaacaacaacacccttcactcttttgagacaacaaaggcagcaccccacaaagaagaagtccactgcttctcagctgaaccctcctcggccacgtcccctcagagtgagtgtgaggtcctataaagtggtgattgagcacgatggagagtccactgaggtggaggttgaacctgacgagaccattctgtcaaaggcattggactctggcttgtctgtgcctcatgattgcaagcttggagtctgcatgacatgccctgctcgcctcattagtggatctgttgatcagagtgatggaatgctaagtgatgatgtggtggagcgtggctatgcactctngtgtgcagnctaccctcaatccgattgtcatattaagaatatccccgaggatgagcta

SEQ ID NO: 257054 - DNA, 405 bp, Glycine max
ggcacaagtgagtttgttgatcgagataactggaaacagtgtgatgaaaatgaaggtccttgttttcttcgttgctacaattttggtagcatggcaatgccatgcgtacgatatgttccctctccgaatgaacactggctatggtgcccgtactccggaggtgaaatgcgcaagttggaggcttgctgtggaagcacacaacatctttggctttgagaccattcctgaagagtgcgttgaagcaacaaaggaatacatccatggcgaacaatatagatcagactccaaaacagttaaccaacaagcttacttttatgccagagacctcgaagtccatcccaaggacacatttgtgttcagtatagatggcaccgtactctctaatattccatactacaaaaaaca

SEQ ID NO: 257055 - DNA, 333 bp, Glycine max
acgagacgacagaagggggcacaagtgagtttgttgatcgagataactagaaacagtgtgatgaaaatgaaggtccttgttttcttcgttgctacaattttggtagcatggcaatgccatgcgtacgatatgttccctctccgaatgaacactggctatggtgcccgtactccggaggtgaaatgcgcaagttggaggcttgctgtggaagcacacagcatctttggctttgagaccattcctgaagagtgcgttgaagccaccaaggaatacatccatggcgaacaatatagatcagactccaaaacagttaaccaacaagcttacttttat

SEQ ID NO: 257056 - DNA, 384 bp, Glycine max
ggctttggggcatgcttttaatttcctagatctgccaaacaaattgtagcataagtcccatggccaaagagactagtgttgtttatctatatcccagcaaatcacaagtttggggtgagaattttgatcataaaaaacttgtaataacaacactagctgctaatggaaagaaggaggagagtaatggagcacctaatgacacatatcctgcgtttcccgggtggtatgctgatgtttcctggccaggagaagcacacacatattaaatagaaaagattctattccacgggaaatcagaattccaagagcttcttgtatttgagtcttctagacaaggcaaggttgcaattcttgatgggcatatccagctgacagaaaacgatg

SEQ ID NO: 257057 - DNA, 316 bp, Glycine max
ggttaagtgagtttgttgatcgagataactagaaacagtgtgatgaaaatgaaggtccttgttttcttcgttgctacaattttggtagcatggcaatgccatgcgtacgatatgttccctctccgaatgaacactggctatggtgcccgtactccggaggtgaaatgcgcaagttggaggcttgctgtggaagcacacaacatctttggctttgagaccattcctgaagagtgcgttgaagcaacaaaggaatacatccatggcgaacaatatagatcagactccaaaacagttaaccaacaagcttacttttatg

SEQ ID NO: 257058 - DNA, 418 bp, Glycine max
  unsure (1)..(418): unsure at all n locations
tatgggatttctgctagtattaagatcaatgaaaggaattcaagaggaccaaagggacgcaaggttgtttctaatttagtcaagcctattcatgtggttcctggatctgagcctgaaattcaggctccctttactgttaataatggatctgaaaatctggtggaaagtagcatcatcaaggagggcttacttgtagaggttttcaaagatgaggaagggtttaaagctgcatggttctcagccaatattttgactttgagggatgataaagcttatgtaggctacacttcacttgtagctgctgaaagtgcanggccattaaaggaatgggtttcactcgtatgtgatggagacaaacaccccagaatacgtactgctcgtnctcttaatacttttacatatgaaggaacaagaaaga

SEQ ID NO: 257059 - DNA, 405 bp, Glycine max
ggtacatgtgagtttgttgatcgagataactagaaacagtgtgatgaaaatgaaggtccttgttttcttcgttgctacaattttggtagcatggcaatgccatgcgtacgatatgttccctctccgaatgaacactggctatggtgcccgtactccggaggtgaaatgcgcaagttggaggcttgctgtggaagcacacaacatctttggctttgagaccattcctgaagagtacgttgaagcaacaaaggaatacatccatggcgaacaatatagatcagactccaaaacagttaaccaacaagcttacttttatgccaaagacctcgaagtccatcccaaggacacatttgtgttcagtatagatggcaccgtactctctaatatttcatactaacaaaaaca

SEQ ID NO: 257060 - DNA, 345 bp, Glycine max
  unsure (1)..(345): unsure at all n locations
ggtagcttcaataagtaagtatcaatggcttgcgaagaatcccagaacaagccccccagcgagcagtccactaccgaactcatcacgagcgcgaagctggtggcggaggcggcgcagtcggctctgaagagcgacagcgacaaagtggacaaggccaaggtggctgacgctgccggcgatcttctcgacgcggcggggaagtatggaaaacttgatgacaaacaaggcatatggcaatatgttgacaaggctgctgattatctgcataattaccagggtgataataccactgctcctgtaaagnctgcagagtctaaaggtgaagaaagtggtggtgggttaggt

SEQ ID NO: 257061 - DNA, 348 bp, Glycine max
  unsure (1)..(348): unsure at all n locations
actagttgaaggagggaagagagagattttcacaccaatgtacttcttcctggcacggaagcctgatttagacaggaactaagctggctgtacaaataggttgctgttttcatcagttacggtgattctggtagggtgaaccgtaagctaggattgtttttggccttgttgccttagtgattcttgctgtttctttgttttgtttaggttaccaacacttcattttgctgcttgtttcgatgaagcagtgctcctccatattttgnttaccctacatattatatgctcttttactttgtttaaaagggatttggcagattttggtctttggaaaaaaaaatnnanaat

SEQ ID NO: 257062 - DNA, 428 bp, Glycine max
tgtggggttttggcagcagaaaaacaagtagttgagaactaagaagaaggaaatggcttcctcaatgatctcctccccagctgttaccaccgtcaaccgtgccggtgccggcatggttgctccattcaccggcctcaaatccatggctggcttccccacgaggaagaccaacaatgacattacctccattgctagcaacggtggaagagtacaatgcatgcaggtgtggccaccaattggcaagaagaagttcgagactctttcctacttgccagacctcgatgatgcccaattggcaaaggaagtcgaataccttctaaggaaaggatggattccttgcttggaattcgagttggagccacggttcgtgtaccgtgagcacaacatgtcacctggatactatgatggacgctactggaccatgtgga

SEQ ID NO: 257063 - DNA, 417 bp, Glycine max
gaacctgttatcttcacttcacatctctctatcctctcattctcatcaccaacaagtgtttctgtaaccatggcatccaccactctatcccctacaaccccttctcagctatgctcaggaaaaagtgggattttcagttcctcacaggcacttcttgtgaagccagtgaagaggcagatgatggggaagagcaagggattgagaattgcatgccaagccaccagcatttccgctgatagagtccctgacatgggcaaaagacagctcatgaatcttcttcttcttggtgccatttcactccccactgctggaatgcttattccctacacctacttctttgtccctccaagttcaggttcttcagctggcggtactgttgccaaggatgccgttggaaatgatgtaattgccgagaat

SEQ ID NO: 257064 - DNA, 350 bp, Glycine max
ggggctgttttgacaagacgacatattgacacagtggccggaacacaagcgaacgtaacgaatgctggattacacacatgggagccggttattataaaagatccacatgttatcactgcaaaagcactatcatacagatcagctgtgagagagaatctgatgaggccgggatacagaatagtaggaatcattgcagaccaatggagacatctgattggacaccacacaagacgaagcaggacctttcagcttgctaatacactgtactacattgagtagcaccttgacctctctcaacaatctagctagaagttgctgctatctatatgtgatcaggcatgctgatatgc

SEQ ID NO: 257065 - DNA, 348 bp, Glycine max
ggtttggagcaatagcagcagaacagagagagcaaaaccctagagcatccatcacaagcagaggaagaagatggtgaagttcctgaagcctaacaaggcagtgatcgtcctgcagggccgctacgccgggcgcaaggcggtgatcgtgaggaccttcgacgagggaaccagggagcgcccctacggccactgcctcgtcgccggaataaagaagtacccaagcaaggtcatcaagaaggactccgcgaagaagaccgcgaagaaatctagggttaaggccttcgtgaagctcgtgaactaccagcacctcatgcccacgcgctacacgctcgacgtggatctaaagga

SEQ ID NO: 257066 - DNA, 407 bp, Glycine max
ggctcaagtgagtttgttgatcgagataactagaaacagtgtgatgaaaatgaaggtccttgttttcttcgatgctacaattttggtagcatggcaatgccatgcgtacgatatgttccctcttcgaatgaacactggctatggtgcccgtactccggaggtgaaatgcgcaagttggaggcttgctgaggaagcacacaacatctttggctgtgagaccattcctgaagagcgcgttgaagcatcaaaggaatacatccatggcgaacaatatagatcagactccagaacagctaaccaacaagcttacttttatgccagagactctcgagtccatcccaaggacacatttgtgttcagtatacatggcaccgtactctttaatattccatgctacaaaaaacatg

SEQ ID NO: 257067 - DNA, 412 bp, Glycine max
  unsure (1)..(412): unsure at all n locations
gatcgcctatgtttttttcagaggagtttcatcttgtaatcaaaagagtttatcttatagtaagaaatcgatgtcttactccattttaaggaacaaaacaagagaacaatagcctgacaaagggtttggccataaaatcgaatccatcattgatttgagatattgataaggtgaatactcatttctcgtcaatgctaggcataatgcgggtatagggacctaaaaaagattatcttttcttcctatcttatgaactttaaggtgtatgaagtgtcatttcctatcttagattttaattntagtaggtagataaagagtccatttaacttaagttgatctaggccagaagcagacctacgtcaagataatccttctttgaaacactttggtagtgctcttagaatgtaatccc

SEQ ID NO: 257068 - DNA, 431 bp, Glycine max
cttgaactcggacgattgggccacgcagggtggtcgtgtgaagacagattggagccacgcacccttcgttgccacctacaaggacttccaaatcgacgcgtgcgcgtgccccgtgccggtgacgtcagcagatagtgctaagaactgtagcagcagcgaggataagaagtattggtgggacgaaccaacgttgtccgaactgaacttgcaccagagccaccagctcatgtgggttagggctaaccatatggtttatgattattgcgccgacactgctaggttccccgttatacctgctgagtgtgttcaccaccgtcaccactgaaagggagaagagaagaggaagagaacgaactacttttgtttaacataacatgggcttcatgtttcaccctgtaacatatttcggcttagctttatgtgaatctttt

SEQ ID NO: 257069 - DNA, 317 bp, Glycine max
tgtgatttggcagcagaagaacaagtagttgagaactaagaaggagaagcaaatggcttcctcaatgatctcttccccagctgttaccaccgtcaaccgtgccggtgccggcatggttgctccattcactggcctcaagtccatggctggcttccccaccagaaagaccaacaatgacattacctccattgctagcaacggtggaagagtgcaatgcatgcaggtgtggccaccagttggcaagaagaagtttgagactctttcctacctgccagaccttgatgatgcacaattggcataggaagtagaataccttc

SEQ ID NO: 257070 - DNA, 357 bp, Glycine max
ttgtgatgaagaagaaggagcatggccatgagcatggccatgacagcagcagcagcagtgacagtgattaaactgctgcatcacctatatatttaaaaggtttatgggaccatagtagcgagggctgtgccttaatttctctctctctctctctctctctctctctctctctctttttcctttttccctatcttgtgatctatttatgagtgagaaaaataaaagtgagaaattgtgcgtgtatctggttgctaattcgagtgctattagtctgtggtttggttggtttgtaaccccgctacttgggttatgtttgattgtatattatcctagagaaataaaaattttaaattatca

SEQ ID NO: 257071 - DNA, 410 bp, Glycine max
  unsure (1)..(410): unsure at all n locations
ttggggttgagagagagagaaggcaagatgtcgaagagaggacgcggtggttcggcggggaacaagttccggatgtcgctgggtctgccggtggcggcgacggtgaactgcgccgacaatacgggggcgaagaacctctacatcatatcggtgaaagggatcaaagggcgtttggaccgtctcccctcggcttgcgttggcgacatggtgatggccaccgtgaagaaggggaaacccgatctgaggaagaaggttttgccagctgtcattgttcgccagcgcaagccatggcgccgaaaggacggcgtctacatgtatttcgaagataatgctggtgttattgtcaatcccaaaggagaaatgaaaggttctgctatcactggtcccattggnaaagagtgtgctgatct

SEQ ID NO: 257072 - DNA, 374 bp, Glycine max
gacataaaagaaaaaggaaaccctagctggataggtcaaacatcatcatgtcggacgaagagcaccatttcgagtccaaggcagacgccggtgcctccaaaacctaccctcagcaagccggtaccattcgcaagaacggctacatcgtcatcaaaggacgcccctgcaaggttgtggaagtttcgacttccaaaactggaaagcacggtcacgccaagtgccactttgttggaattgatattttcactgccaagaaacttgaggatattgtgccctcttctcacaactgtgatgttcctcatgtgaatcgtactgattaccagctcattgatattgctgaagatggatttttgagtctgcttactggaaatggg

SEQ ID NO: 257073 - DNA, 240 bp, Glycine max
tccgagggggacatactttgactaggcactcatatcattctaggcaggtatcatcatgtcttacgacgagcaacatggttagcgctacagaaaactccgaagactcatgagcgtatcatcaacatgctcgctctagtcatgaaaactggcacatccaccctaaatgacaagaccgcactgacatgtatgaagaacttcacaggactattgatcatgattactcacaactgccctcctttg

SEQ ID NO: 257074 - DNA, 391 bp, Glycine max
  unsure (1)..(391): unsure at all n locations
gactggtatgtgcgatcgatcatctcctctgcgaaatacaatggagctgacagcccagcagctgagccaatacaacggcactgacccatcgaagccgatctacgtggcggtgaaaggccgagtctacgacgttacctccggaaaatccttctacggtcccggcggcccctacgccatgttcgccggcaaagacgccagcagggccctcgccaagatgagcaagaacgacgaagacatctccccctccctcgacggcctctccgacaaggagatcggcgttctcaacgactgggagaacanattccaagctaagtacactgtcgttgctcgtcttctcattaattggattctatctatcatatgacatcatctcaccctaataactaataat

SEQ ID NO: 257075 - DNA, 285 bp, Glycine max
gttattgtaaaaggtgttgcctcagaagagcagcaagcacgtgtcagatatggagctggatgattgtgaggagaccactttgcatgatgtcaactttaaggaggagatgagacgaaagcagcaacagcaacaccgcgaggcatacgacgaagatgatgatgagccatctggtcaccgagtgcaatgtgctcaacagtagtgcaatttatggtagtagaggttctataatttctgcttggtttatcttttggttggataatgcagttataactgcgtgataaattt

SEQ ID NO: 257076 - DNA, 397 bp, Glycine max
  unsure (1)..(397): unsure at all n locations
ttggggttctagtgtgtgattgtttgttgttgtaactcgttcttcttcttttgttgttctgtgtttgtgtttgttttttctctcacctgaaaatgtcttgctgcggtggtaactgtggttgcggaagctcctgcaagtgcggcaacggctgcggaggctgcaagatgtacccagacttgagctacactgagtcaaccaccaccgagaccttggtcatgggagtggcacctgttaaggctcaatttgagggtgctgaaatgggtgtgcccgctgagaacgatggctgcaaatgtggaccaaactgctactgcatcccctgcacttgcaagtgaggtgttgggagagcaagcttcaagcagagatagcccttaattaggaataatgantaactattaat

SEQ ID NO: 257077 - DNA, 430 bp, Glycine max
tggggtacaagtgagtttgttgatcgagataactagaaacagtgtgatgaaaatgaaggtccttgttttcttcgttgctacaattttggtagcatggcaatgccatgcgtacgatatgttccctctccgaatgaacactggctatggtgcccgtactccggaggtgaaatgcgcaagttggaggcttgctgtggaagcacacaacatctttggctttgagaccattcctgaagagtgcgttgaagcaacaaaggaatacatccatggcgaacaatatagatcagactccaaaacagttaaccaacaagcttacttttatgccagagacctcgaagtccatcccaaggacacatttgtgttcagtatagatggcaccgtactctctaatattccatactacaaaaaacatggatatggggtggagaaattt

SEQ ID NO: 257078 - DNA, 369 bp, Glycine max
gattcaactctctaaacaacacattaacctttcgcattccccatctcctcaccttattcagccactgctaatttctagggttccgaaatggacgctggcggaaagatcaagaagggcgccggaggaagaaagggcggcggccctaagaagaagccggtttcaaggtccgtcaaggccggtctccaattccccgtcggaagaattggccgttatttgaagaaaggaaggtacgcccagcgtgtcggtaccggtgctcccgtttacttggccgcagttctcgagtacctagctgctgaggtgcttgagttggctgggaatgctgcacgtgacaacaagaagaacgggattattccgagacatgtgctattg

SEQ ID NO: 257079 - DNA, 351 bp, Glycine max
  unsure (1)..(351): unsure at all n locations
gatgacacaagtgtccctgttgagaaagttgaggttgttgaaacagcacatgctgaggaaaagaaggggttcctcgacaagattaaggagaagctaccagggcacaagaagacagaggaggccacagctactactcctnctccaccaccacctgttgcatcattggagcatggtgaaggtgctcatcatgaaggagaggccaaggagaagaaaggtatattagataagataaaagagaagcttcctggttatcactccaagacagaggaggaaaaagaaaagggaaaggagagtggtgctcatagatatttaagattgagacaaggcttttttggtggttggagatgcatg

SEQ ID NO: 257080 - DNA, 329 bp, Glycine max
tacgtttgggagtgcacaagtgagttcggtgatcgagataactagaaacagtgtgatgaaaatgaaggtccttgttgtcttcgttgctacaattttggtagcatggcaatgccatgcgtacgatatgttccctctccgaatgaacactggctatggtgcccgtactccggaggtgaaatgcgcaagttggaggcttgctgtggaagcacacaacatctttggctttgagaccattcctgaagagtgcgttgaagcaacataggaatacatccatggcgaacaatatagatcagactgctaaacaggtaaccgagaagcttacttttatg

SEQ ID NO: 257081 - DNA, 424 bp, Glycine max
tgtggaggagaatatgaagttgtttgttttctttgttgctgcagtagttttggtagcatggccatgccatggcgcaggctaccaaaggttccctctccgaatgaaaactggctatggtgagcgttcttcggaggtaaaatgcgcaagttttaggcttgctgtggaagcacacaacatccgagcctttaaaaccattcctgaagagtgcgttgaaccaacaaaggactacattaatggcgaacaatttagatcagactctaaaacagttaaccaacaagctttcttttatgctagtgaacgcgaagtccatcacaacgacatatttatattcggcatagataacaccgtactctctaatatcccatactatgaaaaacatggatatggggtggaggaatttaatgaaaccttatatgatgaatgg

SEQ ID NO: 257082 - DNA, 380 bp, Glycine max
  unsure (1)..(380): unsure at all n locations
ggttgattgtccacggtgtagtcttcgtagtagaaaggtttacagtgacctgtctgttgactatttaaagatgttcttgctgaatgtcccagcaactgtggttgcactaggattgttcttcttccttgatgatgtgactggatttgagatctcatatctgataaagattccagagccttttagtttcatcttaacttggtttgccgctattccctttattttgtggctggctcaatcgatcactatggcaattgtacaagattttctgattttaaaaggcccttgtcccaactgtggtactgaaaatacctgttttgttggactatactgtcngtttcaagtgcgatttcaccaacaaagtcaaatgtgaaaactgtgaa

SEQ ID NO: 257083 - DNA, 346 bp, Glycine max
ttaactgccacaacactttccacttgtctccgaatgagttatcttgagaaacattattcccattgctatatattatggctagcatgaaggttacatgggtggttgtgatcatgtgcatggccgtggtgggtgcaccgatgatggcgcaagccatgacatgcaatgatgtgacggtgaacacggcacagtgcctattctacctgatgcacggaggaacaccttcaacactttgctgcagcggacgtaagaacattcttggctctgctgtcaccaccgttgacaaacaaactgtgtgcaactgttataaggcggatgctgctaagttcaacatcaatgaccagtatgc

SEQ ID NO: 257084 - DNA, 338 bp, Glycine max
ggaagcttcaataagtaagtatcaatggcttccgaagaatcccagaacaagccccccagcgagcagtccactaccgaactcatcacgagcgcgaagctggtggcggaggcggcgcagtcggctctgaagagcgacggcgacaaagtggacaaggccaaggtggctgacgctgccggcgatcttctcgacgcggcggggaagtatggaaaacttgatgacaaacaaggcatagggcaatatgttgacaaggctgctgattatctgcataattaccagggtgataataccactgctccttcacagcctgcagagtctaaaggtgaaagaaagtgtggtgg

SEQ ID NO: 257085 - DNA, 420 bp, Glycine max
  unsure (1)..(420): unsure at all n locations
gatgcgcggcgggatcagcacaagattgcaaaatgaagttcaacattgcaaatcccaccactgggtgccagaagaagctggaaatcgaatgacgacctgaagcttcgagcattttgggacaagaggatctcccaggaggttcttggtgatgctctgggtgaggagtttaaaggatatgttttcaaaatcaccggtgggtgtgacaaacaaggattccctatgaagcagggagtgctgacccctggtcgtgttcgacttttgctccatagaggaactccttgtttccgtggatatggaaggcgcaatggagagcgtagaaggaagtctgttcgtggttgcattgtcagcccagatctctctgttttgaccttgtnattgtgaagaatggtgagagtgatttgccaggtctcactgatgttg

SEQ ID NO: 257086 - DNA, 367 bp, Glycine max
  unsure (1)..(367): unsure at all n locations
gttcctacagattcttcagcaactgcgattttggatcggaacctcttctgcggcgtagcaatgggacactccaacgtttggaattctcacccaaaaaactacggtcctggttctcgcacttgccgagtgtgtgggaatccacatggattgatcaggaagtatggccttatgtgctgcaggcagtgcttccgtagcaatgccaaggaaattggcttcatcaagtatcgctaaaagagctgttgtcacctacggaccaatattatgttctggcactaagatgttttgaagatgttatgtttgaaaaaacttgagacttgtgtatttcatctattntattatcagacataatgtgtggaacgaagaatac

SEQ ID NO: 257087 - DNA, 391 bp, Glycine max
actcgaattgttccacgccacatgcaattggcggtgaggaacgacgaagagttgagcaagcttctaggagatgttaccattgctaacggcggtgttatgcctaacattcacaaccttcttcttcccaagaaggctgggggctcatccaagggtgctgctgctgacgatgactcttaaatagggattcactgttcacaaagttcttgaatttagattctatgtttgctctctttttttcctttttatttgtagttatgataattgtgccctttgtagtagtagttaggttttcagtcagatgtgtttaaagaatgctcttacgcatcaagaaaggttgttcacaatttaaattattttaatgtcacctttgagtcttgatctagcatttgat

SEQ ID NO: 257088 - DNA, 299 bp, Glycine max
tggatttttacttataaaaaaataatagtaggtatgcagaattagagaaaaagaatagatatatttgatagaaaatctttggtaactacatttttgtttttttcaatctaatcagtaaattttcaaaaaaattagtatcaagcttgagttttgaagcactttctttatttccagaacatgaacaagtaaaaataaattatgaagaagaaaaataacaaataataaaaatattatttgatgcaattagaactgatttgaacgaaaaaacaatagtgaatggaaatagaacaaagtgcatt

SEQ ID NO: 257089 - DNA, 293 bp, Glycine max
tgggtacaagtgagtttgttgatcgagataactagaaacagtgtgatgaaaatgaaggtccttgctttcttcgttgctacaattttggtagcatggcaatgccatgcgtacgatatgttccctctccgaatgaacactggctatggtgcccgtactccggaggtgaaatgcgcaagttggaggcttgctgtggaagcacacaacatctttggctttgagaccattcctgaagagtgcgttgaagcaacaaaggaatacatccatggcgaacaatatagatcagacttcaaaca

SEQ ID NO: 257090 - DNA, 402 bp, Glycine max
  unsure (1)..(402): unsure at all n locations
tgggagcgccaatgtttttttcagaggagtgtcatcttgtaatcaaaagagtttatcttatagtaagaaatcgatgtcttactccattttaaggaacaaaacaagagaacaatagcctgacaaagggtttagccataaaatcgaatccatcattgatttgagatattgataaggtgaatactcatttctcgtcaatgctaggcataatgcgggtatagggacctaaaaaagattatcttttcttcctatcttatgaactttaaggtgtatgaagtgtcatttcctatcttagattttaattntagtaggtagataaagagtccatttaacttaagttgatctaggccagaagcagacctacgttaagaatatccctctttgaaacactttggtagtgctctt

SEQ ID NO: 257091 - DNA, 299 bp, Glycine max
gctttctcgccgctttgtgctgctgttgcaaaacttagggttgagcctttttttgaggttttcagcgcttctttctcacaatggttcttcagaatgatattgatttgctgaatcctccagctgagttggagaagagaaaacacaaactcaagcgtcttgttcagtcaccaaactctttcttcatggatgttaagtgccagggatgcttcaacataacaactgtgtttagccactctcaaactgttgtggtgtgcggaaactgccagactgttttgtgccaaccaacggggggacgggcg

SEQ ID NO: 257092 - DNA, 369 bp, Glycine max
gatagcagcatcatacaaagcattgaattcaagaacttaagttcattccttgtgttttgctttcttcctcaaaaccaaacatgtcgaacacatgcggcaactgcgactgcgctgacaagactagctgcaccaagggaaacagctatggtgttattgtagagactgagaagagttacatcgagactgttgtcatggatgttccagcagctgagcatgatgggaagtgcaagtgtggcactaactgcacttgcacggactgcacctgtggccattaaggaatatgtatgaaaatgtaattgccatgtgtttggcaatacaaatatccaaataatggaatcttcgtatgaataaatgtgtgtgctggtatcc

SEQ ID NO: 257093 - DNA, 319 bp, Glycine max
  unsure (1)..(319): unsure at all n locations
gcctctgagctccctttctcctcggtccacagagacaaaatgtaagacaggtgccaacagttcatcacgaaagaaaggactagctgagccgagatcactaactaaaacgaatttaatactaatcgaaaatactaatagaatagaaatagaactgtcttttcatatagatatcccttcaacacaacataggtcatcgaaaggatctcgaagacccaccaacgcacgaaagccgggatctttcagaaaatggattcctattcgaggggtgcataaccgcatggataagctcacactaacccgtcaatntgggatccaattc

SEQ ID NO: 257094 - DNA, 419 bp, Glycine max
gttccttattccccaatcaatcatctttacgtgttttttcgagaccatggccaaaagccccttcaagcttgaacatcccttggaaagaaggcaggctgagtctgctcgcattagagacaagtatcctgatagaatacctgtgattgttgagaaagctgaaagaagtgacatcccagacatcgataagaagaagtaccttgtcccagcagatttgactgttggccaatttgtttatgttgtccgtaaaaggattaaggtcagtgcagagaaggctatttttgtttttgtcaataacactctacctgcaactgccgctttgatgtcttctatttatgaggaaaataaagacgatgatggttttctttacatgacttacagtggagagaaacactttcggtcttgctagggtcaaatttaat

SEQ ID NO: 257095 - DNA, 297 bp, Glycine max
  unsure (1)..(297): unsure at all n locations
tgttggttcaagtgagtttgttgatcgagataactagaaacagtgtgatgaaaatgtaggtccttgttttcttcgttgctacaattttggtagcatggcaatgccatgcgtacgatatgttccctctccgaatgaacactggctatggtgcccgtactccggaggtgaaatgcgcaagttggaggcttgctgtggaagcacacaacatctttggctttgagaccattcctgaagagtgcgttgaagcaacaaaggaatacatccatggcgaacaatatagatcagactccanaacag

SEQ ID NO: 257096 - DNA, 410 bp, Glycine max
ttgggatagcagcatcatacaaagcattgaattcaaaaacttaagttcattccttgtgttttgctttcttcctcaaaaccaaacgtgtcgaacacatgcggcagctgcgactgcgctgacaagactagctgcaccaagggaaacagctatggtgttattgtagagactgagaagagttacatcgagactgttgtcatggatgttccagcagctgagcatgatgggaagtgcaagtgtggcactaactgcacttgcacggactgcacctgtggccattaaggaatatgtatgaaaatgtaattgccatgtgtttggcaatacagatatccaaataatgtaatcttcgtatgaataaatgtgtgtgctggtatcctacttcaggtctgtgtagtcatgcagtctgaatcatt

SEQ ID NO: 257097 - DNA, 300 bp, Glycine max
tgggatactgctattcctcttaagcttgctactgagtttccacactgcataccttaggtcttccgaattcgaagttaatttgcaagatggctaatgaaaaggctcagatcaacattgtggtggttggtcatgtggaccctgaggaggcaaccaccattaacgagctgaagaagcctgttgtggagaaagaagctccagggcatgccatatgagggcatgcacgtacggcctcggaggggaaccagaaaattatgttaacaaaataatctggaaccctaatgtatcagtgtcatcatcagt

SEQ ID NO: 257098 - DNA, 378 bp, Glycine max
gatttcaatttaaccaaagcaaaaggccatataattttttgttatttgaaataatgtccgggatcatccacaagattgaggagaccctccatgtgggagggcacaagaaagaggagcacaaaggagaacaccatggtgagcacaaaggtgaacacaaaggagaacaccatggtgagcacaaaggtgaacacaaaggagaacaacaccatggggagcacaaggagggacttgtggataagatcaaggacaagatccatggtgatggccatgacaagggtgagaaaaagaagaagaaggacaagaagaagaaagagcatggacatgaccatcatggtcatagcagcagcagtgacagtgattagaacttatatggtaagc

SEQ ID NO: 257099 - DNA, 409 bp, Glycine max
gaaggttttcaagttattgtgagcaaagaaagatagtgagtgaagtaactgaagagaagaaaaaatgccgtgcctcaacctcagcaccaacgtgtccctcgaaggcgtcgacacctcttccatcctcgccgaagccacctcctccgtcgccagcataatcggcaaacccgaagcctatgtgatgattgtactgaaaggatcagtacccatagcttttggtgggaatgagcagccagcagcttatggagaattggtttccattggtggtcttaaccctagtgtaaacaaggaacttagtgctgcaattgcttcaattctggaaaccaaattgtcagtgccgaagtcgcggttcttcttgaaattctatgacaccaaggggttcccaacttcggatgggatggatctacat

SEQ ID NO: 257100 - DNA, 424 bp, Glycine max
  unsure (1)..(424): unsure at all n locations
gtcttctgaacaagataagctatccatagcagccaaagaaatgaagagtaccttgttcgccctctttctactttgtgccctcacctcttacctaccttcagccaccgctggtgatgtggtcgacactgatggtaatcctgttgaaaatggaggcacatactttgtgttgccaactataatattaaacggcggtggaatagaatatgccacatttggaaatgaaacttgccctgtcactgttgcgcaatcccgcgatcagttctgcaagggctttccgataaccatttcatccncagcccgaatccgtcacatcagcgaaggccttagtttgaacattgggttcactttcgcatncccgtgttcccccgcttctgagtggaccattgtgaaggatcaaccaggaaggactcgctgntaaactcac

SEQ ID NO: 257101 - DNA, 284 bp, Glycine max
ggcagccaagaaaagaaaatcctcacccattttcttcgtagccaaacactctgaaattctcagttatgtcgtggcaagcgtatgtggatgatcacctactgtgtgaaatcgaaggtaaccacctcactcacgccgctatcatcggccaagacggaagcgtttgggctcagagcaccaacttccctcagttcaaacctgaggaaataactgccatcaataatgactttaatgagcctggatcacttgctccaactggattgtatatcggtggcaccaaatacatg

SEQ ID NO: 257102 - DNA, 402 bp, Glycine max
gcatttcgataatcatccatagttactgaagaaaatggcaaccatctccgctgctatcacaaccctatcgatcacccgcgcatgtctagtgcaaaaacgttctcttgggttctcatctcccgttcttggtttgccagcaatgggtaaggtgggaagagtgagttgctccatggaggaaaagccttcttctgtgaaggaaagcagctcaagcatgttggggatgggggcatctttgatggcagcggccagcgccgcagccatgtcaggcccagccatggccttggtggatgagagacttagcactgaaggaaccgggctacccttcggcctcagcaacaaccttctcgggtggatcctgttcggcgtcttcggactcatctgggctctctattttgtctacac

SEQ ID NO: 257103 - DNA, 415 bp, Glycine max
  unsure (1)..(415): unsure at all n locations
atgactattgctttccaattagctgtttttgcattaattgctatttcatttattttattgattagtgtacctgttgtatttgcttctcctgaaggttggtcgaataacaaaaatgttgtattttccggtacatcattatggattggattagtgtttctcgtgggtattcttaattctctcatttcttgaagctctatttattctagatcaaaaacgaaatgacccctcccccagaattctttcggattgtcgggcacattaaaaaaggaatggataagttcctaaaaataaagaaaactataacacattataaggaggggtcaaatattaattaagataaaagatatagaatatctatctgtatatatatatatatagatataatntattaataattagaactttcttttttccg

SEQ ID NO: 257104 - DNA, 380 bp, Glycine max
ggattgggactggaggtacaataacaggcgctggaaaatatctgaaagatcagaaccctgatataaagctatatggcattgaaccagtagaaagtccaatactgtctggaggaaaacctggccctcataagatccaaggaattggtgctggcttcatccctggtgttctggatgtcgatttacttgatgaagttgttcgaatttcaagtgaagaagccattgaaactgctaaacttcttgctttgaaagaaggtttgctggtgggaatatcatctggtgcagctgcagctgctgcaattaagatagcaaagaggccagaaaatgctggaaaactcattattgcggtcttcccaagctttggagagcgttatttatcatct

SEQ ID NO: 257105 - DNA, 392 bp, Glycine max
agggccaagcgaagggaaagggttaggcatcattcatacactgaacgaacgctcagctcagtcaggtgccggcgttcctctttcacgttctcatggaaaacgacgacgtcgacatgcacgctgccgacaccagcgaagaattggatgacatgaagaagcgcttgaaggagatggaagatgaagctgctgctttgcgagagatgcaggccaaggtcgagaaggaaatgggatctgcgcaagatcctgcaaatgcttctgcaagtcaggccaataaagaggaaatagattctcgatcagtctttgtaggcaatgtggactattcatgcactcctgaagaagtgcaacagcattttcagtcttggggaacagtaaacagagtcaccattcgaact

SEQ ID NO: 257106 - DNA, 369 bp, Glycine max
gaaggtgcaagagtttgttgtgagctataagctagtttatcgtgaggagaatatgaagttgtttgttttctttgttgctgcagtagttttggtagcatggccatgccatggcgcaggctaccaaaggttccctctccgaatgaaaactggctatggtgagcgttcttcggaggtaaaatgcgcaagttttaggcttgctgtggaagcacacaacatccgagcctttaaaaccattcctgaagagtgcgttgaaccaacaaaggactacattaatggcgaacaatttagatcagactctaaaacagttaaccaacaagctttcttttatgctagtgaacgcgaagtccatcacaacgacatatttatatt

SEQ ID NO: 257107 - DNA, 371 bp, Glycine max
gaggtactgcactggttcatctctccactcatgtcccagcactcaaggacaagcttgatgatgcagatgagaggctaggagccgacattgtgcaaaaggcactgatagctcctgcagcattgattgctcaaaatgctggaatagaaggtgaagttgttgtggagaaaataaagagtggtgaatgggaggtcggttacaatgctatggtagacaggtatgagaatttagtggaggctggagttatcgaccctgccaaggtaacaaggtgtgcattgcagaatgctgcttcagttgctggaatggtgttgaccacacaagccattgtggtggaaaaacctaaacccaaagcacctgtagctggtgccccacaa

SEQ ID NO: 257108 - DNA, 324 bp, Glycine max
ggagcgaagaagatattagggtttttgagtgcggtgcggcgatcctagcactctcttctgcagctttcgccgacagcttcattcaccatggctgagcaaaccgagaaggcttttttgaaacaaccaaaagtgtttctcagctcgaagaaaactgggaagggaaagagacccggaaagggtgggaaccgcttttggaaatccattgggcttggatttaagactcccagggaagccatcgaaggaacctacattgacaagaagtgccccttcactggcaatgtttccatccgtggccgtatcttggctggaacatgtcacagtgct

SEQ ID NO: 257109 - DNA, 422 bp, Glycine max
  unsure (1)..(422): unsure at all n locations
gacaactccaacaaggcattgtttggtttggtttggttacttgaaaatctcgaatcgcttaattttgatttagttttccaccgcaacgcggaacctctttctcgaactggctaactctcaggcaagtggctcggacgctgattccagcaacacgcggctggtggttgcactgtatgacgccctaaactccggcgactccaacgccgtcgtcaagatcgtcgccgncgacctcgagtggtggttccatggntccgcctctcaccagtttttgatgcgcatgctcaccggcgactccgncgncgacaactncttccgattcgttccgcagtccatcgccgncttcggctccaccgtcatcgtcgagggctgcgactnncgccgcaacattgcctgggtccacgcctggaccgtcactgatggga

SEQ ID NO: 257110 - DNA, 331 bp, Glycine max
  unsure (1)..(331): unsure at all n locations
tgtgacaccaacaccaaaacaaacccactaagatggcttcctttgtatccttcctagtgctgcttcttgcagcccttatcctcatgcctcaagggcttgctacttactacaaaccaattaagaagccaccagtgtacaagcctccagtgtacaagccaccagtgtacaaaccaccggtttataagccaaaaccaccggtttacaagccgaaaccaccggtttacaagccaccatataagaagccaccatacaagaaaccaccttatggaaagtaccctncagtagaggacaacacccatgcctaaagcaagcaatgaggtctattatctac

SEQ ID NO: 257111 - DNA, 300 bp, Glycine max
gaccaaaactaataacaaaaactacttgtaaatttttgtgatacgtctaccgttgttgttctcagtctaagatcaccgaggctttccttgttcaatcaaaacacaaaaatggaggggactgttttcactcctgcacttgaaggaattaagcttgtaaaatcagagcaaggagaaattttgacccagcctttcttggatgcttgcaagcatatactgcctgttatagacaagtttggagctgctatggcccttgttaaatctgacatcggtggtaacatatcgagattggaatctaagtat

SEQ ID NO: 257112 - DNA, 344 bp, Glycine max
gaataacgtgtagtgccagacgcagtgactaaaccaaacctctcactcgccgtcgtagggtttctcctttcgtttagcaacaacaacaatggttgcagccaagaaaaccaagaagacccatgagagcatcaacaacaggctcgctcttgtcatgaagagtggaaaattcaccctcggttacaagacggttctcaaatcacttaggagctccaaagggaaattgattatcattgctaacaactgcccccctttgaggaaatcagagattgaatactatgctatgttggccaaggtttgagttcatcattacaatgggaacaatgtggatttggcactgcatgtgg

SEQ ID NO: 257113 - DNA, 442 bp, Glycine max
cgggaagacgacagaaggggacctcacccagttgcggaaagaaaagaccatcaaagtttcacttcagccttatccggtttagggtttcggtttttgacccaacctttgacgtatcgaaaccttaagtttcggatcaggtctgagcaatctggttggtagaacctttggtcttagagagtcaagttttatgtctgaattagacgatcaaattcctactgccttcgatccttttgctgatgcaaatgctgatgactcgggtgctgggtcaaaggagtatgtgcatattcgcgtacagcagcgaaatggaaggaaaagcctgacaaccgttcagggattgaaaaaagaattcagctataacaagatgcttaaagatgctaagaaagagttctgttgcaatggaacaggtgttcaggacccagaactaggacaggttattcaaact

SEQ ID NO: 257114 - DNA, 355 bp, Glycine max
gaagaagaagaaggagcatggccatgagcatggccatgacagcagcagcagcagtgacagtgattaaactgctgcatcacctatatatttaaaaggtttatgggaccatagtagcgagggctgtgccttaatttctctctctctctctctctctctctctctctctctctttttcctttttccctatcttgtgatctatttatgagtgagaaaaacaaaagtgagaaattgtgcgtgtatctggttgctaattcgagtgctattagtctgtggtttggttggtttgtaaccccgctacttgggttatgtttgattgtatattatcctagagaaataaaaattttaaattatcaat

SEQ ID NO: 257115 - DNA, 426 bp, Glycine max
  unsure (1)..(426): unsure at all n locations
ggcacaccaacaccaaaacaaacccactaagatggcttcctttgtatccttcctagtgctgcttcttgcagcccttatcctcatgcctcaagggcttgctacttactacaaaccaattaagaagccaccagtgtacaagcctccagtgtacaagccaccagtgtacaaaccaccggtttataagccaaaaccaccggtttacaagccgaaaccaccggtttacaagccaccatataagaagccaccatacaagaaaccgccttatggaaagtaccctccagtagaggacaacacccatgcctaaagcaagcaatgaagtctattatctacttaataaataagaggaactgctttgtgttttctagcattgtgatttacaacttcgtagcaatgcatattctngactcttgcatgcacttcaatcct

SEQ ID NO: 257116 - DNA, 288 bp, Glycine max
ggaaaacctaatcagaaaaaaaatcgtagttggaggcgccgcactccactccactccaatcaatcagatactagcgatggggaggaagcgaaaggtagcaccgaaatcttctgtatccgccgagcccccgctgaagcaacaccaaccaaaacccgaaaatgccgctcaggaatacgaagaagaggtcgaagaggaagttgaggaagaagaggtagaggaagaggtcgaagaggaagaagaagaagaggaggacgaagaggacgaggaagaagaagaagaagaccaatt

SEQ ID NO: 257117 - DNA, 405 bp, Glycine max
gattgtgattcatttgcacatttggaaagtgttgtttttctttttttcatttgcattgcaaagcaaaaaccttgcaaattgcaatggcttccaacaaggttattgccaccatcttggttctttctctccttgcctactcaacatcattcaccaatgcatgtggcacatgccacccaaaacctactccttctccccctcctccatcagggaagtgccccaaggacacattgaagctaggggtgtgtgctgatgttctaggacttgttaatgttgttgttggttcccctgtctctagcaagtgttgtgcattgcttgaaagtttggctgattcggaggctgcactttgcctttgcactgctattaaggccaatgttcttggaatcaacttgaatgtgcctatcacac

SEQ ID NO: 257118 - DNA, 330 bp, Glycine max
aggttctttcggagggggagcgccaaagtttttgtcagaggagtttcatcttgtgatcaaaagagttgatctgatagtacgaaatcgatgtcttactccattttaaggaacaaaacaagagaacaatagcctgacaaagggtttagccataaaatcgaatccatcattgatttgagatattgataaggtgaatactcatttctcgtcaatgctaggcataatgacggtataggggacctaaaaaaagattatctggacttcctatctgatgaacgttaaggtgcatgaagtgtcatatcctatcttagatattaattctagtaggtagat

SEQ ID NO: 257119 - DNA, 387 bp, Glycine max
tcatcggcattgacgtgaactcgatcaagtccgtcaaaacggcatcgtgggggttgtccaatggacaagtggcggagattctcgttacctataatgccgccacgagcctcttggttgcttctctgatccacccttcaaagaaaacaagttacatcctctctgacacagtgaacttgaagagtaatcttcccgaatgggtgagcgttgggttctctgccaccaccgggttgcatgaaggctccgttgaaacccatggtgtgatttcttggtcttttgcttccaagttgtcagatggtagcagcaatgatgctttggatcttccaagctttgtgctcaatgaggccatctaacttcaaacatcgtagttaaatgtgacaaaagaaaaat

SEQ ID NO: 257120 - DNA, 297 bp, Glycine max
  unsure (1)..(297): unsure at all n locations
ggcagacgctgtgactagacactcatctcactcgcgccatgttanggttactccttttgtttcgcaacatggttgccgctaagaaaactaagaagacccatgagagcatcaacacaggctcgctcttgtcatgaaaaatggcaaattcacccttcgttacagacccgtcttcaatcttttaaggacctccaagggaaattggataatcatggttaccactggccccctttgagaaaagcagaaattggatactaatccatggtggccaaaggtggaagtcattaattccatgggaac

SEQ ID NO: 257121 - DNA, 409 bp, Glycine max
  unsure (1)..(409): unsure at all n locations
gcctctcacgcagtgtctcactcaccccagtcacaccatggaggttgctacagcagcttctagcttcgcactcaacaagcccatgctggcattgccctcttcatctcgaactgtaaccccaatcagatgcatgaacacctccacctcccccgtcaggacctctctctctaccagcttcgtcgctccttacgccggaatctgcagcgcgtctagccctttctccggccacaagctccgtccctcctccctcaatccggcgtcgtttcttggctccaacgctaaacgaggcgtcgttaccatggttattccttttcaacgaagaagtgcatgggagcaacctncacccgacttagcttcttacttatacaaaaatcgaattggttatttgggcatgtctctggttccatct

SEQ ID NO: 257122 - DNA, 440 bp, Glycine max
cgagacgacagaaggggatctggcagcagaagaacaagtagttgagaactaagaaggagaagcaaatggcttcctcaatgatctcttccccagctgttaccactgtcaaccgtgccggtgccggcatggttgctccattcactggcctcaagtccatggctggcttccccaccagaaagaccaacaatgacattacctccattgctagcaacggtggaagagtgcaatgcatgcaggtgtggccaccagttggcaagaagaagtttgagactctttcctacctgccagaccttgatgatgcacaattggcaaaggaagtagaataccttcttaggaaaggatggattccttgcttggaattcgagttggagcacggtttcgtgtaccgtgagcacaacaggtcaccaggatactacgatggacgctactggacccatgtg

SEQ ID NO: 257123 - DNA, 393 bp, Glycine max
  unsure (1)..(393): unsure at all n locations
gataccaaaaacaaaacacaagccaagtgaaagtgagaaaaaataaaaatcaaagagcataatgtcagggatcattcacaagattggggagacccttcatgtgggagggcacaagaaggaggaggagcataagggtgagcaccatgctggagaatacaaaggggagcaccatggtgagcacagtagtgagtacaaaggagagcatcatggtgaacacaaagctggagagtaccatggtgagcacaagccagagcacaaagaggggttcctagacaaagtcaaggacaagatccatggtgaaggcggcgccgncgagggcgagaagaagaagaaggagaagaagaagaaagagcatggccatgagcatggncatgacagcagcagcagcagtga

SEQ ID NO: 257124 - DNA, 409 bp, Glycine max
tgtgataccaaaaacaaaacacaagccaagtgaaagtgagaaaaaataaaaatcaaagagcataatgtcagggatcattcacaagattggggagacccttcatgtgggagggcacaagaaggaggaggagcataagggtgagcaccatgctggagaatacaaaggggagcaccatggtgaacacagtagtgagtacaaaggagagcatcatggtgaacacaaagctggagagtaccatggtgagcacaagccagagcacaaagaggggttcctagacaaagtcaaggacaagatccatggtgagggcggcgccgtcgagggcgagaagaagaagaaggagaagaagaggaaagagcatggccttgagcatggccatgacagcaacagcagcagtgacagtgattaaact

SEQ ID NO: 257125 - DNA, 404 bp, Glycine max
tgtggctcgctctctagggtttttctttttctcttggcactgcatcgcttcaggttcttctgaaaagatgtctcgcgtgtatgttggtaacttggattcacgagtcactgacagagatctcgaagacgaattccgcgttttcggagttattcggagtgtttgggttgcacgtagaccacctggttatgcttttattgactttgatgaccgcagagacgcacaggatgctatccgtgaattggatggcacgaatggttggagggttgagctttctcacaactctagaggtggacgtggtggtcgtggtggtcgctctggtggttctgatttgaaatgttacgagtgtggtgaacctggtcattttgctcgtgaatgccgcatgcgtggtggttcaggaagacgcc

SEQ ID NO: 257126 - DNA, 342 bp, Glycine max
gacacaccccattgctacatagggctatatagcataaacatttgagtcttcattgcacaatgtcaacctcttccataaacgagtggtgcctctcttccatctccccagccaaaacctctctcaggaaggccacattacgcccttccgtcttcgcaacccttaacactccttcttctccttcctcttcatcttccttcccctctctcattcaagacaggcctgtttttgctgcccctgcccccatcatcaccccaactgtgagagaggatatggcaaaggaatacgagaaagctattgaagaactttcagaaatggtgaaggagaagagtgaactcaaagcga

SEQ ID NO: 257127 - DNA, 332 bp, Glycine max
gacacctacaccaagacagacccactaagatggctgcctttgtatccttgctagtgctgcttcttgcagcccttatcctcatgcctcaagggcttgctacttactacaaaccaattaagaagccaccagtgtacaagcctccagtgtacaagccaccagtgtacaaaccaccggtttataagccaaaaccaccggtttacaagccgaaaccaccgggttacaagccaccatataagaagccaccatacaagataccaccttatggaaagtaccctacagtagaggacaacacccatgcctaaagcaagcaatgacgtctattatctacttaa

SEQ ID NO: 257128 - DNA, 395 bp, Glycine max
gacaagataaagagaatggttgttccagatgctctgaaggtgttgagacttcagaaaggacacaagtactgcatactgggcaggttgtcatctgaagttggatggagctactatgataccatcagggagctagaaaagaagagaaaggaaaaggcacaattggtttatgagagaaagaagcagctcaacaaattaagggtgaaagccgagaaggttgctgaagacaagctcggctcccaacttgatattcttgctccagtcaagtactgagtagtctatgtttttaaatttttttatgcaacttatacccaattgaagctacctttcagttttgcttggtattggctatgaagtattgacaccgattcagacaccggacacggacacgttgacac

SEQ ID NO: 257129 - DNA, 408 bp, Glycine max
gacagaaagccatggcttctctggcaagcttagctgttgttcaaccatctactgttaagggccttgctggaactaagctctctttcaagccctctcgccagagtttcagacccaagaatttcaggagtggtgctgtggtagcaaagtatggtgacaagagtgtgtactttgatttggaggatctaggcaacactactggtcagtgggacttgtacggctccgatgcaccttcaccctacaaccctcttcagagcaagttcttcgagacatttgcctctccattcacaaaaaggggattgttactcaagtttttgatcctgggaagtggttccaccctggcatacttcagttccacagcttcaggtgacattctaccaatcaagaaaggcccacaacttccaccaaagc

SEQ ID NO: 257130 - DNA, 317 bp, Glycine max; identical to SEQ ID NO: 235644

SEQ ID NO: 257131 - DNA, 406 bp, Glycine max
  unsure (1)..(406): unsure at all n locations
ggttctagtgtgtgattgtttgttgttgtaactcgttcttcttcttttgttgttctgtgtttgtgtttgttttttctctcacctgaaaatgtcttgctgcggtggtaactgtggttgcggaagctcctgcaagtgcggcaacggctgcggaggctgcaagatgtacccagacttgagctacactgagtcaaccaccaccgagaccttggtcatgggagtggcacctgttaaggctcaatttgagggtgctgaaatgggtgtgcccgctgagaacgatggctgcaaatgtggaccaaactgctcctgcaacccctgcacttgcaagtgangtgttgggagagcaagcttcaagcagagatagcccttaattaggaataatgantaactaataaatgtgtagcttaaa

SEQ ID NO: 257132 - DNA, 449 bp, Glycine max
acagaaggggacaccaacacctttacaaacccactaagatggcttcctttgtatccttcctagtgctgcttcttgcagcccttatcctcatgcctcaagggcttgctacttactacaaaccaattaagaagccaccagtgtacaagcctccagtgtacaagccaccagtgtacaaaccaccggtttataagccaaaaccaccggtttacaagccgaaaccaccggtttacaagccaccatataagaagccaccatacaagaaaccaccttatggaaagtaccctccagtagaggacaacacccatgcctaaagcaagcaatgaggtctattatctacttaataaataagaggaactgctttgtgttttctagcattgtgatttacaacttcgtagcaatgcatattcttgactcttgcatgcacttcaatccttcgtagcattaatgat

SEQ ID NO: 257133 - DNA, 425 bp, Glycine max
  unsure (1)..(425): unsure at all n locations
tttgaagggggttctagtgtgtgattgtttgttggtgtaactcgttcttcttcttttgttgttctgtgtttgtgtttgttttttctctcacctgaaaatgtcttgctgcggtggtaactgtggttgcggaagctcctgcaagtgcggcaacggctgcggaggctgcaagatgtacccagacttgagctacactgagtcaaccaccaccgagaccttggtcatgggagtggcacctgttaaggctcaatttgaaggtgctgaaatgggtgtgcccgctgagaacgatggctgcaaatgtggaccaaactgctcctgcaacccctgcacttgcaagtgangtgttgggagagcaagcttcaagcagagatagcccttaattaggaataatgataaactattaatgtgtagcttaaaacttatgtatt

SEQ ID NO: 257134 - DNA, 395 bp, Glycine max
  unsure (1)..(395): unsure at all n locations
gaaaaaaaagaaaaaaagattctaaagaaatataactaatattctttagaataatcaaaaagaatattaaattcaaataaattttagatagaaaaaagacttaaaaaggaggatttgaaatgcgagatctaaaaacatatctttccgtggcaccagtagtaagtactctatggttcggggctttggcgggtctcttgatagagatcaatcgtttttttccagatgcattgatattcccttttttttcattctagttattgacacggaaaggggtgaagaagattatagatccaattaagtattaaatatatgtaattaatatgtaattaatctcctcttctttatttcgtcttttatntcttcttttttttacaattgtnatagaataaggttag

SEQ ID NO: 257135 - DNA, 409 bp, Glycine max
ggcacaagtgagtttgttgatcgagataactagaaacagtgtgatgaaaatgaaggtccttgttttcttcgttgctacaattttggtagcatggcaatgccatgcgtacgatatgttccctctccgaatgaacactggctatggtgcccgtactccggaggtgaaatgcgcaagttggaggcttgctgtggaagcacacaacatctttggctttgagaccattcctgaagagtgcgttgaagcaacaaaggaatacatccatggcgaacaatatagatcagactccaaaacagttaaccaacaagcttacttttatgccagagacctcgaagtccatcccaaggacacatttgtgttcagtatagatggcaccgtactctctaatattccatactacaagaaacatgga

SEQ ID NO: 257136 - DNA, 350 bp, Glycine max
gaaaaaaaaagaaaaaaaagattctaaagaaatataactaatattctttagaataatcaaaaagaatattaaattcaaataaattttagatagaaaaaagacttaaaaaggaggatttgaaatgcgagatctaaaaacatatctttccgtggcaccagtagtaagtactctatggttcggggctttggcgggtctcttgatagagatcaatcgtttttttccagatgcattgatattcccttttttttcattctagttattgacacggaaaggggtgaagaagattatagatccaattaagtattaaatatatgtaattaatatgtaattaatctcctcttctttatttc

SEQ ID NO: 257137 - DNA, 398 bp, Glycine max
  unsure (1)..(398): unsure at all n locations
gacagcgaaacagagagtgatttcagtgagtgatcggtgttcacttgatctcatcataatcgtcagcgtcaattgaagaagatgccgatcagaaacatcgccgtcggaaggcctgaagaggcgactcaccccgacacgttgaaggcggctttggctgagttcatctcaaccttcatcttcgtgttcgccggctcaggctccggcatcgcctacaacaagctcaccgacaacggcgctgccacccctgccggcctcatctccgcctccatcgcccatgcattcgccctcttcgtcgccgtctccgtcggcgccaacatctccggcggccacgtcaaccccgncgtcaccttcggcgccttcgtcggcggcaacatcaccttccttcgcggcatcgtcta

SEQ ID NO: 257138 - DNA, 392 bp, Glycine max
gaacctcaaaaagagttctttcaaaatgcagacagccttaaccttcgctgcccccaacgttgtgccattggcacccacaaagagtgtctaccatattaccatctttcccaccaaattgaaagccccgcgctcctcacctcgttactctccgattagggttgcaaccgtggagcccgacacttcaactgtcgactacaactctgcgttctcagtgtttcctgcataagcatgcgaaactgtaagaggggaagcctgcatggcagagatgtaccctgaaacgaagctacagccagaggctaagactccacgagtcgttacagagaacgttgagagagagtatctggaatacgatgatcctaaaacggtatttcgaggagaggcttgtgatgatc

SEQ ID NO: 257139 - DNA, 409 bp, Glycine max
aagacgacagaaggggaggacaactttgcctctagccagatattttggctattgaaagaaagtgagctaactcctagtaatgccaatatattggatggtcgatatgccgtctttggctatgtaacagaaaatgaggataacttggcagatctcaaagttggtgatgtcatagaatccattaaagtagtttctggcctggataatttggtgaatcccacctacaagattgctggctagttctgtgcttttgctatcaaatactgcatgagtgtttatttggcacttgcttcaaggctatattcaggaatgctggctattacattgctaagttcactcccccctggtttgtttccattgctattggaaaaagccattaatcattttactagaacctagcattcagttaaac

SEQ ID NO: 257140 - DNA, 413 bp, Glycine max
gacaccaacaccaaaacaaaggcactaagatggcttcctttgtatccttcctagtgctgcttcttgcagcccttatcctcatgcctcaagggcttgcttccttactacaaaccaattaagaagccaccagtgtacaagcctccagtgtacaagccaccagtgtacaaaccaccggtttataagccaaaaccaccggtttacaagccgaaaccaccggtttacaagccaccatataagaagccaccatacaagaaaccaccttatggaaagtaccctccagtagaggacaacacccatgcctaaagcaagcaatgaggtctattatctacttaataaataagaggaactgctttgtgttttctagcattgtgatttacaacttcgtagcaatgcatattcttgactcttgcatg

SEQ ID NO: 257141 - DNA, 181 bp, Glycine max
tagggttattagacacattcttcagcgactgcgtttttggatcggaacctcttctgcggcgtagcaatgggacactccaacgtttggaactctcacccaaaaaactacggtcctggttctcgcacttgccgtgtgtgtaagaatccacatggactaatcaggaagtatggccttatgtgct

SEQ ID NO: 257142 - DNA, 376 bp, Glycine max
gatccatctttttcttcttactctagactcttgcttttctcttctctgtctaaggggtgccctgagatcacattgaacaatggtgaaggctgtggccgttcttggcagcagtgagggtgtcactggaactattcacttcgttcaggagggaagtggtccaaccaccgtaactggatctcttgctggtcttaagcctggtctccatggtttccatgtccatgccttgggggacactaccaatggttgcctctcaactggatcacatttcaatcctaataacaaggagcatggtgcccctgaggatgagaatcgtcatgctggtgatcttgggaatgttaatgtcggtgacgatggtactgtcagcttcactattact

SEQ ID NO: 257143 - DNA, 404 bp, Glycine max
gattgctacatagggctatatagcataaacatttgagtcttcattgcacaatgtcaacctcttccataaacgggtggtgcctctcttccatctccccagccaaaacctctctcaggaaggccacattacgcccttccgtcttcgcaacccttaacactccttcttctccttcctcttcatcttccttcccctctctcattcaagacaggcctgtttttgctgcccctgcccccatcatcaccccaactgtgagagaggatatggcaaaggaatacgagaaagctattgaagaacttcagaaattgttgagggagaagagtgaactcaaagcgacagctgctgaaaaagtggagcagataacagcttctctagggacatcatcatctgatggcatcccatcatca

SEQ ID NO: 257144 - DNA, 407 bp, Glycine max
gaactatgatggatctagcactggacaggcaccgggtgatgatagtgaagtaatcctatatcctcaagcaattttcaaagatcctttccgtggtggtaacaatattttggtcatttgcgattcttacaccccacaaggtgagcctatccctacaaacaagagacacagagctgctgaaattttcagtaacccaaaggtccaagcagaagttccatggtatggaatagaacaagagtacaccttacttcaaacaaatgtgaaatggccattaggttggcccgttggtggctatcctggtcctcagggtccttattattgcagcgctggggcagacaagtcatttggacgtgacatatctgatgctcattacaaggcttgcttatatgctggaattaacatcagtggta

SEQ ID NO: 257145 - DNA, 402 bp, Glycine max
caacataggtcatcgaaaggatctcgaagacccaccaacgcacgaaagccgggatctttcagaaaatggattcctattcgaagggtgcataaccgcatggataagctcacactaacccgtcaatttgggatccaattcggttccttaggaggtatcgggaaggaattttggaatgtaataatatcgattcacacagatacagaagaaagggttctctattgattcaaacgctctacctacgagatagggatagagaaagaggaaaaaaccgaggatttcacatagtacttttggtcgaaaaatcgatctgatttttttcgtacttttcgctcaatgatgaaatgggtcagattctacaggaccaaaccttgtgggagttaaagaatgatggaagaaaagaaa

SEQ ID NO: 257146 - DNA, 407 bp, Glycine max
tggcacaagtgagtttgttgatcgagataactagaaacagtgtgatgaaaatgaaggtccttgttttcttcgttgctacaattttggtagcatggcaacgccatgcgtacgatatgttccctctccgaatgaacactggctatggtgcccgtactccggaggtgaaatgcgcaagttggaggcttgctgtggaagcacacaacatctttggctttgagaccattcctgaagagtgcgttgaagcaacaaaggaatacatccatggcgaacaatatagatcagactccaaaacagttaaccaacaagcttacttttatgccagagacctcgaagtccatcccaaggacacatttgtgttcagtatagatggcaccgtactctctaatattccatactacaaaaaacat

SEQ ID NO: 257147 - DNA, 413 bp, Glycine max
tggcagttcaattccaatatattccattctctctgtgtatttccctacctctgccttcaagatgcagatcttcgtcaagaccctcaccggcaagaccatcacccttgaggtggaaagctctgacaccatcgacaacgtcaaggccaagatccaggacaaggaaggaatccccccggaccagcaacgtctcattttcgccggaaagcaacttgaggacggccgtacccttgctgactacaacattcagaaggagagtactcttcacctcgtcctccgtctccgtggtggcatgcagatcttcgttaagacactcaccggcaagaccataaccctagaggttgaaagctccgacaccatcgataacgtcaaggccaagatccaagacaaggaaggtattcccccggaccagcaac

SEQ ID NO: 257148 - DNA, 308 bp, Glycine max
tgtggcactcacaactccataacacaaggcagaaagcaagctcatcctagagttttaaaaatggcagcagcctcctccatggctctctcttccccatccttggctggcaaggccgtgaagctgggcccatcagcccccgaagtcgggagggtcagcatgaggaagaccgtcaccaagcaggcctcctccggaagcccatggtacggcccagaccgcgtcaagtacttgggcccattctctggcgagcccccgtcctacctcactggcgagttcccaggtgactacggctgggacactgctgggctttc

SEQ ID NO: 257149 - DNA, 422 bp, Glycine max; identical to SEQ ID NO: 256428

SEQ ID NO: 257150 - DNA, 363 bp, Glycine max; identical to SEQ ID NO: 236410

SEQ ID NO: 257151 - DNA, 425 bp, Glycine max
  unsure (1)..(425): unsure at all n locations
gacaactccaacaaggcattgtttggtttggtttggttacttgaaaatctcgaatcgcttaattttgatttagttttccaccgcaacgcggaacctctttctcgaactggctaactctcaggcaagtggctcggacgctgattccagcaacacgcggctggtggttgcactgtatgacgccctaaactccggcgactccaacgccgtcgtcaagatcgtcgccgccgacctcgagtggtggttccatggtccgccctctcaccagtttttgatgcgcatgctcaccggcgactccgncgncgacaactccttccgattcgttccgcagtccatcgccgncttcggctccaccgtcatcgtcgagggctgcgacttccgccgcaacattgcctgggtccacgcctggaccgtcactgatgggatga

SEQ ID NO: 257152 - DNA, 426 bp, Glycine max
ggagggacacaaaaaattctctcttttctctgagtcgcagcttttacgttttcctaattctttgtccttagcatcaccatctccatggccaacaccaaacacctcacatttactttcaccatcgttctcacgctcctcttctcattcgccacagcaaaatccccaacggctttgggtgtccagaaggagaagctcagccaccttcacttcttcttccacgacatagtgagcggtccaaagcccaccgcggtgagagtggcccaggcccacatgaccaacaccccctccacgcttttcgggctcctgatgatggccgacgacccattgaccgtgggccccgagcccgggtccaaactcgtgggaaaggcccaaggaatttacggatttgcgtcccaggaagatatgggtttattgatgatcatgaat

SEQ ID NO: 257153 - DNA, 332 bp, Glycine max
tgatcttacctcagcaccatcaatactataggctggcccatgagaagcttcgagaacgaccgccaatacaccctatcatcgtcacagagccattccatagacgtgtgcggtgaaggccctatcgctacagatcgagaacctagccatgtccggaggaaggcttctacctccggcttggaaaccggcgagactgccgtcgacggctcccgccgctatggcgccgaaagacgaaccctacgaaagcatcgtgctgcgacatacagcggagcttctaaccgcactacattgtacacttagaagctacatgacgatactgagcgtctcgctaatga

SEQ ID NO: 257154 - DNA, 373 bp, Glycine max
ttggatagcagcatcatacaaagcattgaattcaaagaactaagttcatttcttgtgctttgctttattcctcaaaaccaaacatgtcgaacacatgcggcaactgtgactgcgctgacaagactaactgcaccaagggaaacagctatggtgttatagtagagactgagaagagctacatcgagactgttgacatggatgttccagcagctgagcatgatgggaagtgcaagtgtggcactaactgcacttgcacggactgcacttgtggccattaaggaatatggatgaaaatgtaattgccatgtgtttggcaatacaaatctccaaataatgtaatcttcgtatgaataaatgtgtgctgttatcctac

SEQ ID NO: 257155 - DNA, 423 bp, Glycine max
gactcacgttacacaacgcatacacatacattgcggaagcactttcgtctcggaaggcgttctttcgagttatcgcacgcttaaaggacgcacgtgtgctgctgatgcgcatgcctgacatgagtgcaccaatgatacagctagccgggtcatgcaatgacggttatgagaacctagcacactgcctatattacctgatgcacggtggacatgatccagaatcgcgctgtagcactgtgaggaacattccgggctgtgccatgaccacctttggcaaacagaccgtgagcgaatgtccacagcaagctgctaacaactatggcatcaacgacgaatacgctcaagcacttgccggccgctgcaatgtactcgtccgttacaagatcatgcgatccagcaactgcgactccatcaagttctaaa

SEQ ID NO: 257156 - DNA, 418 bp, Glycine max
  unsure (1)..(418): unsure at all n locations
gaccaagtgaaccaatatagcccaagccctatacaacgaaaccctaacacacacccatttgattcagtttccatggctagcctcaaggttgcatttttggctgtagtgctctgcatggttgtggtgagtgcacccatggcacatgcagctatcacgtgcgggcaggtgacgagtagcctggccaattgcatcggttacctccagaagggaggaacgccgtcgtcgggatgctgcaacggagtgaagagcctcaatgccgncgccaagaccaccgtcgaccgccagacggcgtgcaactgcctcaagtcggccgtcagccaaatctccggcttcaacgccaacaacgccgtctcgctccccggcaaatgcggagtctccatcccctacaagatcagcaccttcaccaactgcgctacca

SEQ ID NO: 257157 - DNA, 320 bp, Glycine max
ggggaaaccctaattctgcgtggtgggtgaaaaaggccgtgcccttgctcttcaaaaaggtcgggaaaaaacgcctcaagaaatttatacgcccccagagtgatcccaagatctccggtcagccaagctggcgcaaacccaaaggtattgattctcgtgtcaggagaaagttcaaaggatgcactttgatgcccaacattggttatggctcagaacagaaaacccgccattatctaccaaatggtttcaagaaatttgtcgtgcacaatgtgaaagacctgtaacttctcatgatgcataacaggacatactgtgctgag

SEQ ID NO: 257158 - DNA, 423 bp, Glycine max
gggcagcagaagaacaagtagttgagaactaagaaggagaagcaaatggcttcctcaatgatctcttccccagctgttaccactgtcaaccgtgccggtgccggcatggttgctccattcactggcctcaagtccatggctggcttccccaccagaaagaccaacaatgacattacctccattgctagcaacggtggaagagtgcaatgcatgcaggtgtggccaccagttggcaagaagaagtttgagactctttcctacctgccagaccttgatgatgcacaattggcaaaggaagtagaataccttcttaggaagggatggattccttgcttggaattcgagttggagcacggtttcgtgtaccgtgagcacaacaggtcaccaggatactacgatggacgctactggaccatgtggaag

SEQ ID NO: 257159 - DNA, 406 bp, Glycine max
gagagttaagttgagaacataccaatctacaatggacgatgattctcattatctccctcattttttctcttctctctttctcccatgcttctgtcctagatttctgtgttgcagattatgcaggtcctattggacctgcaggatattcctgcaagaagccttcaaaggtcacagcagatgattttgcttacagtggccttggcattgctggtaacacctcaaacattatcaaagctgcagtgacccctgcatttgatgctcagtttgctggtctcaacggtcttggcatttccgcagcacgtttggacttagcagcaggtggagttataccacttcacactcattctggagcttcagaattacttgttgtaattgaaaggagcatcctagctggattcatttcttc

SEQ ID NO: 257160 - DNA, 419 bp, Glycine max
gacgcacttagcaatcaatcaaaacattcccaatagcgataatatacacatcttgaattaagctccttctcctatagccatggctctttctaagcttataattgcttcccttcttgcgtcgcttctccttcttcatttcgttgatgctgatcaatcggcacatgcacaaacgcaggggtctcttcttcagcagatagattgtaacggagcatgtgctgcgaggtgccgtttatcatctcgtccacgcctctgccaaagagcttgtggaacttgttgtagacgctgtaactgcgtgccacctggcactgctggaaaccaagaagtgtgtccctgctatgcaagtttgactactcatggtggcaaacgcaagtgcccttagacttaattggaccactatcctatgcatgccttagatttat

SEQ ID NO: 257161 - DNA, 410 bp, Glycine max
  unsure (1)..(410): unsure at all n locations
gaccattcattccgacattgccatttttcacaccaccaacacaagatgtttctccacattgtgttcctccttttccttctctcatccacttcccatgccactgtccaagacttctgtgtggcaaacctcaaaggtgcacacacccttgcaggttacctgtgagcgacacgtgcttgtgactttacatgacactgtgtacactgggttagctgaaactgctaatgtgacacacataatcaatgctgctgtgaccccagcttttgttgctcaattcccaggtctcaatggccttgaactatctgcagcaaggttggaccttggtcctagtggtgttatcccactccacactcatcccggtgccaatgaactactcattgtgcttcaaggtcacatccttgcntggattcata

SEQ ID NO: 257162 - DNA, 411 bp, Glycine max
ggcaaaactaagtggaataagagctgaaaaaccgtaataacaatgggaggaaaatgtccgcacaggaacgtgaagaagagaagatattctcacaagaccgcgcggcgaaccaaatttgagctgaaaggggacgacatggtttatgcgcagctcaacaaacccgatcaagagagaccccctttacccgtcgacgaagatttgcctgggatgggccagtactattgccttcactgcgatcggtactttgccaatataactgtgagggatgagcactttaagaccaaacgacacaagaagcgtataaaacaaatgatgggtcctgcaccacatactcaacttgatgccgatttagcttctgggatgggtatgccagacaatggaccaaagctaatgtctatgtaacttcttttt

SEQ ID NO: 257163 - DNA, 413 bp, Glycine max
  unsure (1)..(413): unsure at all n locations
ngagcgccaatgtttttttcagaggagtttcatcgtgtaatcaaaagagtttatcttatagtaagaaatcgatgtcttactccattttaaggaacaaaacaagagaacaatagcctgacaaagggtttagccataaaatcgaatccatcattgatttgagatattgataaggtgaatactcatttctcgtcaatgctaggcataatgcgggtatagggacctaaaaaagattatcttttcttcctatcttatgaactttaaggtgtatgaagtgtcatttcctatcttagattttaattttagtaggtagataaagagtccatttaacttaagttgatctaggccagaagcagacctacgtcaagataatccttctttgaaacactttggtagtgctcttagattgtaatcaa

SEQ ID NO: 257164 - DNA, 405 bp, Glycine max
ggtgcctctcgtctccctttgcacaaaccctaacacctaaaagccagaagaagcgaaatcgtaatcgcaatctagcggatatgaaggtcgtcgctgcatacttgctcgcagtgttgggagggaatccatctccttctgccgatgatatcaaaaacatcctcggcgcagttggagctgaggctgagcatgagttgattgagttgctcttgaccgaagtcaagggcaaagacttcaatgagctacttgctagtggaagtgaaaagatttctgcagtggctggtggtggtgcagcggttgctgttgctgctgcaccagcgggaggtgctggtggcggtgctgcacctgctgccgaagcataggaagaaaagaaagtagaggagaaggaggaatctgatgatgatatgg

SEQ ID NO: 257165 - DNA, 337 bp, Glycine max
gaagcttcaataagtaagtatcaatggctttcgaagaatcccagaacaagccccccagcgagcagtccactaccgaactcatcacgagcgcgaagctggtggcggaggcggcgcagtcggctctgaagagcgacagcgacaaagtggacaaggccaaggtggctgacgctgccggcgatcttctcgacgcggcggggaagtatggaaaacttgatgacaaacaaggcatacggcaatatgttgacaaggctgctgattatctgcataattaccagggtgataataccactgctccttcacagcctgcagagtctaaaggtgaagaaagtggtggtgg

SEQ ID NO: 257166 - DNA, 414 bp, Glycine max
ggttcataatcattacacatcataagctctctctgtaaggtttaatcagactcaagggtttaagccatgggaaaaaagaaagcaaaagcaaagcctcctccaaagaagcgaatggataagctcgataccgtcttcagctggcctttctgcaatcatggcagcagcggtcaatgccggctttgacatgaaaacttggtaagggaaagctatctgcgggataatgccagaaaactttaacactaccaatacaagtttattcaaaaccattggacatattcagtgagtggattgatgaatgtgaaactggtaaccaccccggacgatgatagtgctgagcactgatgctcagaatcctgttcctgtcggtgtgaactgattaactgggccaatttatatcttcaacctgtaactatg

SEQ ID NO: 257167 - DNA, 392 bp, Glycine max
  unsure (1)..(392): unsure at all n locations
ggcacaagtgagtttgttgatcgagataactagaaacagtgtgatgagaatgaaggtccttgttttcttcgttgctacaattttggtagcatggcaatgccatgcgtacgatatgttccctctccgaatgaacactggctatggtgcccgtactccggaggtgaaatgcgcaagttggaggcttgctgtggaagcacacaacatctttggctttgagaccattcctgaagagtgcgttgaagcaacaaaggaatacatccatggcgaacaatatagatcagactccaaaacagttaaccaacaagcttacttttatgccagagacctcggagtccatcccaaggacacnattgtgttcagtatagatggcaccgtactctctaatattccac

SEQ ID NO: 257168 - DNA, 447 bp, Glycine max
  unsure (1)..(447): unsure at all n locations
acagaagggaaaggagattcccgtttcagttacattcaattcaacgattgaccaaaagagaattcaaaaaataacatttagatcacccaaattccaatatttctatgaaacaataattaaatctaacgaatttatttcgattgattgtatccatatggggtaataataaaagggggaggagagcttaaaaaaacaagataacaaataaagtataagtgcggggggtcaaactgggtgtatataatcggatcactataagacaactctttcttttgaggtttcaaagaatgattttcgaattcgattgaatctaaaacacanaagaattggtttacaggatagaagaaacccacgtatatgtgataggatattctatatgaactagttatatatgaactaaccatatccatatatattatataaaataactaatattttatatctaaa

SEQ ID NO: 257169 - DNA, 422 bp, Glycine max
gagggtttgtaactttgtcttttgcttgcgagtctgaatcgaataataatcaatcaatcatcatgtcgtcggcgaagaagatcacactgaagagttcggacggcgaggctttcgaggtggacgaggcggtggcgctggagtctcagacgataaagcacatgatcgaggacgactgcgccgacagtggcatccctctgccgaacgtgacgagcaagatcctggcgaaggtgatcgagtactgcaagaagcacgtcgaggccgcgaatcccgaagacaaacccttcgaggacgatctcaaagcctgggacgccgatttcgtcaaggtcgaccaggccacgctcttcgatcttatcctggctgcgaactacttgaacatcaagagcctgctggaccttacatgccaaactgtagccgacatgatc

SEQ ID NO: 257170 - DNA, 381 bp, Glycine max
ggaagcttcaataagtaagtatcaatggcttgcgaagaatcccagaacaagccccccagcgagcagtccactaccgaactcatcacgagcgcgaagctggtggcggaggcggcgcagtcggctctgaagagcgacagcgacaaagtggacaaggccaaggtggctgacgctgccggcgatcttctcgacgcggcggggaagtatggaaaacttgatgacaaacaaggcataaggcaatatgttgacaaggttgctgattatctgcataattaccagggtgataataccactgctccttcacagcctgcagagtctaaaggtgaagaaagtggtggtgggttaggtggtcttgcaaactttgctggaggcttcttcaaaaag

SEQ ID NO: 257171 - DNA, 403 bp, Glycine max
gatctggcagcagaagaacaagtagttgagaactaagaaggagaagcaaatggcttcctcaatgatctcttccccagctgttaccactgtcaaccgtgccggtgccggcatggttgctccattcactggcctcaagtccatggctggcttccccaccagaaagaccaacaatgacattacctccattgctagcaacggtggaagagtgcaatgcatgcaggtgtggccaccagttggcaagaagaagtttgagactctttcctacctgccagaccttgatgatgcacaattggcaaaggaagtagaataccttcttaggaagggatggattccttgcttggaattcgagttggagcacggtttcgtgtaccgtgagcacaacaggtcaccaggatactacgat

SEQ ID NO: 257172 - DNA, 421 bp, Glycine max
gattatatatgaaatttatattcgtatttctttgtgtatttaaaaatattcgttgaacctagttaattgaaattagtctaacgtttgtatttgttacaaaaaaagctttttgaattccccgtaaaaatagattgcgctaatgaaaaagctttcaatgttgtaaaatatcccttctttttccataaagtgttccgaatccttttttttgatatagaagtgcgcttttttggaactgccatataattagtatagcttttgattgttatagaattcgatgtgaaagacatttttatgaaaatatatttatctttaattagccatatattgtatctatcttaattcccattttttactatttcaagtaaaacattgaatattataatactttttctaaaattttccaaacatagatattgcttat

SEQ ID NO: 257173 - DNA, 239 bp, Glycine max
gagcgccaatgtttttttcagaggagtttcatcttgtaatcaaaagagtttatcttatagtaagaaatcgatgtcttactccattttaaggaacaaaacaagagaacaatagcctgacaaagggtttagccataaaatcaaatccatcattgatttgagatattgataaagtgaatactcatttctcgtcaatgctaggcataatgcgggtatagggacctaaaaaagattatcttttc

SEQ ID NO: 257174 - DNA, 368 bp, Glycine max
gttggaaaaaccaccgaaagggatcttaagccactttagagaaaaatggcggacccttggtttcggaaaaaaatctggaaaaaaagggggaaaaattcaaaaaggcctaaaatggccaggaaattttccgccaaaacaaactggcgttaacaaaagggttttaattcccgtggtaaggagaaagttcaagggatgcactttgatgccaaacatcggtaatgggtctgacaagaagacccgccactatttccctaatggttttaagaaatttgttgtcacaatgtgaaagacttggaactgctcatgatgcacaacaggacttactgtgctgagattgctcacaatatattcacaagaaagagaaaaga

SEQ ID NO: 257175 - DNA, 425 bp, Glycine max
tggcacaagtgagtttgttgatcgagatagcgagaatcagtgtgatgaaaatgaaggtccttgttttcttcgttgctacaattttggtagcatggcaatgccatgcgtacgatatgttccctctccgaatgaacactggctatggtgcccgtactccggaagtgaaatgcgcaagttggaggcttgctgtggaagcacacaacatctatggctttgagaccattcctgaagagtgcgttgaatcaacataggaatacatccatggcgaacaatatagatcagactccaaaacagttaaccaacaagcttacttttatgccagagacctcgaagtccatcccaaggacacatttgtgttcagtatagatggcaccgtactctctaatattccatactacacaaaacatggatatggggtggagaaa

SEQ ID NO: 257176 - DNA, 320 bp, Glycine max
caacataggtcatcgaaaggatctcgaagacccaccaacgcacgaaagccgggatctttcagaaaatggattcctattcgaagggtgcataaccgcatggataagctcacactaacccgccaatttgggatccaattcggttccttaggaggtatcgggaaggaattttggaatgtaataatatcgattcatacagatacagaagatagggttctctattgattcaaacgctctacctacgagataaggatagagaaagaggaaaaaaccgaggatttcacatagtacttttggtcgaaaaaatcgatcttgattttttc

SEQ ID NO: 257177 - DNA, 419 bp, Glycine max
  unsure (1)..(419): unsure at all n locations
ggagtcggttggtatttgtttttgttgttggctgtgcgatcactcatctcacctcttctcatcaacgctgcgaaagacaatggagctgacaccccagcagctgagccaatacaacggcacggacccatcgaagccgatctacgtggcggtgaagggccgcgtctacgacgtcaccaccggaaaatccttttacggccccggcggcccctacgccatgttcgccggcaaagacgccagcagagccctggcgaagatgagcaagaacgacgacgacatctncccctccctcgacggcctctccgacaaggagatcggcgttctcaacgactgggagaacaaattccaagctaagtaccctgtcgttgctcgtgttctcaattaatcatatgataacctaagtgtattttgtactctatcat

SEQ ID NO: 257178 - DNA, 432 bp, Glycine max
agggacacaccccattgctacataaggctatatagcataaacatttgagtcttcattggacaatgtcaacctcttccataaacgggtggtgcctctcttccatcttcccagccaaaacctctctcaagaaggccacattacgcccttccgtcttcgcaacccttaacactccttcttctccttcctcttcatcttccttcccctctctcattcaagacaggcctgtttttactgcccctgcccccatcatcaccccaactgtgagagaggatatggcaaaggaatacgagaaagctattgaagaacttcagaaattgttgagggagaagagtgaactcaaagcgacagctgctgaaaaagtggagcagataacagcttctctagggacatcatcatctgatggcatcccatcatcagaagcctcagacagga

SEQ ID NO: 257179 - DNA, 301 bp, Glycine max
gtactgaagctggtttacttgctctacgagaacgtcgaatgaaggtgactcatgccgactttaagaaggccaaggataaagtaatgtttaagaagaaagaaggggtgcctgaagggctgtatatgtgaaaaactatcctctattatctctggccctcttgtctttcttttaacgttctagttatgcgaacaaatgccaattcatttgtattctgcgaacaaatgtcagttgtattttaggggctttgaatctcaacaacgattttaattcaatatagttttctttcaatttcctcgatttc

SEQ ID NO: 257180 - DNA, 381 bp, Glycine max
aggggagcgaagaagatattagggtttttgagtgcggtgcggcgatcctagcactctcttctgcagctttcgccgacagcttcattcaccatggctgagcaaaccgagaaggcttttttgaaacaaccaaaagtgtttctcagctcgaagaaaactgggaagggaaagagacccggaaagggtgggaaccgcttttggaaatccattgggcttggatttaagactcccaaggaagccatcgaaggaacctacattgacaagaagtgccccttcactggcaatgtttccatacgtggccgtatcttggctggaacatgtcacagtgctaagatgaacaggactattattgttaggaggaattatctccattttatcaagaag

SEQ ID NO: 257181 - DNA, 416 bp, Glycine max
ggcacaagtgcgaatgatgatcgagatagctcggagcagtatgatgaaaatgaaggtgcttgttttcattagttactacgatgttgggtgcatggaaatgccatgtgttcgatatggtgattatgcgtatgaacattggctatggtgacagcactacggaggtggaatgcgctcattggacgatcgctgtaggagatcactacatgtttggatttgtaaccattcctgaagagtgattctgagcatcataggaatacatacattgactgcagtattgatgagactccaagacggataaccgagatgcttgctattgtgcaatagacttcgctatacatccgtgggacacataagtatccagcatagatagcaccgtgctctataatagatcatactgcaactgacatggttttggg

SEQ ID NO: 257182 - DNA, 218 bp, Glycine max
ggcacaagtgagtttgttgatcgagataactagaaacagtgtgatgaaaatgaaagtccttggtttcttcgttgctacaattttggtagcatggcaatgccatgcgtacgatatgttccctcttcgaatgaacactggctattgtggccgtactctggaggtgaaatgcgccaagttggaggcttgctgtggaagcacacaacatctttgggttttag

SEQ ID NO: 257183 - DNA, 415 bp, Glycine max
  unsure (1)..(415): unsure at all n locations
gatatacattctcttgtcagagtgttctgtgtcaccggaactcgtttctttcaaaacacttcaaacatctcgaacgctctctttccggcaactaggttaaagttcatcaatggcaggtcgcggcaaaaccctaggatctagcgccgccaagaaggctacctcaaggagcagcaaagccggcctccaattccccgtcggccgtatcgcccgtttcctcaaggccggaaaatacgctgagcgtgtcggcgccggcgcccctgtctacctcgccgncgtactcgaatatctcgcggctgaggttttggaattggctggaaacgctgcgagagacaacaagaagactcgaattgtgccgcgccacattcaattggcggtgaggaacgacgaggagttgagcaagctactcngtgacgtc

SEQ ID NO: 257184 - DNA, 447 bp, Glycine max
  unsure (1)..(447): unsure at all n locations
agacgacagaagggaataatgaataaaaaaatcaaataataattaataagaaagaaaaaagtgtaaatcaaatagaaatttataaaatctatgatcctagagtagttccctagacaaaatagaagtaagttcacaaacaagattcaagaataagattctctgatgaaaggagagaaatatgtctgaggatccgctgggtataaggagtgaaagaggggatcatttgtttcttgaacagttcctttaaaaaaattttctatcggatttttgagtcataggagattttatgatttatgacttggaggatttttaagaatagaaaggaataactacattgagttcatcgatttgccctagatatcaatagactcataaattattttttattcgaaaccatanagaataaattaaaagaaaaaaaaaagcggcccgctctagaggatccaa

SEQ ID NO: 257185 - DNA, 412 bp, Glycine max
gaagaacggtgatgctggttttgttaagatgattccaaccaaacccatggttgttgaaactttctccgagtatcctccacttggtaggtttgctgttagggacatgcgtcaaactgttgctgtgggagtcatcaagaacgttgagaagaaggatcctaccggagccaaggtcaccaaggctgcccagaagaagaagtgaatcgtgcgggctggttcatcaggggatgttggttacaataaatgttggtttcttttctgtactcttgtgtcttcttttctaggtagcttgtttttcggacaaagtttgaagtctccaccatcatctcgcaactgttgttcccagaactgggttcttgatcgacggtggcaaaattgcttttatttatctgtgttttaatgtgttgtgtttgtc

SEQ ID NO: 257186 - DNA, 424 bp, Glycine max
gattatatttgagttcaaacaaatcaaagccatggccacctccaacttctctattgctctctccgtctccctagccttctttttggtgctacttaccaaggcacactcgaccgataccgtttctttcaccttcaacaagttcaacccagtccaaccaaacattatgctccaaaaagatgctagtatttcatcctctggggtgttacaactcaccaaagttggcagcaacggcgtgcccacctcgggatctctcggtcgtgccctttacgctgccccaatccagatttgggacagcgaaaccggcaaggtagccagctgggctacatcctttaaattcaacattttcgcacccaacaaatcaaactcagctgacgggcttgccttcttcttggcacccgtcgggtctcagccccaatccgacgat

SEQ ID NO: 257187 - DNA, 416 bp, Glycine max
  unsure (1)..(416): unsure at all n locations
gaaagaaaagagaaatggcaacagaaacaaaagtggcagtattaggtggcatcaccgaagtgcagggagctgccaacagcgtcgagatcaacaatctcgctcgctttgctgtagaggaacaaaacaaaagagagaattcagttctggagtttgtgagggtgattagtgcacagcagcaagtggtttctggagtgaattactacataacattggaagcaaaagatggtgagattaaaaatgagtataaagcgaaggtttgggagagggaattccaagagttgctagaattcatgccaacattaggtgcaggaggcgagatcgaccatctcgctcgctttgctgtagaggaacaaaacaaaagagagaatgcaaatctggagtttgtggnggtgattaaggcaaagcagcaagtggtg

SEQ ID NO: 257188 - DNA, 337 bp, Glycine max
gacacccaaatccttcttcaccttcacaattggaaaaaaaaaaaaaaaaaaaaaaaaaaaaaaagcggcggtttaaaagaaccaagcttaacttccccttccttccaacttataagccttttaatggggtaactaaatttaatttaatgggccgtcgtttaaaaacgtctgaccgggaaaaaccttggggtacccaaattaaacggcttggaagaaaatccccttttgtcaagttggggaaataccaaaaaggcccgaacgaatggcctttccaaaaattgggcaacccgaattggcaattggaacaccccttgaacggggcaataaaccccgccgg

SEQ ID NO: 257189 - DNA, 413 bp, Glycine max
catgttagatggctacgaaattccagccaagacattattatatgtgaatgcttgggcaattcatagagatcctaaggcttggaaagatccagaagagtttatacccgagaggtttttaaattgcgacatagatctttatggacaagattttgagtttattccattcggtgctggtcgtagattgtgccctggtatgaatatggcatttgctgcattggatcttatacttgctaatcttctttattcctttgactgggaattgccacaaggaatgaaaaaggaagacattgatactgaagtgatgccaggagttacacagcataagaagaatcctctgtgtgttgtggccaagtgctatatgtaaaatccaaaagtcgtaactactgctgaaaaaataaaataaaataattaat

SEQ ID NO: 257190 - DNA, 420 bp, Glycine max
ggtggaaaatttgcagagatcaaaggagagaagatggcacaaacgctggcaatgcccgtggcaccttcgctcgctatcatctccaattctcgcctctccaagacactctccgttcccgttctcaacaacccaaagtttcaagggttaagcatcaagtgcgttcgtgttggaggtgtggagattccgaacaacaagcgaatcgagtactcgctgcagtacattcatggagttggcaggaccagagcaaaacagattctgtgtgatatccaaatggataacaaaatcacgaaggaactcactgaggaggagctcatcactctcagggacgaagtctccaaatatatgattgaaggcgacctgagacggttcaatgcggctaatataaagagactgaaggacattcagtgctacagagggaat

SEQ ID NO: 257191 - DNA, 97 bp, Glycine max
gcacaagtgagtttgttgatcgagataacttggaacagtgtgatgaaaatgaagggccttggtttcttcggtggtaccattttggtagcatggcaat

SEQ ID NO: 257192 - DNA, 417 bp, Glycine max
gaccaacacaaacaatagtgcatagcggttttcattgtgcattattcaatggccaccacagcagctctatccggaaccatggtgagcacctccttcatgaggaagcaacctatgacgaccaagagcctaaagacattccccaacgctctttttggtctgaaaggtggacgaggtggtcgtgtaacttgcatggcctcgtacaaggtgaagctcataaccccagaaggagaagtggagtttgaatgcccagatgatgttttcattgttgacaaggctgaggaagaaggcattgaacttccctactcgtgcaaggctggttcttgcgtttcatgtgttgggaaaattgtgaaaggtgacgtggaccagtcagatggtagcttccttgatgatgaacaaatagaaagtggatgggttctc

SEQ ID NO: 257193 - DNA, 424 bp, Glycine max
  unsure (1)..(424): unsure at all n locations
ggagacgagggtaaggtcgcgttgtgttgcgtcgtgtcgtgcgctgttcctctgtctgccgtttttgttttcagaccaaaccccagctccgcatcgcaaccatgtcgaccaagcaaggtggaaaagctaagcctttgaagaaacccaagtctgataagaaggattacgacgaggttgacatggctaacattcagaagaaaaaggaagaggagaaggcgctaaaggagttgaaagccaaggcgcaacagaagggaagctttggaggttctgggctcaagaaaagtggaaagaaataagggctctttatcatgattgtatacatccaatattgagccctgtagtttattaccatgataacttctgtcttattgtggccttctttattgctctaaatgtagtactgaactgangtatttcgtgatgt

SEQ ID NO: 257194 - DNA, 417 bp, Glycine max
ggaagtcgccgtttgttttcttttcgttcgcatgttctctctctctcagaaagatgaaggtggtcgccgcgtatttgctcgccgtcctcggtggcaacaacagcccctccgccgatgtcatcaaggaaatccttggctccgttggagtagaagcagatgaagataggattgaatcgtttttgtctgaagttaagggtaaggatatagttgagcttattgctgccggtagggaaaagttggcctcggttccttctggtggtggtggtgccgttgccgtcgccgcagctcctgggggaggtgctgctgctgctgctcctgctgctgaagcaaagaaggaggaaaaggtggaggagaaagaggaatctgatgatgatatgggtttcagtctcttcgattaattggtgtagtctattcagc

SEQ ID NO: 257195 - DNA, 397 bp, Glycine max
  unsure (1)..(397): unsure at all n locations
gagaagcttcaataagtaagtatcaatggcttgcgaagaatcccagaacaagccccccagcgagcagtccactaccgaactcatcacgagcgcgaagctggtggcggaggcggcgcagtcggctctgaagaacgacagcgacaaagtggacaaggccaaggtggctgacgctgccggcgatcttctcgacgcggcggggaagtatggaaaacttgatgacaaacaaggcatagggcaatatgttgacaaggctgctgattatctgcataattaccagggtgataataccactgctccttcacagcctgcagagtctaaaggtgaagaaagtggtggtgggttaggtggtctggcanacttggctggaggcttcttcaaaaagtagttacaaagcaac

SEQ ID NO: 257196 - DNA, 405 bp, Glycine max
gacgcaccaaacccacaaaacgctatagcaatagaaacatttgcttttgaaaaacccctcactcttcatcactacactagctagccacatacaatgtcgaccaaatttaaggtgtttcgtgaattcacaagcgatgactcattcctaaaccaagttatccctgaaaacatcaccgaattccaagtgactctgtccctcgctagagactacgatggcaacaactcaaccaacggaaagttcattccttactgggacactgaaaaggtcactcccgaagtgataaaaaaattcaagaaaaaatacgaacccaccgcactgagggttaaggttcttgtcagcattggaaacagaaacaaacaatttcctttcaccattggctcggactcgaacagcgaagcatgggtc

SEQ ID NO: 257197 - DNA, 312 bp, Glycine max
gatagcgaaacagagagtggtttcagtgagtgatcggtgttcacttgatccttcataagtcgtcatcatcatcatcatcatcaccgttgattgaagaagatgccgatcagaaacatcgccatcggaaggcctgaagaggctactcaccccgacacgttgaaggcggggttggctgagttcatctccaccttgatcttcgtgttcgccggttcaggttccggcatcgcctacaacaagctcaccgacaacggcgccgtcactcccgccggcctcatctgcgcttccatcgcccatgctttcgccctcttcgtc

SEQ ID NO: 257198 - DNA, 349 bp, Glycine max
gggcagcagaagaacaagtagttgagaactaagaaggagaagcaaatggcttcctcaatgatctcttccccagctgttaccactgtcaaccgtgccggtgccggcatggttgctccattcactggcctcaagtccatggccggcttccccaccagaaagaccaacaatgacattacctccattgctagcaacggtggaagagtgcaatgcatgcaggtgtggccaccagttggcaagaagaagtttgagactctttcctacctgccagaccttgatgatgcacaattggcaaaggaagtagaataccttcttaggaagggatggattccttgcttggaattcgagttgg

SEQ ID NO: 257199 - DNA, 418 bp, Glycine max
gacaagtgagtttgttgatcgagatagctagaaacagtgtgatgaaaatgaaggtccttgttttcttcgttgctacaattttggtagcatggcaatgccatgcgtacgatatgttccctctccgaatgaacactggctatggtgcccgtactccggaggtgaaatgcgcaagttggaggcttgctgtggaagcacacaacatctttggctttgagaccattcctgaagagtgcgttgaagcaacaaaggaatacatccatggcgaacaatatagatcagactccaaaacagttaaccaacaagcttacttttatgccagagacctcgaagtccatcccaaggacacatttgtgttcagtatagatggcaccgtactctctaatgttccatactacaaaaaacatggatatggggtgga

SEQ ID NO: 257200 - DNA, 423 bp, Glycine max
gatctggcagcagaagaacaagtaggggagaactaagaaggagaagcaaatggcttcctcaatgatctcttccccagctgttaccactgtcaaccgtgccggtgccggcatggttgctccattcactggcctcaagtccatggctggcttccccaccaggaagaccaacaatgacattacctccattgctagcaacggtggaagagtgcaatgcatgcaggtgtggccaccagttggcaagaagaagtttgagactctttcctacctgccagaccttgatgatgcacaattggcaaaggaagtagaataccttcttaagaagggatggattccttgcttggaattcgagttggagcacggtttcgtgtaccgtgagcacaacaggtcaccaggatactacgatggacgctactggaccatgtg

SEQ ID NO: 257201 - DNA, 400 bp, Glycine max
ggttctagtgtgtgatcgttcgttgttgtaactcgttcttcttcttttgttgttctgagtttgtgtttgtcttttctctcacctgaaaatgtcttgctgcggcggtaactgtggttgcggaagctcctgcaagtgcggcaacggctgcggaggctgcaagatgtacccagacttgagctacactgagtcaaccaccaccgagaccttggtcatgggagtggcacctgttaaggctcaatttgagggtgctgaaatgggtgtgcccgctgagaacgatggctgcaaatgtggaccaaactgctcctgcaacccctgcacttgcaagtgaggtgttgggagagcaagcttcaagcagagatagcccttaattaggaataatgataaactattaatgtgtagc

SEQ ID NO: 257202 - DNA, 419 bp, Glycine max
gaaggtgcaagagtttgttgtgagctataagctagtttatcgtgaggagaatatgaaggttgttggtttctttgttgctggagtagttttggtagcatggccatgccatggcgcaagctaccaaaagttccctctccgaatgaaaactggctatggtgagcgttcttcggaagtaaaatgcgcaagttttaagcttgctgtggaagcacacaacatccgagcctttaaaaccattcctgaagagtgcgttgaaccaacaaaggactacattaatggcgaacaatttagatcagactctaaaacagttaaccaacaagctttcttttatgctagtgaacgcgaagtccatcacaacgacatattcatattcggcatagataacaccgtactctctaatatcccatactatgaaaaacatg

SEQ ID NO: 257203 - DNA, 420 bp, Glycine max
  unsure (1)..(420): unsure at all n locations
ggccgaaaaccctaacaacacaggcgcagagcgtgatccattgacgaagatggtgcagcgtctcacctaccgcaagaggcacagctatgccaccaaatccaaccaacacagggtcgtcaaaacccctggtgggaagctcgtttatcagaccaccaagaagagggccagcgggcccaagtgccccgtcactggcaagaggattcaggggattccacacttgaggcctgcagagtacaagagatcaaggttacccagaaaccgtaagactgtcaaccgtgcatatggcggagttttgtctggaagtgctgtcagggagaggattatccgagctttcttagttgaagagcaaaagattgtggagaaagtcttgaagatccagaaggcaaagganaagcaagcctcataggcttgaatttgaac

SEQ ID NO: 257204 - DNA, 294 bp, Glycine max
gtgttggggatgttgctgatggtgtgccttgttaaggtttcgtctgatccaaagagagaagaagaaatactggaagaagaactacattttcccgataacgagccacttattgtgagagacgggaacagaaggctaatgcaagacatagattgtggtgggttgtgcaagacgaggtgcagtgcacattcgagacccatcttgtgcactaaggcgtgtggcacgtgctgtgtgaagtgtaagtgtgttccacctggcacatctggaaatagggaactatgtggaactttctacact

SEQ ID NO: 257205 - DNA, 427 bp, Glycine max
  unsure (1)..(427): unsure at all n locations
agaaggggatagaagaagcagaaagagaagcattagcaaaagcaagaagaactagtctaagcagaaatggcctcttcagtgatggcatctgtggccctcaaacctgcccctttcactgttgagaagtcctcagttagaggccttccctccctctcaaggaactcctcttcattcagagttgtggccagtggtggcaagaagatcaagactgacaagccttatggaattaatggtggcatggctttgagggaaggagttgatgcatctggcaggaaaggaaagggaaagggcgtttaccagtttgtagacaaatacggtgctaatgtcgatggttacagtcctatctacgacaccaaggactggtctncaaccggtgatgtctacgctggcggtacgactggcttggctatctgggctgtgactctac

SEQ ID NO: 257206 - DNA, 123 bp, Glycine max
gacaccaacaccaaaacaaacccactaagatggcttactttgtatccttactagtgctggttcttgcaacccttatccttatgcctcaaaggcttgctacttactacaaaccaattaagaaac

SEQ ID NO: 257207 - DNA, 388 bp, Glycine max
gaggaacagcagagaaacaaagtgggaagtaaagaagatcctggcttctctagcaaccttggctgctgttcaaccagctacgatcaatggccttgctggaagttccctctctggaactaagctctctttcaagccctctcgccacagtgtcaaatccaagaacttcaggagtggtgccgtggtagcaaagtatggtgacaagagtgtgtactttgatttggaggatctgggcaacactacagggcagtgggacttgtatggctcagatgcaccttcaccctacaaccctcttcagagcaagttcttcgagacatttgctgctccattcacaaagaggggattgttactcaagtttctgatattgggaggtggttccacccttgcatac

SEQ ID NO: 257208 - DNA, 431 bp, Glycine max
gataccatagaagaagcacaaagagaagcattagcactaggagcagcaacaactagtctcagctgaaatggcctcttcagtgatggcatctgtggccctcaaacctgcccctttcactgttgagaagtcctcagtgagaggccttccctctctctcaaggaactcttcttcattcagagttgtggccagtggcaagaagatcaagactgacaaaccttatggaattaatggtggcatggctttgagggatggaactgatgcatctggcaggaaaggaaagggaaagggtgtttaccagtttgtagacaaatacggtgctaatgtcgatggttacagtcctatctacgacaccaaggactggtctccaaccggtgatgtctacgctggcggtacgactggcttggctatctgggctgtgactctacttggtc

SEQ ID NO: 257209 - DNA, 337 bp, Glycine max
ggtctgcgaaagaatcaatggcatctactctcttcgcttgcccgtcgttgtgttcctcctcttcttctatattttctacttccgtcaaattctccttaaacccgaataaaatttctcttccgttcgccggaaacaaaaaacctctttcggctccaattcgaaggcggttcaatgtcattgctatggcttcccctaaacccggtgggaaggccaagaaagtggttggaattataaagctggctcttggagttgggaaggctacacctgctccttccgttggccctgctcttggatccaagggtgtcaatattatggctttctgtaaggattacaacgc

SEQ ID NO: 257210 - DNA, 314 bp, Glycine max
  unsure (1)..(314): unsure at all n locations
ggatccttctacactaactaaagccgagcagcgagagagagaaaccctagcaaaaatgccggctggtcacggtttgagatcccgcaccagagattccttctctcgtcccttcaggaagaagggtaccatcgccctcaccacatacctcagaacctaccacgtcggcgattatgtcgacgtcaaggttaacggcgccgtccacaagggaatgccccacaaagtctaccatggccgnaccggtcgcgtctggaatgtcaccaaacgtgcttgtggggtcgaagtcaacaagcaggtcggcaacagaatcataagga

SEQ ID NO: 257211 - DNA, 414 bp, Glycine max
  unsure (1)..(414): unsure at all n locations
gccgtaacagaagcaaacttaaagaatgctggctaccacacatgggaaaaattaattctcaaggatccacaagatccttccactccaaatgcagtttcatacaaaacagcagcgagagagaaactgataaggcagggatacaacattgttgggatcattggagaccaatggagcgatctcctcggaggccacagaggcgaaagcaggacctttaagcttcctaatcccctgtactacattcagtagttccttcacctctcaacaatctagcttgctcctatctatctatatgtaataagatgcgttcaaataggggcactagcttcactttatgttgtttcagctgtgtgtcaacaagtcatgtaagagacttcactatgttgntntctctttcgtggctttaataaattatgc

SEQ ID NO: 257212 - DNA, 373 bp, Glycine max
ggaaatcctgagcttccattgtgctcactcatctcttacaacgaaaccctcttcatcttgttctatctgtgacgagcaacatggcctcaagagcagtgttattgttggctatgtgtgtgcttccggcgatggttgtggccattcgcccagcaaagaaccctttttgcgtgaagggtcgtgtctactgtgacccttgccgtgctggttttgagacctcagctaccacctacattgctggtgctgagattatgttgcaatgcaagagcagggttagcaacgaggttgtgtacacgaagaaggggtacaccgactcaaccggagcatacacaatgtacgtggatgaggatcacgcagatcagatctgcagtgccaa

SEQ ID NO: 257213 - DNA, 406 bp, Glycine max
ggcacaagtgagtttgttgatcgagataactggaaacagtgtgatgaaaatgaaggtccttgttttcttcgttgctacaattttggtagcatggcaatgccatgcgtacgatatgttccctctgcgaatgaacactggctatggtgcccgtactccggaggtgaaatgcgcaagttggaagcttgctgtggaagcacacaacatctttggctttgagaccattcctgaagagtgcgttgaagcaacaaagggatacatccatggcgaacaatatagatcagactccaaaacagttaaccaacaagcttacttttatgccagagacctcgaagtccattccaaggacacatttgtgttcagtatagatggcaccgtactctctaatattccatactacaaaaaacat

SEQ ID NO: 257214 - DNA, 351 bp, Glycine max
agaagaagaagaaggagcatggccatgagcatggccatgacagcagcagcagcagtgacagtgattaaactgctgcatcacctatatatttaaaaggtttatgggaccatagtagcgagggctgtgccttaatttctctctctctctctctctctctctctctttttcctttttccctatcttgtgatctatttatgagtgagaaaaacaaaagtgagaaattgtgcgtgtatctggttgctaattcgagtgctattagtctgtggtttggttggtttgtaaccccgctacttgggttatgtttgattgtatattatcctagagaaaataaaaatttaaattatcagtacg

SEQ ID NO: 257215 - DNA, 368 bp, Glycine max
  unsure (1)..(368): unsure at all n locations
aagacgacagaatgggagggtacaatacaaacacaaagtcagggacacaaatctgggtatagtggagtagtanggtttttgcgtttgagagagaagaagcatgagcaggagtttgggaattccggtgaagctgctccacgaggcttcggggcacgtggtgacggtggagctcaagagcggagaactctacagaggaagcatgatcgagtgcgaggacaactggaactgtcaactcgagagcatcacctacactgccaaggatggcaaaacatcgcaacttgagcatgtgtttattcgaggcagcaaagtcaggtttatggtcatccctgacatgctgaagaatgctcctatgtttaagcgtttggatg

SEQ ID NO: 257216 - DNA, 220 bp, Glycine max
  unsure (1)..(220): unsure at all n locations
tgggaaaaaaaaaagaaacaaattgtgcaatgaatttgtaaataaggcaaaagttatggattaagaattaatttctctggatatattagaaaacccgaattcgattgtctaatgatngaaactaannacaaatatttaacttaaaatatatgatccttttcctgaacggacgctttcgtggacaaatcgaaaatgttttttcaaccctcaatcccatttg

SEQ ID NO: 257217 - DNA, 217 bp, Glycine max
gataccaaaaacaaaacacaagccaagtgaaagtgagaaaaaataaaaatcaaagagcataatgtcagggatcattcacaagattggggagacccttcatgtgggagggcacaagaaggaggaggagcataagggtgagcaccatgctggagaatacaaaggggagcaccatggtgaacacagtagtgagtacataggagagcatcatggtgaacac

SEQ ID NO: 257218 - DNA, 346 bp, Glycine max
  unsure (1)..(346): unsure at all n locations
gcttctgaatcgtcttttacttctcancanctgcggcgggggttcagaaacgaaaaagggttcggtgttctgttcgcgatgagagccaagtggaagaagaagcgtatgaggaggttgaagaggaagcgccgaaagatgagacagagatccaagtagtgcgttaaacctagtttgtttctgttgcttttacaattgcttatgttgtcgaatgggacacccagttgttagtggcactggtttctcctttttgatgtttgatacattttgttggattcaagtagtttatgttcgtcttatgttattaactcaaaacaatggttgtactggttttgcttatcaacatgat

SEQ ID NO: 257219 - DNA, 333 bp, Glycine max
  unsure (1)..(333): unsure at all n locations
cgatttcggtcgccacgcgtctacgtgcagacacagaagggatctgcagcagaagaacaagtagttganaactgagaaggagaaacaaatggcttgctcaatgatctcttccccagctgttaccactgtcaaccgtgccggtgccggcatggttgctccattcactggcctcaagtccatggctggcttccccaccagaaagaccaacaatggtattacctccattgctagcaacggtggaagagtgcaatgcatgcaggtgtggccaccagttggcaagaagaagtttgagactctntcctacctgccagaccttgatgatgcacaattggc

SEQ ID NO: 257220 - DNA, 151 bp, Glycine max
tgctggttttgagacctcagctaccacctacattgctggtgctgagattatgttgcaatgcaagagcagggttagcaacgaggttgtgtacacgaagaatgggtacaccgactcaaccggagcatacacaatgtacgtggatgaggatcac

SEQ ID NO: 257221 - DNA, 171 bp, Glycine max
ggcacaccaacaccaaaacaaacccactgggagggcttcctttgtatccttcctagtgctgcttcttgcagcccttatcctcatgcctcaagggcttgctacttactacaaaccaattaagaagccaccagtgtacaagccttcagtgtacaagccaccagtgtacaaacc

SEQ ID NO: 257222 - DNA, 257 bp, Glycine max
gatagaagaagcagaaagagaagcattagcaaaagcaagaagaactagtctaagcagaaatggcctcttcagtgatggcatctgtggccctcaaacctgcccctttcactgttgagaagtcctcagttagaggccttccctccctctcaaggaactcctcttcattcagagttgtggccagtggtggcaagaagatcaagactgacaagccttatggaattaatggtggcatggctttgagggaaggagttgatgca

SEQ ID NO: 257223 - DNA, 316 bp, Glycine max
tactgcgtcgagtttgccaaggtctcttgtattgtggaaggaagcaaatgctaaaggaagtctatttcaaagatttccttcagatttgttgacacagctgaagacagattgtctcgtcctgcacaatcatcgttatgccatatccccacgcaagcttcaatataataccaagttatctgacttttttgagattctggcaacatctgaggatagagatggaaagactttcgtttccacagcacgtggtaagaaatatcccgtgactgtcaacctacggcaaccagagaaaaatgcttttgaatgggctacatctttg

SEQ ID NO: 257224 - DNA, 398 bp, Glycine max
gagtgcacaagtgagtttgttgatcgagataactagaaacagtgtgatgaaaatgagggtccttgttttcttcgttgctacaattttggtagcatggcaatgccatgcgtacgatatgttccctctccgaatgaacactgtctatggtgcccgtactccggaggtgaaatgcgcaagttggaggcttgctgttgaagcacacaacatctttggctttgagaccattcctgaagagtgcgttgaagcaacaaatgaatacatccatggcgaacaatatagatcagactccaaaacagttaaccaacaagcttacttttatgccagagacctcgtagtccatcccaaggacacatttgtgttcagtatagtggcaccgtactctctatattccatacttc

SEQ ID NO: 257225 - DNA, 286 bp, Glycine max
gaaaatagagaaaacacaaaaagttctgttctgggtcccacccaattcagttttctcaaatggctcgtacgaagcaaacggctcgcaagtccaccggcggcaaggcgccacgtaagcagctggccaccaaggcggctcgtaagtctgctccggctaccggcggcgtgaagaagccgcacagattccgtccgggaaccgtagcgctccgcgagatccggaagtaccagaagatcacggaacttctgatccggaagctcccgttccagcgattggtccgcgagatcgc

SEQ ID NO: 257226 - DNA, 337 bp, Glycine max
gatccaactctctaaacaacacattaacctgggtcattccccatctgctcaccttattcagccactgctaatttctagggttccgaaatggacgctggcggaaagatcaagaagggcgccggaggaagaaagggcggcggccctaaaaagaagccggtttcaaggtccgtcaaggccggtctccaattccccgtcggaagaattggccgttatttgaagaaaggaaagtacgcccagcgtgtcggtaccggtgctcccgtttacttggccgcagttctcgagtacctagctgctgaggtgcttgagttggctgagaatgctgcacgtgacaacaaga

SEQ ID NO: 257227 - DNA, 198 bp, Glycine max
ttgacccaacctttgacgtatcgaaaccttaagtttcggatcaggtctgagcaatctggttggtagaacctttggtcttagagagtcaggttttatgtctgaattagacgatcaaattcctactgccttcgatccttttgctgatgcaaatgctgatgactcgggtgctgggtcaaaagagtatgtgcatattcgcgt

SEQ ID NO: 257228 - DNA, 327 bp, Glycine max
gacaagcaacattgctagccattctctgcactggtcagttacaaagcatttcattgttttacaatatacaacactacaatggctgcttcaacaatggctctctcttcatcatcattggctggccaagctatcaagcttgccccctccacccctcagcttggtgttggaagggttagcatgagaaaaacagcctccaagactgttacctcatgaagcccatggtacggcccagatcgtgtcaagtacttgggcccattctctggtgagcccccatcctacctcactggtgaattcccaggtgactatggttgggacactgctgggctt

SEQ ID NO: 257229 - DNA, 293 bp, Glycine max
gatagcagcatcatacaaagcattgaatggggggacttaagttcattccttgtgttttgctttcttcctcaaaaccaaacatgtcgaacacatgcggcaactgcgactgcgctgacaagactagctgcaccaaaggaaacagctatggtgttattgtagagactgagaagagttacatcgagactgttgtcatggatgttccagcagctgagcatgatgggaagtgcaagtgtggcactaactgcacttgcacggactgcacctgtggccattaaggaatatgtatgaaaatg

SEQ ID NO: 257230 - DNA, 181 bp, Glycine max
  unsure (1)..(181): unsure at all n locations
ggttgctacccatcatagaagatcgcgatctggtnagacatgtctggggaagaggaagaaaacccctcatatctcaaaattggagacgagtttttgaaggcaaagtgcttaatgaactttgaatgggcattgattctttttctcaagtatgagcagcttcaacagacatccaattatccca

SEQ ID NO: 257231 - DNA, 99 bp, Glycine max
gaaggtgcaagagttggtggtgagctataagctagtttatcgtgaggagaatatgaagctgcttgttttctttgttgctgcagtagttttggtaggatg

SEQ ID NO: 257232 - DNA, 345 bp, Glycine max
ggtcaccaacacaaacaatagtgcatagggggtgtcattgtgcattattcaatggccaccacagcagctctatccggaaccatggtgagcacctccttcatgaggaagcaacctatgacgaccaagagcctaaagacattccccaacgctctttttggtctgaaaggtggacgaagtggtcgtgtaacttgcatggcctcgtacaaggtgaagctcataaccccagaaggagaagtggagtttgaatgcccagatgatgttctcattgttgacaaggctgaggaagaaggcattgaacttccctactcgtgcaaggctggttcttgcgtttcatgtgttgggaaa

SEQ ID NO: 257233 - DNA, 246 bp, Glycine max
ctacacaccgccgcttgtgctgcagccatttctctaatgatccatgataagttccaacggattttttgggtacttaacaagggcatcgattggctacggaaaataccctttgccttaactgccattaaaggttcttatcatatatatactcatatcatgattattaaatccttcattaaccatataaagaagcccactgtactcaatattgatcatgtgcaacttttgataaacattattcagatt

SEQ ID NO: 257234 - DNA, 400 bp, Glycine max
cgggctagcagaagaacacgtaggggaaaactaagaatgataagccaatggaccactcattgatctcatgctaagtattaactacattctacactagccgatgccccaatatggggaacatagatcttgctactttgcatgactgtcttagcgatgactatgttaaagcttatttcgaacagttccactcaactctgattatgatgttcactgatgttggatcagccatcacttacaacgagcttacaagagatgcagtcttggatccaacagtgctggtggcagtagctgtggcacatgcatttgcactgtttgtaagtgtctccgtcgccggcaacatctcacgtggccatttgaacccagctgtcacttttggattggccattggaggcaacatcac

SEQ ID NO: 257235 - DNA, 305 bp, Glycine max
ctgggaccactgcgataacaatgaatggcttagtacaagttgcatgctacattatgcgtagcatcgcagtgccattcgtacgatatagcctcatatctacacgatcaatgtctaaggctcccggattgcaacctgctgatgctcaactcacttgctcgcttcagactgacatcacagaatttgctcaagagatgattgacgcatacaaaattgcaggattcgaccttgacatctatgctcatcaatgtatatgaagcatgtgcacaaggtgccccaaaagggataaccttgcacgaaatccagag

SEQ ID NO: 257236 - DNA, 396 bp, Glycine max
ctgctggcataatttatgtttagatagatagagcaagattgatcaaaagggttgcaaaggtcaaagaggagcaggcaaagattgacgaggctgctgatttgatgcatgaagttgctgtcgaaacatttggctccatggcaaagacggagaaaattgctttcattcttgagcaggtccggctatgcctagatcgtcatgattatgtccgagcacaaattttatcaaggaaaatcaggactagagtatttgacgcagatccatcaaaggaaaaaaagaaaccaaaggagggtgacaacattgttcaggatgctcctgcagatattccttacctcctagaattgaagcgtatctactatgaactgatgattcgatattacttgcacaacaatgattacc

SEQ ID NO: 257237 - DNA, 388 bp, Glycine max
taatggggcgcgcatgagtgagcagatcgagggcacttgggacagagtaacggggatggagggacttggttgctgatttgctacaagaaggggatgacgacacatccatctgtacgatatataccctctacaaagcaacaatggttgtcatgcccgtatttgcctagagcgacgcgcttatgtcacgatacatgtttaatcacacaacatctgtactttagtaaccgttgctgatcaatgcgttgaagcaacgaatccatacgtgcatgacaaccttgatcaagatgactctacagctattaattaactacttgacttgaatcgcatatactatgaactgaatactaaggactaattgcacaacagtgtatacctgaaagtatgttgt

SEQ ID NO: 257238 - DNA, 379 bp, Glycine max
  unsure (1)..(379): unsure at all n locations
gggttgccgcacctgatcgtgagcggagaccagaggcactggggtgagttcatcacacccggaatactattcctgtacatctcgggatggatcggctgggtgggtcggagctacctgattgcgatcagggacgagaagaaacccaccatgaaggagatcatcatcgatgttcctctggcttctcgcttgctcttcaggggtttcagctggcccgttgctgcctacagagaactcatcaacggcgacctcattgccaaggatgtctagataagagagggtggatggctacattggaggaaagcctggagaatttgtatgtggatgggatctttacgcgctctttttgtaattactttntttataaaatgtacatgatatg

SEQ ID NO: 257239 - DNA, 377 bp, Glycine max
gacaacaacagtaacaatggctgcctcactacaagctgcagctaccttcatgcaacccaccaaggtcggcatagcctctcgcaacctcaaatctacacaatgcatttctaaggcttttggctaggaacctgctgcagctaaactcacttgctcccttcagcctgatctcaaagaatttgctcaaaaatgtgtcgacgctaccaaaattgcaggattcgcccttgccacctctgctctcgttgcttctggagcaagtgcagaaggtgttccaaaagggctaaccttcgacgaaatccagagcaagacatacttggaagtgaagggaactggaactgctaaccagtgcccaaccattgaaagtggagtggactcattcg

SEQ ID NO: 257240 - DNA, 409 bp, Glycine max
ggcagcgagacctaggaagcacgacaacaacactcatcagagggaaaagttgggcccactgcgatgaaaatgcaaagatgatggatgatcaagatctcagtttctgtggcaatgttcttggctgcttcatatatgtactagtgatcgctgatcattgtgtcatgggtgacccatagttcggaggaaactactaatgctttgaaggctaagatgtcacactgcgttgtagactttgaaatgataactgtagcttactaagacttccataaagattacaatgagcgtaacactatcaatatcagatatacttatgcgtgctcaattaagttacttttatgtcttaaagcttgaatgccattcaactgacgcatatgcgtggagtatctatggcaacgtactctctaatatt

SEQ ID NO: 257241 - DNA, 412 bp, Glycine max
gggatttccaaagtttttaatagagggtaagtctcaaaaaatcgaagaattacagacgaatatgcaaaaaaaaactgaattgtgtgaatcgaaaactaaacattgctattgtaaaagttgcaaatgcttataaacaccctaatattattgcagaatttatagctggacaattaaagaatagagtttcgtttcgtaaagcaatgaaaaaagctattgaattaactgaacatgcgggtacaaaaggagttcaagtacaaattgcaggacgtatcgacggaaaagaaattgcacgtgttgaatggatcagagaaggtagagttcctctacaaaccattcgagcgaaaatcgattattgatgctataccgttcgaactatttatggggttttagggatcaaagtttggatattttc

SEQ ID NO: 257242 - DNA, 409 bp, Glycine max
  unsure (1)..(409): unsure at all n locations
ggtgtttgttgttgtaactcgttcttcttcttgggttgttctgtgtttgtgtttgttttttctctcacctgaaaatgtcttgctgcggtggtaactgtggttgcggaagctcctgcaagtgcggcaacggctgcggaggctgcaagatgtacccagacttgagctacactgagtcaaccaccaccgagaccttggtcatgggagtggcacctgttaaggctcaatttgagggtgctgaaatgggtgtgcccgctgagaacgatggctgcaaatgtggaccaaactgctcctgcaacccctgcacttgcaagtgaggtgttgggagagcaagcttcaagcagagatagcccttaattaagaataatgantaactattaatgtgtagctaaaaacttatgtattatgtctg

SEQ ID NO: 257243 - DNA, 393 bp, Glycine max
ggaatctgaagtaagagggttgtcgacgggtcgagatcgagcctcggaagagggaatcgcagcgaagtccactatgccgaagcaaattcatgagattaaagacttcctccttactgcaaggaggaaggatgcacgctctgtgaaaatcaagcggagcaaggatgtagtgaagttcaaggtccgttgctccaagtacctgtacactctgtgtgtgtttgattctgagaaggctgataagttgaagcaatcacttcctccaggtttaagcgtgcaggatgtgtgattcttactgctgttgatgaagatcaagttttgctttggattttggggattcatatttagtgaaatggttcacagatttttcttatctgttgttattttttgggatcatat

SEQ ID NO: 257244 - DNA, 158 bp, Glycine max; identical to SEQ ID NO: 256958

SEQ ID NO: 257245 - DNA, 422 bp, Glycine max
gacacttactagtagtaagcatggagtcctcaaagatctatgcttacgctcttcctctgcatgatctttctctcttccgccactcccattctcggttgtggctactgtggcaaaccccccaaaaagcacaagcctggtaaaacaccaaagacacccaaaacacccgttgttaagccaccagtcaccatccctcccattaatgttcctcccgatgatctttcaccaatagtgaagcccccaggtattctccctccaattccaattattaacccaccaaccacaccagggaagggagggaacactccatgcccaccaccaaagtctcctgcgcaggctacgtgccccattgacacgctcaaacttggtgcctgtgtggatcttcttggagggttggttcacattggtttgggtgaccctgttgc

SEQ ID NO: 257246 - DNA, 405 bp, Glycine max
gacaacacatcctaaataagcatcataaattcggagtctttcggtccttccttccttcctctgctctagtgtatgccactctggttaattatcatacccccttctaggcatagttcttctccctctgttctctattctacactgtgaaacccagatgaaggtagcatttgtagctgttctacttatttgccttgtcctaagctcctccttgttcgaggtgtcaatggccggttctgctttctgctcctccaagtgcgcgaagaggtgttctagggctgggatgaaggacaggtgcacgaggttctgcgggatttgctgcagcaagtgtaggtgtgtgccatctgggacttatgggaacaagcacgagtgcccttgctacagagacatgaagaactccaagggcaa

SEQ ID NO: 257247 - DNA, 401 bp, Glycine max
ggaaaagcaacactataggcgaaggactttagggtgggatttgggaattagggttgttcgcgtggcgaagatgattgaggtggttttgaacgatcgattggggaagaaggtgcgcgtgaagtgcaacaacgatgataccatcggcgacctgaagaagcttgtggcgactcagactggcacaagagccgacaagatccgcatccagaagtggtacaccatctacaaggatcacatcactctcaaggattacgagatccatgacggcatgggtctcgaactctactacaactaaacacaacaaggtgtgttttatgcgtaatatactatgtgctgggaatgggataagcgctaaatgtaattctgacttgcgaaagttcccatgatttgaaataatgtacatc

SEQ ID NO: 257248 - DNA, 438 bp, Glycine max
aagacgacagaagggggatacaggaacagcagagaaacaaagttagaagtaaagaagatcatggctggtctagcaaccttggctgctgttcaaccagctacgatcaatggccttgctggaagttccctctctggaactaagctctctttcaagccctctcgccacagtgtcaaatccaagaacttcaggagtggtgccgtggtagcaaagtatggtgacaagagtgtgtactttgatttggaggatctgggcaacactacagggcagtgggacttgtatggctcagatgcaccttcaccctacaaccctcttcagagcaagttcttcgagacatttgctgctccattcacaaagaggggattgttactcaagcttctgatattgggaggtggttccacccttgcatacttcagtgcaactgcctcaggtgacattcta

SEQ ID NO: 257249 - DNA, 401 bp, Glycine max
gaagaagaagaaggagcatggccatgagcatggccatgacagcagcagcagcagtgacagtgattaaactgctgcatcacctatatatttaaaaggtttatgggaccatagtagcgagggctgtgccttaatttctctctctctctctctctctctctctctctctctctctttttcctttttccctatcttgtgatctatttatgagtgagaaaagcaaaagtgagaaattgtgcgtgtatctggttgctaattcgagtgctattagtctgtgctttggttggtttgtaaccccgctacttgggttatgtttgattgtatattatcctagagaaataaaaattttaaattatcaacaaagtaaatcaacctctgcatactataaaagcggtcgctctaga

SEQ ID NO: 257250 - DNA, 411 bp, Glycine max
gagaatagagagctcctccaattagggtttttgtgatctgcagctacgatgggtaagggaacagggagtttcggtaagaggaggaacaagacccacaccctctgtgtgaggtgtggccgccgcagcttccacctccagaagagtcgttgctctgcgtgcgcttaccccgctgcgcgcaccaggaaatataactggagcgtgaaggccattaggagaaagaccaccggaactggaaggatgaggtacttgcgtaacgtgcctcgcagattcaagagcggcttcagagagggtaccgaagctgcacccaggaagagaggagctgctgcctctgcctaagctttgaatgaatgacagcaatttttgctgggtcagtgaattataggagttaatgtttctgtgttggtgccaaac

SEQ ID NO: 257251 - DNA, 409 bp, Glycine max
gataagaaagaagatcaaaggaaaaaagagaaacgaatggcagcactgggtggctttaccgacatcaccggagcacagaacagcatcgatatcgaaaatctcgctcgctttgctgttgatgaacacaacataaatgagaatgcagttctggagtttgtgaaggtgattagtgcaaagaaacaagtgggttctggcaccttgaactatatcactttggaggcaaatgatggtgtgacgaaaaaggtttatgaaactaaagtgttggagaaaccacggttgaacatcaaggaagttcaggaattcaagcccatcactgatactgttaatcctctatcggtgacggtctaacacatagctaggatatggaagtgactagctcggccggaagagtaataatatgtatgaactg

SEQ ID NO: 257252 - DNA, 397 bp, Glycine max
ggcacaagtgagtttgttgatcgagataactaggaacagtgtgatgaaaatgaaggtccttgttttcttcgttgctacaattttggtagcatggcaatgccatgcgtacgatatgttccctctccgaatgaacactggctatggtgcccgtactccggaggtgaaatgcgcaagttggaggcttgctgtggaagcacacaacatctttggctttgagaccattcctgaagagtgcgttgaagcaacaaaggaatacatccatggcgaacaatatagatcagactccaaaacagttaaccaacaagcttacttttatgccagagacctcgaagtccatcccaaggacacatttgtgttcagtatagatggcaccgtactctctaatattccatactac

SEQ ID NO: 257253 - DNA, 397 bp, Glycine max
tggggcatagataacaccgtacggtctaaggtcccatactatggaaaacatggatatggggtggaggaatttaatgaaaccttatatgatgaatgggttaacaagggcgacgcaccggcattgccagagactcttaaaaattacaacaagctgttgtctcttggcttcaagattgtattcttgtcaggaagatatcttgacaaaatggccgtaacagaagcaaacctaaagaaggctggcttccacacatgggagcagttaattctcaaggatccacatcttatcactccaaatgcactttcatacaaatcagcaatgagagagaatctgttgaggcagggatacagaattgttggaatcattggagaccaatggagcgatctgcttggagaccaca

SEQ ID NO: 257254 - DNA, 395 bp, Glycine max
gattcagattacattgcaaaaatggcgtcattcaccatgacagcttccatccttggcggcccagccgtcaccaaccggttggcagtagcaacgcagaggagatcactcgtagtgaatgctgccaaagctgttgaagcggaaaaggtcagttatgacaatgacatggatggtagcaatggaaggaggaacttgatgttcgccgcggcggcggcggctgctgtttgctctgttgctgggatggcagtggcagatgagccaaaaccaggaaccccagcagccaagaaaaagtatgctccgatttgtgtcaccatgccaactgctaggatttgtcgcaattgagggactcggtttttattttacttctgatgatcggaaatgtgcattagggttgtagt

SEQ ID NO: 257255 - DNA, 410 bp, Glycine max
gaagataaagaaaagagaaatggcaacagaaacaaaagtggcagtattaggtggcatcaccgaagtgcagggagctgccaacagcgtcgagatcaacaatctcgctcgctttgctgtagaggaacaaaacaaaagagagaattcagttctggagtttgtgagggtgattagtgcacagcagcaagtggtttctggagtgaattactacataacattggaagcaaaagatggtgagattaaaaatgagtataaagcgaaggtttgggagagggaatcccaagagttgctagaattcatgccaacattaggtgcaggaggcgagatcgaccatctcgctcgctttgctgtagaggaacaaaacaaaagagagaatgcaaatctggagtttgtgggggtgattagggcaaagc

SEQ ID NO: 257256 - DNA, 319 bp, Glycine max
ggcacaagtgagtttgttgatcgagataactagaaacagtgtgatgaaaatgaaggtccttggtttcttcgttgctacaattttggtagcatggcattgccatgcgtacaatatgttccctttccgaatgaacactggctatggtgcccgtactccggaggtgaaatgcccaagttggaggcttgctgtggaagcacacaacatctttggctttgaaaccattcctgaaaagtgcgttaaaccaccaaaggattccatccatggcgaacattttagatcagactccaaaacagttaaccaacaagtttacttttatgcc

SEQ ID NO: 257257 - DNA, 362 bp, Glycine max
  unsure (1)..(362): unsure at all n locations
ggcacaagtgagnttgttgatcgagataactaggaaacagtgtggatgaaaatgaaggtcctggttttcttcgttgttacaattttggtagcatggcaatgccatgcgtacgatatgttccctctccgaatgaacactggctatggtgcccgtactccggaggtgaaatgcgcaagttggaggcttgctgtggaagcacacaacatctttggctttgagaccattcctgaagagtgcgttgaagcaacaaaggaatacatccatggcgaacaatatagatcagactccaaaacagttaaccaacaagcttacttttatgccaaagacctcgaagtccatcccaaggacacatttgtgttcag

SEQ ID NO: 257258 - DNA, 405 bp, Glycine max
ggcacaagtgagtttgttgatcgagataactagaaacagtgtgatgaaaatgaaggtccttgttttcttcgttgctacaattttggtagcatggcaatgccatgcgtacgatatgttccctctccgaatgaacactggctatggtgcccgtactccggaggtgaaatgcgcaagttggaggcttgctgtggaagcacacaacatctttggcttcgagaccattcctgaagagtgcgttgaagcaacaaaggaatacatccatggcgaacaatatagatcagactccaaaacagttaaccagcaagcttacttttatgccagagacctcgaagtccatcccaaggacacatttgtgttcagtatagatggcaccgtactctctaatattccatactacaaaaaaca

SEQ ID NO: 257259 - DNA, 413 bp, Glycine max
ggaaggcatttcattagcagcgttaaagaagagagaagaggaatgcgaaagttcgatccatggcccgttttcttcaagcgcgagtggaaacgcaactggcccttcctcgttggattcgcagtcaccggagctctaatcaccaaactttcccttggccttaccgaggaagatgctaagaattccaaattcgttaaggcgcacaaaaggtgatttctgaatcgtgacatctgcctggctttgcactttatgttaggtttgtcaagattactttgcttgtcttgattttatggattgtaataacagaagagagatgctctagatagtctctttaagtctgtatcccatgttcttattttcagttttggttgtttacctaaatctggttgaaaaaaaaccacaatagttaataattt

SEQ ID NO: 257260 - DNA, 410 bp, Glycine max
gattgtgattcattagcacatttgcaaagtgttagttttctttttttctcatttgcactacaaattgcaatggcttccaacaaggttattgccaccatcatggtgctttctctccttgcctactcaacatcattcaccaatgcatgtggcacatgccacccaaaacctaccccttctcctcctcctccatcaggaaagtgccctaaggacacattgaagctaggggtgtgtgcagatattctaggtcttgttactgttgttgttggttcccctgtctccagcaagtgttgtgcattgcttgaaggtttggctgatttggaggctgcactttgcctttgcactgctattaaggccaatgttcttggaatcaacttgaatgtgcctatcacactcagtgtgctactcagtgc

SEQ ID NO: 257261 - DNA, 416 bp, Glycine max
gagggcgagccacgttctccatctctgccactgccatgactcactcgctagcttcttgtctgttctgaccaatggcatcaacaatatcagcaatggccatgatcaacgccaaatgcgtcaacccaaaggtccccaatcccaccaagctcgcaccatcaaaaccctaccttcagatcaaccttccaaagggcctcatagcctcacccgaaagcactaaactttcccccgcgacagcaatcgcaagagcaatattcacaaccctcggaacctgcgacgccgcattcgcgtggtcatacaaatagcccacatagcagaaggcgacaaccgcggactggcactgttgctgcccataatcccaacgatatggcgggatctgttcaacattctgcagccggcgctgaaccagctgaaccgaa

SEQ ID NO: 257262 - DNA, 390 bp, Glycine max
gacacacacacatcctaatcacaaagcgttggcgcatggcggacatgattgtggcttgcaccaaacctctggttccagtctgcaccagttcccgttcccccacacccaaagtccccattctccaaatttcactccccaaagccccaaccttgaaactgaaactcccgatttcaaagccccagatgctgtccctccttggagggatagcaccactggtcttggccagaccctccctcgcagaagaaattgagaaagcagcactctttgacttcaacctcacccttgccataataatggtggagtttctgctgctgatggttgccttggacaagatatggttcaccccgcttgggaaattcatggacgagagggacgcggcgatcagggaga

SEQ ID NO: 257263 - DNA, 409 bp, Glycine max
ggcacaagtgagtttgttgatcgagataactagaaacagtgtgatgaaaatgaaggtccttgttttcttcgttgctacaattttggtagcatggcaatgccatgcgtacgatatgttccctctccgaatgaacactggctatggtgcccgtactccggaggtgaaatgcgcaagttggaggcttgctgtggaagcacacaacatctttggctttgagaccattcctgaagagtgcgttgaagcaacaaaggaatacatccatggcgaacaatatagatcagactccaaaacagttaaccaacaagcttacttttatgccagagacctcgaagtccatcccaaggacacatttgtgttcagtatagatggcaccgtactctctaatattccatactacaaaaaacatgga

SEQ ID NO: 257264 - DNA, 393 bp, Glycine max
gacaccacagaacaaaaacaaagaagaaaaaaggcttagccaacacaaccatcatggccacctctgctattcagcaatcagcattcactggtcaaactgctctgaagcagctcaatgagttcgtccgcaagaccggtggcgccggcaaaggtcgcactaacatgcgccgcaccgtcaagagtgctcctcagagcatttggtatggccctgaccgtcccaagtacttgggtccattctcggagcagattccatcatacctgaccggagaattccctggtgactacggatgggacactgctggattatcagctgacccggaaaccttcgtcaggaaccgggagctggacgtgattcacagcagatgggcaatgcttggtgcccttggctgcacct

SEQ ID NO: 257265 - DNA, 385 bp, Glycine max
ggttctagtgtgtgattgtttgttgttgtaaggcgttcttcttcttttgatgatctgtgtttgtgtttgttttttctctcacctgaaaatgtcttgctgcggtggtaactgtggttgcggaagctcctgcacgtgcggtaacggctgcggaggctgcaagatgtacccagacttgagctacactgagtcaaccaccaccgagaccttggtcatgggagtggcacctgttaaggctcaatttgagggtgctgaaatgggtgtgcccgctgagaacgatggctgcaaatgtggaccaaactgctcctgcaacccctgcacttgcaagtgaggtgttgggagagcaagcttcaagcagagatagcccttaattaggaataatgttaac

SEQ ID NO: 257266 - DNA, 401 bp, Glycine max
ggaagtcgtcgtttatctctcctcgttcgcaggttcaccctttccctgtctctcagaaagatgaaggtggtcgctgcgtatctgctcgccgtcctcggtggcaacaacaccccttccgccgatgacatcaaggaaatcctcggctccgttggaatagaggcagatgaagataggattgaatcgttcttgtctgaagttaagggtaaggatatagttgagctaattgctgccggtaaggaaaagctggcctcggtgccttctggtggcggtggtgccgttgccgtcgccgctgctcctggtggaagtggcggtggtgctgctccggctgctgaggtaaagaaagaggaaaaggtggaggagaaagaggaatctgatgatgatatgggtttcagtctcttcga

SEQ ID NO: 257267 - DNA, 409 bp, Glycine max
ggcacaagtgagtttgttgatcgagataactagaaacagtgtgatgaaaatgaaggtccttgttttcttcgttgctacaattttggtagtatggcaatgccatgcgtacgatatgttccctctccgaatgaacactggctatggtgcccgtactccggaggtgaaatgcgcaagttggaggcttgctgtggaagcacacaacatctttggctttgagaccattcctgaagagtgcgttgaagcaacaaaggaatacatccatggcgaacaatatagatcagactccaaaacagttaaccaacaagcttacttttatgccagagacctcgaagtccatcccaaggacacatttgtgttcagtatagatggcaccgtactctctaatattccatactacaaaaaacatgga

SEQ ID NO: 257268 - DNA, 294 bp, Glycine max
gattcagattacattgcaaaaatggcatcattcaccatgacagcttccatccttggcagcccagccgtcaccaaccggtcggcagtagcaacgcagaggagatcactcgtagtgaatgctgccaaagctgttgaagcagaaaaggtcagttatgacaatgacatggatggtagcaatggaaggaggaacttgatgttcgccgcggcggcggctgctgtttgctctgttgctgggatggcagtggcagatgagcctaaaccaggaaccccagaagccaagaaaaagtatgctccg

SEQ ID NO: 257269 - DNA, 404 bp, Glycine max
gatactctgtatcattccatttcgaggatcatgcatagttactgaagaaaatggcaaccatctccgctgctatcacaaccgcatcgatcacccgcgcatgtctagtgcaaaaacgttctcttgggttctcatctcccgttcttggattgccagcaatgggtaaggtgggaagagtgagttgctccatggaggaaaagccttcttctgtgaaggaaagcagctcaagcatgttggggatgggggcatctttgatggcagcggccagcgccgcagctatgtcaggcccagccatggccttggtggatgagagacttagcactgaaggaaccgggctacccttcggcctcagcaacaaccttctcggatggatcctgttcggcgtcttcggactcatctgggctctc

SEQ ID NO: 257270 - DNA, 398 bp, Glycine max
gatagaagaagcagaaagaggggcattagcaaaagcaagaagcactagtctaagcagaaatggcctcttcagtgatggcatctgtggccctcaaacctgcccctttcactgttgagaagtcctcagttagaggccttccctccctctcaaggaactcctcttcattcagagttgtggccagtggtggcaagaagatcaagactgacaagccttatggaattaatggtggcatggctttgagggaaggagttgatgcatctggcaggaaaggaaagggaaagggcgtttaccagtttgtagacaaatacggtgctaatgtcgatggttacagtcctatctacgacaccaaggactggtctccaaccggtgatgtctacgctggcggtacgactggcttg

SEQ ID NO: 257271 - DNA, 417 bp, Glycine max
ggagggtgaccagtgaacacaatacagggcagcagggccatgggattgagtattctgagaagcacttccatttccactcctatctcttcctccaaatccaaacccattttctcaactcttgttcgttcatctttcgcctccatttcccccacaaagtgtgttactcccaccactcttttcgtttctgccacccccttcttcaccgcctcacccaagcgcggctttcgtggtgggattgtggccatggccgccgctggctcgctccgcaatcagaggaagagtggcgcgcagttctctcccctgaacagtttcgtattctcaggcaaaagggcaccgagttccctggaacaggagagtatgacaagttctttgatgagggagtctacaactgtgctggttgtgggacacctctctaca

SEQ ID NO: 257272 - DNA, 394 bp, Glycine max
agaatatgaaaaagaaaaaaaagattctaaagaggtatagctaatattctttagaataatcaaaaagaatattaaattcaaataaattttagatagaaaaaagacttaaaaaggaggatttgaaatgcgagatctaaaaacatatctttccgtggcaccagtagtaagtactctatgggtcggggctttggcgggtctcttgatagagatcaatcgtttttttccagatgcattgatattccctttgttttcattctagctattgacacggaaaggggtgaagaagattatagatccaattaagtattaaatatatgtaattaatatgtaattaatctcctcttctttatttcgtctttcatttcttctttttttacaattgtaatagaatatg

SEQ ID NO: 257273 - DNA, 407 bp, Glycine max
agaagggggagcgaagaagatattagggtttttgagtgcggtgcggcgatcctagcactctcttctgcagctttcgccgacagcttcattcaccatggctgagcaaaccgagaaggcttttttgaaacaaccaaaagtgtttctcagctcgaagaaaactgggaagggaaagagacccggaaagggtgggaaccgcttttggaaatccattgggcttggatttaagactcccagggaagccatcgaaggaacctacattgacaagaagtgccccttcactggcaatgtttccatccgtggccgtatcttggctggaacatgtcacagtgctaagatgaacaggactattattgttaggaggaattatctccattttatcaagaagtaccagaggtacgagaaaaggc

SEQ ID NO: 257274 - DNA, 410 bp, Glycine max
gccgctgagctccctttctcctcggtccacagagacaaaatgtaagacaggtgccaacaggtcatcacgaaagaaaggactagctgagccgagatcactaactaaaacgaatttaatactaatcgaaaatactaatagaatacaaatagaactgtcttttcatatagatatcccttcaacacaacataggtcatcgaaaggatctcgaagacccaccaacgcacgaaagccgggatctttcagaaaatggattcctattcgaagggtgcataaccgcatggataagctcacactaacccgtcaatttgggatccaattcggttccttaggaggtatcgggaaggaattttggaatgtaataatatcgattcatacagatacagaagaaagggttctctattgattcaaac

SEQ ID NO: 257275 - DNA, 405 bp, Glycine max
ggcacaagtgagtttgttgatcgagataactagggacagtgtgatgaaaatgaaggtccttgttttcttcgttgctacaattttggtagcatggcaatgccatgcgtacgatatgttccctctccgaatgaacactggctatggtgcccgtactccggaggtgaaatgcgcaagttggaggcttgctgtggaagcacacaacatctttggctttgagaccattcctgaagagtgcgttgaaacaacaaaggaatacatccatggcgaacaatatagatcagactccaaaacagttaaccaacaagcttacttttatgccagagacctcgaagtccatcccaaggacacatttgcgttcagtatagatggcaccgtactctctaatattccatactacaaaaaaca

SEQ ID NO: 257276 - DNA, 374 bp, Glycine max
gaagcaaaggtttatgaggcaaggcaccagtaattaataacaagctagctattagttcgattttgtagtaagtgaggtgccaatatggtgaagatagctcttggtactttggatgactcttttagcgctgcctctcttaaggcttatttcgcagagttccacgcaactctgattttcgtgttcgctggtgttggatcagccatcgcttacaacgagcttacaaaagatgcagccttggatccaacggggctggtggcagtagctgtggcacatgcatttgcactgtttgtaggtgtctccgtcgccgccaacatctcacgtggccatttgaacccagctgtcacttttggattggccattggaggcaacatcac

SEQ ID NO: 257277 - DNA, 415 bp, Glycine max
ggcacaagtgagtttgttgatcgagataactagaaacagtgtgatgaaaatgaaggtccttgttttcttcgttgctacaattttggtagcatggcaatgccatgcgtacgatatgttccctctccgaatgaacactggctatggtgcccgtactccggaggtggaatgcgcaagttggaggcttgctgtggaagcacacaacatctttggctttgagaccattcctgaagagtgcgttgaagcaacaaaggaatacatccatggcgaacaatatagatcagactccaaaacagttaaccaacaagcttacttttatgccagagacctcgaagtccatcccaaggacacatttgtgttcagtatagatggcaccgtactctctaatattccatactacaaaaaacatggatatggg

SEQ ID NO: 257278 - DNA, 299 bp, Glycine max
ggttctagtgtgtgattgtttgttgttgtaactcgttcttcttcttttgatgttctgtgtttgtgtttgttttttctctcacctgaaaatgtcttgctgcggtggtaactgtggttgcggaagctcctgcaagtgcggcaacggctgcggaggctgcaagatgtacccagacttgagttacactgagtcaaccaccaccgagaccttggtcatgggagtggcacctgttaaggctcaatttgagggtgctgaaatgggtgtgcccgctgaggacgatggctgcaaatgtggaccaaact

SEQ ID NO: 257279 - DNA, 409 bp, Glycine max
ggagagagcgagcgagcgagcagtttcaaagagaggatttgggattgggaaggcgagggattgcgctgcgtctcttcctcttctctttcgattcatccctcattcataatcttccaatccaacaacctcagcctcacactcacacatacacacatctgaacgcgtatcgtccctcccatggcttcaaagcgcatcctcaaggagctcaaggacttgcagaaagacccaccaacttcttgcagcgctggtccagtagctgaggacatgttccattggcaagcaacgattatgggtcctgctgatagtccttatgctggaggtgtattcctagtcactattcactttcctccggattatcctttcaaacctcccaaggttgcctttaggactaaggtgtttcatccgaaca

SEQ ID NO: 257280 - DNA, 429 bp, Glycine max
accacagaaggttatcagctgtcccactctctttagcaatgggcgaattggcgattgattagggcaacgttagtggcacatacggctgcttacaacaactgagctcctcataaatatccatcattcatatatgttaacaatatcaacacatcgtcaacctgcacacttctagagcattagcgcgactatgaagaggcgcagcatcgatccaataaccatgatatctcaaaccgtcatctaagaaaacccataggactggccaaaacacgtaaagtacttttgcccattttgacctgaacccccatactatttcactgggcaattcccaggtgactatggttctgacactgctgagctttctgctgacccacagacttttgccaaaaaccgtgaactgtaagtcatccactccagataggccatgtttgg

SEQ ID NO: 257281 - DNA, 375 bp, Glycine max
  unsure (1)..(375): unsure at all n locations
gataagaaagaagatcaaaagaaaaaagagaaacagatggcagcactgggtggctttaccgacatcaccggagcacagaacagcatcgatatcgaaaatctcgctcgctttgctgttgatgaacacaacaaaaaagagaatgcagttctggagtttgtgagggtgattagtgcaaagaaacaagtggtttctggcaccttgtactatatcactttggaggcaaatgatggtgtgacgaaaaaggtttatgaaactaaggtgttggagaaaccacggttgaacatcaaggaggttcaggaattcaagcccatcactggttgctgtaatcctctntcggtgacggtctaacacatagctagggtatgggaagtgact

SEQ ID NO: 257282 - DNA, 370 bp, Glycine max
gatagcagcatcatacaaagcattgaattcaaaaacttaggttcattccttgtgtttcgctatcttcctcaaaaccaaacatgtcgaacacatgcggcaactgcgactgcgctgacaagactagctgcaccaagggaaacagctatggtgatattgtagagactgagaagagttatatccagactgttgtcatggatgttccagcagctgatcatgatggaagtgcaagtgtggcactaactgcacttgcacggactgcacctgtggccattaaggaatacgtatgaaaatgtaattgccatgtgtttggcaatacagatatccaaataatgtaatcttcggatgaataaatgtgtgtgctgttatccca

SEQ ID NO: 257283 - DNA, 176 bp, Glycine max
ttcggctaagagaggattacggagggttcctacgtgcacaaaaccgcggaagggcatgatgatcatcgtcatgcttcggggagttgaaaattagcgtagatacggtgattcctctatatgagccaagcttacgaactggtgcttgatacacggtcagtcttatatagtgtcaccta

SEQ ID NO: 257284 - DNA, 391 bp, Glycine max
gacagcagcagagcaaaagaaagaaagaaagaaagtgcgaacttcctctgttttgctcccctgtttaagccttatcataagcttagaatggcacacaaggaattttccattgccctagtgactctcattgttctctttgtcaacacgaacctccatggtgccatggctgactatggtggtggttggcagagtgctcatgccactttctatggtgggggtgatgcttctggcacaatgggtggagcatgtgggtatggaaatttgtatagccagggatatggaactgacactgtggctctaagcactgctttgttcaacaatggcttaagctgtggatcttgctatgaaatgagatgtgatgatgacccaagatggtgcaaacctggctcta

SEQ ID NO: 257285 - DNA, 448 bp, Glycine max
gccgctgagctccctttctcctgggtccacagagacaaaatgtaagacaggtgccaacagttcatcacgaaagaaaggactagctgagccgagatcactaactaaaacgaatttaatactaatcgaaaatactaatagaatagaaatagaactgtcttttcatatagatatcccttcaacacaacataggtcatcgaaaggatctcgaagacccaccaacgcacgaaagccgggatctttcagaaaatggattcctattcgaagggtgcataaccgcatggataagctcacactaacccgtcaatttgagatccaattcggttccttaggaggtatcgggaaggaattttggaatgtaataatatcgattcatacagatacagaagaaagggttctctattgattcaaacgctctacctacgagataaggatagagaaagaggaaaaa

SEQ ID NO: 257286 - DNA, 369 bp, Glycine max
  unsure (1)..(369): unsure at all n locations
gaccacagagagagaggttttgatgcaacgctgtcgctgagaaaggatctctatctacgaaggagcggaataaaacccttctctctgtgattaagagaatggcttcagatcggaaacttcacacttttgaggaggtggcaaagcacaaccagaccaaggattgctggctcatcatttctggcaaggtgtatgatgtcacccctttcatggaggatcatcccggaggtgatgaggttntgttatctgcaacagggaaagatgcaaccaatgactntgaagatgtggngcacagtgattctgctagagatatgatggaaaaatactacattggtgaagatgatgcatcaaccgttcccactaaacggacct

SEQ ID NO: 257287 - DNA, 468 bp, Glycine max
ggacagctattcctcttaagcttgctactgagttgggacactgcataccttaggtcttccgaattcgaagttaatttgcaagatggctaaggaaaaggctcagatcaacattgtggtggttggtcatgtggaccctgaggaggcaaccaccattaacgggctgaagaagcctgttgtggagaaagaagctccagggcatgccatatgagggcatgcacgtacggcctcggagggaaccagaaaattatgttaacaaaataatctggaaccctaatgtatcagtgtcatcatcagtgtgtagtttaagctagctttgctatggttacgttctttgagatgagagtcttgatgaacagtaccattctgatgtattgctttccttgaaagttaatgcatgcttcttatcttctgaaaaaaaaaaactctacattaaaaaaaaaagcggccgctctaaaggatccaagctta

SEQ ID NO: 257288 - DNA, 378 bp, Glycine max
  unsure (1)..(378): unsure at all n locations
gacgcgtgcggcgagacgacgacagaaggggatagcagcatcatacaaagcattgaattcaaaaactaagttcgtttgttgtgctttgctttattcctgaaaaccaaacatgtcgaacacatgcggcaactgtgactgcgctgacaagactaactgcaccaagggaaacggctatggtgttatagtagagactgagaagagctacatcgagactgttgacatggatgttccagcagctgagcatgatgggaagtgcaagtgtggcactaactgcacttgcacggactgcacttgtggccattaaggaatatgtatgaaaatgtaattgccatgtgtttgcaatacanatctncaaataatgtatcttcgtatgaataa

SEQ ID NO: 257289 - DNA, 371 bp, Glycine max
gatagcagcatcatacaaagcattgaattcaaaaacgtagagttcattccttgtgttttgctttcttcctcaaaaccaaacatgtcgaacacatgcggcaactgcgactgcgctgacaagactagctgcaccaagggaaacagctatggtgttattgtagagactgagaagagttacatcgagactgttgtcatggatgttccagcagctgagcatgatgggaagtgcaagtgtggcactaactgcacttgcacggactgcacctgtggccattaaggaatatgtatgaaaatgtaattggcatgtgtttggcaatacaaatatccaaataatgtaatcttcgtatgaataaatgtgtgtgctgttatccc

SEQ ID NO: 257290 - DNA, 377 bp, Glycine max
gagcgtgacctagccagcacaaagggcgtaggagaagagggtttcgttccgtttcaatggggagcgaagagcagaacggcgaattctacctgcgttactacgtcggtcacaagggcaagtttggtcacgagttcctggagttcgagttccgcccagacggcaagctccgctacgccaacaactccaactacaaaaacgacaccatcatccgcaaggaggtttacctaacccccgccgttctccgcgagtgccgtcgcatcatcgccgagagcgagattatgaaggaagatgataacaactggcccgaaccggatcgggtggggcggcaggagctcgagattgttatggggaacgagcacatttcgttcaccacgtcg

SEQ ID NO: 257291 - DNA, 410 bp, Glycine max
cctgcaagaggacaacagagggggccggaaagagaatgcaatggcttctctggcaagcttagctggtgttcaaccatctactgtcaagggccttgctggaactaagctctctttcaagccctctcgccagagcttcagacccaagaatttcaggagtggtgccgttgtagcaaagtacggtgacaagagtgtgtactttgatttggaggatctaggcaacactactggtcagtgggacttgtactgctcctatgcaccttcaccctacaaccctgttcagagcaagttcttcgagacattcgtcgctccattcacaaagaggggattgctactaaagtatttgatcctgggaggtggttccaccactgcatacttgagtgccacatcgtcaggtgacattctaccaatca

SEQ ID NO: 257292 - DNA, 408 bp, Glycine max
agaagacgacagaaggggaggtttttagggtttacattgaggaggcacaccttcaggagcagtggtggttctcaaaaccgagctgtgccgattcagcggtgccaagatctacccagggaaaggcatcagatttgttcgtggtgattctcaggttttcctgtttgctaactcaaaatgtaagaggtatttccacaacaggttgaagccgtcaaagctcacgtggactgcaatgtaccgaaagcagcataagaaggatattgctcaagaagctgtgaagaagagaagacgtgctaccaaaaaaccttactctaggtctattggtggtgctactttagaagttatccagaaaaagagaaccgagaagccagaagttcgagatgcagctagggaagcacagcttcgtgaaat

SEQ ID NO: 257293 - DNA, 272 bp, Glycine max
gacacaactgaacaagataagctatccatagcaggggaagaaatgaagagtaccttgttcgccctctttctactttgtgccctcacctcttacctaccttcagccaccgctggtgatgtggtcgacactgatggtaatcctgttgaaaatggaggcacatactttgtgttgccaactataatattaaacggcggtggaatagaatatgccacatttggaaatgaaacttgccctgtcactgttgcgcaatctcgcgatcagttctgcaaggg

SEQ ID NO: 257294 - DNA, 456 bp, Glycine max
ggattgattccctcattcttcatggatagacatggccaccgtcacttctgcagccgttgctattccctcattcactggcctcaaggcaagcgcaggcaaagtgggtgccgcagttaaagtctcagctccccaagccacaaggttgggcatcaaggcttcgctgaaagacgttggagtcgctgttgtggccactgccgcgagtgcagtgctggctagcaacgccatggccattgaagtgttgctgggtggtgatgacgggtctctggctttcgttcccaacaatttctccgtggcctctggggagaagatcgtgttcaagaacaacgcaggtttcccccacaacgttgtgttcgacgaggacgagattcctagcggcgtggatgcagggaaaatctccatgagcgatgaagaccttctcaatgcgcctggtgagacttacaagcgtactttggatgc

SEQ ID NO: 257295 - DNA, 224 bp, Glycine max
gacacaccgtttgttctattcttaactcaacttctgctacccactctcttcttccaagtccaaccacgcttttctctacagtcatgggcaaggtcaagatcggaatcaacggatttggaagaattggccgtttggttgccagagtcgctctgcaaagagacgatgtggagctcgttgccgttaacgaccctttcattaccaccgattacatgacatacaatgtt

SEQ ID NO: 257296 - DNA, 322 bp, Glycine max
taatggagcacaagtgagtttgatgatcgagatggctagaaacagtgtgatgaatgtgaacgtccttgttttcttcgttgctacaattatggtagcatggcaatgccatgcgtacgatatgttccctctgcgaatgaacactggctatggtgcccgtactccggaagtgaaatgcgcaagttggaggcttgctgtggaagcacacaacatctttggctgtgagaccattcctgaagagtgcgttgaagcaacaaaggaatacatccatggcgaacaatatagatcagactccaaaacagttaaccaacaagcttacttttat

SEQ ID NO: 257297 - DNA, 406 bp, Glycine max
  unsure (1)..(406): unsure at all n locations
gattcagattacattgcaaaaatggcatcattcaccatgacagcttccatccttggcagcccagccgtcaccaaccggtcggcagtagcaacgcagaggagatcactcgtagtgaatgctgccaaagctgttgaagcagaaaaggtcagttatgacaatgacatggatggtagcaatggaaggaggaacttgatgttcgccgcggcggcggctgctgtttgctctgttgctgggatggcagtggcagatgagcctaaaccaggaaccccagaagccaagaaaaagtatgctccgatttgtgtcaccatgccaactgctaggatttgtcgcaattgaaggactttggtttttattttacttctgatgattggaaatgtacaaaatgggtngtgtaatgctttgatga

SEQ ID NO: 257298 - DNA, 371 bp, Glycine max
gttattctattccacctcttagaaagaaaaaaacttgaagcaaaatacttaatagcatggcgatacatttatacaaaacttctaccccaagcacacgcaatggagccgtagacagtcaagtaaaatccaatccacgaaatcatttgatctatggacagcatcgttgtggtaaaggccgtaatgccagaggaatcattaccgcagggcatagagggggaggtcataagcgtctataccgtaaaattgattttcgacggaatgaaaaaaacatatatggtagaatcgtaaccatagaatatgaccctaatcgaaatgcatacatttgtctcatacactatggggatggtgagaaaaaatatatattacacccc

SEQ ID NO: 257299 - DNA, 294 bp, Glycine max
aaggacagatacgacatgacgaatgggttgtcatttgcaatgcgccggttctgtccgagactggggagaattacaacacggtggtgtgtctagccttcaagattatattcttgtcatgacgaacactggacacacatgccgtaacacaagcaaacttacagaatgctggataccacacatgggaaaaattaattctcaaagatccacacgatccttccactccaaatgcacattcatacacagcatccatgagacgaaaactgattacgcatggatacagcattcatgagatca

SEQ ID NO: 257300 - DNA, 426 bp, Glycine max
  unsure (1)..(426): unsure at all n locations
gaagtgagtttgttgatcgagataactagaaacagtgtgatgagaatgaaggtccttgttttcttcgttgctacaattttggtagcatggcaatgccatgcgtacgatatgttccctctccgaatgaacactggctatggtgcccgtactccggaggtgaaatgcgcaagttggaggcttgctgtggaagcacacaacatctttggctttgagaccattcctgaagagtgcgttgaagcaacaaaggaatacatccatggcgaacaatatagatcagactccaaaacagttaaccaacaagcttacttttatgccagagacctcgaagtccatcccaaggacacanttgtgttcagtatagatggcaccgtactctctaatattccatactacnaaaaacatgggatatgggtggagaaaattaac

SEQ ID NO: 257301 - DNA, 462 bp, Glycine max
gaagaaaaatggcaaccatcatcgccggcatcccgggtacatcgatcactcgcgcaggtcttgtgctcaaacgacctgttggagcctcgtcctctaccgttcttggattgccagcaatggctaaggcagggaaagtgaggtgctccatggaggaaaagccttcaagcagctcaaatatagggatgggggcatccttgttagcagctgcagttgccgcaaccatgtcaagcccagccatggctttggtggatgagagactcagcactgaaggaaccgggcttccctttgggcttagcaacaacctccttggttggatcctgtttggtgtcttcggtcttatatgggctctctactttgtctacgcttccacccttgaagaggatgaagagtctggattgtccctctaaacccccaagtggcgatgcatgcattgtagaaattgcaaagaattatctctttttc

SEQ ID NO: 257302 - DNA, 416 bp, Glycine max
gacactgctattcctcttaagctgggtactgagtttccacactgcataccttaggtcttccgaattcgaagttaatttgcaagatggctaaggaaaaggctcagatcaacattgtggtggttggtcatgtggaccctgaggaggcaaccaccattaacgagctgaagaagcctgttgtggagaaagaagctccagggcatgccatatgagggcatgcacgtacggcctcggaggggaaccagaaaattatgttaacaaaataatctggaaccctaatgtatcagtgtcatcatcagtgtgtagtttaagctagctttgctatggttacgttctttgagatgagagtcttgatgaacagtaccattctgatgtattgctttccttgaaagttaatgcatgcttcttatcttctgtcc

SEQ ID NO: 257303 - DNA, 452 bp, Glycine max
ggttctccatctctgccactgccataactcactcaggagcttcttctctgttctcaccaatggcatcaacaatatcagcaatggccatgatcaacgccaaatgcgtcaacccaaagttccccaatcccaccaagctcgcaccatcaaaaccctcccttcagatcaaccttccaaagggcctcatagcctcacccgaaagcactaaactttcccccgcgacagcaatcgcaggagcaatattcacaaccctcggaacctgcgacgccgcattcgctgttcaacaaatagccgacatagcagaaggcgacaaccgcggactggcactgttgctgcccataatcccagcaatagggtgggttctgttcaacattctgcagccggcgctgaaccagctgaaccgaatgcgcagcaccaaaggcgtgatcattggcttgtggcttggcggcttggct

SEQ ID NO: 257304 - DNA, 419 bp, Glycine max
  unsure (1)..(419): unsure at all n locations
cccacgcgtccggacgacagaaggggagagaacctaagagatataaataagccataataaggaggcgattcggaaaagaagaaaagacattcaacaaacaacgcaatgggtattccgtcggaactgagggacatgttgttgcccaacaaaaagggcgtcctcgttgcctctcccgcagaggacaggaagactttgaggtccaagcaatgcactagggaaggtgtgcgagctggattcaaggctgcttccattgctggtgttgccagtgctgtgcctacattggctgcagttcgtatgattccatgggcaaaggcaaacctcaattatactgctcaagcacttatcatatctgctgcatccatcgnctcatacttcatcactgctgataaaactatcttggagtgtgcaacgaaaaatgc

SEQ ID NO: 257305 - DNA, 395 bp, Glycine max
acagaaagagcacaagtgagtttgttgatcgagataactagaaacagtgtgatgaaagtgaaggtccttgttttcttcgttgctacaattttggtagcatggcaatgccatgcgtacggtatgttccctctccgaatgaacactggctatggtgcccgtactccggaggtgaaatgcgcaagttggaggcttgctgtggaagcacacaacatctttggctttgagaccattcctgaagagtgcgttgaagcaacaaaggaatacatccatggcgaacaatatagatcagactccaaaacagttaaccaacaagcttacttttatgccagagacctcgaagtccatcccaaggacacatttgtgttcagtatagatggcaccgtactctctaatat

SEQ ID NO: 257306 - DNA, 297 bp, Glycine max
aaggacagaaggggtatgatgaatgggttaacaagggcaatgcaccggcactgcccgagactcttgagaattacaacaagctggtgtctcttggcttcaagattatattcttgtcaggaagaacactggacaaacaggccgtaacagaagcatacttaaagaatgctggcttccacacatgggataaatttattcttaaggatccacatgatcctttcactccaaatgcatattcattcaaagcagcaactagtgagaaactcattatgcacggctacaacatcctgcgaatccttg

SEQ ID NO: 257307 - DNA, 313 bp, Glycine max
gacccttaataagttgtcacaaaacacaaacctagtgcgtagcatattccagtgtttttcatttcatcgtgcattcaatggccaccacagcagctctatccggaaccatggtgagcacctccttcatgaggaggcaacctatggccaccacaagcctaaagacattccccaacgttggtgaagctctttttggtctgaaaagtggacgaggtggtcgtgtcacttgcatggcctcgtacaaggtgaagctcataaccccagaaggagaagtggagtttgaatgcccagatgatgttttcattgttgacaaggc

SEQ ID NO: 257308 - DNA, 419 bp, Glycine max
gaaagaagtgtgagtaagatcataagcaaaagcgggggtgaactgaagatgccggttctcaccctttctactaacgttagccttaatgatttagacgcctcttcgatactctcccaagtaatctccaccgtcgccagcatcatgcgcacacctgagccttttgtgatggtttcactggaaggatcaacaaccacatgttttggtgggactgaggagccagctgcctatggtgaactggtgtccatgggtgctcttaacccagaattgaacaaaaaactgagtgctggaattgcctgcgttcttgaaaccaagttgttggtgccaaagtcacggttcttcttaaaattctataacacagagggctataattgtgcatttgaacggtctatcatggtagtcgagtccaaatgatggaaaga

SEQ ID NO: 257309 - DNA, 440 bp, Glycine max
aggaacgccgtcgtcgggatgctgcaacggagtgaggagcctcaatgccgccgccaagaccaccgccgaccgccagacggcgtgcaactgcctcaagtcggccgccagccaaatctccggcttcaacgccaacaacgccgcctcgctccccggcaaatgcggagtctccatcccctacaagatcagcacctccaccaactgcgctaccatcaaggtttgaagagaaagtcatggacgcaggaaaccggaaactactcactagtatatgagtagcattattaatattaagaataagatcgagggtgatgagggctccacttatatgcccctctcctcttgtatgagagatttgcattggatagctttaagttgggttgcgttggtatttctctggatgagttacacatagttatatctactttaatattgggttcttcctt

SEQ ID NO: 257310 - DNA, 298 bp, Glycine max
ggttctagtgtgtgattgtttgttgttgtaacccgttcttcttcttttgttgttctgtgtttgtgtttgttttttctctcacctgaaaatgtcttgctgcggtggtaactgtggttgcggaagctcctgcaagtgcggcaactgctgcggaggctgcaagatgtacccagacttgagctacactgagtcaaccaccaccgataccttggtcatgggagtggcacctgttaaggctcaatttgagggtgctgaaatgggtgtgcccgctgagaacgatggcttgaaatgtggaccaaac

SEQ ID NO: 257311 - DNA, 376 bp, Glycine max
gtactctgatggcaaggcaagcgcttctgctctttgtgtggtggctatgcttcttggcaagagttagatcggacgaggattgcgtgtacacggtgtacgttcggacgggttcgatcatcaagggaggcaccgattcagtaattggtctgaagctatacgacaagtccggctacggcatatacatcaccaacctcgaggcatggggcgggttaatggatccgggtcacaactactacgagcggtgcaacctcgacatattcagtggtagaggcccttgcttggaagcacctgtttgcgaggccaacctaacttctgacgggtcggtgccccatcacggctggtacgttaattacgtcgaggtcaccactactggggt

SEQ ID NO: 257312 - DNA, 416 bp, Glycine max
ggaacagagagagagagaatggcagcagttggtgggaatcgtgatgtgacaggaagccagaacagcgttgggatcgatgctctagctcgctttgctgttgaagaacacaacaaaaaacagaatgcccttttggagtttgaaaaggtggtaactgcgaaacagcaagtggtttctggtaccttgtacaccatcactttggaggcaaaagatggtgggcaaaagaaggtttatgaagccaaagtttgggagaagtcatggttgaacttcaaggaggtgcaagagttcaagcttgttggagatgcacccgcatagtctagtgcttaattaggttgctgaagagtgaagaatgagacagcctggttcgaaagggaaaagcctaaggatatatcaaaagatcctatatgtataaaataaat

SEQ ID NO: 257313 - DNA, 347 bp, Glycine max
  unsure (1)..(347): unsure at all n locations
ggttctagtgtgtgattgcttgttgttgtaactcgtgctgcttcttttgttgttctgtgtttgtgtttgttttttctctcacctgaaaatgtcttgctgcggtggtaactgtggttgcggaagctcctgcaagtgcggcaacggctgcggaggctgcaagatgtacccagacttgagctacactgagtcaaccaccaccgagaccttggtcatgggagtggcacctgttaaggctcaatttgagggtgctgaaatgggtgtgcccgctgagaacgatggctgcaaatgtggaccaaactgctcctgcaacccctgcacttgcaagtgangtgttgggagagcaagct

SEQ ID NO: 257314 - DNA, 424 bp, Glycine max
  unsure (1)..(424): unsure at all n locations
gatcatcaagtcccaacaactattctacttaccttttctggtaatccaaatatcatcgtctgaaacgatggctgccatggcaaccacaaccctctcttcaaacccgaaactctcatttttccacggaaagcccgttacatattcttcccgcgtcgcacccaccaccaagttattctcatccaaacaaggcacaatctccatgtccctaacccaacccccatacgacctccaatccttcaaattccaacccatcaaagaatccatcgtctcacgcgaaatgacgcgccgctacatgaccgacatgataacctacgccgacaccgacgtcgtaatcgtcggagccggctcggcggggctctcctgtgcgtacgagatcagcaagaaccccgncgtgagcgtcgccataatcgagcagtccgtgagc

SEQ ID NO: 257315 - DNA, 381 bp, Glycine max
attgatgggaagccggtttcattcacatttgcttatcatacatatttctctgtgtcagatataagtgaagtgcgggttgaaggattagagacattggattatcttgacaacttgcagaaaagggaacgctttactgaacagggggatgctttaacatttgaatcagaatttgacaggatatatctcagcactcctacaaagattgcaattcttgatcatgagaaaaagagaacaattgtattgcgtaaagatggtcttcctgatgctgtggtgtggaatccttgggatacgaaagcaaaggctatatctgatttcggtgatgatgagtataagtacatgctatgtgtagaggctgctgctattgaaaagcctatcactttg

SEQ ID NO: 257316 - DNA, 400 bp, Glycine max
gaatagaaatagaactgtcttttcatatagatatccgtgcaacacaacataggtcatcgaaaggatctcgaagacccaccaacgcacgaaagccgggatctttcagaaaatggattcctattcgaagggtgcataaccgcatggataagctcacactaacccgtcaatttgggatccaattcggttccttaggaggtatcgggaaggaattttggaatgtaataatatcgattcatacagatacagaagaaagggttctctattgattcaaacgctctacctacgagatagggatagagaaagaggaaaaaaccgaggatttcacatagtacttttggtcgaaaaatcgatctgatttttttcgtacttttcgctcaatgatgaaatgggtcagattcta

SEQ ID NO: 257317 - DNA, 352 bp, Glycine max
gaaggaaggaaggaaggaaggaagagtgagcgtgaaagatgccttcggcgaggctttcagggtcaccaaggctcgacgttgctattgacatgggcaatccatttctcaatctcactgttgatggtttccttaagatcggagctgtcgcagccacgcgatcagctgctgaagatacttatcatattatccgaaacgggaatatctcaagtcatgatttcgagaaaacgttgaagaagatgtgtaaagaaggtgtatattggggaactttagctggtgtttatcttggaatggaatatggggtagagaggatccgtggcaccagagattggaagaatgccatgattgggggtgc

SEQ ID NO: 257318 - DNA, 366 bp, Glycine max
gaggctgaagaacacatagagagagagagagaagggcagaaaaaatgagactgttcgatccatggcctgttttcttcaagagagaatggaagcggaattggcccttcttggttggattcgccatcaccggaactctcatcaccaaactttcccttggtctctctgaggaggaagccaaaaagtcgaaattcgtccaggcacacaagaggtgactttagaatggaagatttgcagtggctttgcacattgtattagatgtgtgaagagagcttttgtttgtaataaatgaagagagatgttgtatacactccatgttcctatttccattttggttgtttactttaatgtgattgagaaattcatact

SEQ ID NO: 257319 - DNA, 306 bp, Glycine max
gaaagaaaactccaaactcaagtaggcgatactaaggtgaaaaaggagagatggcagctgcaacatctagtgctgtgttaaacgggtttggatctcacttcttgtgtggaggaaagaggagccatgcccttcttgctgctagcattggagggaaagttggtgcttctgttagtcctaaaagagttattgtggcagttgctgctgcaccaaagaagtcatggatccccgctgtaaaaggtggtgggagtttcatagacccagaatggcttgacggctcgctaccaggtgactatggttttgacccac

SEQ ID NO: 257320 - DNA, 385 bp, Glycine max
gtagtaattattagaatttgtagtaattattataaggatgagaagcagcaattcttaggtatttcagattaatacttgataacctaaacaatatatctatatatagaatatagatagatatatatataatagaacgtaaaaaaaagaagagaataataaatagaaaaaggagcatgttgattatatagaaagtaaagggcaacaatcatttttgtttaccatgggtaaggacaccatcgctgacataataacctatataagaaatgctgacatgaataaaaaaggaatggttcaaataccatttactaacataacagaaaacattgtaaaaatacttttacgcgagggttttgttgaaaacgtcagaaaacatagagaaaacgac

SEQ ID NO: 257321 - DNA, 187 bp, Glycine max
gaggaagagtgagcgtgaaagatgccttgggtgaggctttcagagtctccaaggctcgacgttgctattgacatgggtaatccatttctcaatctcactgttgatggtttccttaagatcggagctgtcgcagtcacgcgatcagctgctgaagatacttatcatattatccaaaagggaatatctc

SEQ ID NO: 257322 - DNA, 453 bp, Glycine max
  unsure (1)..(453): unsure at all n locations
gagataaagaaaagagaaatggcaacagaaacaaaagtggcagtattaggtggcatcaccgaagtgcagggagctgccaacagcgtcgagatcaacaatctcgctcgctttgctgtagaggaacaaaacaaaagagggaattcagttctggagtttgtgagggtgattagtgcacagcagcaagtggtttctggagtgaattactacataacattggaagcaaaagatggtgagattaaaaatgagtataaagcgaaggtttgggagagggaatcccaagagttgctagaattcatgccaacattacgtgcangaggcgagatcgaccatctcgctcgctttgctgtacaagaacaaaacaaaagagagaatgcaaatctggagtttgtcggggtgattagggcatagcagcatgtggcggaagggtcatatactacatcactttggaaagca

SEQ ID NO: 257323 - DNA, 451 bp, Glycine max
  unsure (1)..(451): unsure at all n locations
gaaaagaaaagagaaatggcaacagaaacaaaagtggcagtatgaggtggcatcaccgaagtgcagggagctgccaacagcgtcgagatcaacaatctcgctcgctttgctgtagaggaacaaaacanaagagagaattcagttctggagtttgtgagggtgattagtgcacagcagcaagtggtttctggagtgaattactacataacattggaagcaaaagatggtgagattaaaaatgagtataaagcgaaggtttgggagagggaatcccaagagttgctagaattcatgccaacattaggtgcaggaggcgagatcgaccatctcgctcgctttgctgtagaggaacaaaacaaaagagagaatgcaaatctggaatttgtgggggtgattaaggcaaagcaacaagtggtggaagggttcatatactacatcactttggaaagca

SEQ ID NO: 257324 - DNA, 312 bp, Glycine max
ggagacgagggtaaggtcgcgttgtgttgcgtcgtgtggtgcgctgttcctctgtctgtcgtttttgttttcagaccaaaccctagctccgcatcgcaaccatgtcgaccaagcaaggtggaaaagctaagcctttgaagaaacccaagtctgataagaaggattacgacgaggttgacatggctaacattcagaagaaaaaggaagaggagaaggcgctaaaggagttgaaagccaaggcgcaacagaagggaagctttggaggttctgggctcaagaaaagtggaaagaagtaagggctctttatcatga

SEQ ID NO: 257325 - DNA, 381 bp, Glycine max
  unsure (1)..(381): unsure at all n locations
gatagcagcatcatacaaagcattgagttcaaaaacttaagttcattccttgtgttttgctttcttcctcaaaaccaaacatgtcgaacacatgcggcaactgcgactgcgctgacaagactagctgcaccaagggaaacagctatggtgttattgtagagactgagaagagttacatcgagactgttgtcatggatgttccagcagctgagcatgatgggaagtgcaagtgtggcactaactgcacttgcacggactgcacctgtggccattaaggaatatgtatgaaaatgtaattgccatgtgtttggcaatacaaatatccanataatgtaatcttcgtatgaataaatgtgtgtgctgttatcctactttaggtct

SEQ ID NO: 257326 - DNA, 308 bp, Glycine max
  unsure (1)..(308): unsure at all n locations
ggcgtttttcattgtgcattattcaatggccaccacagcagctctatccggaaccatggtgagcacctccttcatgaggaagcaacctatgacgaccaagagcctaaagacattccccaacgctctttttggtctgaaaggtggacgaggtggtcgtgtaacttgcatggcctcgtacaaggtgaagctcataaccccagaaggagaagtggagtttgaatgcccagatgatgttttcattgttgacaaggctgangaagaaggcattgaacttccctactcgtgcaaggctggttcttgcgtttcat

SEQ ID NO: 257327 - DNA, 369 bp, Glycine max
gaaggtgcaagagtttgttgtgagctataagctagggtatcgtgaggagaatatgaagttgtttgttttctttgttgctgcagtagttttggtagcatagccatgccatggcgcaggctaccaaaggttccctctccgaatgaaaactggctatggtgagcgttcttcgggggtaaaatgcgcaagttttaggcttgctgtggaagcacacaacatccgagcctttaaaaccattcctgaagagtgcgttgaaccaacaaaggactacattaatggcgaacaatttagatcagactctaaaacagttaaccaacaagctttcttttatgctagtgaacgcgaagtccatcacaacgacatatttatatt

SEQ ID NO: 257328 - DNA, 417 bp, Glycine max
cgacagaaggagtataatagacgtaacaagttcaacccattgtggaatgcacttgtacttgggggggtgaaaaacgggcagaagtaccttggcatggttaacatgattggcattaattttgaggacaaccatgtagcaaccgggcttggaaatcatctcgctaggccaattctccgtgatgagtggcatgaaaacttgacctttgaagagggcgtcaagttactggaaaaatgcatgcgtgtgcttttataccgtgataggtctgctgtcaacaaaatccagatatctaaaattacagatgaaggtgccactgttttcccaccattctcattgaaaacgtactgggagttctctgccttcaagaatccaactgtgggcgctgaaagttcatggtaactgactcattgtgaaatgaaa

SEQ ID NO: 257329 - DNA, 424 bp, Glycine max
  unsure (1)..(424): unsure at all n locations
ggctgcagctgaggaggaccatcgcgcccaagggagagagagagagagagaggcgcgaaaatgagcggagcgaaggggaagaagaagggagcgagctttgtgatcgattgcgcgaagccggtggaggataaaattatggacattgcttctctggagaagttccttcaggagaggattaaggttggcggcaaggccggtgcactcggcgattccattactgtcactagggacaagagcaagatcaccgtcaccttcgacagcaacttctctaaacggtatctngaaatattgaccaagaagtacttgaaaaagcacaatgtgaggggatggcttcgcgtgatggcattcaacagggagcgaatgtctatgaatggagatacttaacatcgctgagaacgagggtgaagaggaagactgaagatct

SEQ ID NO: 257330 - DNA, 425 bp, Glycine max
ggtaaaaggtgagggtgacccgtgattcgtgaacacagagaccatcgccatgggcttcaatattctgagaaccacttccatctccactcctatctcttcctccaaatccaaacccattttctcaactcttcttcgttcttctccttccaccattttccccccaaagtccgttactcccaccactcttttcgtttctgccacccccttcttcactctccatcccaagcttggttttcgtggtgggattgtggccatggccgcacctggctctctccgcaaatccgaggaagagtggcgcgcaattctctcccctgaacagtttcggatcctcaggcaaaagggcaccgagttccctggaacaggagagtatgacaagttctatgaagagggagtttacaactgtgctggttgtgggacttcactct

SEQ ID NO: 257331 - DNA, 304 bp, Glycine max
gataccaaaaacaaaacacaagccaagtgaaagtgagaaaaaataaaaatcaaagagcataatgtcagggatcattcacaagattggggagacccttcatgtgggagggcacaagaaggaggaggagcataagggtgagcaccatgctggagaatacaaaggggagcaccatggtgaacacagtagtgagtacaaaggagagcatcatggtgaacacaaagctggagagtaccatggtgagcacaagccagagcacaaagaggggttcctagacaaagtcaaggacaagatccatggtgagggc

SEQ ID NO: 257332 - DNA, 415 bp, Glycine max
gattgaagaagtgcccaaggaagctcgttctttcggcggcgtcacaagtcacaactcgcagaccacaatgcctaagcagatccacgagattaaggattttcttctgacggcgcggaggaaggatgcgaggtcggtgaaaatcaagaggagcagggatgtcgttaagtttaaggttcgatgctccaagtacttgtacacgctttgggtctttgaccctgagaaagccgataagttgaagcaatctcttcctcccggtttgagtgttcaagacctgtagagctgttgagtgtggcagcatgcgtttgtttctctttttggtacctgatgctctagattttgtggctcggctttatatgttggtgatttttacgaggaccatttttgtttaaatgggtacgaaatgtgaaagtttgat

SEQ ID NO: 257333 - DNA, 359 bp, Glycine max
gatagcagcatcatacaaagcattgaattcaaaaacgtaagttcattccttgtgttttgctttcttcctcaaaaccaaacaggtcgaacacatgcggcaactgcgactgcgctgacaagactagctgcaccaagggaaacagctatggtgttattgtagagactgagaagagttacatcgagactgttgtcatggatgttccagcagctgaacatgatgggaagtgcaagtgtggcactaactgcacttgcacggactgcacctgtggccattaaggaatatgtatgaaaatgtaattgccatgtggttggcaatacaaatatccaaataatgtaatcttcgtatgaataaatgtgtgt

SEQ ID NO: 257334 - DNA, 422 bp, Glycine max
gaacgtaaaaaaaaaaaaagaataataaatagaaagaggagcatgttgattatatagaaagtaaagggcaacaatcatttttgtttaccatgggtaaggacaccatcgctgacataataacctatataagaaatgccgacatgaataaaaaaggaatggttcaaataccatttactaacataacagaaaacattgtaaaaatacttttacgcgagggttttgttgaaaacgtcagaaaacatagagaaaacgacaaatattttttagttttaactctacggtatagaagaaatagaaaaggatcatataaaagttttttaaatttaaaacgggtcagtacacccggtctacgaatatattctaattatcaacgaatccctcgaattttagggggcatggggattgtaattctttcaacttct

SEQ ID NO: 257335 - DNA, 379 bp, Glycine max
  unsure (1)..(379): unsure at all n locations
gaccaagtgaaccaatatagcccaagccctatacaggcaaaccctaacacacacccatttgattcagtttccatggctagcctcaaggttgcatttttggctgcagtgctctgcatggttgtggtgagtgcacccatggcacatgcagctatcacgtgcggacaggtgacgagtaacctggccaattgcatcggttacctccagaagggaggaacgccgtcgtcgggatgctgcaacggagtgaagagcctcaatgccgtcgtcaagaccaccgtcgaccgtcagacggcgtgcaactgcctcaagtcggccgtcagccaaatctccggcttcaacgccaacaacgccgnctcgctaccccgcaaatgcggagtctcca

SEQ ID NO: 257336 - DNA, 380 bp, Glycine max
ggcacaccttcaccaaaacaaacccactaagatggcttcgtgagtatccctcctagtgctgcttcttgcagcccttatcctcatgcctcaagggcttgctacttactacaaaccaattaagaagccaccagtgtacaagcctacagtgtacaagccaccagtgtacaaaccaccggtttataagccaaaaccaccggtttacaagccgaaaccaccggtttacaagccaccatataagaagccaccatacatgaaaccaccttatggaaagtacccttcagtagaggacaacacccatgcctaaagcaagcaatgaagtctattatctacttaatacataagaggaactgctttgtgttttccaacattgtgatttacaa

SEQ ID NO: 257337 - DNA, 412 bp, Glycine max
  unsure (1)..(412): unsure at all n locations
gcacaagtgagtttgttgatcgagataactagaaagagtgtgatgaaaatgaaggtccttgttttcttcgttgctacaattttggtagcatggcaatgccatgcgtacgatatgttccctctccgaatgaacactggctatggtgcccgtactccggaggtgaaatgcgcaagttggaggcttgctgtggaagcacacaacatctttggctttgagaccattcctgaagagtgcgttgaagcaacaaaggaatacatccatggcgaacaatatagatcagactccaaaacagttaaccaacaagcttacttttatgccagagacctcgaagtccatcccaaggacacatttgtgttcagtatagatggcaccgtactctctaatattccatactataaaaaaaagaannnaa

SEQ ID NO: 257338 - DNA, 417 bp, Glycine max
gacgggtaagctggcgtagctatgggggaattcaagcactttgtaattgttaagttcaaggaaggtgtggccgttgacgagctcacaaaagggatggaaaagttggtcacggagattggtgctgtcaagtcctttgaatggggacaagacattgaaagcctagatgtgttgagacaaggttccactcatgcattcttgatgacattcaacaagaaagaagactttgttgcatttcagagccacccaaatcatgtcgagttctcgacaaagttttcggcagctattgagaatattgtgctactggatttcccatctactcttgtgaaggccccagcatgatcctaaagatattcaagcaataaagattccctctttaaaatttgttagtgtatgtttgtgcctgtgtccggtatcttt

SEQ ID NO: 257339 - DNA, 349 bp, Glycine max
gactaccaagtgaaaaagcaactaagcatagtgtgtaagaagagggagaaaaacaagtgctgtgtagagagaaaaatggctaggtggtgcatgatcttggtggttcttgctcttgccgtggttgcaagtgccagaaacatgcccaatgacgctggtttggaggaccagaagaacttccttgggtatgggttttcgggagttggcaacaatggccttccctttggtggagtgggttctgggtttgatggtaatatgggtgggccttctgggctcggatgacttggaggattcggtgggcctggtgggcttggcggactcggaggtactggtaacggtgaatgacccagtc

SEQ ID NO: 257340 - DNA, 430 bp, Glycine max
  unsure (1)..(430): unsure at all n locations
gaagcacaacaaaaccacaatctaagtaagtgttgagagaagagtgcgtttgtttgtttgaaattaagtagtaaagatgtttggaatcatcggaggaaacaagggtcacaagataaaggggaacttggtgattatgcgaaagaatgtgttggatatcaacagcatcaccagtgttaagggtgtcattggaaccggcattaacatcattggaggtgtcgtcgacaccgttactgctttggcgtcccacatctgcatccagctcatcagtgccaccaaggctgatgggcatgggaaaggtaaagttggaaaggctacaaatttaagaggacaagtgtcgttgccaaccttgggagctggcgaagatgcatacgatgttaattttgaatgggacagtgacttcngaattcccggtgcattttacataaagaac

SEQ ID NO: 257341 - DNA, 287 bp, Glycine max
acacaactgaacaagataagctatgcatagcagccaaagaaatgaagagtaccttgttcgccctctttctactttgtgccctcacctcttacctaccttcagccaccgctggtgatgtggtcgacactgatggtaatcctgttgaaaatggaggcacatactttgtgttgccaactataatattaaacggcggtggaatagaatatgccacatttggaaatgaaactggccctgtcactgatgcgcaatctcgcgatcagttctgcaagggctttacgataaccatt

SEQ ID NO: 257342 - DNA, 474 bp, Glycine max
  unsure (1)..(474): unsure at all n locations
gacaccaacaccaaaacaaacccactaagatggcttcctttgtatccttcctagtgctgcttcttgcagcccttatcctcatgcctcaagggcttgctacttactacaaaccaattaagaagccaccagtgtacaagcctccagtgtacaagccaccagtgtacaaaccaccggtttataagccaaaaccaccggtttacaagccgaaaccaccggtttacaagccaccatataagaagccaccatacaagaaaccaccttgtggaaagtaccctccagtagaggacaacacccatgcctaaagcaagcaatgaggtctattatctacttaataaataagaggaactgctntgtgttttctagtattgtgatttacaacttcgtagcaatgcatattctngactcttgcatgcacttcaatccttcgtagcattaatgatgtggccaagtcatcatgagcatcatacttatttc

SEQ ID NO: 257343 - DNA, 337 bp, Glycine max
gctcaaacggtcttatctctctcttacacacccaagcactactactactactttctttctagatatgggttctggtgctgtgcaactgtttctgatcttggggctcttggctagctcatgcttagcccaagccccaggtgctgcaccgtcacaaccacccactacaaccccatcaccaccaccacccagatcagcacctgcaccagcacccaccgcaccagcaaccccaccaccagcaacctcaccaccagcagcaactccaccaccagcagcaactccaccaccagcagcaacaccaacaccagcaccagcaccaccaacggctgcacctacacct

SEQ ID NO: 257344 - DNA, 435 bp, Glycine max
  unsure (1)..(435): unsure at all n locations
gatctggcagcggaagaacaagtagttgagaactaagaaggagaagcatatggcttcctcaatgatctcttccccagctgttaccactgtcaaccgtgccggtgccggcatggttgctccattcactggcctcaagtccatggctggcttccccaccaggaagaccaacaatgacattacctccattgctagcaacggtggaagagtgcaatgcatgcaggtgtggccaccagttggcaagaagaagtttgagactctatcctacctgccagaccttgatgatgcacaattggcaaaggaagtagaataccttcttaggaagggatggattccttgcttggaattcgagttggagcacggtttcgtgtaccgtgagcacaacaggttaccaggatactacgatggacgctacttnaccatgtggaagctgcctat

SEQ ID NO: 257345 - DNA, 444 bp, Glycine max
  unsure (1)..(444): unsure at all n locations
gagagcgaaagagatgtcgttggtttcaagcatgtgcgggtgtggagtggtgatggcggcgtcgcaagcaatgggaattggaaggagaagcgatggtggattgacgatagtgtgttcgtctaggccgcagaagaaagcgactgcgcatcacatgaagactcggcctcggaagacgcatgcatgggatagaaaccgcatgcccaccgtctacgatccactccctactgttcctcctgattggaccctcgttattcccgctgacgcttcttctgcttccgttacgcctncgncttcaactncctctgcctagtcactctctcggtactctctctcagtttcatgtagtcttatctttaattccagcagcttttctttcatgttttcatctcaaatcaaaccttcatcatttgttttggatcaataaatgtttctgaaatctctctc

SEQ ID NO: 257346 - DNA, 472 bp, Glycine max
gacaacgtaataataaccaaaacagcagagagaagagagggtgtagacaaacacaatctctaatggcactcaggatgtgggcttcttccactgccaatgcactcaaagtctcttctacctccagacctcatctcttgcatcctttttctttctccagatgcttgtcttccgtcttggatggacttaagtatgcagattcacacgaatgggtcaagcacgaaggctcagtcgccaccattggtatcactgaccatgcccaggaccatcttggagaggttgtgtatgtggagctgccagaatcaggtggcacagttacccagaagtctggcttcggagccgttgaaagtgttaaagtaacaagtgacataaactctccaatctcgggggagattgttgaggttaacaaaaagctcacagagacacctggcctggtcaactcaagcccatacgaagatggatggatgatcaaagt

SEQ ID NO: 257347 - DNA, 434 bp, Glycine max
  unsure (1)..(434): unsure at all n locations
tgggcagcagaagaacaagtagtnnctaactttgaggggggccatcagtgatcgacaatgatttacgacgttaactctactattgtccgatccttcctcagccagaagggaggctcctctgatgagatgaaatcggacgaacagaagccaaaagagcagaaacccaaagccagcgagaacaaacctataatgactgagtgataacagctgagctgcattcagttgtagaatgaaaataggtggtaggtattgtatttggtgctaaactaagatctttttggctgtgttctgaagtatatgccggcgatgttggtctttggtattggaattggttgattttggatatgggtataacgaaaacttataatggacacaagtggacttgatgcacgcatgacacatgcaatgaagtcactcggttaaaaagtggtttg

SEQ ID NO: 257348 - DNA, 396 bp, Glycine max
ggcattatatttgagttcaaacagatcaaagccatggccaccggcaacttctctattgttctctccggctccctagccttctttttggtgctacttaccaaggcacactcgaccgataccgtttctttcaccttcaacaagttcaacccagtccaaccaaacattatgctccaaaaagatgctactatttcatcctctggggtgttacaactcaccaaagttggcagcaacggcgtgcccacctcgggatctctcggtcgtgccctttacgctgccccaatccagatttgggacagcgaaaccggcaaggtaaccagctgggctacatgctttaaattcaacattttcgcacccaacaaatcaaactcagctgacgggcttgccttcttataggca

SEQ ID NO: 257349 - DNA, 318 bp, Glycine max
caacataggtcatcgaaaggatctcgaagacccaccggcgcacgaaagccgggatctttcagaaaatggattcctattcgaagggtgcataaccgcatggataagctcacactaacccgtcaatttgggatccaattcggttccttaggaggtatcgggaaagaattttggaatgtcataatatcgattcatacagatacagaagaaagggttctctattgattcaaacgctctaactacgaaatatggatttagaaagagggaaaaaaccgggggtttacatagaaccttttggccaaaaaatccgctcggattttt

SEQ ID NO: 257350 - DNA, 329 bp, Glycine max
caccgtcaaccgtgccggtgccggcatggttgctcggttcaccggcctcaaatccatggctggcttccccacgaggaagaccaaccatgacattacctccattgctagcaacggtggaagagtacaatgcatgcaggtgtggccaccaattggcaagaaggagttcgagactctttcctacttgccagacctcgatgatgcccaattggcaaaggaagtcgaataccttctaaggaaaggatggattccttgcttggaattccagttggagcacggtttcgtgtaccgtgagcacaacaggtcacctggatactatgatggacgctact

SEQ ID NO: 257351 - DNA, 296 bp, Glycine max
gattatatttgagttcaaacaaatgggggccatggccacctccaacttctctattgttctctccgtctccctagccttctttttggtgctacttaccaaggcacactcgaccgataccgtttctttcaccttcaacaagttcaacccagtccaaccaaacattatgctccaaaaagatgctagtatttcatcctctggggtgttacaactcaccaaagttggcagcaacggcgtgcccacctcgggatctctcggtcgtgccctttacgctgccccaatccagaattgggacagcg

SEQ ID NO: 257352 - DNA, 158 bp, Glycine max
tcaaacgaagaaaggcttatggtggatacctaggcaggcagagacgaggaagggcgtagtaagcgacgaaatgcttcggggagttgaaaataagcgtagatccggggattcccgatataggtcaacctttcgaactgctgctgaatccacgggcagac

SEQ ID NO: 257353 - DNA, 218 bp, Glycine max
gatctggcagcggatgatacaagtagttgagacctaagaaggacatgcacatggcttactcaacgatcgctctctcagctgttaccactgtcaaccgggccgtagccacgcatggttgattcattcactggcctcaagttcatggctggctacctcaccaggaagaccaccaatgacattacctacattgctagcaacggtggaagagtgcaatgcat

SEQ ID NO: 257354 - DNA, 449 bp, Glycine max
gctggcagcagaaaaacaagtagttgagaactaagaggaaggaaatggcttcctcaatgatctccttcccagctgttaccaccgtcaaccgtgccggtgccggcatggttgctccattcaccggcctcaaatccatggctggcttccccacgaggaagaccaacaatgacattacctccattgctagcaacggtggaagagtacaatgcatgcaggtgtggccaccaattggcaagaagaagttcgagactctttcctacttgccagacctcgatgatgcccaattggcaaaggaagtcgaataccttctaaggaaaggatggattccttgcttggaattcgagttggagcacggtttcgtgtaccgtgagtacaacaggtcacctggatactatgatggacgctactggaccatgtggaagctgcctatgattggctgcactgatgct

SEQ ID NO: 257355 - DNA, 371 bp, Glycine max
aataatgaataaaaaaatcaaataataattaatggggagaaaaaagtgtaaatcaaatagaaatttataaaatctatgatcctagagtagttccctagacaaaatagaagtaagttcacaaacaagattcaagagtaagattctctgatgaaaggcgagaaatatgtctgaggatccgctgggtataaggagtgaaagaggggatcatttgattcttgaacagttcttttaaaaaaattttctatcggatttttgagtcataggagattttatgatttatgacttggaggatttttaagaatagaaaggaataactacattgagttcatcgatttgccctagatatcaatagactcataaattatttttta

SEQ ID NO: 257356 - DNA, 408 bp, Glycine max
gctgttagcagaaaaacaagtagttgagaactgagaggaaggaaatggcttcctcagtgatctcctccccagctgttaccaccgtcaaccgtgccggtgccggcatggttgctccattcaccggcctcaaatccatggctggcttccccacgaggaagaccaacaatgacattacctccattgctagcaacggtggaagagtacaatgcatgcaggtgtggccaccaattggcaagaagaagttcgagactctttcctacttgccagacctcgatgatgcccaattggcaaaggaagtcgaataccttctaaggaaaagatggattccttgcttggaattcgagttggagcacggtttcgtgtaccgtgaatacaacaagtcacctggatactatgatggacgctact

SEQ ID NO: 257357 - DNA, 301 bp, Glycine max
gacatctctcatagtagagtaaccaaaaggagagttgaataactcgttgtacattcctagtgtgtgtgagagacatggctaagatgtgtgttttggtgttggttcttgctctgtctgtggccacaagtgccataaacgttcccaaccccaaggatgctggtcttaatgaccagaagaacttcatcagctattgtggagttggtggttatttcgggattgggaacaatggactgccttttggaggagctggtgcctgaatatgtggtgactttggcgaacgtagtgtacttgatggtacact

SEQ ID NO: 257358 - DNA, 376 bp, Glycine max
gatctggcagcagaagaacaagtagttgagaactaggaaggagaagcaaatggcttcctcaatgatctcttccccagctgttaccactgtcaaccgtgccggtgccggcatggttgctccattcactggcctcaagtccatggctggcttccccaccaggaagaccaacaatgacattacctccattgctagcaacggtggaagagtgcaatgcatgcaggtgtggccaccagttggcaagaagaagtttgagactctttcctacctgccagaccttgatgatgcacaattggcaaaggaagtagaataccttcttaggaagggatggattccttgcttggaattcgagttggagcacggtttcgtgtaccgtgag

SEQ ID NO: 257359 - DNA, 479 bp, Glycine max
gatctggcagcagaagaacaagtagttgagaactaagagggagaagcaaatggcttcctcaatgatctcttccccagctgttaccactgtcaaccgtgccggtgccggcatggttgctccattcactggcctcaagtccatggctggcttccccaccagaaagaccaacaatgacattacctccattgctagcaacggtggaagagtgcaatgcatgcaggtgtggccaccagttggcaagaagaagtttgagactctttcctacctgccagaccttgatgatgcacaattggcaaaggaagtagaataccttcttaggaagggatggattccttgcttggaattcgagttggagcacggtttcgtgtaccgtgagcacaacaggtcaccaggatactacgatggacgctactggaccatgtggaagctgcctatgtttggttgcactgatgcttctcaggtgttgaaggagcttcaag

SEQ ID NO: 257360 - DNA, 364 bp, Glycine max
  unsure (1)..(364): unsure at all n locations
gatctggcagcagaagaacaagtagttgagaactaagaaggagaagcaaatggcttcctcaatgatctcttccccagctgttaccactgtcaaccgtgccggtgccggcatggttgctccattcactggcctcaagtccatggctggcttccccaccagaaagaccaacaatgacattacctccattgctagcaacggtggaagagtgcaatgcatgcaggtgtggccaccagttggcaagaagaagtttgagactctntcctacctgccagaccttgatgatgcacaattagcaaaggaagtagaataccttcttaggaagggatggattccttgcttggaattcgagttggagcacggtttc

SEQ ID NO: 257361 - DNA, 295 bp, Glycine max
gaccttaagtgccgcaaccacgtctttttagatcttcaagggggtatcaccttagccgatgtcagatatgagcactagctagtttcacaatttccaaatggctaggggattgaagaagcatcttaagaggctcaatgctcctaagcattggatgcttgacaaactgggtggtgcatttgcgcccaaaccctcatctggaccacacaaatctagggagtgccttcccctcatactcatgctacgaaaccggctaaagtatgctctgacttaccgtgaagtcatcagtattctgatg

SEQ ID NO: 257362 - DNA, 369 bp, Glycine max
cccgtccggaattcccggtcgacccacctacgggcgagagacccacagggggccacggatgaatctacccactgagagccgtggacgacgcatagcgatcaggcgtgagcgacctcatacagcacacgactatgaattccaatattatacatcaggtgtattcagagggaaatgcggtacagaattaaatcatgctctcctgcttgtggggtatggtacagaaaaagatggacattattggatagcaaagaattcatatagtgataaatggggagagaatggctatatcagaatacaaagaatactgagcactctgtaatttggaaacgggagttactatcccattataaaagtcaccgatcaacaagc

SEQ ID NO: 257363 - DNA, 403 bp, Glycine max
  unsure (1)..(403): unsure at all n locations
gatctggcagcagaagaacaagtagttgagaactaagagggagaagcaaatggcttcctcaatgatctcttccccagctgttaccactgtcaaccgtgccggtgccggcatggttgctccattcactggcctcaagtccatggctggcttccccaccagaaagaccaacaatgacattacctccattgctagcaacggtggaagagtgcaatgcatgcaggtgtggccaccagttggcaagaagaagtttgagactctntcctacctgccagaccttgatgatgcacaattggcaaaggaagtagaataccttcttaggaagggatggattccttgcttggaattcgagttggagcacgggttcgtgtaccgtgagcacaacaggtcaccaggatactacgat

SEQ ID NO: 257364 - DNA, 323 bp, Glycine max
  unsure (1)..(323): unsure at all n locations
ggaaccaaaaaaatattaaggtttttgaatgcggtggggcgatcctaacaactctttctgcaactttcgccgacagcttcattcaccatggcttgaacaaccgaaaaagcttttttgaaacaaccaaaaggtgttctcagctcgaagaaaactgggaaaggaaagaaacccggaaagggtgggaacccgtttttgaaatccaattgngcttggatntaagaactccagggaaagccatcgaaagaacctacattgacaagaagtgccccttcactggcaatgtttncatccgtggccgtatcttggctggaacatgtcacagt

SEQ ID NO: 257365 - DNA, 354 bp, Glycine max
  unsure (1)..(354): unsure at all n locations
ggttctctggaggaggagtgaagcagcagagggaggagcggcattaaaaatgcagatcttcgtgaaaaccctaacggggaagaccataaccctcgaggtcgaaagcagcgacaccattgacaatgtcaaggctaagattcaagacaaggaaggcatccctccggatcagcagcgtttgattttcgccggaaagcaacttgaagatggaaggaccttggccgattacaacatccagaaggaatcaacccttcaccttgtcctcaggcttcgtggtggcatcatcgagccttncctcatggctttggctcgcaaatacaaccaaggacaagatgatttgccgcaaatgctatgctc

SEQ ID NO: 257366 - DNA, 386 bp, Glycine max
  unsure (1)..(386): unsure at all n locations
gacccagttgcagaaagaaaagaccatcaaaggttgacttcagccttatccggtttagggtttcggtttttgacccaacctttgacgtatcgaaaccttaagtttcggatcaggtctgagcaatctggttggtagaacctttggtcttaaagagtcaagttttatgtctgaattagacgatcaaattcctactgccttcgatccttttgctgatgcaaatgctgatgactcgggtgctgggtcaaaagagtatgtgcatattcgcgtacagcagcgaaatggaaggaaaagcctgacaaccgttcagggattgaaaaaagaattcagctataacaagatacttnaagatgttaagaaagagtttctgtgcaatggaacagttgttc

SEQ ID NO: 257367 - DNA, 375 bp, Glycine max
ggtaccgatcagtgaagagaccatatctatctattgagaaacatgaagaaggtttcacccttggcattttccattctctttttggccttcaccatagaaccctttattggcattgctgcagcagcaccagaagcagtgcttgacacctcaggccagaagctgagaacaggtgtcaagtactacattctgccagtgttcagaggcaaaggtggaggcctaacagtttcaagcagtggcaacaacacatgccccctctttgtggtgcaagagaagcttgaagtctcaaagggcaccccagttaccttcacaccctacaatgccaaaagtggtgtcatactaacctcaaccgatctcaacatcaagtcttatgggaaa

SEQ ID NO: 257368 - DNA, 436 bp, Glycine max
agacgacagatgggggttctagtgtgtgattgtttgttgttgtaactcgttcttcttcttttggggggctgtgtttgtgtttgttgtttctctcacctgaaaatgtcttgctgcggtggtaactgtggttgcggaagctcctgcaagtgcggcaacggctgcggaggctgcaagatgtacccagacttgagctacactgagtcaaccaccaccgagaccttggtcatgggagtggcacctgttaaggctcaatttgagggtgctgaaatgggtgtacccgctgagaacgatggctgcaaatgtggaccaaactgctcctgcaacccctgcacttgcaagtgaggtgttgggagagcaagcttcaagcagagatagcccttaattaggaataatgattaactattaatgtgtagctaaaaacttatgtattatgtct

SEQ ID NO: 257369 - DNA, 339 bp, Glycine max
  unsure (1)..(339): unsure at all n locations
agacgacagaaggggatcaaattgatgaactagtgtgacattagagaagaaccaatttaagagaagagcagcggagctaaagaggggagaggagagaggagaagagaagctaaagaaagaaaggagatgggagtggagaagcagttgttgaggtctggcaccggtccgaagccaattcccggtcagaacgtaaccgttcactgcactggtttcgggaagatcggtgacctttctcagaaattctggagcacaaaggatcctggccagaaccccattcactttcaaaatcggccaaggttctgatatcaaaggatgggatgaangtgtgcttggcatgca

SEQ ID NO: 257370 - DNA, 407 bp, Glycine max
ggaacggagaagcactggcgcatctaccctgaggcgtgctcttctctgctcttctctgtcgtgagtcaccatggtgaggggctgcgtgctgaactatgctctgaagagcatgtacaatgctgagaaacgggtaaagcgccacgtcatgatcaggccattctccaaagtcattatcaaattccttttggcgatgcaaaagcacggatacatcggagagttcgagtatgtagatgaccacagggctggtacaatcgtggatcaattgaacggtaaactgagcaagcgtggtgttattaccccgcgctttgatgtgggcgtcaaagagatcgaacgttggactgctatgcttcttccctcaagacagtttgggtctattgaattgactacctctgctggcatcatggatc

SEQ ID NO: 257371 - DNA, 386 bp, Glycine max
gctggcagcagaagaacaagtagttgagaactaagaacgagaaggaaatggcttactgaatgatctgttgcccagctgataccactgtcaaccctgccggtgccagcatggctgctgcattcactggccttaaatccattgctggctttcccaccaataataccaacagtgacattacctccattgctagcaacggtggacgagtgcaatgcatgtacgtgtggccaccagctggcaagatgaagtttgagactctttcctacctgccagaccttgatgatgcacaattggcaaaggaagtagaataccttcttatgaagggatggattccttgcttggaattcgagttggagcacggtttcgtgtaccgtgagcacaacaggtca

SEQ ID NO: 257372 - DNA, 452 bp, Glycine max
gatatctggcagcagaagaacaagtagttgagaactgggaaggagaagcaaatggcttcctcaatgatctcttccccagctgttaccactgtcaaccgtgccggtgccggcatggttgctccattcactggcctcaagtccatggctggcttccccaccagaaagaccaacaatgacattacctccattgctagcaacggtggaagagtgcaatgcatgcaggtgtggccaccagttggcaagaagaagtttgagactctttcctacctgccagaccttgatgatgcacaattggcaaaggaagtagaataccttcttaggaagggatggattccttgcttggaattcgagttggagcacggtttcgtgtaccgtgagcacaacaggtcaccaggatactacgatggacgctactggaccatgtggaagctgcctatgtttggttgcactga

SEQ ID NO: 257373 - DNA, 425 bp, Glycine max
gaagaagaactagtctaagcagaaatggcctcttcagtgatggcatctgtggccctcaaacctgcccctttcactgttgagaagtcctcagttagaggccttccctccctctcaaggaactcctcttcattcagagttgtggccagtggtggcaagaagatcaagactgacaagccttatggaattaatggtggcatggctttgagggaaggagttgatgcatctggcaggaaaggaaagggaaagggcgtttactagtttgtagacaaatacggtgctaatgtcgatggttacagtcctatctacgacaccaaggactggtctccaaccggtgatgtctacgctggcggtacgactggcttggctatctgggctgtgactctacttggtcttcttgctggtggtgcacttcttgtctacaacac

SEQ ID NO: 257374 - DNA, 464 bp, Glycine max
gaaggtgcaagagtttgttgtgagctataagctagtgtatcgtgaggagaatatgaagttgtttgttttctttgttgctgcagtagttttggtagcatggccatgccatggcgcaggctaccaaaggttccctctccgaatgaaaactggctatggtgagcgttcttcggaggtaaaatgcgcaagttttaggcttgctgtggaagcacacaacatccgagcctttaaaaccattcctgaagagtgcgttgaaccaacaaaggactacattaatggcgaacaatttagatcagactctaaaacagttaaccaacaagctttcttttatgctagtgaacgcgaagtccatcacaacgacatatttatattcggcatagataacaccgtactctctaatatcccatactatgaaaaacatggatatggcgtggaggaatttaatgaaaccttatatgatgaatggg

SEQ ID NO: 257375 - DNA, 259 bp, Glycine max
gatgagtcgatttgataactaagatattgttattcgggatattgatccaatttgatatcatcgaaatccaatttataccattgttgaattaattatcgatgaaagatttatcatctctatgggattaaatcccaaattttttattggaaatttaagagaaataaaacataataaagattatggaagtaaatattcttgcatttattgctactgcactgtttattctagttcctactgcttttttacttataatttacgc

SEQ ID NO: 257376 - DNA, 365 bp, Glycine max
  unsure (1)..(365): unsure at all n locations
gaaggtgcaagagtttgttgtgagctataagctaggggatcgtgaggagaatatgaaggtgcttgatttctttggtgctgcagtagttttggtagcatgggcatgccatggcgcaagcttccaaagggttccttttcgaatgaaaactggctattgggaaccgtcttcggagggtaaatgcgccaggtttaagcttggctgggaaacacacaacattcgagcctttaaaaccatttcttgagagtgcgttgaccaaccaaagactacatttatgggcgacaatntagatcagactctaaaacagttaccaacaagctttcttttatgctagtgaacgcgaagttcattacaacgacatatttata

SEQ ID NO: 257377 - DNA, 423 bp, Glycine max
aacatgacagaaagggacccagagagccaatgtaccccaagccctatacaaccataccctagcgcacacccattagattcagatgccatggctagcctcaaggtcgcatttttggctgcagtgctctgcatggctgtggtgagtgcacccatggcacatgcatctatcacgtgcgggcatgtgacgagtagcctggccaattgcatcggctacctccagaatggatgaacgccgtcatcgggatgctgcaacggagtgaagagcctcaatgccggcggcaagaccaccggcgtccgtcagacggcgtgcaactgcctcaagtcggtcgacagccaaatctccggcttcaacgccaacaacgccagctcgctccccggcacatgcggagtctacatcccctactagatcagcacctacaccaac

SEQ ID NO: 257378 - DNA, 260 bp, Glycine max
ggttctagtgtgtgattgattgttgggggaactcgttcttcttcttttgttgttctgtgtttgtgactgcattttctctcacctgacaatgtctcgctgccctggcaactgtggatgcagaagctcctgcacgtgctgcaactgctgcagaggctgcgagatgtacccagacttgagctacactgacttaaccaccacctagacctcggtcatgggagaggcacctgttcaagctcaataacagggagctgaaatgagtg

SEQ ID NO: 257379 - DNA, 445 bp, Glycine max
gggcagcagagagacaagtagttgagaactaagaagaaggaaatggcttcctcaatgatctcctccccagctgttaccaccgtcaaccgtgccggtgccggcatggttgctccattcaccggcctcaaatccatggctggcttccccacgaggaagaccaacaatgacattacctccattgctagcaacggtggaagagtacaatgcatgcaggtgtggccaccaattggcaagaagaagttcgagactctttcctacttgccagacctcgatgatgcccaattggcaaaggaagtcgaataccttctaaggaaaggatggattccttgcttggaattcgagttggagcacggtttcgtgtaccgtgagcacaacaggtcacctggatactatgatggacgctactggaccatgtggaagctgcctatgtttggctgcactgatg

SEQ ID NO: 257380 - DNA, 305 bp, Glycine max
cgggcagcagaagatcaagtgcttgagaactaggagggagaagcaacatggctatgctaatcgaactcttacacccgagctgttcaccaactgtcacaccgtgctcgaggcaccgcatggctgcatccatacactggcctcaagtccatggctggcttgcccaccaggaagaccaacactgacattacctccattgctagcaacggtggaagagtgcaatgcatgcaggtgcggccaccagctggcagcatgaagtttgagactctatcctacctgccagaccttgatgacgcacaattggctaa

SEQ ID NO: 257381 - DNA, 428 bp, Glycine max
  unsure (1)..(428): unsure at all n locations
gacagctattcctcttaagcttgctactgagtttccacagtgcataccttaggtcttccgaattcgaagttaatttgcaagatggctaaggaaaaggctcagatcaacattgtggtggttggtcgtgtggaccctgaggaggcaaccaccattaacgagctgaagaagcctgttgtggagaaagaagctccagggcatgccatatgagggcatgcacgtacggcctcggaggggaaccagaaaattatgttaacaaaataatctggaaccctaatgtatcagtgtcatcatcagtgtgtagtttaagctagctttgctatggttacgttctttgagatgagagtcttgatgaaccgtaccattctgatgtattgctttccttgaaagttaatgcatgcttcttatctacaaaaaaaaaaagtntacat

SEQ ID NO: 257382 - DNA, 475 bp, Glycine max
gaactgctcggtttttatcagaagcttgtgatttagttttggatgcagcaagtgagggaaaacaattcttaattgttggtacaaaaaaaagcagcggatttagtagcacgggctgcaataagagctcggtgtcattatgttaataaaaagtggctcggcggtatgttaacgaattggtatactacagaaacacgacttcaaaagttcagggacttgagaatgcaacaaaagacggggagactcaatagttttccaaaaagagatgccgctatattgaagagacatttagctcatttggaaacatatcttggcggcattaaatatatgacggggttacctgatattgtaataatcgtcgatcaacaagaagaatatacggctcttcgagaatgtataactttggaaattccaacaatttgtttaatcgatacaaattgtgacccggacctcgccgatatttcaattccagctaatg

SEQ ID NO: 257383 - DNA, 414 bp, Glycine max
gatctccaacaagtgtttctgtaaccatggcatccaccggtggatcccctacaaccccttctcagctatgctcaggaaagagtgggattttcagtccctcacaggcacttcttgtgaagccagtgaagaggcagatgatggggaagagcaagggaatgagaattgcatgccaagccaccagcattcctgctgatagagtccctgacatgggcaaaagacagctcatgaatctgcttcttcttggtgccatttcactcccctctgctggaatgcttattccctacacctacttttttgtccctccaggttcaggttcttcagctggtggtactggtgccaaggatgctgttggaaatgatgtaattgcggagaattgggctcaggcacatggacctggtgaccgaacccttgcac

SEQ ID NO: 257384 - DNA, 358 bp, Glycine max
  unsure (1)..(358): unsure at all n locations
tattggatcgtaaggaattcatggggttctagctggggagaggatggctacatcagattagaaagaaatcttgctaacagcagatcaggcaagtgtggaattgcaattgagccatcttatccccttaagaatggtccaaatccccctaatcctggaccatcacccccttcacctgtgaagccgccaaatgtctgtgacaactactacagctgtgctgatagtgctacttngtgcttgattttgaggttcgaaatgcttgcttcgagtggggttcatgacctcttgagggtgcttcctgctgtgatgaccactacagttgctgccctgcagactatcccatctgcaacacttacgctgg

SEQ ID NO: 257385 - DNA, 250 bp, Glycine max
agtggattatatcatagtgaaaaattgatggggatctaagtggggagagaaaggatacataagaatgaggaggaacattggaaaacccgagggaatctgcggtatctataagatggcttcttatcccactaagaagaaataagattcattcccattcttttgtctgaatatctttcagcttttccttggaaacaatgtaacgttttccatataataatagattgattgactcttttcattattcccttgc

SEQ ID NO: 257386 - DNA, 449 bp, Glycine max
gacagaaagagaaagcaatggcttctctggcaagctgagctgttgttcaaccatctactgtcaagggccttgctggaactaagctctctttcaagccctctcgccagagcttcagacccaagaatttcaggagtggtgccgttgtagcaaagtacggtgacaagagtgtgtactttgatttggaggatctaggcaacactactggtcagtgggacttgtacggctccgatgcaccttcaccctacaaccctcttcagagcaagttcttcgagacattcgccgctccattcacaaagaggggattgttactaaagtttttgatcctgggaggtggttccaccctggcatacttgagtgccacagcgtcaggtgacattctaccaatcaagaagggcccacaacttccaccaaagccaggtccccgtggcaagatctaatttgtttcccaa

SEQ ID NO: 257387 - DNA, 406 bp, Glycine max
  unsure (1)..(406): unsure at all n locations
gaaccaagtatgctagcgtgtctattcattttagcagcaatgttgaatctcagagaaaaacagacatcgacacgcatgtctggaaggggaaagggaggcaagggtctcagaaagggaggagccaaacgacaccgaaaggctctgagggataacattcagggaatcaccaagcccacgattcgccagttggccagacgtggtggcgtcaatcgtatcactaggcttatctatgaagaaactcgcggtgttcttaagatcgttctagagaacgtcattcacgacgctgtcacctacactgaacacgctcgtcgcaagactcgcactgccatggacgcttgttacgccctcaagacgcatgggaagacccatgacagattcngctgctagacaattggggatttcttgg

SEQ ID NO: 257388 - DNA, 419 bp, Glycine max
  unsure (1)..(419): unsure at all n locations
ggcacaagtgagtttgttgatcgagataactagaaacagtgtgatgaaaatgaaggtccttgttttcttcgttgctacaattttggtagcatggcaatgccatgcgtacgatatgttccctctccgaatgaacactggctatggtgcccgtactccggaggtgaaatgcgcaagttggacgcttgctgtggaagcacacaacatctttggctttgagaccatttctgaagagtgcgttgaagcatcaaatgaatacatccatggcgaacaatatagatcagactccaaaacagttaaccaacaagcttacttttatgccagagacctcgaagtccatcccaaggacacatttgtgttcagtatagatggcaccgtactctctaatattccatactacaaaacaaaacaaantgggnagg

SEQ ID NO: 257389 - DNA, 378 bp, Glycine max
gacacaccgtttgttctattcttaactcaacttctgggaggcactctcttcttccaagtccaaccacgcttttctctacagtcatgggcaaggtcaagatcggaatcaacggatttggaagaattggccgtttggttgccagagtcgctctgcaaagagacgatgtggagctcgttgccgttaacgaccctttcattaccaccgattacatgacatacatgtttaaatacgacagtgttcacggacactggaagcatcacgatgtcaccgttaaggacgagaagacccttctcttcggtgacaagccagtcactgattttggacacaggaaccctgaagagatcccatcggggtcaactggagccgatatcattggtg

SEQ ID NO: 257390 - DNA, 418 bp, Glycine max
gagcgaaacagagagtgatttcagtgagtgatcggtgttcacttgatctcatcataatcgtcagcgtcaattgaagaagatgccgatcagaaacatcgccgtcggaaggcctgaagaggcgactcaccccgacacgttgaaggcggctttggctgagttcatctcaaccttcatcttcgtgttcgccggctcaggctccggcatcgcctacaacaagctcaccgacaacggcgctgccacccctgccggcctcatctccgtctccatcgcccatgcattcgccctcttcgtcgccgtctccgtcggcgccaacatctccggcggccacgtcaaccccgccgtcaccttcggcgccttcgtcggcggcaacatcaccttcctccgcggcatcgtctacgtcatcgcccagctcctcggc

SEQ ID NO: 257391 - DNA, 388 bp, Glycine max
  unsure (1)..(388): unsure at all n locations
gatctggcagcagaagaacaagtagttgagaactaagaaggagaagcaaatggcttcctcaatgatctcttccccagctgttaccactgtcaaccgtgccggtgccggcatggttgctccattcactggcctcaagtccatggctggcttccccaccaggaagaccaacaatgacattacctccattgctagcaacggtggaagagtgcaatgcatgcaagtgtggccaccagttggcaagaagaagtttgagactctttcctacctgccagaccttgatgatgcacaattggcaaaagaagtagaataccttcttaggaagggatggattccttgcttggaanttcgagttgagcacggnttcgtgtaccgtgagcacaacaggtca

SEQ ID NO: 257392 - DNA, 475 bp, Glycine max
ggaactgcgtagcgacccatcagagaagatcgcgatcgtgggaaacatgtctggggaagaggaagaaaacgccgcagagctcaaaattggagacgagtttttgaaggcaaagtgcttaatgaactgtgaagttgcattgattcttgagcacaagtatgagcagcttcaacagacatccgatgatcccatgaatcaagtttctcaggtatttgaaaagtcactacagtatgtgaagcgcttcagccgctataaaaatcccgatgctgttagacaagttcgagaaattctcgccagatatgaattggctgagtttgagttgtgtgtccttggcaacctttgcccagaaactgtggaggaagctattgctatggttccatctatcaagtcaagaggacgggctcaggatgatgaagcagtcgagaaaatgctaaatgacctgtcgttgattaagaaatttgaataaatacgtcaaagt

SEQ ID NO: 257393 - DNA, 324 bp, Glycine max
ggaactgcgtagcgacccatcagagaagatcgcgatcttgtgaaacatgtctggggaagaggaagaaaacgccgcagagctcaaaattggagacgagtttttgaaggcaaagtgcttaatgaactgtgaagttgcattgattcttgagcacaagtatgagcagcttcaacagacatccgatgatcccatgaatcaagtttctcaggtatttgaaaagtcactacagtatgtgaagcgcttcagccgctataaaaatcccgatgctgttagacaagttcgagagattctcgccagatatgaattggctgagtttgagtcgtgtgt

SEQ ID NO: 257394 - DNA, 382 bp, Glycine max
ggctttagattcttttcccctagattcagccacagttggaaaaaaaaaaagttgttcgagatggcacgtacgaagcaaactgctcgtaagtccacaggaggaaaggcacctaggaagcagctcgcaaccaaggctgcacgtaagtctgcaccaactactggtggtgtgaagaagccacatcgttatcgtcctggtaccgttgctcttcgtgagattaggaaataccagaagagtaccgagcttttgatcaggaagctccccttccagaggctggttcgtgaaattgctcaggacttcaagactgatctgcgtttccagagccatgctgtgcttgcattgcaagaagctgctgaggcatacctttgtggactctttgaggata

SEQ ID NO: 257395 - DNA, 312 bp, Glycine max
ggcaacacaacctagtaagctcttttaaagttctggcccgaaccctttctttcgtcacaatcacaacttggtaaaggtactccgtgcaagaaagatgaagctcgagttcgcaaatgtgctacttctgtgccttgtccttagctcttctttcttggaaatctcaatggctggttctcctttctgtgactcaaagtgcgcgcagaggtgtgccaaagctggggttcaggacagatgcttgaggttttgcgggatctgctgcgagaagtgcaactgtgtcccatctgggacttacggaaaccaggaccaatgccc

SEQ ID NO: 257396 - DNA, 400 bp, Glycine max
  unsure (1)..(400): unsure at all n locations
gaaagagagagaagggtaaggtaaccctagagtggtgaatcgaatctgcaaagatgtaagctgtttctcgaagaagaggtggaggcattttcgaaagcctctacaaggtcgttatgcgtcgcaactctgtctacgttaccttcgtcatcgctggcgccttactaggagaacgggctgtagattatggagtccacaagctctgggaggctaataatgttgggaaacgatctgaagacattcctgtgctagggcaaaggcagtcagaatagtgaccagcttgctagccattatgaagtcttattattttcatgaaaatctgaagtgattcagagctggaagcagtttccatttctacaataaataccatatgctngtctctttcaggcttaactcttatgcg

SEQ ID NO: 257397 - DNA, 418 bp, Glycine max
gacggcactcgttttcgttctcgttctggtgtatagatctttgcgaaggaggtttacagcgctcaaccaaagatgcagaacgaggaaggacagatcactgagctttacattcctaggaagtgctccgccacaaacagattgattaccgctaaggaccatgcttcggttcagatcaacattgggcatgtggatgagaatggcgtctacaatggccatttctccacttttgccctctgcggattcatccgtgctcagggtgatgctgacagtgctctagaccgcttgtggcagaagaagaaagttgaagttaagcaacagtagacacccatgatagtttgttacttcgttatgtattaatttctactcttgctagagatatttgagtactatgattgtcgttttgagcacaaatactcat

SEQ ID NO: 257398 - DNA, 391 bp, Glycine max
gattccggttgaaacagaaaacctaatttctcaaatttgatttcgcaccaaattttcctcactaaaatgtctggtcgtggaaagggtggcaagggtttgggaaagggaggtgccaagaggcacaggaaggttctgcgcgatgacattcaaggaatcacgaaacctgcgattcgtaagttagcgagaagaggtggcgtgaaaaggatcagtggtttgatctacgaggaaaccagaggagttctgaagatattcttggagaacgtgattcgtgatgctgtgacctacactgagcacgctatgaggaagacagtgactgctatggacgtggtttatgctcttaagaggcaaggaaagaccctctacggttttggaggctgaacaattctttttt

SEQ ID NO: 257399 - DNA, 337 bp, Glycine max
gacaccaacaccaaaacaaacccactaagatggcttcctttgtatccttcctagtgctgcttcttgcagcccttatcctcatgcctcaagggcttgctacttactacaaaccaattaagaagccaccagtgtacaagcctccagtgtacaagccaccagtgtacaaaccaccggtttataagccaaaaccaccggtttacaagccgaaaccaccggtttacaagccaccatataagaagccaccatacaagaaaccaccttatggaaagtacccttcagtagaggacaacacccatgcctaaagcaagcaatgaggtctattatctacttaataaat

SEQ ID NO: 257400 - DNA, 376 bp, Glycine max
  unsure (1)..(376): unsure at all n locations
ggcacaagtgagtttgttgatcgagataactagaaacagtgtgatgaaaatgaaagtccttggtttcttcgttgctacaattttggtagcatggcaatgccatgcgtacgatatgttccctcttcgaatgaacactggctatggtgcccgtactccggaggtgaaatgcgcaagtggaggcttgctgtgggaacacacaacatctttggttttgagaccattcctgaagagtgcgttgaagcaaccaaagaatacatncatggcgaacattttagatcagactccaaaacagttaaccaacaagcttacttttatgccagagacctcgaagtccatcccaaggacacatttgtgttcagtatagatggcaccgtac

SEQ ID NO: 257401 - DNA, 384 bp, Glycine max
gacactaacaccaaaacaaacccactaagatggcttcctttatatccttcctagtgctgcttcttgcagcccttatcctcatgcctcaagggcttgctacttactacaaaccaattaagaagccaccagtgtacaagcctccagtgtacaagccaccagtgtacaaaccaccggtttataagccaaaaccaccggtttacaagccgaaaccaccggtttacaagccaccatataagaagccaccatacaagaaaccaccttatggaaagtaccctccagtagaggacaacacccatgcctaaagcaagcaatgaggtctattatctacttaataaataagaggaactgctttgtgttttctagcattgtgatttacaacttcgt

SEQ ID NO: 257402 - DNA, 271 bp, Glycine max
caagaaagaagccattgagggagaagagaagttttgtgcaaaatccttgggaacagtaattggttttgccatttcaaagctgggaaagaacattcaagtactttcaagttcctttgtcaataagcaagaccaatacactgtggaaggagtgcagaatcttggagacaaagcagtgatgtgtcataggctaaatttcagaactgcagtattttactgccatgaagtccgtgaaacaacagctttcatggttccattggtggctggtgatgga

SEQ ID NO: 257403 - DNA, 357 bp, Glycine max
gggggggctaccaactgcggcttgatcagtctttcttggaactttgttactctcacacatgtctcgctccgtgcctttggtttcaaccatttttgtcttgcttctgcttctggtggccactgagatgatggggccaacaatggtggcagaagcaagaacttgtgagtctcagagccaccgtttcaaggggccatgtttgagtgacaccaactgtggctctgtttgccgaaccgaacgtttcactggaggacactgccgtggcttccgtcgcagatgcttctgcaccaaacattgctaattataaaaaattaattaagagtgctttgatagaagatgatagatctatcatctttctac

SEQ ID NO: 257404 - DNA, 137 bp, Glycine max
gaagaaagctgctagcagagggaagttctacactgtgttgtttggattgatcgagtgtactttttcttttcgagattggcttggtgtgcagtggaaagagggtggaaaagaatggtaagggggagggcggcgccccg

SEQ ID NO: 257405 - DNA, 391 bp, Glycine max
  unsure (1)..(391): unsure at all n locations
ggtgcctggccatccggtttcccagatctgctccttcctcaccccacagaagtcagttgaagagcatgggtcgtggagttagcagtggtggtggtcaaagttccttgggttatctttttggcagtggagaggcccctgccgcaaaaccggcaacaaacaatgccccagcccaacctgaagtgcaggctgtaaataatgcgcctacttcaaaagcatctnctcctactaaaacaatagaccctaacaaggctgctggtataaacagtcattctactgatggccagaacaccggcaacttcatcacggaccgaccctcaaccaaggtccatgctgcccctggtggtggttcttctctgagttatctctttggtggacctggagaggggaagtg

SEQ ID NO: 257406 - DNA, 327 bp, Glycine max
  unsure (1)..(327): unsure at all n locations
cctagagcacacactatctcactgaatggctcttcatgatgcatctgtggcctcaaactgcccttcactggtgaaaaatctcatgagaggcccttcctctctctcaaggaactcttcttcattcagagttgtggccagtggcaagaagatcaagactgacanaccttatggaattaatggtggcatggctttgaaggatggaactgatgcatctggcaggaaaggaaaaggaaagggtgtttaccagtttgtagacaaatacggtgctaatgtcgatggttacagtcctatctacgacaccaaggactggtctccaaaccgtgatgt

SEQ ID NO: 257407 - DNA, 296 bp, Glycine max
agaaggagacgcaggctgaggtggaacaaaagatcgctgaggggaggaagaaagtggaggctgagctgcaggaggctctggctgccttggagaatcaaaaggaagaaaccatcaagtcccttgattcccagatcgcagcccttagccaggagattgttaataaggttcttcccactgcttaatatgtctgtgtaattttcatttcaatcccctcaccaaaggattcatagtttctacttttgaatgggtctattctgtaatcgcaatacttttcaatgtaaaatccgagattcaga

SEQ ID NO: 257408 - DNA, 375 bp, Glycine max
gacgatgagtcgatttgataactaagatattgggattcgtgatattgatccaatttgatatcatcgaaatccaatttataccattgttgaattaattatcgatgaaagatttatcatctctatgggattaaatcccgaattttttattggaaatttaagagaaataaaacataataaagattatggaagtaaatattcttgcatttattgctactgcactgtttattctagttcctactgcttttttacttataatttacgtaaaaacggtaagtcaaagtgactaatttcactgaaatctgacttcttcatttttatcaatgtaatcaatgattaaaaaaaatgaaaaaggttttcaatttttggtcttagtct

SEQ ID NO: 257409 - DNA, 349 bp, Glycine max
gacggctcagttgtgtattctcgttctgcacgaaggaaaaaccctagcttccgttcgatcaacaatgacaggagagacagtgaaccccaaagcttaccctttggccgatgcccaactctcaataaccatactagatcttgttcaacaagctgccaactacaagcagctcaaaaaaggtgctaatgaagccactaaaaccctgaacagaggtatctctgaatttggtggtatggctgctgatactgaaccccttgaaattcttctccatcttcctctactcgccgaggataagaatgtgccctacgtgtttgtcccttcaaaacaagcacttgggcgtgcatgtggggtc

SEQ ID NO: 257410 - DNA, 414 bp, Glycine max
gggagatagctgtgagtagtgagagggaggaagacgtagacataaagaaggagaagtgaagtgatgaatgccccagatcgttacgagcgtttcgttgtccctgaaggcaccaaaaaggtttcttatgagagggacacaaagatcatcaatgccgcgtccttcaccatcgagagagaggagcacactatcggcaacatcctccgcatgcagcttcacagagaccccaatgtgttgtttgccggatacaagcttcctcaccctcttcaatacgaaattatcgtcaggatacacaccactagtcagtcttcgccaatgcaagcatataaccagtctattaatgatctggacagggaacttgatcatttaaagagtgcctttgaggcagagatgttgaagttttctagggactattga

SEQ ID NO: 257411 - DNA, 413 bp, Glycine max
gaagcttcaataagtaagtatcaatggcttgcgaagaatcccagaacaagcccaccagcgagcagtccactaccgaactcatcacgagcgcgaagctggtggcggaggcggcgcagtcggctctgaagagcgacagcgacaaagtggacaaggccaaggtggctgacgctgccggcgatcttctcgacgcggcggggaagtatggaaaacttgatgacaaacaaggcatagggcaatatgttgacaaggctgctgattatctgcataattaccagggtgataataccactgctccttcacagcctgcagagtctaaaggtgaagaaagtggcggtgggttaagtggtcttgcaaacttggctggaggcttcttcaaaaagtagttacaaagcaactaaataagaccttaattg

SEQ ID NO: 257412 - DNA, 411 bp, Glycine max
gacaccaacaccaaaacaaacccactaagatgggttcctttggatccttcctaaggctggttcttgcaacccttatccttatgccttaaaggcttgctacttactaccaaacaattaaaaaaccaacaatgtaccaaccttcaatgtccaaccaaccatgtccaaacaaccggttaataagccaaaaccaccggtttacaagccgaaaccaccggtttacaagccaccatataagaagccaccatacaagaaaccaccttatggaaagtacccttcagtagaggacaacacccatgcctaaagcaagcaatgaggtctattatctacttaataaataagaggaactgctttgtgttttctagcattgtgatttacaacttcgtagcaatgcatattcttgactcttgcatg

SEQ ID NO: 257413 - DNA, 406 bp, Glycine max
gaccacaccgagtcgcagaaaaagaaaggagcgatcatagtttcacttcggccttatccagtttagggtttcggttctctaccctatctttcacgtatcgaaaccttaaatttacgatcaggtctgagcaatctggttggtagaacctttggtcttagtgagtcaagttttatgtctgaattagacgatcaaattcctactgccttcgatccttttgctgatgcaaatgctgatgactcgggtgctgggtcaaaggagtatgtgcatattcgtgtacagcagcgaaatggtaggaaaagcctgacaaccgttcagggattgaaaaaggaattcagctataacaagatacttaaagacgtcaagaaagagttctgttgcaatggaacagttgttcaggacccagaac

SEQ ID NO: 257414 - DNA, 411 bp, Glycine max
ggttctagtgtgtgattgtttgttgttgtaagtcgttcttcttcttttgttgttctgtgtttgtgtttgttttttctctcacctgaaaatgtcttgctgcggtggtaactgtggttgcggaagctcctgcaagtgcggcaacggctgcggaggctgcaagatgtacccagacttgagctacactgagtcaaccaccaccgagaccttggtcatgggagtggcacctgttaaggctcaatttgagggtgctgaaatgggtgtgcccgctgagaacgatggctgcaaatgtggaccaaactgctcctgcaacccctgcacttgcaagtgaggtgttgggagagcaagcttcaagcagagatagcccttaattaagaataatgataaactattaatgtgtagctaaaaacttat

SEQ ID NO: 257415 - DNA, 348 bp, Glycine max
gattatatttgagttcaagcaaatcaaagccatggccacctccaacttctctattgttctctccgtctccctagccttctttttggtgctacttaccaaggcacactcgaccgataccgtttctttcaccttcaacaagttcaacccagtccaaccaaacattatgctccaaaaagatgctagtatttcatcctctggggtgttacaactcaccaaagttggcagcaacggcgtgcccacctcgggatctctcggtcgtgccctttacgctgccccaatccagatttgggacagcgaaaccggcaaagtagccagctgggctacatcctttaaattcaacattttcgc

SEQ ID NO: 257416 - DNA, 339 bp, Glycine max
  unsure (1)..(339): unsure at all n locations
ggcatcaattcaaaatatatcatggattataagcatgggtttgtggaacacaacgaatacagtgtcttgccgctttcacaagtttggtgatgaccaaaagaatctggtcttccaaggtggtgccacgtcttcttccaggggcatagaactcacaaagttagacggtggaggaaaaccagtgggtggcagtgtggggagagtgttatactcttctncagtgcacctttgggaaagctctacagtggtcgcaagctttgaaaccgacttcaccttttgcatctcatcagactctactactgcaggtgatggccttgccttcttcattgcaccatttgacac

SEQ ID NO: 257417 - DNA, 379 bp, Glycine max
caacataggtcatcgaaaggatctcgaagacggagcaacgcacgaaagccgggatctttcagaaaatggattcctattcgaagggtgcataaccgcatggataagctcacactaacccgtcaatttgggatccaattcggttccttaggaggtatcgggaaggaattttggaatgtaataatatcgattcatacagatacagaagaaagggttctctattgattcaaacgctctacctacgagatagggatagagaaagaggaaaaaaccgaggatttcacatagtacttttggtcgaaaaatcgatctgatttttttcgtacttttcgctcaatgatgaaatgggtcagattctacaggaccaaaccttgtgggagtt

SEQ ID NO: 257418 - DNA, 402 bp, Glycine max
gattatatttgagttcaggcaaatcaaagccatggccacctccaacttctctattgttctctccgtctccctagccttctttttggtgctacttaccaaggcacactcgaccgataccgtttctttcaccttcagcaagttcaacccagtccaaccaaacattatgctccaaaaagatgctagtatttcatcctctggggtgttacaactcaccaaagttggcagcaacggcgtgcccacctcgggatctctcggtcgtgccctttacgctgccccaatccagatttgggacagcgaaaccggcaaggtagccagctgggctacatcctttaaattcaacattttcgcacccaacaaatcaaactcagctgacgggcttgccttcttcttggcacccgtcgg

SEQ ID NO: 257419 - DNA, 408 bp, Glycine max
  unsure (1)..(408): unsure at all n locations
gagcgccaatgttttttcagaggagtttcatgttgtaatcaaaagagtttatcttatagtaagaaatcgatgtcttactccattntaaggaacanaacaagagaacaatagcctgacaaagggtttagccataaaatcgaatccatcattgatttgagatattgataaggtgaatactcatttctcgtcaatgctaggcataatgcgggtatagggacctaaaaaagattatctnttcttcttatcttatgaactttaaggtgtatgaagtgtcatttcctatcttagattttaattttagtaggtagataaagagtccatttaacttaagttgatctaggccagaagcagacctacgtcaagataatccttctttgaaacactttggtagtgctcttagattgtaat

SEQ ID NO: 257420 - DNA, 414 bp, Glycine max
ggttctagtgtgtgattgtttgttgttgtaacggggtcttcttcttatgttgttctgtgtttgtgtttgttttttctctcacctgaaaatgtcttgctgcggtggtaactgtggttgcggaagctcctgccagtgcagcaacggctgcagaggctgcaagatgtacccagacttgagctacactgagtcaaccaccaccgataccttggtcatgggaatggcacctgttaaggctcaatttgagggtgctgaaatgggtgtgcccgctgagaacgatggctgcaaatgtggaccaaactgctcctgcaacccctgcacttgcaagtgaggtgttgggagagcaagcttcaagcagagatagcccttaattaggaataatgatcaactattaatgtgtagctaaaaacttatgta

SEQ ID NO: 257421 - DNA, 360 bp, Glycine max
  unsure (1)..(360): unsure at all n locations
aggggtgcacaagtgaatttggggatcgggataactagaaaccgtgttattaaaattaaagtccttggtttctttggtggtaccatttttggaacctgggaattcccttccttccaaattgttccttttccaattgaccttgctttgtgccctcctccgaggtgaaatcccaggttgaagctgctggtgagcaccacacatttttggctttgagaccattcctgaagagtgcgttgaagcaacanagggatacatncatggcgaacattatagatcagactccaaaacagttaaccaacaagcttacttttatgccagagacctcgaagtccatcccaaggacacatttgtgttcagtat

SEQ ID NO: 257422 - DNA, 360 bp, Glycine max
agaagaagaagaaggagcatggccatgagcatgggcatgacaacagcagcagcagtgacagtgattaaactgctgcatcacctatatatttaaaaggtttatgggaccatagtagcgagggctgtgccttaatttctctctctctctctctctctctctctctctctctctctctttttcctttttccctatcttgtgatctatttatgagtgagaaaaacaaaagtgagaaattgtgcgtgtatctggttgctaattcgagtgctattagtctgtggtttggttggtttgtaaccccgctacttgggttatgtttgattgtatattatcctagagaaataaaaattttaaattatcagt

SEQ ID NO: 257423 - DNA, 414 bp, Glycine max
gaaggtgcaagagtttgttgtgagctataagctaggttatcgtgaggagaatatgaagttgtttgttttctttgttgctgcagtagttttggtagcatggccatgccatggcgcaggctaccaaaggttccctctccgaatgaaaactggctatggtgagcgttcttcggaggtaaaatgcgcaagttttaggcttgctgtggaagcacacaacatccgagcctttaaaaccattcctgaagagtgcgttgaaccaacaaaggactacattaatggcgaacaatttagatcagactctaaaacagttaaccaacaagctttcttttatgctagtgaacgcgaagtccatcacaacgacatatttatattcggcatagataacaccgtactctctaatatcccatactatgaaaa

SEQ ID NO: 257424 - DNA, 240 bp, Glycine max
  unsure (1)..(240): unsure at all n locations
gacccccaaaccctgctgcataggaagaaagcctagcctctcaccctccctgcgacacgatgcagatcttcgtgaaaaccctaacgggtaagacgatcacccttgaggtggagtcttctgacaccatcgacaacgtgaaggccaagatccatgacaaggaaggcatccctccggaccagcagcgcctcatcttcgtcggatagcagctggaggacagncgcaccctcgccgactacaaca

SEQ ID NO: 257425 - DNA, 377 bp, Glycine max
gatagcgtttttcattgtgcattattcaatggccggcacagcagctctatccggaaccatggtgagcacctccttcatgaggaagcaacctatgacgaccaagagcctaaagacattccccaacgctctttttggtctgaaaggtggacgaggtggtcgtgtaacttgcatggcctcgtacaaggtgaagctcataaccccagaaggagaagtggagtttgaatgcccagatgatgttgtcattgttgacaaggctgatgaagaaagcattgaacttccctactcgtgcagggctggttcttgcgtttcatgtgttgggaaaattgtgaaaggtgacgtggaccagtcagatggtagcttccttgatgatgaacaaa

SEQ ID NO: 257426 - DNA, 407 bp, Glycine max
ggcacaagtgagtttgttgatcgagataacgagaaacagtgtgatgaaaatgaaggtccttgttttcttcgttgctacaattttggtagcatggcaatgccatgcgtacgatatgttccctctccgaatgaacactggctacggtgcccgtactccggaagtgaaatgcgcaagttggaggcttgctgtggaagcacacaacatctttggctttgagaccattcctgaagagtgcgttgaagcaacaaaggaatacatccatggcgaacaatatagatcagaccccaaaacagttaaccaacatgcttacttttatgccagagacctcgaagtccatcccaaggacacatttgtgttcagtatagatggcaccgtactctctaatattccatactacaaaaaacatg

SEQ ID NO: 257427 - DNA, 381 bp, Glycine max
  unsure (1)..(381): unsure at all n locations
ggttctagtgtgtgattgtttgttgttgtaactcgttcttcttcttttgttgttctgtgtttgtgtttgttttttctctcacctgaaaatgtcttgctgcggtggtaactgtggttgcggaagctcctgcaagtgcggcaacggctgcggaggctgcaagatgtacccagacttgagctacactgagtcaaccaccaccgagaccttggtcatgggagtggcacctgttaaggctcatttggaggtgcctgaatgggttgtgcccgcttagaacgattgctgcaaatgtggaccaaactgctcctgcaacccctgcacttgcaagtgangtgttgggagagcaagcttcaagcagagatagcccttaattaggaataatga

SEQ ID NO: 257428 - DNA, 407 bp, Glycine max
agggctatagctcagttaggtagagcacctggtttacacgagcgccaatgtttttttcagaggagtttcatcttgtaatcaaaagagtttatcttatagtaagaaatcgatgtcttactccattttaaggaacaaaacaagagaacaatagcctgacaaagggtttagccataaaatcgaatccatcattgatttgagatattgataaggtgaatactcatttctcgtcaatgctaggcataatgcgggtatagggacctaaaaaagattatcttttcttcctatcttatgaactttaaggtgtatgaagtgtcatttcctatcttagattttaattttagtaggtagatgaagagtccatttaacttaagttgatctaggccagaagcagacctacgtcaagataa

SEQ ID NO: 257429 - DNA, 361 bp, Glycine max
ggagtgtcattgtgaagttggaaacaatgcgagcttcttcgctctccttcctccattcttgtacatccccctcttcctcttccttattgtcaatttcacctccaaaccccaaaccctctcacttcctacctttcgtggtcgaagccaaagacaggacccgcagggaagacaggaccgctcgccacactcgcatcagaaagaaggtcgaagggacgcccgagaggccgaggctgtccgtgttccggtcgaacaagcatctctctgtgcaggtgattgatgacaccgcaatgcgcacgcttgcttcggtgtcgacaatgcagaagacggttgctgatgagttcaactactccgctggccctac

SEQ ID NO: 257430 - DNA, 411 bp, Glycine max
ccatcacaacgacatatttatattcggcatagatgacaccgtactctctaatatcccatactatgaaaaacatggatatggggtggaggaatttaatgaaaccttatatgatgaatgggttaacaagggcgacgcaccggcattgccagagactcttaaaaattacaacaagctggttgtctctgggcttcaagattgtattcttgtcaggaagatatcttgacaaaatggccgtaacagaagcaaacctaaagaaagctggctatcacacatgggagcagttaattctcaaggatccacatcttatcacttcaaatgcactttcatacaaatcagcaatgaaagagaatctgttgaagcaaggatacagaatatgtggaatcattggagaccaatggagcgatctgcttg

SEQ ID NO: 257431 - DNA, 269 bp, Glycine max
ctgcagagacacagaggggaccaagtgaccaatatagcccaagccctgtgaaccaaaccctaacacacacccatttgattcagttccatggctagcctcaagttgcatttttggctgcagtgctctgcatggttgtggtgagtgcacccatggcacatgcagctatcacgtgcgggcaggtgacgagtagcctggccaattgcatcggttacctccagaagggaggaacgccgtcgtcgggatgctgcaacggagtgaagagcctcaat

SEQ ID NO: 257432 - DNA, 404 bp, Glycine max
ggctccgccatttttcgtagctgctggtcggtgcgcgtgaacaagcctcaggtaagccaaaaccatggttaagcataacaatgttatcccaaacggacacttccgtaagcactggcagaactatgcgaagacttggttcaatcagccagcacggaagacaaggagacgattggctcgtcagaagaaagctgtgaagatattccccagacctacggctggacctctcaggcccattgtacatggtcaaactttgaaatacaacatgaaagtgagaagtggaaggggattttctcttgaagaactcaaggcagcagggattcccaaaaagcttgcaccaaccataggtattgctgttgatcatcgtcgcaagaaccgttctttggaaagtctgcaagctaatgtgc

SEQ ID NO: 257433 - DNA, 405 bp, Glycine max
gcacaagtgagtttgttgatcgagataactggaaacagtgtgatgaaaatgaaggtccttgttttcttcgttgctacaattttggtagcatggcaatgccatgcgtacgatatgttccctctccgaatgaacactggctatggtacccgtactccggaggtgaaatgcgcaagttggaggcttgctgtggaagcacacaacatctttggctttgagaccattcctgaagagtgcgttgaagcaacaaaggaatacatccatggcgaacaatatagatcagactccaaaacagttaaccaacaagcttacttttatgccagagacctcgaagtccatcccaaggacacatttgtgttcagtatagatggcaccgtactctctaatattccatactacaaaaaacat

SEQ ID NO: 257434 - DNA, 382 bp, Glycine max
gatctggcagcagaagaacaagtagttgagaggctaagaagagaagcaaatggcttcctcaatgatctcttccccagctgttaccaccgtcaaccgtgccggtgccggcatggttgctccattcactggcctcaagtccatggctggcttccccaccagaaagaccaacaatgacattacctccattgctagcaacggtggaagagtgcaatgcatgcatgtgtggccaccagttggcaagaagaagtttgagactctttcctacctgccagaccttgatgatgcacaattggcaaaggaagtagaataccttcttaggaagggatggattccttgcttggaattcgagttggagcacggtttcgtgtaccgtgagcacaac

SEQ ID NO: 257435 - DNA, 401 bp, Glycine max
gagacgacagaagggggcacaagtgagtttgttgatcgagataactagaaacagtgtgatgaaaatgaaggtccttgttttcttcgttgctacaattttggtagcatggcaatgccatgcgtacgatatgttccctctccgaatgaacactggctatggtgcccgtactccggaggtgaaatgcgcaagttggaggcttgctgtggaagcacacaacatctttggctttgagaccattcctgaagagtgcgttgaagcaacaagggaatacatccatggcgaacaatatagatcagactccaaaacagttaaccaacaagcttacttttatgccagagaccccgaagtccatcccaaggacacatttgtgttcagtatagatggcaccgtactctctaata

SEQ ID NO: 257436 - DNA, 408 bp, Glycine max
accaagtgaaccaatatagcccaagccctatacaagcaaaccctaacacacacccatttgattcagtttccatgactagcctcaaggttgcatttttggctgcagtgctctgcatggttgtggtgagtgcacccatggcacatgcagctatcacgtgcgggcaggtgactagtagcctggccaattgcatcggttacctccagaaaggaagaacgccgtcatcgggatgctgcaacggagtgaagagcctcaatgccgacgccaagaccaccgtcgaccgtcagactgcgtgcaactgcctcaagtcggccgtcagccaaatctccggcttcaacgccaacaacgccgactcgctccccggcaaatgcggagtctccatcccctacaagatcagcaccttcaccaact

SEQ ID NO: 257437 - DNA, 406 bp, Glycine max
gagtgaagaagatggcgtcgagcggagcggtaccgttttggagggcggcggggatgacgtacataacatactcaaacatatgcgcgaatctgctcaggaattgcctcaaggaaccctacaaggccgaatccctctctcgtgagaagctccattttggtctctccaaatgggtcgacgccaagcctgaaaaacctactattcgttcagacaccccagagcagtgatctggaatagttggaagctataaatgcataaatctttgagatctggaagttcattggcattttgaacctttctgtgatgtttaattcctttggttttttctcttcatgaaatggaacatggactggaatttgatttgcacggctaatcttggaataattccaggttaaaccgatgaattaaa

SEQ ID NO: 257438 - DNA, 414 bp, Glycine max
gagcgccaatgtttttttcagaggagtttcatctggtaatcaaaagagtttatcttatagtaagaaatcgatgtcttactccattttaaggaacaaaacatgagaacaatagcctgacaaagggtttagccataaaatcgaatccctcattgatttgagatattgataaggtgaatactcatttctcgtcaatgctaggcataatgcgggtatagggacctaaaaaagattatcttttcttcctatcttatgaactttaaagtgtatgaagtgtcatttgctatcttagattttaattttaataggtagataaagagtccatttaacttaagttgatctaagccagaagcagacctacgtcaagataaatcttctttgaaacactttggtagtgctcttagattgtaatccaaa

SEQ ID NO: 257439 - DNA, 357 bp, Glycine max
gatagcagcatcatacaaagcattgaattcaaaaacttaagttcattccttgtgttttgctttcttcctcaaaaccaaacatgtcgaacacatgcggcaactgcgactgcgctgacaagactagctgcaccaagggaagcagctatggtgttattgtagagactgagaagagttacatcgagactgttgtcatggatgttccagcagctgagcatgatgggaaatgcaagtgttgcactaactgcacttgcacggactgcacctgtggccattaaggaatatgtatgaaaatgtaattgccatgtgtttggcaatacaaatatccaaataatgtaatcttcgtatgaataaatgtgt

SEQ ID NO: 257440 - DNA, 407 bp, Glycine max
  unsure (1)..(407): unsure at all n locations
ggcacaagtgagtttgttgatcgagataactggaaacagtgtgatgaaaatgaaagtccttgttttcttcgttgctacaattttggtagcatggcaatgccatgcgtacgatatgttccctctccgaatgaacactggctatggtgcccgtactccggaggtgaaatgcgcaagttggaagcttgctgtggaagcacacaacatctttggctttgagaccattcctgaagagtgcgttgaagcaacaaaagaatacatccatggcgaacaatatagatcagactccaaaacagttaaccaacaagcttacttttatgccagagaccttgaagtccatcccaaggacacatttgtgttcagtatagatggcaccgtactctgtaatattccatactacaaanaacatg

SEQ ID NO: 257441 - DNA, 415 bp, Glycine max
gttctagtgtgtgattgtttgttgttgtagcgtcgttcttcttcttttgttgttctgtgtttgtgtttgttttttctctcacctgaaaatgtcttgctgcggtggtaactgtggttacggaagctcctgcaagtgcggcaacggctgccgaggctgcaagatgtacccagacttgagctacactgagtcaaccaccaccgagaccttggtcatgggagtggcacctgttaaggctcaatttgagggtgctgaaatgggtgtgcccgctgagaacgatggctgcaaatgtggaccaaactgctcctgcagcccctgcacttgcaagtgaggtgttgggagagcaagcttcaagcagagatagcccttaattaggaataatgataaactattaatgtgtagctaaaaacttatgtat

SEQ ID NO: 257442 - DNA, 409 bp, Glycine max
gatcgcatttgatagcactcaccctcattagcgacacgaaagcatatccgaaaccttctttggaagtctctgattatcctaatggctcctgcaaaggcactgaagaagccggcggagaataagccagcggcagagaacgcacctgcggagaagaagccggaggctgcgaatacgatctcgaaggaaggatggagctagaagaagaagaagcacacgaagaagaacctggagacctacaagatctacatcttcaacgtcctcaagcaggttcaccgcgacattggcatttacagcaaggccatgggcatcatgaacagcttcatcaacgacatcttcgataagctcgctcaggaagcgtcgcgattggctcgctactacaagatgcccaccattacctctagggagatcc

SEQ ID NO: 257443 - DNA, 373 bp, Glycine max
  unsure (1)..(373): unsure at all n locations
ggagtattcagattacattgcaaaaatggcatcattcaccatgacagcttccatccttggcagcccagccgtcaccaaccggtcggcagtagcaacgcagaggagatcactcgtagtgaatgctgccaaagctgttgaagcagaaaaggtcagttatgacaatgacatggatggtagcaatggaaggaggaacttgatgttcgccgcggcggcggctgctgtttgctctgttgctgggatggcagtggcagatgagcctaaaccaggaaccccagaagccaagaaaaggtatgctccgatttgtgtcaccatgccaactgctaggatttgtcgcaattgagggactntggtttttattttacttctgatgatt

SEQ ID NO: 257444 - DNA, 342 bp, Glycine max
  unsure (1)..(342): unsure at all n locations
gaccaacacaaacaatagtgcatagcgtttttcattgtgtattattcaatggccaccacagcagctctatccggaaccatggtgagcacctccttcatgaggaagcaacctatgacgaccaagagcctaaagacattccccaacgctctttttggtctgaaaggtggacgaggtggtcgtgtaacttgcatggcctcgtacaaggtgaagctcataaccccagaaggaggagtggagtttgaatgcccagatgatgttttcattgttgacaaggctgangaagaaggcattgaacttccctactcgtgcagggctggttcttgcgtttcatgtgttgggaaa

SEQ ID NO: 257445 - DNA, 405 bp, Glycine max
  unsure (1)..(405): unsure at all n locations
gaaggtgcaagagtttgttgtgagctataagctagtttatcgtgaggagaatatgaagttgtttgttttctttgttgctgcagtagttttggtagcatggccatgccatggcgcaggctaccaaaggttccctctccgaatgaaaactggctatggtgagcgttcttcggaggtaaaatgcgcaagttttaggcttgctgtggaagcacacaacatccgagcctttaaaaccattcctgaagagtgcgttgaaccaacaaaggactacattaatggcgaacaatntagatcagactctaaaacagttaaccaacaagctttcttttatgctagtgaacgcgaagtccatcacaacgacatatntatattcggcatagataacaccgtactctctaatattccata

SEQ ID NO: 257446 - DNA, 318 bp, Glycine max
ggtgcacaagtgagtttgttgatcgagatagctagaaacagtgtgatgaaaatgaaggtccttggtttcttcgttgctacaattttggtagcatggcaatgccatgcgtacgatatgttccctctccgaatgaacactggctatggtgcccgtactccggaggtgaaatgcgcaagttggaggctcgctgtggaagcacacaacatctttggctttgagaccattcctgaagagtgcgttgaagcaacaaaggaatacattcatggcgaacaatatagatcagactccaaaacagttaaccaacaagcttacttttat

SEQ ID NO: 257447 - DNA, 407 bp, Glycine max
gatagcaagtagcaaggagactagttctgtattgagagtacattgcaaaaatggcatcattcaccatgacagcttctatctttggctgcccagctgtcaccaaacggtcggcagtggctgcgcagaggagattactcgtagtgagtactgccaaagctgaaggggaaaaggtcagttatgacaacaatgatagcaatggaaggaggaacttgatgttcgctgtggctgctgctgctgttttctctgttgctgggatggcagtggcagatgagcctaaaccaggaacctcagaagccaagaaaaagtatgccccggtttgtgtcaccaatcctacagctaggatttgtcgcaattgaggatctcctgtttcattttacctctgatgatcggaaatgtacgttggggat

SEQ ID NO: 257448 - DNA, 412 bp, Glycine max
cggttatggtccaacaccaagactaaccctctatgaggggttcctttgaatcctagctatgactactcattacagcccttatcctcattcctcaaggtcttgctacttactacaaaccaattaagaagccaccagtacatcaccctactacttacaaacctccactgtacaaactacctgtttataagccagatccacctgtttacaagcccaaaccaccggtttacaatccaccatataagattccaccatactagaaaccaccttattgatagtaccctccagtagagctcaacacccaagcctaaagcatgcactgatgtctattatctacttaacaattatgattaactgctttgagttattctagcattgcgatttacatcttcatatcaatgcttatacttgactc

SEQ ID NO: 257449 - DNA, 409 bp, Glycine max
  unsure (1)..(409): unsure at all n locations
cgcccatgctttcgccctctgcgtcgccgtctccgtcggcgccaacatctccggcggccacgtcaatcccgccgtcaccttcggcgccttcgtgggcggcaacatcaccttactccgcggcatcgtctacgtcatcgcccagctcctcggctccatcgtggcctccctcctcctcgccttcgtcactgcctcccctgttccagcattcgggctttccgctggagtcggagttggcaacgctttggtgttggagatcgtgatgaccttcggtttggtgtacacagtctacgccactgccgttgaccccaagaagggcaatttgggaattattgctcccatcgccattggtttcattggtggcgctaacattttgntgggtggggccttctccggagcagccatgaaccct

SEQ ID NO: 257450 - DNA, 410 bp, Glycine max
gaaattaaaaatgctatcaaggaggaatcagagggcaagttgaagggaattcttggttacactgaagatgatgtggtctccaccgactttgtgggcgatagcagatcaagtatttttgatgcaaaggctggaattgcattgaataagaactttgtgaagcttgtctcttggtatgacaacgagtggggatacagctcacgtgtcattgacctgcttgtattcgttgccaagaagtctttttaaggttgtactgaaaaaaaagtagcttgtctagacattatgtgctggtgtctagctgcgatttagtgtcttcttgctcgggcagaaatgagaagtatgaataaatcggtttcgggaaccggtgttgttaccctgttaggagcattaagcttttttttgttgtctcttct

SEQ ID NO: 257451 - DNA, 319 bp, Glycine max
gacggcaacagaagaataatcgagacgcagggcatagtgatcattttttaatttctcagatttatccgacgtcgctgcagatccaccaaccgttatggctgccttcagcggtgatgaaacggcaccgtttttcggcttccttggcgccgcagctgccctcgtcttctcctgtatgggagctgcctatggcacagcgaagagtggcgtgggcgtggcttccatgggtgtaatgagacctgagctggtgatgaagtcgattgttcctgttgtcatggctggagttttgggcatttatggccttattattgctgttattatc

SEQ ID NO: 257452 - DNA, 411 bp, Glycine max
gaccaacaccaaaacaaacccactaagatggcttcctttgtatccttcctagtgctgcttcttgcagcccttatcctcatgcctcaagggcttgctacttactacaaaccaattaagaagccaccagtgtacaagcctccagtgtacaagccaccagtgtacaaaccaccggtttataagccaaaaccaccggtttacaagccgaaaccaccggtttacaagccaccatataagaagccaccatacaagaaaccaccttatggaaagtaccctccagtagaggacaacacccatgcctaaagcaagcaatgaggtctattatctacttaataaataagaggaactgctttgtgttttctagcattgtgatttacaacttcgtagcaatgcatattcttgactcttgcatgc

SEQ ID NO: 257453 - DNA, 397 bp, Glycine max
ggcacaagtgagtttgttgatcgagataactagaaacagtgtgatgaaaatgaaagtccttgttttcttcgttgctacaattttggtagcatggcaatgccatgcgtacgatatgttccctctccgaatgaacactggctatggtgcccgtactccggaggtgaaatgcgcaagttggaggcttgctgtggaagcacacaacatctttggctttgagaccattcctgaagagtgcgttgaagcaacaaaggaatacatccatggcgaacaatatagatcagactccaaaacaggtaaccaacaagcttacttttatgccagagacctcgaagtccatcccaaggacacatttgtgttcagtatagatggcaccgtactctctaatattccatactac

SEQ ID NO: 257454 - DNA, 378 bp, Glycine max
  unsure (1)..(378): unsure at all n locations
ggcatgcatatgaaataaactgcaaccgtgacgaaagttgcgtagcaatagcatactcttactctgattcgttagtgaagaaaaatggcaacaatcatcgccggcaccccaactacatcaatcactcgcacaggtcatgtgctcaaacgacctgttggggcctcatcctctaccgttcttggattgccagcaatggccaaggcggngagagtgaggtgctccatggaggaaaagccttcaagcagctcaaacctagggatgggggcatccttgttagcagctgcagctgccgcaaccatgtcaagcccagcagccatggctttggttgatgagagactcagcactgaaggaactgggcttccctttgggcttagcaac

SEQ ID NO: 257455 - DNA, 380 bp, Glycine max
ggcgcacccagagaggaggaagctttgagagagagagagggaggagggagagtgttgacgctccatcaagatgggtatttctagggattccatgcacaagaggcgtgccactggtggcaagaagaaggcatggagaaagaagggaaagtatgagcttgggcgtcaggccgcaaacaccaagttatcaagcaacaaaactatccggaggatccgtgttcgaggtggcaatgttaaatggagggcattgaggttggataccggcaattactcatggggtagtgaagcagttactcgcaagactcgtattctagatgttgtttacaatgcctcaaacaatgagcttgtgcgaactcagaccctggtcaggaatgctattggtc

SEQ ID NO: 257456 - DNA, 353 bp, Glycine max
ggtatatcatttacaatttgaatctctctctctctctgtctctctctctctagacttagattttgtgaatggctgaagtggaagagggacaggtcatcggcgtccacaccgttgatgagtggaagctgcaactccagaatgcacaagactccaaaaaactgattgtggtggatcttactgcttcctggtgtggtccatgccgttttatggccccagttcttgcagaggttgcaaagaaaactcctgaattgatcttcctcaaagtggatgtggatgaagtgaggcctgttgctgaggaatattccattgaagccatgccaaccttcctcttcttgaaagatggcgagatcgtg

SEQ ID NO: 257457 - DNA, 390 bp, Glycine max
actcgaattgttccacgccacatccaattggcggtgaggaacgacgaagagttgagcaagcttctaggagatgttaccattgctaacggcggtgttatgcctaacattcacaaccttcttcttcccaagaaggctgggggctcatccaagggtgctgctgctgacgatgactcttaaatagggattcactgttcacaaagttcttgaatttagattctatgtttgctctctttttttcctttttatttgtagttatgataattgtgccctttgtagtagtagttaggttttcagtcagatgtgtttaaagaatgctcttacgcatcaagaaaggttgttcaaaatttaaattattttaatgtcacctttgagtcttgatctagcatttga

SEQ ID NO: 257458 - DNA, 402 bp, Glycine max
ggattccctcattcttcatccatagacatgggcaccgtcacttctgcagccgttgctattccctcattcactggcctcaaggcaagcgcaggcaaagtgagtgccgcagttaaagtctcagctccccaagccacaaggttgggcatcaaggcttcgctgaaagacgttggagtcgctgttgtggccactgccgcgagtgcagtgctggctagcaacgccatggccattgaagtgttgctgggtggtgatgacgggtctctggctttcgttcccaacaatttctccgtggcctctggggagaagatcgtgttcaagaacaacgcaggtttcccccacaacgttgtgttcgacgaggacgagattcctagcggcgtggatgcagggaaaatctccatgagcgat

SEQ ID NO: 257459 - DNA, 374 bp, Glycine max
tttattaaaccaaagcaaaaggccatataatgtttttttatttgaaataatgtccgggatcatccacaagattgaggagaccctccatgtgggagggcacaagaaagaggagcacaaatgagaacaccatggtgagcacaaaggtgtacacaaaggagaacaccatggtgggcacaaaggtgaacacaaaggagaacaacaccatggggagcacaaggagggacttgtggataagatcaaggacaagatccatggtgatggccatgacaagggtgagaaaaagaagaagaaggacaagaagaagaaggagcatggacatgaccatcatggtcatagcagcagcagtgacagtgattagatcttatatgttaagc

SEQ ID NO: 257460 - DNA, 246 bp, Glycine max
ggagaagcattatcaaaaagcaagaagaactagtctaagcagaaatggcctcttcagtgatggcatctgtggccctcaaacctgcccctttcactgttgagaagtcctcagttagaggccttccctccctctcaaggaactcctcttcattcaaagttgtggccagtggtggcaagaagatcaagactgacaagccttatggaattaatggtggcatggctttgagggaaagagttgatgcatctg

SEQ ID NO: 257461 - DNA, 442 bp, Glycine max
accggttgggagatccaggcttgagcacggcgtccgtacgctgacagaagcgtctagaagggatgaagggagggaagaatagaaggggatctggaagtggaaaacacactggagagttcttcaggagaagggatgcatggaggaagcatccgatgctcaccaatcagctccgccacgccacccctggccttggcatcgccgtcgtcgccttcggtatctacctcgtccgcgaacaagtctacaataggctctatgctcccgatcctcattcgatttctcacgtgaaagccggggatcaccactaaacgtttggacggacgcactccattccatcatcacttaataagcttgctagcatgttctcgcagcctttaatgtttaaatttcagaccgtgttcgcttctttggcactcactatgttgtcttgtatgcctacatttta

SEQ ID NO: 257462 - DNA, 336 bp, Glycine max
ggagtgtagaacgctgctgccgaaacccttgcggaaccctaaggtaagtgagtaatcagtggttgagaatggtggagaaggcgaagggtagaaaggaggaggtggttacccgtgagtacaccattaacctccacaagcgcctccatggctgcacatttaagaagaaagctcctaaagctattaaggagataaggaaatttgcccaaaaggccatggggaccaatgatgtgagggtggatgtgaagttgaacaagtttgtctggagccagggaatcaggagtgttccaaggaggattagagtaagaattgctcgcaagagaaatgatgatgaagatg

SEQ ID NO: 257463 - DNA, 425 bp, Glycine max
aagacgacagaagggggtatcatttcatttcgataatcatccatagctgctgaagaaaatggcaaccatctctgctgctatcacaaccccatcgatctcccgcgcaactcttgtgcaaaagcgggtctcatctcccgttcttggtttgccagcaatgggtaaggtgggaagagtgagttgctccatgcaggaaaaaccttattctgtgaaggaaagcagctctagcatgttggggatgggggcatctctgatggcagctgccagcgctgcagccatgtcaggcccagccatggccttggtagatgagagactgagcactgaaggaaccggacttccctttggcctcagcaacaatcttcttggttggatccttttcggcgtctttggtcttatctggactctctattttgtctacacttccactc

SEQ ID NO: 257464 - DNA, 398 bp, Glycine max
accggcccggaatacccaggcggacgcacgcgtgcgagagaagaccacagaaggggatctggctgcataaaaacaagtagttgcgagctaataagaacgaagtgggtgactcaatgatctccttcacagctgttaccaccgtctaccgtgcctgtgccggcatggttgctccattcaccggcctcaaatacatggctggcttccccacgtggaagaccaacaatgacattacctccattgcttgcaaccgtggatgagtacaatgcatgcatgtgtggccaccaattggcaagaagaagttcgagactctttcctacttgccagacctagatgatgcacaattggcaaacgaagtcgaataccttctaaggaaacgatggattgcttgcttggaattc

SEQ ID NO: 257465 - DNA, 401 bp, Glycine max
  unsure (1)..(401): unsure at all n locations
agatgggggcgtttcactcggatcgcgcattcacaaataagggtgaagaggtcactgccggaagaagagagcaacaccatctttcattttccggcgatctcttgtttcttccatcatcaccgttttccggcgatccctaatcctcgcaaacagaaatgacgacatcaaggcgccttgcggacaggaaggtggagaagtttgagaagaacatcacaaaaagaggatttgtgccagacactaccactaagaagggaaaagactaccctgttggcccagtgctgctcggtttcttcgtctttgttgtcattggatcatctctcttccagatagtcaggacagcaacgagtggaggcatggcttanatgggagcttgttttggaatttgggcatcttctctttct

SEQ ID NO: 257466 - DNA, 397 bp, Glycine max
ttgactattgctttccaattagctgtttttgcattaattgctatttcatttattttattgattagtgtacctgttgtatttgcttctcctgaaggttggtcgaataacaaaaatgttgtattttccggtacatcattatggattggattagtgtttctcgtgggtattcttaattctctcatttcttgaagctctatttattctagatcaaaaacgaaatgacccctcccccagaattctttcggattgtcgggcacattaaaaaaggaatggataagttcctaaaaataaagaaaactataacacattataaggaggggtcaaatattaattaagataaaagatatagaatatctatctgtatatatatatatatagatataatttattaataatt

SEQ ID NO: 257467 - DNA, 317 bp, Glycine max
ggagtgcacaagtgaatttggtgatcgagataactagaaacaaggggatgaaaatgaaaggccttggtttcttcggtggtacaattttggtagcatggcaatggcatgcgtacgatatgttccctctccgaatgaacactggctatggtgcccgtactccggaggtgaaatgcgcaagttggaggcttgctgtggaagcacacaacatctttggctttgagaccattcctgaagagtgcgttgaagcaacaaaggaatacatccatggcgaacaatatagatcagactccaaaacagttaaccaacaagcttacttt

SEQ ID NO: 257468 - DNA, 113 bp, Glycine max
gcacaagtgagtttgttgatcgagataactagaaacagggtgatgaaaatgaaagggcctggtttcttcgttgctacaatttcggtagcatggcaatgccatgcgtacgatat

SEQ ID NO: 257469 - DNA, 360 bp, Glycine max
agaagacgacagttttggagtgttttgtcgttgaggttttttggggcagaattgagtgcggtgtgtggtctcagacattccaacgaatgatgaaagatgaacacaaacatcactgcatcgacgaaaccagagtacccagtcattgatcgcaaccctcctttcaccaaagtcgtctgtatcttcaacaccatccactatctccgattcatcacaatcaccggcgtttccgtcaccgtcggctacctctccgggattaagcctggaattatgggtccttcgatggtgacagggggtttgatcggagaggtgggtgggttcatgtatgcttaccacaactccgctgggagactcatgggtttc

SEQ ID NO: 257470 - DNA, 316 bp, Glycine max
acgacagaaggggggcgtgcagttcaatgcgaaaagagattcgaatccaaggaagggaaaggaaagtaagagaagagaagaatggccgaagagggacaagtgattggtgtccacagcgtggaggagtgggaggaacatctcaagaagggacaagagtccaagaaattgattgtggtggattttaccgcttcttggtgcggcccatgccgtttcattgccccaattcttgcggatatggctaaaaagttgccgaatgtcaccttcctcaaggtggatgtggatgaattggcgactgtttccaaggagtgggaagttg

SEQ ID NO: 257471 - DNA, 312 bp, Glycine max
gacaagtgagtttgttgatcgagataactagaaacagtgtgatgaaaatgaaggtccttgttttcttcggtgctacaattttggtagcatggcaatgccatgcgtacgatatgttccctctccgaatgaacactggctatggtgcccgtactccggaggtgaaatgcgcaagttggaggcttgctgtggaagcacacaacatctttggctttgagaccattcctgaagagtgcgtcgaagcaacaaaggaatacatccatggcgaacaatatagatcagactccaaaacagttaaccaacaagcttactttt

SEQ ID NO: 257472 - DNA, 347 bp, Glycine max
caatttgggaattattgctcccatcgccattggtttcattgttggcgctaacattttgttgggtggggccttctccggagcagccatgaaccctgctgtgacatttgggcctgctgtcgtgagctggacctggaccaaccactggatctactgggccggccctctcatcggaggtggaattgctgggcttatctacgaggttgtcttcatcagccacacccacgagcagcttcccagcactgactactagaggggaaaaatgaaataataaaaaaaaaaaaatgtgtattattgaatttctccggaatcttcttctgtgtatggttttccttcccttgtgttttctt

SEQ ID NO: 257473 - DNA, 302 bp, Glycine max
taaggtttgtgcgtttggttcacaacataggtggcgctcagaaaactaaaaacaaccatgggagcatgatccacaaggtcgctcttggcatgaagaggggcaaattcaacctcgggtacagaccggtctcaaatactttaggaacctgcaaggaaaattgattatcattgctaataactgcccccccttgagaaagtcagagattgaatactatgctatgttggccaaggttggagttgatcattacaatgggaacaatgtggattcgggcactgcatgtggaaaatattacagagtgtgct

SEQ ID NO: 257474 - DNA, 414 bp, Glycine max
ttttagggggcacaagtgagtttgttgatcgggatgactagaaacagtgtgaggaaaatgaaggtccttgttttcttcgttgctacaattttggtagcatggcaatgccatgcgtacgatatgttccctctccgaatgaacactggctatggtgcccgtactccggaggtgaaatgcgcaagttggaggcttgctgtggaagcacacaacatctttggctttgagaccattcctgaagagtgcgttgaagcaacaaaggaatacatccatggcgaacaatatagatcagactccaaaacagttaaccaacaagcttacttttatgccagagacctcgaagtccatcccaaggacacatttgtgttcagtatagatggcaccgtactctctaatattccatactacaaaaaacat

SEQ ID NO: 257475 - DNA, 410 bp, Glycine max
  unsure (1)..(410): unsure at all n locations
tgaccttcacagaagcaattaatcatattggggtctcattcccactataaacacaaaacccttcccatcctaattaaggtgaaaatgaaggcatcacccattgcttggttcactttggtggttgtgtttcttgtggctgaagttcaagtttcaatggcagtgacatgcagcccaatgcagctgagtgcatgtgtaagtgcaataacctcttcaacccctccatcaaacctatgctgctccaagatcaaagaacagaaaccatgcctctgccaatacctcaagaaccccaatctcaagaagtttgttgactctcctaatgcaaggagagttgctagcacttgtggaactcccttcccaaggtgctaagtgctaataaattggaagaggttntaatttctctgcctgattat

SEQ ID NO: 257476 - DNA, 391 bp, Glycine max
gggtaaccctaaatgaaccatatggctacagcgtgaatggctacagtggtggaaattttgtaccaggtagatgttctaactacgttggaaaatgccctgctggtgattcttccaccgagccctacattgttaaccaccacttaatacttgctcatggagcagcagtcaattgctacaagaacaaataccaggctcatcggaaaggacaaattggagtcaccatagtgactttcttctttgaaccaaaatctaatagtgatgctgatcgcaaggcagcaaggcgagctctggactttatgcttggctggtttgctaatcccattacatttggtgactatcctgagagtatgagatctttagttggttctagactccccacattcaccaaagc

SEQ ID NO: 257477 - DNA, 341 bp, Glycine max
gcttcttcaattcagagagagcgaaacggcggcacgcgcaaaaatggtgaagtttctgaaaccaaacaaagccgtcatcgtccttcagggacgctacgccggcaaaaaagccgtgatagtgagaaccttcgatgaaggcacgcgcgagcgcccctacgggcactgcttggtggcagggataaagaagtaccctgcgaaggtgatcaagaaggattcggccaagaagacggccaagaagtcgcgtgtgaaagcgttcgtgaagctcgtgaactaccagcaccttatgcccacgcgctacacgctcgatgtcgatttgaaggacgcggttacccccgacgtgc

SEQ ID NO: 257478 - DNA, 402 bp, Glycine max
tgaccacacacccttcttcatctctctttgatacccttttgttctttttggtgctttaatttgcactagcaagggggttggttttatttctgtttgcttgcaacaatggctgtggctaataagttactttctgttttgatcattgccctcattgccatttccatgcttcaaacagtggttatggcatctcatggacatggaggccaccactacaatgacaagaaaaaatatggacctggcagtctcaaaagcttccaatgcccatcacaatgctcaaggaggtgtggcaagacccagtaccacaagccctgcatgtttttctgtcagaagtgttgtaggaagtgcctatatgtgccaccggggtattatgggaacaaagcagtgtgcccttgctacaacaac

SEQ ID NO: 257479 - DNA, 401 bp, Glycine max
gtatagaaatagaactgtcttttcatatagatatgccttcaacacaacataggtcatcgaaaggatctcgaagacccaccaacgcacgaaagccgggatctttcagaaaatggattcctattcgaagggtgcataaccgcatggataagctcacactaacccgtcaatttgggatccaattcggttccttatgaggtatcgggaaggaattttggaatgtaataatatcgattcatacagatacagaagaaagggttctctattgattcaaacgctctacctacgagatagggatagagaaagaggaaaaaaccgaggatttcacatagtacttttggtcgaaaaatcgatctgatttttttcgtacttttcgctcaatgatgaaatgggtcagattctac

SEQ ID NO: 257480 - DNA, 389 bp, Glycine max
  unsure (1)..(389): unsure at all n locations
ttcttnaaggtgtgcctcacttcagcttctacgaggagcatggagaagatacacgaggaggaagggattggtcccgacatgctggtaggggatgtgctatactacggggacaaccactctggtgtggtgcagctgcacaacgtggaggacgtgcagaagctcatagaggaccacaagctggatcacaagctcatcgtgctcgatgtgggtctcaaacattgtgggccctgcgttaaggtttatcctacagtggttaagctctcgaggcagatggactcggtggtgttcgctcggatgaacggggacgagaacgagagctgcatgcagttcttgaaagacatggaagtcatccaggtccctacctttctcttcatcagagatggcaacat

SEQ ID NO: 257481 - DNA, 380 bp, Glycine max
gatctggcagcagaagaacaagtagttgagaactaagaaggagaagcaaatggcttcctcaatgatctcttccccagctgttaccactgtcaaccgtgccggtgccggcatggttgctccattcactggcctcaagtccatggctggcttccccaccaggaagaccaacaatgacattacctccattgctagcaacggtggaagagtgcaatgcatgcaggtgtggccgccagttggcaagaagaagtttgagactctttcctacctgccagaccttgatgatgcacaattggcaaaggaagtagaataccttcttaggaagggatggattccttgcttggaattcgagttggagcacggtttcgtgtaccgtgagcaca

SEQ ID NO: 257482 - DNA, 314 bp, Glycine max
ggcacaagtgagtttgttgatcgagataactagaaacagtgtgatgaaaatgaaggtccttgttttcttcgttgctacaattttggtagcatggcaatgccatgcgtacgatatgttccctctccgaatgaacactggctatggtgcccgtactccggaggtgaaatgcgcaagttggaggcttgctgtggaagcacacaacatctttggctttgagaccattcctgaagagtgcgttgaagcaacaaaggaatacatccatggcgaacaatatagatcagactccaaaacagttaaccaacaagcttactttt

SEQ ID NO: 257483 - DNA, 286 bp, Glycine max
ctatttgggaattattgctcccatcgccattggtttcattgttggcgctaacattttgttgggtggggccttctccggagcagccatgaaccctgctgtgacatttgggcctgctgtcgtgagctggacctggaccaaccactggatctactgggccggccctctcatcggaggtggaattgctgggcttatctacgaggttgtcttcatcagccacacccacgagcagcttcccagcactgactactagaggggaaaaatgaaataagaaaaaaaaaaaaaatac

SEQ ID NO: 257484 - DNA, 405 bp, Glycine max
  unsure (1)..(405): unsure at all n locations
aagacgacagaagggggtggataatttgcagagagcaaagaacagaagaagatggcacagacgctggcaatgcccgtggcaccttcgctagctatcatctccaattctcgcctctccaacacactctccgttcccgttctgaacaaaccaaaggttcaagggtcaagcatcaagtgcgttcgtgttggcggtgtggagattccgaacaacaagcgaatcgagtactcgctgcagtacattcatggagttggaaagaccagagcgaaacagattctctgtgatatccaaatggataataaaatcacgaaggaactcactgaggaggagctaatcacactcanggacgaggtctccatatacatgattgaaggcgacctgagacggttcaatgcggttaatataaag

SEQ ID NO: 257485 - DNA, 399 bp, Glycine max
gaccttgatgaatggagcctgcaaccgagaggagagaggattttgggaagttgcagtacggatgcgagcactataagagacgatgcaaaattcgagcaccatgctgcaatcagatttttccatgtcgtcactgccacaacgacgccgcgaactcatctagcaaccccgcagatcgtcatgaacttgttagacgcgatgttaagcaagttatatgctctgtctgtgatactgaacaggaggttgccaaggtgtgttctagctgtggcgtcaatatgggaggatattattgcgagatttgcaaattctatgatgatgatacggataaaggacaattccattgtgatgaatgcggcatttgcagggttggtggtcgtgataagttctttcactgtaagaaat

SEQ ID NO: 257486 - DNA, 358 bp, Glycine max
gatctggcagcaaaagaacaagtagttgggaactaagaaggagaagcaaatggcttcctcaatgatctcttccccagctgttaccactgtcaaccgtgccggtgccggcatggttgctccattcactggcctcaagtccatggctggcttccccaccaagaagaccaacaatgacattacctccattgctagcaacggtggaagagtgcaatgcatgcaggtgtggccaccagttggcaagaagaagtttgagactccttcctacctgccagaccttgatgatgcacaattggcaaaggaagtagaataccttcttaggaagggatggattccttgcttggaattcgagttggagcac

SEQ ID NO: 257487 - DNA, 187 bp, Glycine max
agggatctgggggcagaaagacaagtagttgggaactaagaagaaagaaatggcttcctcaatgatctcctccccagctgttaccaccgtcaaccgtgccggtgccggcatggttgctccattcaccggcctcaaatccatggctggcttccccacgaggaagaccaacaattgacattatcctccg

SEQ ID NO: 257488 - DNA, 343 bp, Glycine max
tctgaaaggaaaccctagagagaaggaactcctatcgtgttcccctctcttctttcttctttgtgccttcacctcatatctaccttcagccaccgctgatgatgatcatgtgtacgacactgacggcgataagcttcaatacggtgtcaattatttcgtgttgccagtgataagaggaaatggcggtggaatacaagtagcaaaagcaggaaacgaaacttgccctctgactgtggtgcaatctggcaacgagctctctgaggggttaccgataaagattgcatctcgatcagcaggagtcgctttcatcacccaaggccagcttttcaagagcattcagttc

SEQ ID NO: 257489 - DNA, 380 bp, Glycine max
  unsure (1)..(380): unsure at all n locations
tttctaggttaatcctctgttgtttctcagccgcctctgctagggttcggaaacgaanaaaggttctgttttcttttcgcgatgagggccaagtggaagaagaagcgtatgaggaggctgaagaggaagcgccgaaagatgagacagagatccaagtagtgcgttaaacctagtttgtttccgttgcttttacaattgcttatgttgtcaaataggacacccagttgttagtggcactggtctctcctttttgatgttttgatacattttgttggattttatttcgtcttatgttcttagctgaaaacaatgctgttactgcgtttgcgaatcaacaggatatcttgtttaanaaaaaaaaaaaaataatttttaaaagc

SEQ ID NO: 257490 - DNA, 399 bp, Glycine max
ggcagcagaaaaacaagtagttgagaactaagaagaaggaaatggcttcctcaatgatctcctccccagctgttaccaccgtcaaccgtgccggtgccggcatggttgctccattcaccggcctcaaatccatggctggcttccccacgaggaagaccaacaatgacattacctccattgctagcaacggtggaagagtacaatgcatgcaggtgtggccaccaattggcaagaagaagttcgagactctttcctacttgccagacctcgatgatgcccaattggcaaaggaagtcgaataccttctaaggaaaggatggattccttgcttggaattcgagttggagcacggtttcgtgtaccgtgagcacaacaggtcacctggatactatgatggac

SEQ ID NO: 257491 - DNA, 313 bp, Glycine max
ggcacaagtgagtttgttgatcgagataactagaaacagtgtgatgaaaatgaaggtccttgttttcttcgttgctacaattttggtagcatggcaatgccatgcgtacgatatgttccctctccgaatgaacactggctatggtgcccgtactccggaggtgaaatgcgcaagttggaggcttgctgtggaagcacacaacatctttggctttgagaccattcctgaagagtgcgttgaagcaacaaaggaatacattcatggcgaacaatatagatcagactccaaaacagttaaccaacaagcttacttt

SEQ ID NO: 257492 - DNA, 355 bp, Glycine max
gaaggtgcaagagtttgttgtgagctataagctagtttatcgtgaggagaatatgaagttgtttgttttctttgttgctgcagtagttttggtagcatggccatgccatggcgcatgctaccaaaggttccctctccgaatgaaaactggctatggtgagcgttcttcggaggtaaaatgcgcaagttttaggcttgctgtggaagcacacaacatccgagcctttaaaaccattcctgaagagtgcgttggaccaacaaaggactacattaatggcgaacaatttagatcagactctaaaacagttaaccaacaagctttcttttatgctagtgaacgcgaagtccatcacaac

SEQ ID NO: 257493 - DNA, 341 bp, Glycine max
gttagtgacctggagagccttattgacctgcgatttagtgcactacagaaggcattgaagatacctcacaaggcttcagaagcgcggttaatggtgtccaagaagttccttactctattcaagaccggtaagcttggacctttcattctagatgatgtcccggatgtcaagcctgtgtcataaggtagattgaatcatggtttttccccctcctttttcttgtgtattagatctcctacctttcctcctttcccatttgtgcaatatgtatttcaatccaaattttgctgtaacttgtaaatatcgatgaatttaagttagaaagagaaatttgaactttc

SEQ ID NO: 257494 - DNA, 400 bp, Glycine max
gattatatttgagttcaaacaaatcaaagcgatggccacctccaacttctctattgttctctccgtctccctagccttctttttggtgctacttaccaaggcacactcgaccgataccgtttctttcaccttcaacaagttcaacccagtccaaccaaacattatgctccaaaaagatgctagtatttcatcctctggggtgttacaactcaccaaagttggcagcaacggcgtgcccacctcgggatctctcggtcgtaccctttacgctgccccaatccagatttgggacagcgaaaccggcaaggtagccagctgggctacatcctttaaattcaacattttcgcacccaacaaatcaaactcagctgacgggcttgccttcttcttggcacccgtc

SEQ ID NO: 257495 - DNA, 118 bp, Glycine max
gtttatggtagtgttgtcagtgagaaagtattggccacccaccatccaagatatggatataatgctgccaccggaaaatatgaagatttgatgtctgctgggatcattgatcccacaa

SEQ ID NO: 257496 - DNA, 360 bp, Glycine max
gaggcatttgaataagaaaagccttccatagcctgccaaaaaatgaagagcactaccttggtcgctctctttctactttgtgccctcacttcatcatacctaccttcagccaccgctgatgtggtgctggacatggatggtaatcctcttggaaacggttggcaaaatgaatatttcatgttgccagttacaagaggaagcgggggtggaatagcactagctgcaactggaaatgaaagatgccctgtaactgtcgtgcaatctcacattgagcgcgataaggggtatgcggcaacttttagagctccattccacctcccttttatcgcagaggccttcctttgacgatttcattcgata

SEQ ID NO: 257497 - DNA, 309 bp, Glycine max
  unsure (1)..(309): unsure at all n locations
tagtcgttcaagatgagagctaagtggaagaagaagcgcatgaggaggttgaagaggaagcgccgaaagatgagacaaagatctaagtaggtgcttgagcaggagttgagatgagctttccatctgctaccagcctcatgacattntaggctgttatggctcttatgatcttgaggtctagtcgctaggggagcttcactcttgacttagtttgctttactggtcctggtcctggtccaagactattgagtgtgggttaagttgtgatgtttagtggtttgtggtatctaattatgtactggtttttat

SEQ ID NO: 257498 - DNA, 108 bp, Glycine max
taggggtgcacaagtgagtttgttgatcgagataactagaaacagtgtgatgaaaatgaaagtccttgttttcttcgttgctacaatttttgtagcatggcaatgcca

SEQ ID NO: 257499 - DNA, 350 bp, Glycine max
gggattcagcccaaagttgattcactggatttggggttccctaagcacaccattattttattatgaatgagtggcaatagcagcaacaacaacaatataagtaaaagaatctctgtgttgtcatcacacttcgctagatccagccccatcatggcttcagagaagcaagcggctcttgccgtcactccctctgatgctgatgctcctaccatatttgacaagatcatcaataaggagattccttctactgtggtttatgaggatgacaaggtgcttgccttcagggacataactcctcaagctcctacacatattcttatcattcctaaattcaaagacgggttaagtgg

SEQ ID NO: 257500 - DNA, 397 bp, Glycine max
tgttctagtgtgtgattgtttggtgttgtagctcgttcttcttcttttgttgttctgtgtttgtgtttgttttttctctcacctgaaaatgtcttgctgcggtggtaactgtggttgcggaagctcctgcaagtgcggcaacggctgcggaggctgcaagatgtacccagacttgagctacactgagtcaaccaccaccgagaccttggtcatgggagtggcacctgttaaggctcaatttgagggtgctgaaatgggtgtgcccgctgagaacgatggctgcaaatgtggaccaaactgctcctgcaacccctgcacttgcaagtgaggtgttgggagagcaagcttcaagcagagataagcccttattaggaataatgataaactattaatgtgt

SEQ ID NO: 257501 - DNA, 354 bp, Glycine max
  unsure (1)..(354): unsure at all n locations
caacagaggggttggtgcaagaattcgatgggagctatcagcgagtttatcgcgaggggaatgtgcagctgcttgttttctttggtgctgcactagttttggtagcatagccatgccatcgggcangctaccaaacgttacctgtccgaatgaaaactggctatggtgagcgttcttcggagggaaaatgcgcaagaattatggcttgctgtgaagcacacaacatacgagcctttaaaaccattcctgaagagtgcgttgaaccaacaaaggactacattaatggcgaacaatctagatcagactctaaaacagtttacccacaagctttcttttatgctagtgaacgcgaag

SEQ ID NO: 257502 - DNA, 120 bp, Glycine max
gtcacccactcccaaacaaacccacttagatgggttcctttgtattcctcctagtgctgcttctttcaacccttattctcatgcctcaagggcttggttcttacttcaaaccaatttaaa

SEQ ID NO: 257503 - DNA, 402 bp, Glycine max
cggcaagagtttgttgtgagctataagctagtggatcgtgaggagaatatgaaggtgtttgttttctttgttgctgcagtagttttggtagcatggccatgccatggcgcaggctaccaaaggttccctctccgaatgaaaactggctatggtgagcgttcttcggaggtaaaatgcgcaagttttaggcttgctgtggaagcacacaacatccgagcctttaaaaccattcctgaagagtgcgttgaaccaacaaaggactacattaatggcgaacaatttagatcagactctaaaacagttaaccaacaagctttcttttatgctagtgaacgcgaagtccatcacaacgacatatttatattcggcatagataacaccgtactctctaatatcccatac

SEQ ID NO: 257504 - DNA, 285 bp, Glycine max
  unsure (1)..(285): unsure at all n locations
tctttggtgctgcagtatttttgtagcatggccatgccatggcgcangctaccaaaggttccctctccgaatgaaaactggctatggtgagcgttcttcggaggtaaaatgcgcaagttntangcttgctgtggaagcacacaacatccgagcctttaaaaccattctgaagagtgcgtngaaccaacanaggactacattaatggcgaacaatttagatcagactctanaacagttaaccaacaagctttcttttatgctagtgaacgcgaagtccatcacaac

SEQ ID NO: 257505 - DNA, 308 bp, Glycine max
gaccaagtgaggcaatatagcccaagccctatgcaaccaaaccctaacacacacccatttgattcagtttccatggctagcctcaaggttgcatttttggctgcagtgctctgcatggttgtggtgagtgcacccatggcacatgcagctatcacgtgcgggcaggtgacgagtagcctggccaattgcatcggttacctccagaagggaggaacgccgtcgtcgggatgctgcaacggagtgaagagcctcaatgccgccgccaagaccaccgccgaccgccagacggcgtgcaactgcctcaagtc

SEQ ID NO: 257506 - DNA, 396 bp, Glycine max
  unsure (1)..(396): unsure at all n locations
tgttaccaaaaacaaaacacaagccaagtgagagtgagaaaaaataaaaatcaaagagcataatgtcagggatcattcacaagattggggagacccttcatgtgggagggcacaagaaggaggaggagcataagggtgagcaccatgctggagaatacaaaggggagcaccatggtgaacacagtagtgagtacaaaggagagcatcatggtgaacacaaagctggagagtaccatggtgagcacaagccagagcacaaagaggggttcctagacaaagtcaaggacaagatccatggtgagggcggcgccgccgagggcgagaagaagatgaaggagaagaagaagaggagcatggccatgagcatggncatgacagcagcagcagcagtgacag

SEQ ID NO: 257507 - DNA, 418 bp, Glycine max
  unsure (1)..(418): unsure at all n locations
acgcgttcggcgagaagacgacagatttggaaaaactttgtttcactcggatcgcgcgagcacaaagaaagttgaagagggccctgccggaaaaagattaataccgtctttcattttccggcgatctcttttttcttccatcaccgttttccggctatccctaatccttaacagaaatgacgacatcaaggcgccttgcggacaggaaggtggagaagtttgagaaaaacatcaccaaaagaggatttgtgccagacacaaccactaaaaaggggaaagactaccctgttggcccagtgctgctcggtttcttcgtctttgttgtcattggatcatctctcttccagataatcaggacagcaacgagtggaggcatggcttaaatggagctntattttggattgtgtcatcatctctt

SEQ ID NO: 257508 - DNA, 252 bp, Glycine max
gacccccaaactctgcatgggaagaaaccctagccactctcccggcgtcacgatgcagatcttcgtgaaaaccctaacgggtaaaacgatcacgttggaggtggagtcttcggacaccatcgacaacgtgaaggccaagatccaggacaaggaaggcatccctccggaccagcagcgcctcatcttcgccgggaagcagctggaggacggccgcaccctcgccgactacaacatccagaaggagtccacgct

SEQ ID NO: 257509 - DNA, 352 bp, Glycine max
gaccggcggtctcatctctcttgccagttctcacctcaccggtgcatcttcacgtcgtctctaacgagggaaaatgagtcgaggaagtgcagcagtagcgaaaggaaagaagaaaggtgctacattcaccattgactgtgcaaagccagtagaagacaagatcatggacattgcttctctcgagaagtttcttcaagagaggatcaaggttggtggcaaagctggtgctcttggtgactctgttaccgttacacgtgagaagactaagattattctcacctctgactgtaacttttccaaacggtatttgaagtacttgacgaagaagtactttgagaaacacaatgtgcga

SEQ ID NO: 257510 - DNA, 222 bp, Glycine max
  unsure (1)..(222): unsure at all n locations
tatgtcgtgtgaaaggatgtgttggaacagtgaagagagttctaggaaaattggatggtgtggaatcatatgacattganttgaaggaacaaaaggtggtagtgaaaggaaatgtccagccagacacagttctgcagaccgtttccaaaactgggaagaagactaccttctgggaaggtgaagcagcaacatctgaaactagcacagcaactgcctaaaaca

SEQ ID NO: 257511 - DNA, 390 bp, Glycine max
ccgttgggttaaaaaagacaacgtacgggtaaaaaaaaaaaaattacgggttctgagtgcttaagaaaaagcaggcttttaaaaaaaattgaaaaattaatacggcgcttgtaatttcagagacaaatattcattcaaacaaaacaacttatgatagtaaaagggtagaattcgaaaaaaaaaaaattgcagatattacaaagaagaagaaatgctcgattaactcgtaaatcacattcttttttaaaatttttcatgaaaaggatatacagagatatatttctatatatcagctgtattccgaggatcaatatacaactttttcttgaattaacaaaaaaatttttaaataaatccatttacgataatgaagcaaatgcagaaagaatt

SEQ ID NO: 257512 - DNA, 361 bp, Glycine max
tgacatcttatcttctaaagaataggtgctataatgaactccattcttatttctattcctagtatttagatttttttcattatatatggtatttgcaagtttagaacatatattaactcatatatcgttttcggtcgtatctattttaatttcaattcatttgataaccttattatttgtcaaagaaatcataggattatctgattcgtccaaaaaaggcatgataataactttttttggattaccaggatggttagtaactcgtggggttttttcaggccattaaccgttaagggattaatttgaatcattattattcttttcatgaactttttccatttttataaatgttccttgcttc

SEQ ID NO: 257513 - DNA, 355 bp, Glycine max
gggtgcaagagtttgttgtgagctataagctagtttatcgtgaggagaatatgaagttgtttgttttctttgttgctgcagtagttttggtagcatggccatgccatggcgcaggctaccaaaggttccctctccgaatgaaaactggctatggtgagcgttcttcggaggtaaaatgcgcaagttttaggcttgctgtggaagcacacaacatccgagcctttaaaaccattcctgaagagtgcgttgaaccaacaaaggactacattaatggcgaacaatttagatcagaccctaaaacagttaaccaacaagctttcttttatgctagtgaacgcgaagtccatcacaacga

SEQ ID NO: 257514 - DNA, 315 bp, Glycine max
gggtggagtgtgcagaagagcgtctcagtcgcaaccctaatcagaagaagcgcagcttcaagcgtgtgacagccaccagccatgggtcgtatgcacagccgcggtaagggtatatcctcttctgctttgccctacaaaaggacacctcctagctggctcaaaatctcttcgcaagatgtcgaagaaaatatctgcaagtttgcgaagaaaggtttgaccccgtctcagattggtgtcattctcagagattctcacggtattgctcaggtcaatagcgtcactggcagcaaaatccttcgcatcctcaaagctcac

SEQ ID NO: 257515 - DNA, 405 bp, Glycine max
acacaactgaacaagatagataagccttccacagcctcacaaaaatgaagaacactacctcgttcgctctctttctactttgtgccttcttcacctcatacctaccttcagccaccggtgcttttgtgcttgacagtgatggaaaccctcttgaaaatggtggcacatactatgtgccagcaccaaataactgcggtggaatagaatacactacatcaggaaacgaaacttgccctatcactgttgtgcaacatcacgacccaacctgtaaggggtttccgataacgatttcgtccccggcccgaatccgttacatctccgaaggccttaatgtgaacatagggttcactttcagaccccctccgtgtgccccctcttctttgtggactgttctcaaggatcaat

SEQ ID NO: 257516 - DNA, 372 bp, Glycine max
  unsure (1)..(372): unsure at all n locations
gacagcatatatatcaataatctatgttatactatacctacattttgataattttctttgtagttgatagccatggctacccgtggaaagcttgaggttgacattgatctcaagtccaacgcagacaagtactggcaaacccttaggaattctactgaaatattccctaaggccttcccacatgattacaaaagcattgaggttcttgagggtgatggcaagtctcctggttctatccgccacataagttatggtgaaggttcaccacttgtgaaatcatcctttgagaggattgaggctgttgatgaggaaaagaaggtagtgtcgtacactatcattgatggggaactcctncagcactacaaaacattc

SEQ ID NO: 257517 - DNA, 364 bp, Glycine max
agaaggggaaggtgcaagagtttgttgtgagctataagctagtttatcgtgaggagaatatgaagttgtttgttttctttgttgctgcagtagttttggtagcatggccatgccatggcgcaggctaccaaaggttccctctccgaatgaaaactggctatggtgagcgttcttcggaggtaaaatgcgcaagttttaggcttgctgtggaagcacacaacatccgagcctttaaaaccattcctgaagagtgcgttgaaccaacaaaggactacattaatggcgaacaatttagatcagactctaaaacagttaaccaacaagctttcttttatgctagtgaacgcgaagtccatcacaacga

SEQ ID NO: 257518 - DNA, 370 bp, Glycine max
ggaggcatttgaaaaagaaaagccgtccatagcctcccaaaaaatgaagagcactaccttgttcgctctctttctactttgtgccctcacttcatcatacctaccttcagccaccgctgatgtggtgctggacatggatggtaatcctcttggaaacggttggcaaaatgaatatttcatgttgccagttacaagaggaagcggtggtggaatagcactagctgcaactggaaatgaaagatgccctgtaactgtcgtgcaatctcacattgagcgcgataaggggtatgcggcaacttttagagctccattccacctcctttttatcgcagaaggccctcctttgacgatttcattcgataactttgaa

SEQ ID NO: 257519 - DNA, 299 bp, Glycine max
  unsure (1)..(299): unsure at all n locations
aaagaccaatggggaacgatggctctgatgggcggttttgctagaataaacaataatgagatcactgttttagtaaatgatgcggaaaagggtagtgacattgatccacaagaagcacagcaaactcttgaaatagcagaagctaatttgaataaggcggaaggcaagagacaaacaattgaggcaaatctagctcttagacgagctaggacacgagtagaggctatcaatgtgatttcataacaagttgatgcgtccgaatatcggaataactaaaaaatggaaaatgaaacagtnna

SEQ ID NO: 257520 - DNA, 357 bp, Glycine max
gactgatacaggaacaggagagaaacaaagttagaagtaaagaagatcatggcttctctagcaaccttggctgctgttcaaccagctacgatcaatggccttgctggaagttccctctctggaactaagctctctttcaagccctctcgccacagtgtcaaatccaagaacttcaggagtggtgccgtggtagcaaagtatggtgacaagagtgtgtactttgatttggaggatctgggcaacactacagggcagtgggacttgtatggctcagatgcaccttcaccctacaaccctcttcagagcaagttcttcgagacatttgctgctccattcacaaagaggggattgttactc

SEQ ID NO: 257521 - DNA, 388 bp, Glycine max
gtcagcgaaaaatggctgcaccaacaccgattcagaaaactgaagaggggtggaaggtcattctctcccccgagcagtttcggatccttcgccagaaaggaactgaattgaagggtacaggagaatataacaagttttatgaagaaggaatttacaactgtgctggctgtgggactcctctttacaagtcttcaaccaagtttgattctggttgtggttggcctgctttctttgagggttttcccggtgccatcgatcgatcccctgacccagatgggaggaggactgagataacttgtgcagcatgtggtgggcacttgggtcatgttttcaagggagagggattcaagaccccaactgatgaacgccattgcgtcaatagtatttc

SEQ ID NO: 257522 - DNA, 380 bp, Glycine max; identical to SEQ ID NO: 236633

SEQ ID NO: 257523 - DNA, 106 bp, Glycine max
cgtagtaagcgacgaaatgcttcggggagttgaaaataagcgtagatccggggattcccgatataggtcaacctttcgaactgctgctgaatccacgggccgaccc

SEQ ID NO: 257524 - DNA, 313 bp, Glycine max
ggcacaagtgagtttgttgatcgagataactagaaacagtgtgatgaaaatgaaagtccttgttttcttcgttgctacaattttggtagcatggcaatgccatgcgtacgatatgttccctctccgaatgaacactggctatggtgcccgtactccggaggtgaaatgcgcaagttggaggcttgctgtggaagcacacaacatctttggctttgagaccattcctgaagagtgcgttgaagcaacaaaggaatacatccatggcgaacaatatagatcagactccaaaacagttaaccaacaagcttacttt

SEQ ID NO: 257525 - DNA, 313 bp, Glycine max
gcacaagtgagtttgttgagcgagataactagaaacagtgtgatgaaaatgaaggtccttgttttcttcgttgctacaattttggtagcatggcaatgccatgcgtacgatatgttccctctccgaatgaacactggctatggtgcccgtactccggaggtgaaatgcgcaagttggaggcttgctgtggaagcacacaacatctttggctttgagaccattcctgaagagtgcgttgaagcaacaaaggaatacatccatggcgaacaatatagatcagactccaaaacagttaaccaacaagcttactttt

SEQ ID NO: 257526 - DNA, 284 bp, Glycine max
  unsure (1)..(284): unsure at all n locations
ctagatcaaaaacgaaatgacccctcccccagaattctttcggattgtcgggcacattaaaaaaggaatggataagttcctaaaaataaagaaaactataacacattataaggaggggtcaaatattaattaagataaaagatatagaatatctatctgtatatatatatatatagatataatttattaataattagaactttcttttttcttaaaaaaaaaaaaagtaaataaaaagatttgatagaatcgtaatttcaattcgattatatagatacctngna

SEQ ID NO: 257527 - DNA, 299 bp, Glycine max
  unsure (1)..(299): unsure at all n locations
caacttatgtcatcgaaaggatctcgaaggcccacgcgactcacgtaagccgggatctttcataaaatggattcctattcgaagggtgcataaccgcatggataagctcacactaacccgtcaatttgggatccaattcggttccttaggaggtatcgggaaggaatctnggaatgtaacaatatccattcatacagattcagaagaaagggttctctattgattcaaacgctctacctacaatattggtatagagctagaggaaataaccgaggatctctcattgtacttttggtcga

SEQ ID NO: 257528 - DNA, 392 bp, Glycine max
  unsure (1)..(392): unsure at all n locations
gatagcagcatcatacaaagcattgaattcaaaaacttaagttcattccttgtgttttgctttcttcctcaaaaccaaacatgtcgaacacatgcggcaactgcgactgcgctgacaagactagctgcaccaagggaaacagctatggtgttattgtagagactgagaagagttacatcgagactgttgtcatggatgttccagcagctgagcatgatgggaagtgcaagtgtggcactaactgcacttgcacggactgcacctgtggccattaaggaatatgtatgaaaatgtaattgccatgtgtttggcaatacaaatatccaaataatgtaatcttcgtatgaataaatgtgtgtgcttgtatcctacttcangcctgtgtagtcatg

SEQ ID NO: 257529 - DNA, 285 bp, Glycine max
  unsure (1)..(285): unsure at all n locations
gcaaaaaaaactgaattgtgtgaatcgaaaactaaacattgctattgtaaaagttgcaaatgcttataaacaccctaatattattgcagaatttatagctggacaattaaagaatagagtttcgtttcgtaaagcaatgaanaaagctattgaattaactgaacaggcgggtacaaaaggagttcaagtacaaattgcaggacgtatcgacggaaaagaaattgcacgtgttgaatggatcagagaaggtagagttcctctacanaccattcgagcgaaaatcga

SEQ ID NO: 257530 - DNA, 274 bp, Glycine max
  unsure (1)..(274): unsure at all n locations
taatttgggaattattgctcccatcgccattggtttcattgtcggcgctaacattttgttgggtggggccttctctggagcggccatgaaccccgctgtgacatttgggcctgctgtcgtgagctggacctggaccaaccactggatctactgggccgggcctctcatcggtggtggaatcgctggccttgtttacgaggttgtctttatcagccacacccacgagcagcttcccaccactgactactagagggggggaaatgaaaaccccnna

SEQ ID NO: 257531 - DNA, 383 bp, Glycine max
ggcctcattttctggctaaccaaccctgacactccttggtctccgcttcctcttcgatcatcgcttcagaatgccgccgaagttcgacccctcccagatcgtcgacgtcttcgtacgcgtcaccggcggtgaggtcggcgcggcgagttccctcgccccgaagatcggtcccctcggtctctcccccaagaagatcggagaagatatcgccaaggaaaccgccaaggactggaagggcctccgcgtcaccgtcaagctcaccgtgcagaaccgtcaggccaaggtcacggtggtcccatccgccgccgcgctcgtcatcaaggccctcaaggagcccgagcgtggccgcaagaaaacgaagaacatcaagcacaacggcaaca

SEQ ID NO: 257532 - DNA, 401 bp, Glycine max
  unsure (1)..(401): unsure at all n locations
gacacacagctattcctcttaagcttgctactgagtttccacactgcataccttaggtcttccgaattcgaagttaatttgcaagatggctaaggaaaaggctcagatcaacattgtggtggttggtcatgtggaccctgaggaggcaaccaccattaacgagctgaagaagcctgttgtggagaaagaagctccagggcatgccatatgagggcatgcacgtacggcctcggaggggaaccataaaattatgttaacaaaataatctggaaccctaatgtatcagtgccatcatcagtgtgtagtttaagctagctttgctatggttacgttctttgagatgagggtcttgatgaacagtaccattctgatgtatngctttccttgaaagtaatgcatgc

SEQ ID NO: 257533 - DNA, 309 bp, Glycine max
aggaacgccgtcgtcgggatgctgcaacggagtgaagagcctcaatgccgccgccaagaccaccgccgaccgccagacggcgtgcaactgcctcaagtcggccgccagccaaatctccggcttcaacgccaacaacgccgtctcgctccccggcaaatgcggagtctccatcccctacaagatcagcaccttcaccaactgcgctaccatcaaggtttgaagagaaagtcatggacgcaggaaaccggaaactactcactagtatatgagtagcattattaatattaagaataagatcgagggtgatga

SEQ ID NO: 257534 - DNA, 312 bp, Glycine max
gaaggacaagtggctataacactacttgcattcagttagactttgatagtttgattagctctaataaggttaaggaccagagagagaaagagaaataagaagaaaaacacaagatgggttattggaagtctaaggttcttcccaagatcaagaaggttttcgagaagaatagcaccaagaaagctgctgctgctgaggccaccaagtcctttgatgagtcaaaggaggaatacaacaaagcctttgaagaaaagaagactgaacttcaaaccaaagttgttgaaatatatgaggcttcatcaacagaaatca

SEQ ID NO: 257535 - DNA, 337 bp, Glycine max
gacaccaacaccaaaacaaacccactaagatggcttcctttgtatccttcctagtgctgcttcttgcagcccttatcctcatacctcaagggcttgctacttactacaaaccaattaagaagccaccagtgtacaagcctccagtgtacaagccaccagtgtacaaaccaccggtttataagccaaaaccaccggtttacaagccgaaaccaccggtttacaagccaccatattagaagccaccatacaagaaaccaccttatggaaagtaccctccagtagaggacaacacccatgcctaaagcaagcaatgaggtctattatctacttaataaat

SEQ ID NO: 257536 - DNA, 244 bp, Glycine max
ggccgaaaaccctaacaacacaggcgcagagcgtgatccattgacgaagatggtgcagcgtctcacctaccgcaagaggcacagctatgcctccaaatccaaccaacacagggtcgtcaaaacccctggtgggaagctcgtttatcagaccaccaagaagaaggccagcgggcccaagtgccccgtcactggcaagaagattcaagggattccacacttgaggcctgcagagtacaagagatca

SEQ ID NO: 257537 - DNA, 332 bp, Glycine max
  unsure (1)..(332): unsure at all n locations
gcagatagatctgcttcttgttgttggaaagaaaccctagcaagcggaacaatggcagacgttgaggtcgatgtggcggctgcagcagcagcagggcagccgaagaagagaacgttcaagaagttcagtttcaggggcgtggatctcgatgcgcttctggacatgtccaccgatgaactcgtgaagatgttcagtgctcgcgcacgtagaaggttccagagaggcctcaccagaaagcccatggccttgatcaagaagcttcgcaaagcgaaaagagaagctccaccaagtgagaagccagaacctgtncgcacccaccttcggaacatgat

SEQ ID NO: 257538 - DNA, 322 bp, Glycine max
aggtctgttgagtgtagaacgctgctgccgaaacccttcgggaaccctaaggtaagtgagtaatcagtggttgagaatggtggagaaggcgaagggtagaaaggaggaggtggttacccgtgagtacaccattaaccttcacatgcgccttcatggctgcacatttaagaagaaagctcctaaagctattaatgagataaggaaatttgcccaaaaggccatggtgaccaatgatgtgagggtggatgtgaagttaaacaagtttgtctgtagccagggaatcaggagtgttccaaggaggattagagttagatttgctcgc

SEQ ID NO: 257539 - DNA, 383 bp, Glycine max
  unsure (1)..(383): unsure at all n locations
gatctggcagcagaagaacaagtagttgagaactaagagggagaagcaaatggcttcctcaatgatctcttccccagctgttaccactgtcaaccgtgccggtgccggcatggttgctccattcactggccttcaagtccatggctggcttccccaccaggaagaccaacaatgacattacctccattgctagcaacggtggaagagtgcaatgcatgcaggtgtggccaccagttggcaagaagaagtttgagactctttcctacctgccagaccttgatgatgcacaattggcaaaggaagtagaataccttcttaggaagggatggattccttgcttggaattcgagttggagcacggnttcgtgtaccgtgagcacaac

SEQ ID NO: 257540 - DNA, 346 bp, Glycine max
gggatttccaaagtttttaatagagggtaagtctcaaaaaatcgaagaattacagacgaatatgcaaaaaaaactgaattgtgtgaatcgaaaactaaacattgctattgtaaaagttgcaaatgcttataaacaccctaatattattgcagaatttatagctggacaattaaagaatagagtttcgtttcgtaaagcaatgaaaaaagctattgaattaactgaacaggcgggtacaaaaggagttcaagtacaaattgcaggacgtatcgacggaaaagaaattgcacgtgttgaatggatcagagaaggtagagttcctctacaaaccattcgagcgaaaatc

SEQ ID NO: 257541 - DNA, 333 bp, Glycine max
gacattactcacagaaggagaaggggggggacagagagatgatggagttgaagaaggtggcattggtgaaggtagctttgttgcttttcctgttagggttcagtgcaaccactgcagatgctactcgcttcgacccacgttccttcattactcaggtgctccccaacaattactatgtaaaaatcaaatccacagccactgcatgttgtgatctttgtctttgcacaaaatcaaaccctccccagtgccaatgtgtatatgggagcgagacaggctgccactcatgttgcaaaaattgcatttgcaataagaaatttcctcggacgtgttttt

SEQ ID NO: 257542 - DNA, 318 bp, Glycine max
cccacgcgtccgtaagacgacagaagggggtgcagttcaaagcgaagaaagattcgaagcgaagaaagaaagcgttgtgaagaatggcggaagaaggacaagtgatcggtgtccgcagcgtagaggagtggaaggaacatctcaagaagggagaagagtccaagaaattgattgtggtggattttactgcttcttggtgcggtccatgccgtttcattgccccaattcttgcagagtttgctaaaaagttgccgaatgtcaccttcctcaaggtggatgtggatgaattggagactgtttccaaggagtggggaattg

SEQ ID NO: 257543 - DNA, 359 bp, Glycine max
atcagtggtgccccccatgataacaacatagggctgtggaatgctgtcatatttggtcctgatgatactccatgggatggaggcacgttcaagttgacactccaatttactgaggactatccaaataaaccaccgactgtacgatttgtgtctcgcatgtttcatccaaatatttatgctgatggaagtatttgtttggatatattacaaaatcagtggagtcctatttatgatgtggctgctatactcacatctatccagtcattgccttgtgatcccaacccaaattctcctgcaaactctgaagcagctcgaatgtttagtgagaacaagcgtgagtacaatcgaagagtgaggga

SEQ ID NO: 257544 - DNA, 329 bp, Glycine max
gagaagcttcaataagtaagtatcaatggcttgcgaagaatcccagaacaagccccccagcgagcagtccactaccgaactcatcacgagcgcgaagctggtggcggaggcggcgcagtcggctctgaagagcgacagcgacaaagtggacaaggccaaggtggctgacgctgccggcgatcttctcgacgcggcggggaagtatggaaaacttgatgacaaacaaggcataaggcaatatgttgacaaggctgctgattatctgcataattaccagggtgataataccactgctccttcacagcctgcagagtctaaaggtgaagaaa

SEQ ID NO: 257545 - DNA, 311 bp, Glycine max
gacaagtgagtttggtggtcgagataactaggaacagggtgatgaaaatgaagggccttgttttcttcgttgctacaattttggtagcatgggaatgccatgcgtacgatatgttccctttccgaatgaacactggctatggtgcccgtactccggaggtgaaatgcgcaagttggaggcttgctgtggaagcacacaacatctttggctttgggaccattcctgaagagtgcgttgaagcaacaaaagaatacattcattgcgaacaatatagatcagactccaaaacagttaaccaacaagcttacttt

SEQ ID NO: 257546 - DNA, 313 bp, Glycine max
  unsure (1)..(313): unsure at all n locations
ggcacaagtgagtttgttgatcgagataactagaaacagngggatgaaaatgaaagtccctgttttcttcgttgctacaattttggtagcatggcaatgccatgcgtacgatatgttccctctccgaatgaacactggctatggtgcccgtactccggaggtgaaatgcgcaagttggaggcttgctgtggaagcacacaacatctttggctttgagaccattcctgaagagtgcgttgaagcaacaaaggaatacatccatggcgaacaatatagatcagactccaaaacagttaaccaacaagcttacttt

SEQ ID NO: 257547 - DNA, 292 bp, Glycine max
gatctggcagcagaagaacaagtagttgagaactaagaaggagaagcaaatggcttcctcaatgatctcttccccagctgttaccactgtcaaccgtgccggtgccggcatggttgctccattcactggcctcaagtccatggctggcttccccaccaggaagaccaacaatgacattacctccattgctagcaacggtggaagagtgcaatgcatgcaggtgtggccaccagttggcaagaagaagtttgagactctttcctacctgccagaccttgatgatgcacaattg

SEQ ID NO: 257548 - DNA, 280 bp, Glycine max
ggctcactctctagggtttttatttctctctgctctctgcatcgcttcaggttcttctgaaaagatgtctcgcgtgtatgttggtaacttggattcacgagtcaccgagagagatctcgaagacgaattccgtgttttcggagttgttcggagtgtttgggttgcacgtagaccacctggttatgcttttattgactttgatgatcgcagagatgcacaggatgctatccgtgaattggatggcaagaatggttggagggttgagctttctcacaactct

SEQ ID NO: 257549 - DNA, 315 bp, Glycine max
ggcaaaactaagtggaataagagctgaaaaaccctgataacaatgggaggaaaatgtccgcacaggaacgtgaagaagagaagatattctcacaagaccgtgcggcgaaccaaatttgagctgaaaagggacgacatggtttatgcgcagctcaacaaacccgatcaagagagaccccctttacccgtcgacgaagatttgcctgggatgggccagtactattgccttcactgcgatcggtactttgccaatataactgtgagggatgagcactttaagaccaaacgacacaagaagcgtttagaacaaatgatg

SEQ ID NO: 257550 - DNA, 331 bp, Glycine max
  unsure (1)..(331): unsure at all n locations
ttacaccatctccaaaacaaacccactaanatggctaaagttgtattcttactagagctggttcttccaacccttatcctcatgcctcaatatcttgctacttactacaaaccaattaataatccaccattgtacaatcctccattatacaatccaccattgtacaaaccacctgtttataaaccaaaaccacctttttacaaaccgaaaccacctatttacataccaccatataataatccaccatacaataaaccaccttattgaaaataccctccattataagacaacacccattcctaaagcaatcaatgaagtctattatctactt

SEQ ID NO: 257551 - DNA, 367 bp, Glycine max
ggagttcaaacaaatcaaagccatggccacctccaacttctgtattgttctctccgtctccctagccttctttttggtgctacttaccaaggcacactcgaccgataccgtttctttcaccttcaacaagttcaacccagtccaaccaaacattatgctccaaaaagatgctagtatttcatcctctggggtgttacaactcaccaaagttggcagcaacggcgtgcccacctcgggatctctcggtcgtgccctttacgctgccccaatccagatttgggacagcgaaaccggcaaggtagccagctgggctacatcctttaaattcaacattttcgcacccaacaaatcaaactcagctgacggg

SEQ ID NO: 257552 - DNA, 390 bp, Glycine max
gaatagaaatagaactgtcttttcatatagatatcccttcgacacaacataggtcatcgaaaggatctcgaagacccaccaacgcacgaaagccgggatctttcagaaaatggattcctattcgaagggtgcataaccgcatggataagctcacactaacccgtcaatttgggatccaattcggttccttaggaggtatcgggaaggaattttggaatgtaataatatcgattcatacagatacagaagaaagggttctctattgattcaaacgctctacccacgagatagggatagagaaagaggaaaaaaccgaggatttcacatagtacttttggtcgaaaaatcgatctgatttttttcgtacttttcgctcaatgatgaaatggg

SEQ ID NO: 257553 - DNA, 345 bp, Glycine max
  unsure (1)..(345): unsure at all n locations
gagggttattggacacattcttcagcgactgcgtttttggatcggaacctcttctgcggcgtagcaatgggacactccaacgtttggaactctcacccaaaaaactacggtcctggttctcgcacttgccgtgtgtgtgggaatccacatggactgatcaggaagtatggccttatgtgctgcaggcagtgcttccgtagcaatgccaaggaaattggcttcatcaagtatcgctaaaagagcagttgtcaactacggaccaatattgtgttctggcactaggatgttttgaggatgttatgtttgaagaaactngagactntctttttcatctaattaattatc

SEQ ID NO: 257554 - DNA, 245 bp, Glycine max
gctctgaaaagcaacactttatgccgaaagactttatgttgggatttgggaattagggttattcccgtggcgaaaatgattgagggggttttgaacgatcgattggggaaaaaagtgcccgcgaaatgcaaccacaattataccatctgcgacctgaaaaagcttgtggcggctcagactggcacaagagccgacaagatccgcatccagaagtggtgcaccatctacaaggatcacatcactct

SEQ ID NO: 257555 - DNA, 217 bp, Glycine max
ggcacaagtgagtttgttgatcgagataactagaaacagtgtgatgaaaatgaaggtccttgttttcttcgttgctacaattttggtagcatggcaatgccatgcgtacgatatgttccctcttcgaatgaacactggctatggtgcccgtactccggaggtgaaatgcgcaagttggaggcttgctgtggaagcacacaacatctttggctttgag

SEQ ID NO: 257556 - DNA, 314 bp, Glycine max; identical to SEQ ID NO: 257482

SEQ ID NO: 257557 - DNA, 323 bp, Glycine max
gatagaagaagcacaaagagaagcattagcactaggagcagcaacaactagtctcagctgaaatggcctcttcagtgatggcatctgtggccctcaaacctgcccctttcactgttgagaagtcctcagtgagaggccttccctctctctcaaggaactcttcttcattcagagttgtggccagtggcaagaagatcaagactgacaaaccttatggaattaatggtggcatggctttgagggatggaactgatgcatctggcaggaaaggaaagggaaagggtgtttaccagtttgtagacaaatacggtgctaatgtcgat

SEQ ID NO: 257558 - DNA, 410 bp, Glycine max
  unsure (1)..(410): unsure at all n locations
tgagggggcacaagtngagtttgttggatcgaggatggctagaaacagtgtgatgaagaatgaaggtcccttgttttctttcgttgctacaattnttggtagcatggcaatgccatgcgtacgatatgttccctctccgaatgaacactggctatggtgcccgtactccggaggtgaaatgcgcaagttggaggcttgctgtggaagcacacaacatctttggccttgagaccattcctgaagagtgcgttgaagcaacaaaggaatacatccatggcgaacaatatagatcagactccaaaacagttaaccaacaagcttacttttatgccagagacctcgaagtccatcccaaagacacatttgtgttcagtatagatggcaccgtactctcttatattncatactac

SEQ ID NO: 257559 - DNA, 359 bp, Glycine max
gcattatatttgagttcaaacaaatcaaagccatggccacctccaacttctctattgttctctccgtctccctagccttctttttggtgctacttaccaaggcacactcgaccgataccgtttctttcaccttcaacaagttcaacccagtccaaccaaacattatgctccaaaaagatgctagtatttcatcctctggggtgttacaactcaccaaagttggcagcaacggcgtgcccacctcgggatctctcggtcgtgccctttacgctgccccaatccagatttgggacagcgaaaccggcaaggtagccagctgggctacatcctttaaattcaacattttcgcacccaacaaa

SEQ ID NO: 257560 - DNA, 351 bp, Glycine max
ggaagcatagcagcatcatacaaagcattgaattcaaaaacttaagttcattccttgtgttttgctttcttcctcaaaaccaaacatgtcgaacacgtgcggcaactgcgactgcgctgacaagactagctgcaccaagggaaacagctatggtgttattgtagagactgagaagagttacatcgagactgttgtcatggatgttccagcagctgagcatgatgggaagtgcaagtgtggcactaactgcacttgcacggactgcacctgtggccattaaggaatatgtatgaaaatgtaattgccatgtgtttgggcatacaaatatccaaataatgtaatcttcgtatg

SEQ ID NO: 257561 - DNA, 316 bp, Glycine max
ggtctttctcagaagacaactcaaaaaaaccatggacgtgggtcagatgcagagacagtggatcgactacaccaaatccctcttccttgagggcttcctggatggtcagtttctgcaacttcagcagcttcaagatgagaacaaccctgactttgtggtcgaagttgtctctctcttctttgaagattctgaaaggcttctcaaagatctcacctttgccctagatcagaatggtgttgacttcaaaaaagttgatgctcatgtgcaccagttaaagggtagcagttcaagcataggcgcgcaaagggtgaaaaat

SEQ ID NO: 257562 - DNA, 243 bp, Glycine max
tcgaagacgacagaaagggacacccacacccaaacaaacccacttagatgggttcctttgggggcctcctaatgctggttcttgcggcccttatactcatgcctcaagggcttggttcttactacaaaccgatttagaagccaccactgtgcaagccctcagtgtgcaagccaccactgtgcaaaccaccgggttatatgccaaaaccaccgggtttcaagccgaaaccaccggttttcaagc

SEQ ID NO: 257563 - DNA, 365 bp, Glycine max
gagaaagagaagcattagcaaaagcaagaagaactagtgtaagcagaaatggcctcttcagtgatggcatctgtggccctcaaacctgcccctttcactgttgagaagtcctcagttaggggccttccctccctctcaaggaactcctcttcattcagagttgtggccagtggtggcaagaagatcaagactgacaagccttatggaattaatggtggcatggctttgagggaaggagttgatgcatctggcaggaaaggaaagggaaagggcgtttaccagtttgtagacaaatacggtgctaatgtcgatggttacagtcctatctacgacaccaaggactggtctccaaccggtgatgtcta

SEQ ID NO: 257564 - DNA, 391 bp, Glycine max
tggaaactaaattccaacaagttcctaccatagtctgaggaaagtgagtgagagaaagagatcgcagacacagagcagaatggcttctacccaatgtttcttgcaccaccatgctcttactacccctgccagtgccagatccccatcactacgcatcttggttagcaccaagcctaaccagcttgtttgcaaggcacagaaacaacaaacaccacaagaggatattgatgtcagcccaatctctcgccggttagctctaactgtgctcattggtgctgctgctgttggctccaaagtccaacctgctgatgcagcctatggtgaagctgccaatgtgtttggaaagccaaagacagacacagatttcctgccatacaatggagatggattc

SEQ ID NO: 257565 - DNA, 325 bp, Glycine max; identical to SEQ ID NO: 238978

SEQ ID NO: 257566 - DNA, 354 bp, Glycine max
gataccaaaaacagggcacaagccaagtgaaagtgagaaaaaataaaaatcaaagagcataatgtcagggatcattcacaagattggggagacccttcatgtgggagggcacaagaagaaggaggagcataagggtgagcaccatgctggagaatacaaaggggagcaccatggtgaacacagtagtgagtacaaaggagagcatcatggtgaacacaaagctggagagtaccatggtgagcacaagccagagcacaaagaggggttcctagacaaagtcaaggacaagatccatggtgagggcggcgccgccgagggcgagaagaagatgaaggagaagaagaagaaggagca

SEQ ID NO: 257567 - DNA, 309 bp, Glycine max
gacatcacgtcacatcgcagagagagagatccatcgatcaattaatttccaatggccgatcagctcaccgacgaacagatctctgagttcaaggaagcctttagcctcttcgacaaggacggcgatggttgtattaccaccaaggaacttgggactgtgatgcggtcgcttgggcagaacccaactgaggctgagctgcaggacatgataaatgaggttgatgctgatgggaatggtaccattgatttcccagaattcctcaatctcatggcgcgcaagatgaaagacactgattcagaggaagagctg

SEQ ID NO: 257568 - DNA, 294 bp, Glycine max
gaaaaagaaaaaaaagagtctaaagaaatataactaatattctttagaataatcaaaaagaatattaaattcaaataaattttagatagaaaaaagacttaaaaaggaggatttgaaatgcgagatctaaaaacatatctttccgtggcaccagtagtaagtactctatggttcggggctttggcgggtctcttgatagagatcaatcggttttttccagatgcattgatattcccttttttttcattctaggtattgacacggaaaggagtgaagaagattatagatccaatt

SEQ ID NO: 257569 - DNA, 369 bp, Glycine max
gaaactcaagtaggctatactaaggtgaaaaaggagagatggcagctgcaacatctagtgctgtgttaaacgggtttggatctcacttcttgtgtggaggaaagaggagccatgcccttcttgctgctagcattggagggaaagttggtgcttctgttagtcctaaaagagttattgtggcagttgctgctgcaccaaagaagtcatggatccccgctgtaaaaggtggtgggagtttcatagacccagaatggcttgatggctcgctaccaggtgactatggttttgacccactaggactaggaaaggacccggcattcctgaaatggtatagagaagctggactcattcatgggaggttggcaatgg

SEQ ID NO: 257570 - DNA, 325 bp, Glycine max
gacaaccctagctagcagtcgctcagcattgtgtgcccacaaagcagctccttttcctgttccgttgagagaagatgggattttgggggacgcgggtgatggagattgtgaagaagcatgattctggagggctggtttggaagagaatcaagctcaccaccacccgaaaagccaatgctaagaagcgtcttcttcgggtttggcagaatgaagctgtcctcaaagcctgttctgccactcccaacgaacctcaacctacaccagtggctacaccagtggctagttaagttcaagcccacccatctcaatttcattacttttcttt

SEQ ID NO: 257571 - DNA, 318 bp, Glycine max
tgggacaagtgagtttgttgatcgagataactaggaacagtgtgatgaaaatgaaggtccttgttttcttcgttgctacaattttggtagcatggcaatgccatgcgtacgatatgttccctctccgaatgaacactggctatggtgcccgtactccggaggtgaaatgcgcaagttggaggcttgctgtggaagcacacaacatctttggctttgagatcattcctgaagagtgcgttgaagcaacataggaatacatccatggcgaacaatatagatcagactccaaaacagttaaaccaacagcttactttttat

SEQ ID NO: 257572 - DNA, 261 bp, Glycine max
ggttctagtgtgtgattgtttgttgttgtgactcgttcttcttcttttgttgttctgtgtttgtgtttgttttttctctcacctgaaaatgtcttgctgcggtggtaactgtggttgctgaagctcctgcaagtgcggcaacggctgctgaggctgcaagatgtacccagacttgagctacactgagtcaaccaccaccgagaccttggtcatgggagtggcacctgttaaggctcaatttgagggtgctgaaatgggtgt

SEQ ID NO: 257573 - DNA, 378 bp, Glycine max
agaatatgaaaaagaaaaaaaagattctagagaaatataactaatattctttagaataatcaaaaagaatattaaattcaaataaattttagatagaaaaagacttaaaaaggaggatttgaaatgcgagatctaaaaacatatctttccgtggcaccagtagtaagtactctatggttcggggctttggcgggtctcttgatagagatcaatcgtttttttccagatgcattgatattcccttttttttcattctagttattgacacggaaaggggtgaagaagattatagatccaattaagtattaaatatatgtaattaatatgtaattaatctcctcttctttaattcggcttttaattccttctttttttaca

SEQ ID NO: 257574 - DNA, 364 bp, Glycine max
ttataccatagaagaagcacaaagagaagcattagcactaggagcagcaacaactagtctcagctgaaatggcctcttcagtgatggcatctgtggccctcaaacctgcccctttcactgttgagaagtcctcagtgagaggccttccctctctctcaaggaactcttcttcattcagagttgtggccagtggcaagaagatcaagactgacaagccttatggaattaatggtggcatggctttgagggaaggagttgatgcatctggcaggaaaggaaagggaaagggcgtttaccagtttgtagacaaatacggtgctaatgtcgatggttacagtcctatctacgacaccaaggactggtc

SEQ ID NO: 257575 - DNA, 398 bp, Glycine max
ggaaaaactctgaccgagtccgagaggcatcatggcgacactggattccgacgtgaccgtgtttccggccggcgaagcctctagcagcgccggtccttcttcgtccaccaagaagccgaagcgtttcgagatcaagaagtggaatgcggtttccctctgggcttgggatattgtcgtggataattgcgctatttgtcggaaccatatcatggatctctgtattgagtgccaggccaaccaggctagcgccactagcgaggaatgcactgtagcttggggagtttgtaaccatgcttttcacttccattgcataagccgatggctcaagacccgtcaagtatgtcctctagataatagcgagtgggaatttcagaaatacggtcactagaactttgatg

SEQ ID NO: 257576 - DNA, 386 bp, Glycine max
gaatatgaaaaagaaaaaaagattctaaagaaggataactaatattctttagaataatcaaaaagaatattaaattcaaataaattttagatagaaaaaagacttaaaaaggaggatttgaaatgcgagatctaaaaacatatctttccgtggcaccagtagtaagtactctatggttcggggctttggcgggtctcttgatagagatcaatcgtttttttccagatgcattgatattcccttttttttcattctagttattgacacggaaaggggtgaagaagattatagatccaattaagtattaaatatatggtaataatatgtaattaatctcctcttctttaatttcgtcttttaatttcttctttttttttacaaattgg

SEQ ID NO: 257577 - DNA, 319 bp, Glycine max
gatagatagctccttcaattagggtttttgtgagctggaagctacgatgggtaagggaacggggagtttcggtaagagaaggaacaagacccacaccctctgtgtgaggtgtggccgccgcagtttccacctccagaagagtcgttgcgccgcgtgcgctttccccgctgcgcgcaccaggaaatataactggagcgtgaaggccattaggagaaagaccaccggaactggaaggatgaggtacttgcgtaacgtgccccgtagatttaagagtggcttcagagacggtaccgaagctgcacccaggaagagaggagct

SEQ ID NO: 257578 - DNA, 294 bp, Glycine max
ggcacaagtgagtttgttgatcgagataacgagaaacagtgtgatgaaaatgaaggtccttgttttcttcgttgctacaattttggtagcatggcaatgccatgcgtacgatatgttccctctccgaatgaacactggctatggtgcccgtactccggaggtgaaatgcgcaagttggaggcttgctgtggaagcacacaacatctttggctttgagaccattcctgaagagtgcgttgaagcaacaaaggaatacatccatggcgaacaatatagatcagactccaaaacagt

SEQ ID NO: 257579 - DNA, 356 bp, Glycine max
gaacacagaacaaaaacaaagaaaaaaaacgcttagccaacacaaccatcatggccacctctgctattcagcaatcagcattcactggtcaaactgctctgaagcagctcaatgagttcgtccgcaagaccggtggcgccggcaaaagtcgcactaacatgcgccgcaccgtcaagaagtgctcctcagagcatttggtatggccctgaccgtcccaagtacttgggtccattctcggagcagattccatcatacctgaccggagaattccctggtgactacggatgggacactgctggattatcagctgacccggaaaccttcgccaggaaacccggagctggaagtgattcaca

SEQ ID NO: 257580 - DNA, 329 bp, Glycine max
gaaggtgcaagagtttgttgtgagctataggctagtttatcgtgaggagaatatgaagttgtttgttttctttgttgctgcagtagttttggtagcatggccatgccatggcgcaggctaccaaaggttccctctccgaatgaaaactggctatggtgagcgttcttcggaggtaaaatgcgcaagttttaagcttgctgtggaagcacacaacatccgagcctttaaaccattcctgaagagtgcgttgaaccaaccaaagactacattaatggcgaacaatttaaatcagactctaaaacaagtaaccaacaagctttcttttatgc

SEQ ID NO: 257581 - DNA, 393 bp, Glycine max
gcacaagtgagtttgttgatcgagataactaggagcaatgttattaaaatggagggtcttggtttcttcggtgctaccaatttggtagcattgcaatgccattcgtaccatatggtccctttttcaatggacacttgctatggtggccgtacctccgaagttgaatgcgccaagttgaagcttgctgtggaagcacacaacatctttggctttgagaccattcctgaagagtgcgttgaagcaacataggaatacatccatggcgaacaatatagatcagactccaaaacagttaaccaacaagcttacttttatgccagagacctcgaagtccatcccaaggacacatttgtgttcagtttagatggcaccctactctctaaatattcatac

SEQ ID NO: 257582 - DNA, 372 bp, Glycine max
aagaagaagaagaaggagcagggccatgagcatggccatgacagcagcagcagcagtgacagtgattaaactgctgcatcacctatatatttaaaaggtttatgggaccatagtagcgagggctgtgccttaatttctctctctctctctctctctctctctctctctctctctttttcctttttccctatcttgtgatctatttatgagtgagaaaaacaaaagtgagaaattgtgcgtgtatctggttgctaattcgagtgctattagtctgtggtttggttggtttgtaaccccgctacttgggttatgtttgattgtatattatcctagagaaataaaaattttaaattatcagtacgtattggtatt

SEQ ID NO: 257583 - DNA, 371 bp, Glycine max
gattgtatatcatttacaatttcagtctcgctctctctctgtctctctctctctagacttagattttgtgaatggctgaagtggaagagggacaggtcatcggcgtccacaccgttgatgagtggaagctgcaactccagaatgcaaaagactccaaaaaactgattgtggtggattttactgcttcctggtgtggtccatgccgttttatggccccagttcttgcagagattgcaaagaaaactcctgaattgatcttcctcaaagtggatgtggatgaagtgaggcctgttgctgaggaatattccattgaggccatgccaaccttcctcttcttgaaagatggcgagatcgtggacaaggtggttggt

SEQ ID NO: 257584 - DNA, 406 bp, Glycine max
  unsure (1)..(406): unsure at all n locations
ggtcttggtgtgaaccatagccatggctacttgatcaaccacattattgctatcatcactcatacctgcaagcatcccatcattcaactctggaaaccattcagtttttttgcttcaaaaccgttctttgaatcgacccaagaagagagttttcctccgtggtcaagcagccaagccccctattggtgtggaaattccaaaggtgcaatcttaatttaagcctntcgttctttgggtcactaaaactgcagaggtatggaactctagagcttgcatgattggaatcatntgagtttttattgtagagtttataataaacaagggcatacttcaagtgattggggttgatgttgcaaaggccttaataatcctctctgaacattatttttggctgtgctcgtaaatg

SEQ ID NO: 257585 - DNA, 321 bp, Glycine max
gccacaaaaaccaagtactacaagggaaggggaacttagctacaagctaaggaaggatcaaagagaatggctcaagcaatggcatcaatgactagcttacgtggttcctctcaggctgtgttggaaggtagccttggctccacacgcttgaatgtggggagtggaagcagggtggcctcagtcacacgtgcagggttcacagttagagcacagcaacaacaagtgaatggtggtgaggtacaaagtagccgtagggcagtgctttcacttgttgctgctggtttgaccactggctcttttgttcaaactgtgcttgctgat

SEQ ID NO: 257586 - DNA, 297 bp, Glycine max
gaagcacaacatctctatcgagtaaattagctatgaagcctaccctactattatccctttccttcctgcctctctttgctttcctggctctttcagaagatgttgaacaagttgtggacataagtggcaaccccattttcccaggtggcacatattacattatgccatcaacttggggcgctgccggtggtggattgaaactaggccggacaggaaactcaaacttgccagttactggtttgcaagattactcagaaatcttccgtggcacaccagtcaaattcagcatacctggga

SEQ ID NO: 257587 - DNA, 342 bp, Glycine max
gagggtttttgtcgttgcgactaagagttgcggcttcttccgccactcagcacttcgctccctctgtgcttcaccaaccatggccgaaatcgaagctaccgttccagatccctctcaaatcgacgtcaaacttttcaaccgctggagcttcgacgacgttgaggttactgatatgtctctggctgattacattggagtgtccccgtcaaagcatgctacatatgttcctcacactgctggtaggtactcagtgaagaggttcaagaaggcgcagtgccccattgttgagagactcaccaactctctcatgatgcacggaaagaacaatggaaagaagctcat

SEQ ID NO: 257588 - DNA, 305 bp, Glycine max
  unsure (1)..(305): unsure at all n locations
gatcttcccaatcttcatctccaacaagtggttctgtaaccatggcatccaccactctatcccctacaaccccttctcagctatgctcaagaaagaatgggattttcagtccctcacaggcacttcttgtgaagccagtgaagaagcagatgatggggaagagcaagggaatgagaattgcatgccaagccaccagcattcctgctgatagagtccctgacatgggcaaaagacagctcatgaatctgcttcttcttggtgccatttcactcccctttgcttgaatgctntattcctacacctac

SEQ ID NO: 257589 - DNA, 105 bp, Glycine max
gaagaaagctgctagcagagggaagttctacacttttttgtttggattgatcgagtgtactttttcttttcgagattggcttggtgtgcagtggaaagagggtac

SEQ ID NO: 257590 - DNA, 158 bp, Glycine max
tcaaacgaagaaaggcttatggtggataccgaggcacccagagacgaggaagggcgtagtaagcgacgaaatgcttcggggagttgaaaataagcgtagatccggggattcccgatataggtcaacctttcgaactgctgctgaatccacgggcaggt

SEQ ID NO: 257591 - DNA, 418 bp, Glycine max
gcagcagttcaacaagatactgaactacaagcggggtggaaggaagctgtggagaagggtcatggtgacttaaaagaaaagccttggtggcctaaaatgcagacaactgaagatctcattcaatcatgctctattatcgtttggacagcttcggctctccatgctgctgttaattttggacaatatccttatgggggcttaatcctgaaccgtccaactctagccagaaggtttatcccagctgaaggaaccccagagtatgatgagatggtgaagaatcctcaaaaggcttatctgagaacaatcacacccaagtttgagacccttattgatctttcagtgatagagatattgccaggcatgcttctgatgagatataccttggagagagggagacttcaaattggactactgataa

SEQ ID NO: 257592 - DNA, 335 bp, Glycine max
ggagggttattggacacattcttcagcgactgcgtttttggatcggaacctcttctgcggcgtagcaatgggacactccaacgtttggaactctcacccaaaaaactacggtcctggttctcgcacttgccgtgtgtgtgggaatccacatggactgatcaggaagtatggccttatgtgctgcaggcagtgcttccgtagcaatgccaaggaaattggcttcatcaagtatcgctaaaagagcagttgtcaactacggaccaatattgtgttctggcactaggatgttttgaggatgttatgtttgaagaaacttgagactttcttttttcatc

SEQ ID NO: 257593 - DNA, 210 bp, Glycine max
gagagcgaaagagatgtcgttggttgcaagcatgttcgggtgtggagtggtgatggcggcgtcgcaagcaatgggaattgtaaggagaagcgatggtcgattgacgatagtgtgatcgtctaggccgcagaagaaagctacggcgcatcacatgaagactcggccttggaagacgcatgcatgggatagaaaccggaagcccaccgtcta

SEQ ID NO: 257594 - DNA, 376 bp, Glycine max
  unsure (1)..(376): unsure at all n locations
ccaaggtatgatgccacagcttacagccaaatcatactgaatgcaagaccgcaaggtgtcaataacaatggccctccaaaactaagcatgtttggagtaacataccttcgtctatcagatgatctactgcaaaaatcaaattttaatatattcaaaaaatttgtgctaaagatgcatgcagatcatgattactgtgcatacnctcanaagtataatcacgccataacaccattgaagccatctgcaccaaagattcccatngaggttcttctggaagcaactaaaccaacactgncattcccctggctttcagagacagacatgaaagttgatggttgatttcccaatttgtgccatgaagtaataaataatctgc

SEQ ID NO: 257595 - DNA, 419 bp, Glycine max
agacgacagaagggggcacaagtgagtttgttgatcgagataactagaaagagtgtggtgaaaatgaaggtccttgttttcttcgttgctacaattttggtagcatggcaatgccatgcgtacgatatgttccctctccgaatggacactggctatggtgcccgtactccggaggtgaaatgcgcaagttggaggcttgctgtggaagcacacaacatctttggctttgagaccattcctgaagagtgcgttgaagcaacaaaggaatacatccatggcgaacaatatagatcagactccaaaacagttaaccaacaagcttacttttatgccagagacctcgaagtccatcccaaggacacatttgtgttcagtatagatggcaccgtactctctaatattccatactacaaaaaaca

SEQ ID NO: 257596 - DNA, 386 bp, Glycine max
ggcacaagtgagtttgttgatcgagataacgagaaacagtgtgatgaaaatgaaggtccttgttttcttcgttgctacaattttggtagcatggcaatgccatgcgtacgatatgttccctctccgaatgaacactggctatggcgcccgtactccggaggtgaaatgcgcaagttggaggcttgctgtggaagcacacaacatctttggctttgagaccattcctgaagagtgcgttgaagcaacaaaggaatacatccatggcgaacaatatagatcagactccaaaacagttaaccaacaagcttacttttatgccagagacctcgaagtccatcccaaggacacatttgtgttcagtatagatggcaccgtactctctaata

SEQ ID NO: 257597 - DNA, 398 bp, Glycine max
gatagaagaagcagaaagagaagcattagcagaagcaagaagaactagtctaagcagaaatggcctcttcagtgatggcatctgtggccctcaaacctgcccctttcactgttgagaagtcctcagttagaggccttccctccctctcaaggaactcctcttcattcagagttgtggccagtggtggcaagaagatcaagactgacaagccttatggaattaatggtggcatggctttgagggaaggagttgatgcatctggcaggaaaggaaagggaaagggcgtttaccagtttgtagacaaatacggtgctaatgtcgatggttacagtcctatctacgacaccaaggactggtctccaaccggtgatgtctacgctggcggtacgactggcttg

SEQ ID NO: 257598 - DNA, 385 bp, Glycine max
ggatatctggcagcagaagaacaagtagttgagaactaagaaggagaagcaaatggcttcctcaatgatctcttccccagctgttatcactgtcaaccgtgccggtgccggcatggttgctccattcactggcctcaagtccatggctggcttccccaccaggaagaccaacaatgacattacctccattgctagcaacggtggaagagtgcaatgcatgcaggtgtggccaccagttggcaagaagaagtttgagactctttcctacctgccagaccttgatgatgcacaattggcaaaggaagtagaataccttcttaggaagggatggattccttgcttggaattcgagttggagcacggtttcgtgtaccgtgagcacaac

SEQ ID NO: 257599 - DNA, 336 bp, Glycine max
gacaccaacaccaaaacaaacccactaagatggctcccgttgtatccttcctagtgctgcttcttgcagcccttatcctcatgcctcaagggcttgctacttactacaaaccaattaagaagccaccagtgtacaagcctccagtgtacaagccaccagtgtacaaaccaccggtttataagccaaaaccaccggtttacaagccgaaaccaccggtttacaagccaccatataagaagccaccatacaagaaaccaccttatggaaagtaccctccagtagaggacaacacccatgcctaaagcaagcaatgaggtctattatctacttaataaa

SEQ ID NO: 257600 - DNA, 311 bp, Glycine max
  unsure (1)..(311): unsure at all n locations
gacgctgcaaacgacgagggagaacgccgcgcggagctgcacggagtgaagagcctcaatgccgtcgtcaagaccaccgtcgaccgccagacggcgtgcaactgcctcaagtcggccgccagccaaatctccggcttcaacgccaacaacgccgactcgctccccggcaaatgcggagtctccatcccctacaagatcagcacctncaccaactgcactaccatcaaggtttgaagagaaagtcatggacgcatgaaaccggaaactactcactagtatatgagtagcattattaatattaagaataagat

SEQ ID NO: 257601 - DNA, 325 bp, Glycine max
gcacaagtgagtttgttgatcgagataactggagacagtgtgatgaaaatgaaggtccttgttttcttcgttgctacaattttggtagcatggcaatgccatgcgtacgatatgttccctcttcgaatgaacactggctatggtgcccgtactccggaggtgaaatgcgcaagttggaggcttgctgtggaagcacacaacatctttggctttgagaccattcctgaagagtgcgttgaagcaacaaaggaatacatccatggcgaacaatatagatcagactccaaaacagttaaccaacaagcttacttttatgccagagacc

SEQ ID NO: 257602 - DNA, 380 bp, Glycine max
gatctggcagcagaagaacaagtagttgagaactaagaaggagaagcaaatggcttcctcaatgatctcttccccagctgttaccactgtcaaccgtgccggtgccggcatggttgctccattcactggcctcaagtccatggctggcttccccaccagaaagaccaacaatgacattacctccattgctagcaacggtggaagagtgcaatgcatgcaggtgtggccaccagttggcaagaagaagtttgagactctttcctacctgccagaccttgatgatgcacaattggcaaaggaagtagaataccttcttaggaaaggatggattccttgcttggaaatcgagttggaacacggtttcgtgtaccgtgagcaca

SEQ ID NO: 257603 - DNA, 318 bp, Glycine max
gacaagcaacattgctaaccattctctgcagttttcagttacaaagcatttcattgttttacaatatacaacactacaatggctgcttcaacaatggctctctcttcatcatcattggctggccaagctatcaagcttgcccccttcacccctcagcttggtgttggaagggttagcatgagaaaaacagcctccaagactgttacctcaggaagcccatggtacggcccagatcgtgtcaagtacttgtgcccattctctggtgagcccccatcctacctcactggtgaattcccaggtgactatggttgggacact

SEQ ID NO: 257604 - DNA, 306 bp, Glycine max
cactcggtcctgttgtgtgtgcgcagaataaaatttctcatcgacgatggcgaataccttacaacgcgcccttcgcgccaccatggcccggccgttctccaccggcgcattggccgaaattaagcgaggcgagatcggaatggtttctggaattcctgaagaacaccttcgtaggagggttctaatttactctcctgctagaactgcatctcaacaaggatctggaaaggttggaagatggaagatcaacttcttatcaacccaaaagtgggaaaatccactgatgggctggacattcactgggga

SEQ ID NO: 257605 - DNA, 357 bp, Glycine max
gaagaagaagaaggagcatggccatgagcatggccatgacagcagcagcagcagtgacagtgattaaactgctgcatcacctatatatttaaaaggtttatgggaccatagtagcgagggctgtgccttaatttctctctctctctctctctctctctctctctctctctctttttcctttttccctatcttgtgatctatttatgagtgagaagaacaaaagtgagaaattgtgcgtgtatctggctgctaattcgagtgctattagtctgtggtttggttggtttgtaaccccgctacttgggttatgtttgattgtatattatcctagagaaataaaaattttaaattatcacg

SEQ ID NO: 257606 - DNA, 365 bp, Glycine max
ggtgcacaagtgagtttgttgatcgagatagctagaaacagtgtgatgaaaatgaaagtccttgttttcttcgttgctacaattttggtagcatggcaatgccatgcgtacgatatgttccctctccgaatgaacactggctacggtgcccgtactccggaggtgaaatgcgcaagttggaggcttgctgtggaagcacacaacatctttggctttgagaccattcctgaagagtgcgttgaagcaacaaaggaatacatccatggcgaacaatatagatcagactccaaaacagttaaccaacaagcttacttttatgccagagacctcgaagtccatcccaaggacacatttgtgttcagtat

SEQ ID NO: 257607 - DNA, 352 bp, Glycine max
ggcacaagtgaggttgttggtcgagataactagaaacagtgtgatgaaaatgaaggtccttgttttcttcgttgctacaattttggtagcatggcaatgccatgcgtacgatatgttccctctccgaatgaacactggctatggtgcccgtactccggaggtgaaatgcgcaagttggaggcttgctgtggaagcacacaacatctttggctttgagaccattcctgaagagtgcgttgaagcaacaaaggaatacatccatggcgaacaatatagatcagactccaaaacagttaaccaacaagcttacttttatgccagagacctcgaagtccattccaaggacacattt

SEQ ID NO: 257608 - DNA, 367 bp, Glycine max
ggcagttcaattccaatatattccattctggctgtgtatttccctacctctcccttcaagatgcagatcttcgtcaagaccctcaccggcaagaccatcacccttgaggtggaaagctctgacaccatcgacaacgtcaaggccaagatccaggacaaggaaggaatccccccggaccagcaacgtctcattttcgccggaaagcaacttgaggacggccgtacccttgctgactacaacattcagaaggagagtactcttcacctcgtcctccgtctccgtggtggcatgcagatcttcgttaagacactcaccggcaagaccataaccctagaggttgaaagctccgacaccatcgataacgtca

SEQ ID NO: 257609 - DNA, 400 bp, Glycine max
agaatatgaaaaagaaaaaaaagattctaaggagatataactaatattctttagaataatcaaaaagaatattaaattcaaataaattttagatagaaaaaagacttaaaaaggaggatttgaaatgcgagatctaaaaacatatctttccgtggcaccagtagtaagtactctatggttcggggctttggcgggtctcttgatagagatcaatcgtttttttccagatgcattgatattccctttttttcattctagttattgacacggaaaggggtgaagaagattatagatccaattaagtattaaatatatggtattaatatgtaattaatctcctcttctttatttcggcttttaattcttcttttttttacaattggaataggattaggttacc

SEQ ID NO: 257610 - DNA, 118 bp, Glycine max
  unsure (1)..(118): unsure at all n locations
ggcacaagtgagtttgttgatcgagataactagaaacagtgtgatgaaaatgaaggttcttnngtttcttcgtgctacaattttggtagcatgggcatgccatgcgtacgatatgttc

SEQ ID NO: 257611 - DNA, 292 bp, Glycine max
acaagcaacattgctaaccattctctgcagtggtcagttacaaagcatttcattgttttacaatatacaacactacaatggctgcttcaacaatggctctctcttcatcatcattggctggccaagctatcaagcttgcccccttcacccctcagcttggtgttggaagggttagtatgagaaaaacagcctccaagactgttaccttaggaagcccatggtacggcccagatcgtgtcaagtacttgggcccattctctggtgagcccccatcctaacttactggtgaaat

SEQ ID NO: 257612 - DNA, 400 bp, Glycine max
agaatatgaaaaagaaaaaaaagattctaaagaggtataactaatattctttagaataatcaaaaagaatattaaattcaaataaattttagatagaaaaaagacttaaaaaggaggatttgaaatgcgagatctaaaaacatatctttccgtggcaccagtagtaagtactctatggttcggggctttggcgggtctcttgatagagatcaatcgtttttttccagatgcattgatattcccttttttttcattctagttattgacacggaaaggggtgaagaagattatagatccaattaagtattaaatatatgtaattaatatgtaattaaactgctcttctttatttcggcttttatttcttcttttttttaacaatgtatagaataaggtagcc

SEQ ID NO: 257613 - DNA, 258 bp, Glycine max
gagcgccaatgtttttttcagaggagtttggtcttgtcatcaaaagaggttatcttatagtaagaaatcgatgtcttactccattttaaggaacataacaagagaacaatagcctgacaaagggtttagccctaaaatcgaatccatcattgattcgagatattgataaggtgaatactcatttctcgtcaatgctaagcataatgcgggtattgggacctaaaaaagattatcttttcttcctatcttatgaacttt

SEQ ID NO: 257614 - DNA, 380 bp, Glycine max
gagaagcttcaatgagtaagtatcaatggcttccgaagaatcccagaacaagccccccagcgagcagtccactaccgaactcatcacgagcgcgaagctggtggcggaggcggcgcagtcggctctgaagagcgacagcgacaaagtggacaaggccaaggtggctgacgctgccggcgatcttctcgacgcggcggggaagtatggaaaacttgatgacaaacaaggcatagggcaatatgttgacaaggctgctgattatctgcataattaccagggtgataataccactgctccttcacagcctgcagagtctaaaggtgaagaaagtggtggtgggttaggtggtcttgcaaacttggctggaggcttcttcaaaa

SEQ ID NO: 257615 - DNA, 409 bp, Glycine max
ggatcaaatactcagaactgttcggttgttctggaaatttttcttctctcagccatctctctctctctctctgcgtccatggagttttggggtgttgaggtgaaaagtggagaatctctcaaggttgatccgggagatgacaagattatccacctttcaaatgcatgcctgggggatgtcactaaggataaagaaggtctaccagtagccctgtatgtcaagtttggtaaccaaaagcttgtacttggaacgctttcttctgaagcttttcctcagatatcttatgatttggtatttgagaaggaatttgagctatcccataactggaaacatggaagtgtcttctttaccggatttaaagctcaatctcagtcagagtctgataatgatgaagattctgatgattttg

SEQ ID NO: 257616 - DNA, 382 bp, Glycine max
gatgagagcaaaggatagaggatagagtatagagagcaacataggaagtgaagtgtaggtaagtgagagccatgaagggttatgagccccgttcaagctcttcatgtgcagcttgcaagctattgaagagaagatgcataccaaattgtatttttgcaccttactttaggtctgatgagtgcaagaagtttgcaaaggtgcacaaggtgtttggagccagcaatgtgagcaagattctgattgaagtgccagaagagcagagagaggacacggtgaattctctggcttatgaggctgaggcaaggctgagagacccggtttatggatgcattggtgccatagctctgttgcaaaggaagatggtggagcttcaacatgatct

SEQ ID NO: 257617 - DNA, 303 bp, Glycine max
tttaaggttatgagagcaaaggatagacgatgtagtatggaaagcaacatagggggtgaattgtaggtaagtgagagccatgaagggttatgagccccgttcaagctcttcatgtgcagcttgcaagctatctatgagaaccatgcataccaaattgtatttctgcaccttactttatgtctgatgagtgcacgacgtttgtagatgtgcacaccgtgtttgaagccagcaatgtgagccagattcttacttacgtgccagaagagcttagagaggacacggagaattctctggcttatgatg

SEQ ID NO: 257618 - DNA, 344 bp, Glycine max
  unsure (1)..(344): unsure at all n locations
aggggcttatatttgcagtaacaacagctaacgtgcaagttccaaggcagagaaaacaataatggccaccacctcggagagggatatggagaacaagagtgatcaagaagaactgaagcatcttgggtttgtgaagattgcggcaattaaagcctttgcgtgtgtgtcgaatctctacgacttcgcaaagcaaaactcgggacctttgagatctgctgttggaaccgtggaagacactgtaaccaccgntctgggtcccgtctaccaccaattcaaggcttgtcccaaccaccttcttctttttgccgacaacaatgtggatgaagctgctcacaaattcgatg

SEQ ID NO: 257619 - DNA, 406 bp, Glycine max
gaaggtgcaagagtttgttgtgagctataagcgagtttatcgtgaggagaatatgaagttgtttgttttctttgttgctgcagtagttttggtagcatggccatgccatggcgcaggctaccaaaggttccctctccgaatgaaaactggctatggtgagcgttcttcggaggtaaaatgcgcaagttttaggcttgctgtggaagcacacaacatccgagcctttaaaaccattcctgaagagtgcgttgaaccaacaaaggactacattaatggcgaacaatttagatcagactctaaaacaggtaaccaacaagctttcttttatgctagtgaacgcgaagttcatcacaacgacttatttatattcggcatagataacaccgtactctctaatattccatac

SEQ ID NO: 257620 - DNA, 280 bp, Glycine max
gacaaaaccaaattataatatttcatgctggtctttcactcttgtcacattccacaaaaacgaagtactactacaagggaagaaaaacttagctactaaggaaggatcaaagagaatggctcaagcaatggcatcaatggctggcttgcgtggttcctctcaggctgtgttggaaggtagccttcaagtgagtggctccacacgcttgaatgtggggagtggaagcagggtggcctcagtcacacgtgcaaggttcacagttagagcacaacaacaagtg

SEQ ID NO: 257621 - DNA, 386 bp, Glycine max
ggagaagaagaagccttcagcacttgaagttgaaaccgtgctgatcctcatcatgggaaccatttttcctcctcactctctctctccactcctcaacatcaaaccttcaccctcaagaattctcttggctccctctccccaacccaagtcaaattctctcttttgctccaaacccattgtttcaagtctcagaaagaaccaaacttcatctcccaaaccttcatcgggcacaagctggttagctcatgctcaacagggcctagcagctttggctatctccttggcacccaactttagcccagttttgtttagtggcaatgcattggcatctgagtttgatgtgcttaatgagggtccacccaaagattcttatgtgtttgatgatg

SEQ ID NO: 257622 - DNA, 384 bp, Glycine max
gaacacagaactgtagttgcagaagcttcagataagtaagtatcaatggcttccgaagaatcccagaacaagccccccagcgagcagtccactaccgaactcatcacgagcgcgaagctggtggcgggggcggcgcagtcggctctgaagagcgacagcgacaaagtggacaaggccaaggtggctgacgctgccggcgatcttctcgacgcggcggggaagtatggaaaacttgatgacaaacaaggcatagggcagtatgttgacaaggctgctgattatctgcataattaccagggtgataataccactgctccttcacagcctgcagagtctaaaggtgaagaaagtggtggtgggttaggtggtcttgcaaacttggct

SEQ ID NO: 257623 - DNA, 390 bp, Glycine max
gaaaaagtgaacctcaaaatcagcctctaatatttttctcactgtctctccagagaacttgatagagagatggcagctgcaacatctggtgccgtgttaaatgggttgggatcttccttcttgagtggaggaaacaggagccaaacccttctggcctctgctattggaggcaaagttggtgctgctgttactgttaatcccagaagactcattgtggtagctgctgctgcaccaaagaagtcatggctccctggtgttagaggtggtggcaatctcgtcgacccagaatggcttgatggatcgctaccaggtgactatggttttgatccactaggccttgggaaggacccagcattcctcaaatggtacagagaagctgagctcattcat

SEQ ID NO: 257624 - DNA, 294 bp, Glycine max
ggtgcacaagtgagtttgttgatcgagataactagaaacagtgtgatgaaaatgaaggtccttgttttcttcgttgctacaattttggtagcatggcaatgccatgcgtacgatatgttccctctccgaatgaacactggctatggtgcccgtactccggaggtgaaatgcgcaagttggaggcttgctgtggaagcacacaacatctttggctttgagaccattcctgaagagtgcgttgaagcaacaaaggaatacatccatggcgaacaatatagatcagactgcaaaaca

SEQ ID NO: 257625 - DNA, 399 bp, Glycine max
gacaccaacaccaaaacaaacccactaagggggcttcctttgtatccttcctagtgctgcttcttgcagcccttatcctcatgcctcaagggcttgctacttactacaaaccaattaagaagccaccagtgtacaagcctccagtgtacaagccaccagtgtacaaaccaccggtttataagccaaaaccaccggtttacaagccgaaaccaccggtttacaagccaccatataagaagccaccatacaagaaaccgccttatggaaagtaccctccagtagaggacaacacccatgcctaaagcaagcaattgaggctattatctacttaataattagaggaactgccttgggtttctaacttgtgattacaacttcgaaccatgcatattcttgact

SEQ ID NO: 257626 - DNA, 354 bp, Glycine max
  unsure (1)..(354): unsure at all n locations
gattccacacacaagaagactcctcaatcatccatagacatggccaccgtcacttctgcagcagtttctattccctcattcactggcctcaaggcaagcgcaggcaaagtgagtgccgccgcagttaaagtctcagctccccaagccacaaggttctgcggcatcaaggcttccctcaaagacgttggagtcgctgttgtggccactgctgcgagcgcagttctagctagcaacgccatggccattgaagtgttactgggcactgatgacgggtctctggttttctcttccaactctttctacgtggccccctggggaaaaatcgtgttcaagaacacgcangcttccccacaa

SEQ ID NO: 257627 - DNA, 380 bp, Glycine max
  unsure (1)..(380): unsure at all n locations
ggaacctttgcattctattcattcaagattcagcaagtgcgttttggaagcagagaccgaaatacttcgagatggcccgtacaaagcaaactgctcgtaagtcaactggaggaaaagctcccaggaagcagcttgcaaccaaggctgcacgtaagtctgcaccaacaactggtggtgtgaagaagcctcatcgttatcgccctggaactgttgctcttcgtgagattaggaaacaccagaagagcactgagctcctaatcaggaagcttcctttccagaggttggttcgtgaaattggcccagatttcaagactgatctgcgnttccagagccatgctgtgcttgcttggcagaagctgctgaggcatacctgttgggct

SEQ ID NO: 257628 - DNA, 355 bp, Glycine max
  unsure (1)..(355): unsure at all n locations
gccgctgagctccctttctcctcggtccacagagacaaaatgtaagacaggtgccaacagttcatcacgaaagaaaggactagctgagccgagatcactaactaaaacgaatttaatactaatcgaaaatactaatagaatagaaatagaactgtcttttcatatagatatcccttcaacacaacataggtcatcgaaaggatctcgaagacccaccaacgcacgaaagccgggatctttcagaaaatggattcctattcgaagggtgcataaccgcatggataagctcacactaacccgtcaatttgggatccaattcggttccttaggaggtatcgggaaggaattntggaat

SEQ ID NO: 257629 - DNA, 314 bp, Glycine max
ggcacaagtgagtttgttgatcgagataacgtagaaacagtgtgatgaaaatgaaggtccttgttttcttcgttgctacaattttggtagcatggcaatgccatgcgtacgatatgttccctctccgaatgaacactggctatggtgcccgtactccggaggtgaaatgcgcaagttggaggcttgctgtggaagcacacaacatctttggctttgagaccattcctggaagagtgcgttgaagcaacaaaggaatacatccatggcgaacaatatagatcagactccaaaacagttaaccaacaagcttactt

SEQ ID NO: 257630 - DNA, 367 bp, Glycine max
gaccacaccgagtcgcagaaaaagaaaaaagcgatcatagtttcacttcggccttatccagtttagggtttcggttctctaccctatctttcacgtatcgaaaccttaaatttacgatcagacctgagcaatctggttggtagaacctttggtcttagtgagtcaagctttatgtctgaattagacgatcaaattcctactgccttcgatccttttgctgatgcaaatgctgatgactcgggtgctgggtcaaaggagtatgtgcatattcgtgtacagcagcgaaatggtaggaaaagcctgacaaccgttcagggattgaaaaaggaattcagctataacaagatacttaaagacgtcaagaaag

SEQ ID NO: 257631 - DNA, 397 bp, Glycine max
ggcacaagtgagtttgttgatcgagatcactagaaacagtgtgatgaaaatgaaggtccttgttttcttcgttgctacaattttggtagcatggcaatgccatgcgtacgatatgttccctctccgaatgaacactggctatggcgcccgtactccggaggtgaaatgcgcatgttgcacgcttgctgtggtagcacacaacatctttggcttttacaccattcctgaagagtgcgttgacgcacccatggaatacatccatggcgatcaatctagatcagactccattacaggtgaccaacgagcttacttttatgccacagacctggaaggccatcctagggacacatttgcagttagcatagatcgctccgtactctctaatattgcatactac

SEQ ID NO: 257632 - DNA, 406 bp, Glycine max
gagcagaagaacaagtagttgagaactaagaaggagaagcaaatggcttcctcaatgatctcttccccagctgttaccactgtcaaccgtgccggtgccggcatggttgctccattcactggcctcaagtccatggctggcttccccaccaggaagaccaacaatgacattacctccattgctagcaacggtggaagagtgcaatgcatgcaggtgtggccaccagttggcaagaagaagtttgagactctttcctacctgccagaccttgatgatgcacaattggcaaaggaagtagaataccttcttaggaagggatggattccttgcttggaattcgagttggagcacggtttcgtgtaccgtgagcacaacaggtcaccaggatactacgatggacgctact

SEQ ID NO: 257633 - DNA, 419 bp, Glycine max
  unsure (1)..(419): unsure at all n locations
gaaggtgcaagagtttgttgtgagctataagctagtttatcgtgaggagaatatgaagttgtttgttttctttgttgctgcagtagttttggtagcatggccatgccatggcgcaggctaccaaaggttccctctccgaatgaaaactggctatggtgagcgttcttcggaggtaaaatgcgcaagttttaggcttgctgtggaagcacacaacatccgagcctttaaaaccattcctgaagagtgcgttgaaccaacaaaggactacattaatggcgaacaatttagatcagactctaaaacagttaaccaacaagctntcttttatgctagtgaacgcgaagtccatcacaacgacatatttatattcggcatagataacaccgtactctctaatatcccatactatgaaaaacatg

SEQ ID NO: 257634 - DNA, 423 bp, Glycine max
gatatctggcagcagaaaaacaagtagttgagaactaagaagaaggaaatggcttcctcaatgatctcctccccagctgttaccaccgtcaaccgtgccggtgccggcatggttgctccattcaccggcctcaaatccatggctggcttccccacgaggaagaccaacaatgacattacctccattgctagcaacggtggaagagtacaatgcatgcaggtgtggccaccaattggcaagaagaagttcgagactctttcctacttgccagacctcgatgatgcccaattggcaaaggaagtcgaataccttctaaggaaaggatggattccttgcttggaattcgagttggagcacggtttcgtgtaccgtgagcacaacaggtcacctggatactatgatggacgctactggaccatgtgg

SEQ ID NO: 257635 - DNA, 375 bp, Glycine max
gacgatgagtcgatttgataactaagatattggtattcgtgatattgatccaatttgatatcatcgaaatccaatttataccattgttgaattaattatcgatgaaagatttatcatctctatgggattaaatcccgaattttttattggaaatttaagagaaataaaacataataaagattatggaagtaaatattcttgcatttattgctactgcactgtttattctagttcctactgcttttttacttataatttacgtaaaaacggtaagtcaaagtgactaatttcactgaaatctgacttcttcatttttatcaatgtaatcaatgattaaaaaaaatgaaaaaggttttcaatttttggtcttagtat

SEQ ID NO: 257636 - DNA, 419 bp, Glycine max
ggagtttgttgatcgagataactagagacagggtgatgaaaatgaaggtccttgttttcttcgttgctacaattttggtagcatggcaatgccatgcgtacgatatgttccctctccgaatgaacactggctatggtgcccgtactccggaggtgaaatgcgcaagttggaggcttgctgtggaagcacacaacatctttggctttgagaccattcctgaagagtgcgttgaagcaacagaggaatacatccatggcgaacaatatagatcagactccaaaacagttaaccaacaagcttacttttatgccagagacctcgaagtccatcccaaggacacatttgtgttcagtatagatggcaccgtactctctaatattccatactacaaaaaacatggatatggggtggagaaattt

SEQ ID NO: 257637 - DNA, 416 bp, Glycine max
gaacgtaaaaaaaaaagaataataaatagaaaaaggagcatgttgattatatagaaagtaaagggcaacaatcatttttgtttaccatgggtaaggacaccatcgctgacataataacctatataagaaatgctgacatgaataaaaaaggaatggttcaaataccatttactaacataacagaaaacattgtaaaaatacttttacgcgagggttttgttgaaaacgtcagaaaacatagagaaaacgacaaatattttttagttttaactctacggtatagaagaaatagaaaaggatcatataaaagttttttaaatttaaaacggatcagtacacccggtctacgaatatattctaattatcaacgaatccctcgaatttaaggggcatggggatggtaatctttcaacttc

SEQ ID NO: 257638 - DNA, 419 bp, Glycine max
gaacgatggctatccgaatcaactccttgacggtctcttccgctttacctatggagttaagaggtggaatttcgggcctctgggttggctcgcagatgatgccccaaatgcgaaaggaggctcgtggacgacgagtttggaggcgaagaaaattgataaaaaaggatgaatatatgcaccccaaaatggagcgcattccttttatggaggagcaggtaaggatggtaagggaacagggaaagctcttgacgatggacatagagaggttaatgttgttagaagataatcggtttgattttgtgaatgagatagcagctgaggccaattcttatgttgagaacaacagggatgagtatggaagtgagaagaaggccattcttcatgttttgagcaatcgaatgaatgatactggaatttac

SEQ ID NO: 257639 - DNA, 258 bp, Glycine max
taatttgggaattattgctcccatcgccattggtttcattgtcggcgctaacattttgttgggtggggccttctctggagcggccatgaaccccgctgtgacatttgggcctgctgtcgtgagctggacctggaccaaccactggatctactgggccgggcctctcatcggtggtggaatcgctggccttgttcacgaggttgtctttatcagccacacccacgagcagcttcccaccactgactactagaggggggg

SEQ ID NO: 257640 - DNA, 396 bp, Glycine max
gacaccaacaccaaaacaaacccactaagatggcttcctttgtatccttcctagtgctacttcttgcagcccttatcctcatgcctcaagggcttgctacttactacaaaccaattaagaagccaccagtgtacaagcctccagtgtacaagccaccagtgtacaaaccaccggtttataagccaaaaccaccggtttacaagccgaaaccaccggtttacaagccaccatataagaagccaccatacaagaaaccaccttatggaaagtaccctccagtagaagacaacacccatgcctaaagcaagcaatgaagtctattatctacttaataaataagaagaactgctttgtgttttctagcattgtgaattacaacttcgtagcaatgcatat

SEQ ID NO: 257641 - DNA, 358 bp, Glycine max
cccacgcgtccggagacgacagaaggggaagaagaagaaggagcatggccatgagcatggccatgacagcagcagcagcagtgacagtgattaaactgctgcatcacctatatatttaaaaggtttatgggaccatagtagcgagggctgtgccttaatttctctctctctctctctctctctctctctctctctctttttcctttttccctatcttgtgatctatttatgagtgagaaaaacaaaagtgagaaattgtgcgtgaatctggttgctaattcgagtgctattagtctgtggtttggttggtttgtgaccccgctacttgggttatgtttgattgtatattatcctagag

SEQ ID NO: 257642 - DNA, 372 bp, Glycine max
tctctctcaccctcatatccatcatcttgcacacccatgtagcgttctctgagcaatcaataatcaagttacccacagaccaaccaagggttgagaaactgacccacttgcattatttctaccacgacatcttatggggcaagaacattacggtggagaaaatcatcgagccatcagcgagcgatgttcgtgaaacaactgggtttggaaccactttcatgatggacaatgttttgaccgacggtccaaggctgagctcgaagcacgttgggaaggctcacgggctgattggctaggcctctttggaggaccgcggaatggtgatgctcattaacttggctttcagtgacggtgaatatgctggcagcactc

SEQ ID NO: 257643 - DNA, 414 bp, Glycine max
  unsure (1)..(414): unsure at all n locations
ggggtagcagtgaggataaaaaatggctatggccacagctgtcgtgtgtcctcagaacatcaccggagccatcgtgagctcacctagcaagaccaagaagagagtggtacacgtgagaggcataaattcatttgggggactgaaggctagcaatggtgttgtctctttggggattcctatgagcactgagaagtgctttgctaaggttgtgagctcagtgaaagcagctacatcaaatgggaaaggaaaaggaggggctctttcttccacgtgcaacgctgctggtgagatattcacgattgctgctatcatcaatggacttgttcttgtcggggttgctgttggctttgtgctcttgcgagttgaagcatgggtcgaggagtccgaggcagagtgaanattcaatcagataag

SEQ ID NO: 257644 - DNA, 420 bp, Glycine max
  unsure (1)..(420): unsure at all n locations
gcacaccaacaccaaaacaaacccactaagatggcttcctttgtatccttcctagtgctgcttcttgcagcccttatcctcatgcctcaagggcttgctacttactacaaaccaattaagaagccaccagtgtacaagcctccagtgtacaagccaccagtgtacaaaccaccggtttataagccaaaaccaccggtttacaagccgaaaccaccggtttacaagccaccatataagaagccaccatacaagaaaccaccttatggaaagtaccctccagtagaagacaacacccatgcctaaagcaagcaatgaagtctattatctacttaataaataagaggaactgctttgtgttttctagcattgtgatttacaacttcgtagcaatgcatattctngactcttgcatgcacttca

SEQ ID NO: 257645 - DNA, 417 bp, Glycine max
  unsure (1)..(417): unsure at all n locations
ggcacaccaacaccaaaacaaacccactaagatggcttcctttgtatccttcctagtgctgcttcttgcagcccttatcctcatgcctcaagggcttgctacttactacaaaccaattaagaagccaccagtgtacaagcctccagtgtacaagccaccagtgtacaaaccaccggtttataagccaaaaccaccggtttacaagccgaaaccaccggtttacaagccaccatataagaagccaccatacaagaaaccgccttatggaaagtaccctccagtagaggacaacacccatgcctaaagcaagcaatgaggtctattatctacttaataaataagaggaactgctntgtgttttctagcattgtgatttacaacttcgtagcaatgcatattctngactcttgcatgcac

SEQ ID NO: 257646 - DNA, 411 bp, Glycine max
ggtgccagtcttacccctcttaataccaattttctagggtttatacaattttcgatggcttcttcagatgttgagtaccgttgctttgtcggtgggctcgcttgggccactgacgaccaagctctcgagagagccttctctcagtacggcgaaatcgttgaaacgaagattatcaacgatcgtgagactggaagatccaggggttttggatttgtgaccttcgcctcggagcagtccatgaaagacgccatcgaagggatgaacggccaaaaccttgacggccgtaacatcactgttaacgaagctcagtcccgtggtggctatggcggtggcagagaccgtggttatggtggtggtggtgaccgtggttactctcgtggtggtgacggtggtgatgggggctggagaaac

SEQ ID NO: 257647 - DNA, 389 bp, Glycine max
  unsure (1)..(389): unsure at all n locations
gacagcatgtcaataatctattttatactatacccacattttgataattatttttctagttgataagccatggctactcgaggaaagcttgaggttgacgttgatctcaagtctaacgcagacaagtactggcaaacccttaggaactccactgaaatattccccaaggccttccccaatgattacaaaagcattgaggttcttgagggtgatggcaaatcacctggttctatccgccacataagttatggtgaaggttcaccacttgtgaagtcatcctttgagaagatcgaggctgttgatgaagaaaagaaggtagtgtcgtacactatcattgatggagaactcctncagcactacaaaacattcaagggagacatttctgtgac

SEQ ID NO: 257648 - DNA, 403 bp, Glycine max
gacagaaagagaaagcaatggcttctttggcaagcttagctgttgttcaaccatctactgtcaagggccttgctggaactaagctctctttcaagccctctcgccagagcttcagacccaagaatttcaggagtggtgccgttgtagcaaagtacggtgacaagagtgtgtactttgatttggaggatctaggcaacactactggtcagtgggacttgtacggctccgatgcaccttcaccctacaaccctcttcagagcaagttcttcgagacattcgccgctccattcacaaagaggggattgttactaaagtttttgatcctgggaggtggttccaccctggcatacttgagtgccacagcgtcaggtgacattctaccaatcaagaagggcccacaact

SEQ ID NO: 257649 - DNA, 411 bp, Glycine max
ggcacaagtgagtttgttgatcgagataactagaagcagtgtgatgaaaatgaaggtccttgttttcttcgttgctacaattttggtagcatggcaatgccatgcgtacgatatgttccctctccgaatgaacactggctatggtgcccgtactccggaggtgaaatgcgcaagttggaggcttgctgtgggagcacacaacatctttggctttgagaccattcctgaagagtgcgttgaagcaacaaaggaatacatccatggcgaacaatatagatcagactccaaaacagttaaccaacaagcttacttttatgccagagacctcgaagtccatcccaaggacacatttgtgttcagtatagatggcaccgtactctctaatattccatactacaaaaaacatggata

SEQ ID NO: 257650 - DNA, 420 bp, Glycine max
ggcattggggcatgcttttaatttcctagatctgccaaacaaattgtagcataagtcccatggccaaagagactagtgttgtttatctatatcccagcaaatcacaagtttggggtgagaattttgatcataaaaaacttgtaataacaacactagctgctaatggaaagaaggaggagagtaatggagcacctaatgacacatatcctgcgtttcccgggtggtatgctgatgtttcctggccaggagaagcacacacatataaaatagaaaagattctattccacgggaaatcagaattccaagagcttcttgtatttgagtcttctagacaagggcaggttgcaattcttgatgggcatatccagctgacagaaaacgatgaatttgcttaccaagagatgctcactcaccttgcac

SEQ ID NO: 257651 - DNA, 349 bp, Glycine max
ttgggccctgaaaacatttcatcttcgtattgatgtcggaaaagggtcggccacttcccaaatttggtgaatgggatgtcaatgatccagcctcagctgaggggttcacagtgatttttaataaggccagggatgagaaaaagacaggtggcaacccagagtcaccaggaaagactgctactgatcctcatagcaaacctgcagtagagcctggcaaaactcagactaaaaaatggctttgctgcatgcaaaacccttttgccgaatcatagcatagcaatggttgctcctgtgaaaagcctgaacagaagaaccaatgttatgtgtaactagcgtcacagtattttct

SEQ ID NO: 257652 - DNA, 330 bp, Glycine max
  unsure (1)..(330): unsure at all n locations
gagtctctgaatctgaaattgcaatgcttcacccggcggcactgatagcatcgtgtccttatccttatccttatcctgggcggcatgagttaccctcagcctcagcgtcagcgacagccagagtcgctgttccaatgccaaatctgagaggcaaagcggttgttggtgttggttccagaatgataaggtgcatggctaaccccagaagagttcaaatggtggccaagcaaattaggagagagctttctcatatgcttctcaccgataaagtcttgcagtatgctgntcttcccgaagcctncttaggagccgaccgttacctctcttctc

SEQ ID NO: 257653 - DNA, 420 bp, Glycine max
ggcattggggcatgcttttaatttcctagatctgccaaacaaattgtagcataagtcccatggccaaagagactagtgttgtttatctatatcccagcaaatcacaagtttggggtgagaattttgatcataaaaaacttgtaataacaacactagctgctaatggaaagaaggaggagagtaatggagcacctaatgacacatatcctgcgtttcccgggtggtatgctgatgtttcctggccaggagaagcacacacatataaaatagaaaagattctattccacgggaaatcagaattccaagagcttcttgtatttgagtcttctagacaaggcaaggttgcaattcttgatgggcatatccagctgacagaaaacgatgaatttgcttaccaagagatgctcactcaccttgcac

SEQ ID NO: 257654 - DNA, 173 bp, Glycine max
aaaaacaattcagttataggtcaaaacaaagaaattgctttctcaatgatcttctacccaacttttaccaccttaaaccgtgccctttcccgcattgtttctccattcacctgtcttaaattcatcgcttgctttcccaccaggaagacccacaattacattacctccatttc

SEQ ID NO: 257655 - DNA, 394 bp, Glycine max
  unsure (1)..(394): unsure at all n locations
ggcacaagtgagtttgttgatcgagataactagaaacagtgtgatgaaaatgaaggtccttgttttcttcgttgctacaattttggtagcatggcaatgccatgcgtacgatatgttccctctccgaatgaacactggctatggtgcccgtactccggaagtgaaatgcgcaagttggaggcttgctgtggaagcacacaacatctttggctttgagaccattcctgaagagtgcgttgaagcaacanaggaatacatccatggcgaacaatatagatcagaccccaaaacagttaaccaacaagcttacttttatgccagagacctcgaagtccatcccaaggacacatttgtgttcagtataagatgcaccgtactctctaatatttcatac

SEQ ID NO: 257656 - DNA, 365 bp, Glycine max
gaactccagtcgaatatgaagcgcctggatacaagttatgccttggaatggaagagaattccgaatcagctttgtctacgaacaatgaagctaagaacttataactaggaactgaaaaatttacgtttaataaaattagttattaaagtaactgaaaaatataaaataatggaaaaccattaaaatcataattaattaatgtaagataaatttaaaattggataaatttatcaaggttaaaaaatattaaaaaattggaaattatcagattaaaaatatttacttaaaataatattttaaaatacctaaaaactattaaaaaaatttattattcaaatatttaatggaatttttcaactatattt

SEQ ID NO: 257657 - DNA, 411 bp, Glycine max
  unsure (1)..(411): unsure at all n locations
ggggttattggacacattcttcagcgactgcgtttttggatcggaacctcttctgcggcgtagcaatgggacactccaacgtttggaactctcacccaaaaaactacggtcctggttctcgcacttgccgtgtgtgtgggaatccacatggactgatcaggaagtatggccttatgtgctgcaagcagtgcttccgtagcaatgccaaggaaattggcttcatcaagtatcgctaaaagagcagttgtcaactacggaccaatattgtgttctggcactaggatgttttgaggatgttatgtttgaagaaacttgagactttcttttttcatctaattaattatcagacgtaatttgtggtactaagaatactnttatataaattggttttgaaaaaaaaaattnnnattt

SEQ ID NO: 257658 - DNA, 413 bp, Glycine max
gacacactgctattcctcttaagcttgctactgagtttccacactgcataccttaggtcttccgaattcgaagttaatttgcaagatggctaaggaaaaggctcagatcaacattgtggtggttggtcatgtggaccctgaggaggcaaccaccattaacgagctgaagaagcctgttgtggagaaagaagctccagggcatgccatatgagggcatgcacgtacggcctcggaggggaaccagaaaattatattaacaaaataatctggaaccctaatgtatcagtgtcatcatcagtgtgtagtttaagctagctatgctatggttacgttctttgagatgagagtcttgatgaacagtaccattctgatgtattgctttccttggaagttaatgcatgcttcttatcttc

SEQ ID NO: 257659 - DNA, 426 bp, Glycine max
gacgatctgctttctctgaattgtgaaaatgtcgctcggagaaactgcttgttcatacgcagctctcatccttcatgaagatggaattagtgtaactgctgacaagatcagcaccttgttaaaaactgcaaaggttccagtagactcttattggccaaccttgtttgctaaacttgctgagaagaaaaatcttggcgatttgatagcaaatgcggcaggcggtggtgcaccagttgctgctgcagctgccccagttgctgctgctgctggtggtgctgctgccgcagctccagctgctgaggagaaaaagaaggaagaaccggaagaagagagtgatgatgatatgggattcggcttgtttgattagggacattctcaatgatttggttaaattttgtggggtcttaacctttaagggtactctgg

SEQ ID NO: 257660 - DNA, 428 bp, Glycine max
  unsure (1)..(428): unsure at all n locations
gataccaaaaacaaaacacaagccaagtgaaagtgagaaaaaataaaaatcaaagagcataatgtcagggatcattcacaagattggggagacccttcatgtgggagggcacaagaaggaggaggagcataagggtgagcaccatgctggagaatacaaaggggagcaccatggtgaacacagtagtgagtacaaaggagagcatcatggtgaacacaaagctggagagtaccatggtgagcacaagccagagcacatagaggggttcctagacaaagtcaaggacaagatccatggtgagggcggcgccgncgagggcgagaagaagaagaaggagaagaagaagaaagagcatggccatgagcatggccatgacagcagcagcaacagtgacagtgattaaactgctgcatcacctatatatttaa

SEQ ID NO: 257661 - DNA, 389 bp, Glycine max
cgggttgaaccacgcggtcctacggcttgagaaaactacacattgggatatctggcagcagaaaaacaactaggtgagagctaagaataatgaaatggcttcctcaatgatctcctacccagctgataccaccgtcaaccgtgccgttgccggcatggttgctccattcaccggactcaaatccatggctggcttccccactatgaagaccaacaatgacattacctccattgctagcaacagttgaagagtacaatgcatgcaggtgtggccaccaattgtcaagaagaagttcgagactctttcctacttgccagaccttgatgatgcccaattggcaaatgaagtcgaataccttctaaagaaatgatggattccttgcttggaat

SEQ ID NO: 257662 - DNA, 396 bp, Glycine max
ggactatgagtcgatttgataactaaggtattggtattcgtgatattgatccaatttgatatcatcgaaatccaatttataccattgttgaattaattatcgatgaaagatttatcatctctatgggattaaatcccgaattttttattggaaatttaagagaaataaaacataataaagattatggaagtaaatattcttgcatttattgctactgcactggttattctagttcctactgcttttttacttataatttacgtaaaaacggttagtcaaagtgactaatttcactgaaatctgacttcttcatttttatcaatgtaatcaatgattaaaaaaaatgaaaaaggttttcaatttttggtcttagtataaaaaaaaaaaactttatct

SEQ ID NO: 257663 - DNA, 419 bp, Glycine max
  unsure (1)..(419): unsure at all n locations
ggttctagtgtgtgattgtttgttgttgtaactcgttcttcttcttttgttgttctgtgtttgtgtttgttttttctctcacctgaaaatgtcttgctgcggtggtaactgtggttgcggaagctcctgcaagtgcggcaacggctgcggaggctgcaagatgtacccagacttgagctacactgagtcaaccaccaccgagaccttggtcatgggagtggcacctgttaaggctcaatttgagggtgctgaaatgggtgtgcccgctgagaacgatggctgcaaatgtggaccaaactgctcctgcaaccnctgcacttgcaagtgangtgttgggagagcaagcttcaagcagagatagcccttaattaggaataatgataactattaatgtgtagctaaaacttatgaatatggct

SEQ ID NO: 257664 - DNA, 419 bp, Glycine max
gatccaatccaattgaattctccagagagaagaagaaacttaatcgatcatcacttcacttcactaatacatcatggcagacgagacccagaacaagtatgagagctctgaggttgaagtccaggatcgtggtgtttttgactttctcggtaagaaaaaggatgaagaagacaagcctcatcctcaggaggaggtcatcgccaccgagtttcaaaaagtcactgtctcagaccaaggagagaacaagcacagcctcttagaaaagcttcaccgatctgacagcagctctagctcttcaagtgaggaggaaggagaagatggagagaaaaggaagaagaagaagaaggaaaagaaagggctgaaagagaagatcgaggagaaaatagagggtgatcatcatcatcacaaggatgaggaca

SEQ ID NO: 257665 - DNA, 348 bp, Glycine max
gatctggcagcagaaaaacaagtagttgagaactaagaagaaggaaatggcttcctcaatgatctcctccccagctgttaccaccgtcaaccgtgccggtgccggcatggttgctccattcaccggcctcaaatccatggctggcttccccacgaggaagaccaacaatgacattacctccattgctagcaacggtggaagagtacaatgcatgcaggtgtggccaccaattggcaagaagaagttcgagactctttcctacttgccagacctcgatgatgcccaattggcaaaggaagtccgataccttctaaggaaaggatggattccttgcttggaattcgagtt

SEQ ID NO: 257666 - DNA, 397 bp, Glycine max
gatctggcagcagaagaacaagtagttgagaactaagaaggagaagcaaatggcttcctcaatgatctcttccccagctgttaccactgtcaaccgtgccggtgccggcatggttgctccattcactggcctcaagtccatggctggcttccccaccagaaagaccaacaatgacattacctccattgctagcaacggtggaagagtgcaatgcatgcaggtgtggccaccagttggcaagaagaagtttgagactctttcctacctgccagaccttgatgatgcacaattggcaaaggaagtagaataccttcttaggaagggatggattccttgcttggaattcgagttggagcacggtttcgtgtaccgtgagcacaacaggtcaccaggatac

SEQ ID NO: 257667 - DNA, 412 bp, Glycine max
ggtgtgagtttattaacatatacaaattctctgtgttgtgttgtgtacttgtgttaattgtgttgttgttgtaggaaatttaagtgaagagagaatgatgatgaagtctgctgtgtgtgcattggtgcttgtggcactggttgtggttgaagtggggcccatggctgaggctgcggtgacttgcaacccaacacagttgactccttgtcttccggcaattaattcgggttctgcaccttcgagtgcttgttgccagaagctgaaggagcaaaagtcatgcttctgtggctacctcaaaaaccctagcttgaagcagtatgttaactctcctaatgccaaaaaaaccagtagttcttggggtattgcctatccaacttgttaagcacctcttatatatatatataaaaagtgt

SEQ ID NO: 257668 - DNA, 416 bp, Glycine max
tttgggttcgctaaaaaaaaagaataattaagagaaaggggagcatgttgattatataggaagtaaagggcaacaatcatttttgtttaccatgggtaaggacaccatcgcttacataataacctatataagaaatgctgacatgaataaaaaaagaatggttcaaataccatttactaacataacagaaaacattgtaaaaatacttttaccccaaggttttgttgaaaacgtcagaaaacatatagaaaacgacaaatattttttagttttaactctacggtatagaagaaatataaaaggatcatataaaagttttttaaatttaaaacggatcagtacacccggtctacgaatatattctaattatcaacgaatccctcgaatttaaggggcatggggattgtaattctttc

SEQ ID NO: 257669 - DNA, 425 bp, Glycine max
  unsure (1)..(425): unsure at all n locations
gggacgacagaagggcaacataggtcatcgaaaggatctcgaagacccaccaacgcacgaaagccgggatctttcagaaaatggattcctattcgaagggtgcataaccgcatggataagctcacactaacccgtcaatttgggatccaattcggttccttaggaggtatcgggaaggaattttggaatgtaataatatcgattcatacagatacagaagaaagggttctctattgattcaaacgctctacctacgagatagggatagagaaagaggaaaaaaccgaggattccacatagtacttttggtcgaaaaatcgatctgatttttttcgtacttttcgctcaatgatgaaatgggtcagattctacaggaccaaaccttgtgggagttaaggaatgatggaagaaaaaaaannnnnntt

SEQ ID NO: 257670 - DNA, 262 bp, Glycine max
gagcaatactaatagtagaacttattcgcgatctcgttctgttctgtacctgcacccagccgcagcagcaagtgatcgaagcgaaaagagagtaatcagcagagaaattcatcgtcgtagttatgggtaaagttcacggatcacttgcacgtgccggtaaggttagaggccaaaccccaaaagtggccaagcaggataagaagaagaagccacgtggccgcgctcacaagaggatgcagtataatcgccgattcgtcaccgc

SEQ ID NO: 257671 - DNA, 353 bp, Glycine max
gatctggcagcagaagaacaagtagttgagaactaagaaggagaagcaaatggcttcctcaatgatctcttccccagctgttaccactgtcaaccgtgccggtgccggcatggttgctccattcactggcctcaagtccatggctggcttccccaccagaaagaccaacaatgacattacctccattgctagcaacggtggaagagtgcaatgcatgcaggtgtggccaccagttggcaagaagaagtttgagactctttcctacctgccagaccttgatgatgcacaattggcaaaggaagtagaataccttcttaggaagggatggattccttgcttggaattcgagttgg

SEQ ID NO: 257672 - DNA, 326 bp, Glycine max
  unsure (1)..(326): unsure at all n locations
gactccaagaacaacaccacaggatctagaaaagccattccatcttcaccaccaaaaagaaaataatggcaatggccagtgcaacaactccagccacaatcactgttgtggccatctccagtgttgccagcacaaaaagaagggagaggaatgtgcacttcatcagaggtttgaattcctttggagggttgaaggctcagaacagtgtgacatcactaggtcttcctgtgtgcactgaacagtgttttgcaaaggtggtgagctcattgaaatatcaatcatcatctaagggcagaggtggaggtgctgnctcttcaacatgcaat

SEQ ID NO: 257673 - DNA, 86 bp, Glycine max
tcaaacgaagaaaggcttatggtggatacctaggcacccagagacgaggaagggtgtagtaagcgacgaaatgcttcggggagttg

SEQ ID NO: 257674 - DNA, 355 bp, Glycine max
gaccacattccaaaacacaaacacatacattgtagtatcacttttgtctcggaatttgttcttttgagttatggcaagcttaaaggttgcatgtgtggttttgatgtgcatggctgtgatgagtgcaccaatgatggtgcaagccgtgtcatgcaatgatgtttctgtgaacctagcaccgtgcctatcttacctgatgcagggtggagatgttccagaatcgtgctgtagcggagtgaggaacattctgggttctgccagcaccacctttgacaaacaaaccgtgtgcaaatgtcttcagcaagctgctaataactatggcatcaacgacgaatacgctcaagcacttcccggc

SEQ ID NO: 257675 - DNA, 328 bp, Glycine max
gcagcatctcctcaaacacaaacatccctcttgatttgaaggttgttttgtgcttatagataaaagttctgccaaatcaagaggggttttcagatcatagtgtgtgtgtgtgtgttaaacaatggctaagttctttgctgctatgatcttggcactcattgccatttccatgcttcaaacagtggttatggctgctaatgagcaaggaggccacttgtatgacaacaagagcaaatatggaagtgggagtgtcaagagacaccaatgcccatcacaatgctcgaggagatgtagccagacccaataccacaagccctgcatgtttttc

SEQ ID NO: 257676 - DNA, 419 bp, Glycine max
  unsure (1)..(419): unsure at all n locations
atagaagaagcagaaagagaagcattagcaaaagcaagaagaactagtctaagcagaaatggcctcttcagtgatggcatctgtggccctcaaacctgcccctttcactgttgagaagtcctcagttagaggccttccctccctctcaaggaactcctcttcattcagagttgtggccagtggtggcaagaagatcaagactgacaagccttatggaattaatggtggcatggctttgagggagggagttgatgcatctggcaggaaaggaaagggaaagggcgtttaccagtttgtagacaaatacggtgctaatgtcgatggttacagtcctatctacgacaccaaggactggtctncaaccggtgatggctacgctggcggtacaactggcttggctatctgggctgggactctac

SEQ ID NO: 257677 - DNA, 362 bp, Glycine max
ctgccgggtggacccaaccttctacggctgtataagaccacctttggttccgctgctagagacgacagaacggggatttgtgaattattgctcccatcgccattggtttcattgtcgtcgctaacattttgttgggtggggccttctctggagcggccatgaaccccgctgtgacatttgggcctgctgtcgtgagcttgacctggaccaaccactggatctactgggccgtgcctctcatcggtggtggaatcgctggccttgttcaccaagttgtctttatcaaccacacccaccaacagctttccaacactgactactataaggggggaaattgaaatttaaaaaaattaattatctat

SEQ ID NO: 257678 - DNA, 333 bp, Glycine max
gacatgaacacctaaacaaacccactaagatagcttcctttgtatccttcctagtgctacttcttgcagaccttatactcatgcctcaaaggcttgctacttactacaaaccaattaagaagccaccaatgtacaagccttcaatgtacaaaccaacaaatgtcaaaccaccggtttataaaccaaaatcaccggtttacaagcctaaaccaaccgtttacaaaccaccatatatgaagcccccatactagaaaccaccttattgaaagtaccctccactacaagacaacacccatgcctaaagcaagctatgacgtctattatctacttaat

SEQ ID NO: 257679 - DNA, 422 bp, Glycine max
ggatgccacaatggttgtccctcttaggcactgtcttgttttctctctcaccctcatatccatcatcttccacacccatggagcgttctctgagcaatcaataatcaagttacccacagaccaaccaagggtagagaaactgacccacttgcattttttctaccacgacatcttagggggcaagaacatcacggtggtgaaaatcatcgagccatcagcgagcgaggttcgtgaagcaactgggtttggaaccactttcatgatggacaatgttttgaccgagggtccagggctgagctcgaagcacgttgggagggctcaggggctgtttggcttggcctctttggaggaccgtggaatggtgatgctcattaacttggctttcagtgagggtgagtatgctggcagcactctcagcatgc

SEQ ID NO: 257680 - DNA, 348 bp, Glycine max
gatagcagcatcatacaaagcattgaattcaaaaactaagttcatttcttgtgctttgctttattcctcaaaaccaaacatgtcgaacacatgcggcaactgtgactgcgctgacaagactaactgcaccaagggaaacagctatggtgttatagtagagactgagaagagctacatcgagactgttgacatggatgttccaacagctgagcatgatgggaagtgcaagtgtggcactaactgcacttgcacggactgcacttgtggccattaaggaatatgtatgaaaatgtaattgccatgtgtttggcaatacaaatcttcaaataatggtatcttcgtattgat

SEQ ID NO: 257681 - DNA, 357 bp, Glycine max
gaccacaccgagtcgcagaaaaagaaaaaagcgatcatagtttcacttcggccttatccagtttagggtttcggttctctaccctatctttcacgtatcgaaaccttaaatttacgatcaggtctgagcaatctggttggtagaacctttggtcttagtgagtcaagttttatgtctgaattagacgatcaaattcctactgccttcgatccttttgctgatgcaaatgctgatgactcgggtgctgggtcaaaggagtatgtgcatattcgtgtacagcagcgaaatggtaggaaaagcctgacaaccgttcaaggattgaaaaaaggaattcagctataacaagatacttaaaga

SEQ ID NO: 257682 - DNA, 290 bp, Glycine max
gatgagagcaaaggatagaggatagagtatagagagcaacataggaagtgaagtgtaggtaagtgagagccatgaagggttatgagccccgttcaagctcttcatgtgcagcttgcaagctattgaagagaagatgcataccaaattgtatttttgcaccttactttaggtctgatgagtgcaagaagtttgcaaaggtgcacaaggtgtttggagccagcaatgtgagcaagattctgattgaagtgccagaagagcagagagaggacacggtgaattctctggcttat

SEQ ID NO: 257683 - DNA, 337 bp, Glycine max
ctaatgaacagatacaagagtttgtttgtactcgcttcaaggctgagtttcccgtttttgacaaggttgatgtgaatggtgacaaagctgctccactgtacaagtatctaaaatcaagcaaaggtggactctttggggatggtatcaaatggaacttctccaagttccttgttgataaagagggaaatgtggttgatcgctatgcacccacaacttctcctctgagcattgagaaggacttgctgaagttgttggatgcatgaatgaagctatgaatgactggagctgccaataaatgaattgtgattagaatataaattatgaataagaaatgtat

SEQ ID NO: 257684 - DNA, 408 bp, Glycine max
gggcagcagaagaacaagtagttgagaactaagaaggagaagcaaatggcttcctcaatgatctcttccccagctgttaccactgtcaaccgtgccggtgccggcatggttgctccattcactggcctcaagtccatggctggcttccccaccaggaagaccaacaatgacattacctccattgctagcaacggtggaagagtgcaatgcatgcaggtgtggccgccagttggcaagaagaagtttgagactctttcctacctgccagaccttgatgatgcacaattggcaaaggaagtagaataccttcttaggaagggatggattccttgcttggaattcgagttggagcacgggttcgtgtaccgtgagcacaacaggtcaccaggatactacgatgggcgctac

SEQ ID NO: 257685 - DNA, 408 bp, Glycine max
ggggtagcagtgaggataaaaaatggctatggcgacagctgtcgtgtgtcctcagaacatcaccggagccatcgtgagctcacctagcaagaccaagaagagagtggtacacgtgagaggcataaattcatttgggggactgaaggctagcaatggtgttgtctctttggggattcctatgagcactgagaagtgctttgctaaagttgtgagctcagtgaaagcagctacatcaaatgggaaaggaaaaggaggggctctttcttccacgtgcaacgctgctggtgagatattcacgattgctgctatcatcaatggacttgttcttgtcggggttgctgatggctttgtgctcttgcgagttgaagcatgggtcgaggagtccgaggcagagtgaaaattcaatca

SEQ ID NO: 257686 - DNA, 373 bp, Glycine max
ggtagcgcagagaaagaactagaactagggtttcatctttgccatcagtaaacgacaatgatttacgacgttaactctcctcttttccgatccttcctcagccagaagggaggctcctctgataagaggaaatcggacgaacagaagccaaaagagcagaaacccaaagccagcgagaacaaacctataatgactgagtgataacagctgagctgcattcagttgtagaatgaaaataggtggtaggtattgtatttggtgctaaactaagatctttttggctgtgttctgaagtatatgccggcgatgttggtctttggtattgtaatggtttgattttggatatggttataacgaaaacttattatggaca

SEQ ID NO: 257687 - DNA, 211 bp, Glycine max
gatcgcattttcactcgtctttggttctggtgggtagaggtgctgtgaagtcggtgtataacactcaacctaagatgcacaacgaggaaagacagatcaccgagctttacattcctaacaagtgctctgccacaaaccgattgattaccgataatgaccatgctccgggtcaagttaacattgggcttatccatgacaatggcttttacaa

SEQ ID NO: 257688 - DNA, 274 bp, Glycine max
gagaaagagaaagcaatggcttctctggcaagcttagctgttgttcaaccatctactgtcaagggccttgctggaactaagctctctttcaagccctctcgccagagcttcagacccaagaatttcaggagtggtgccgttgtagcaaagtacggtgacaagagtgtgtactttgatttggaggatctaggcaacactactggtcagtgggacttgtacggctccgatgcaccttcaccctacaaccctcttcagagcaagttcttcgagacat

SEQ ID NO: 257689 - DNA, 414 bp, Glycine max
ttatttgggaattattgctcccatcgccattggtttcattgtcggcgctaacattttgttgggtggggccttctctggagcggccatgaaccccgctgtgacatttgggcctgctgtcgtgagctggacctggaccaaccactggatctactgggccgggcctctcatcggtggtggaatcgctggccttgtttacgaggttgtctttatcagccacacccacgagcagcttcccaccactgactactagagggggggaaatgaaaataaaaaaaaaaaaaattgtgtattattgaatttctctggaatcttcttctgtgtatggttttccttccttgtgttttcttcctaattcactttcgagggttgtacttgttcctttcgtcttaaaaacttggatgggtgatgatcaaa

SEQ ID NO: 257690 - DNA, 436 bp, Glycine max
gaccgcattagcactcgtctttggttctggtttatagatctctgtgaagtcgctttataacactcaacctaagatgcagaacgaggaaggacagatcaccgagctttacattcctaggaagtgctctgccacaaaccgattgattaccgctaaggaccatgcttcggttcaggttaacattgggcatgtggatgagaatggcgtctacaatggccatttctccacttttgctctctgcggcttcatccgtgctcagggtgatgctgacagtgccctagatcgcttgtggcagaagaagaaagttgaagttaagcaacagtagacacccatgatagtttgttactttgctatgtattaatttctactctggctagagatatttgagtactatgattggcggcttgagcaaatactcattctaaattttcgtgggatt

SEQ ID NO: 257691 - DNA, 450 bp, Glycine max
gaaagaaaagagaaatggcaacagaaacaaaagtgcaagaattaggtggcatcaccgatgtgcatggagctgccaacagcgtcgagatcaacaatctcgcccgctttgctgtagaggaacaaaacaaaagagagaattcagttctggagtttgtgagggtgattagtgcaaagcagcaagtggttgctggagtgaattactacataacattggaagcaaaagatggtttgattaaaaatgagtatgaagcgaaggtttgggtgagggaatggttgaactccaaagagttgctagaattcaagccagtcaatgtttctagcacaccaataggtggcattaccgatgtgactgcgaatagcctcgagatcgacattctcgctcgttttgctgttgatcaacacaacaaaaaagagaatgcatatctggagtttgtgggggtgattaaggcaa

SEQ ID NO: 257692 - DNA, 252 bp, Glycine max
gggtgtagcgcagagaaagaactagaactagggtttcatctttgccatcagtaaacgacaatgatttacgacgttaactctcctcttttcccgaatccttcctcagccaaaagggaggctcctctgataagaggaaatcggacgaacagaagccaaaagagcagaaacccaaagccagcgagaacaaacctataatgactgagtgataacagctaagctgcattcagttgtagaatgaaaataggtggtagg

SEQ ID NO: 257693 - DNA, 428 bp, Glycine max
tttggggttcaccaacaccaaaacaaacccagtaagagggcttcctttgtatccttcctagtgctgcttcttgcagcccttatcctcatgcctcaagggcttgctacttactacaaaccaattaagaagccaccagtgtacaagcctccagtgtacaagccaccagtgtacaaaccaccggtttataagccaaaaccaccggtttacaagccgaaaccaccggtttacaagccaccatataagaagccaccatacaagaaaccgccttatggaaagtaccctccagtagaggacaacacccatgcctaaagcaagcaatgaggtctattatctacttaataaataagaggaactgctttgtgttttctagcattgtgatttacaacttcgtagcaatgcatattcttgactcttgcatgcacttcaat

SEQ ID NO: 257694 - DNA, 425 bp, Glycine max
tgtatggggttccaggcttacccctcttaatacggaaattgtacggcttatacaaatatcgatggcttattcagatgttgagtaccgttgctttgtcggcgggctcgcttgggccactgacgaccaagctctcgagagagccttctctcagtacggcgaaatcgttgaaacgaagattatcaacgatcgtgagactggaagatccacgggttttggatttgtgaccttcgcctcggagcagtccatgaaagacgccatcgaagggatgaacggccaaaaccttgacggccgtaacatcactgttaacgaagctcagtcccgtggtggctatggcggtggcagagaccgtggttatggtggtggtggtgaccgtggttactctcgtggtggtgacggtggtgatgggggctggagaaactagggct

SEQ ID NO: 257695 - DNA, 351 bp, Glycine max
gacaactgaacaagataagctatccatagcagccaaagaaatgaagagtaccttgttcgccctctttctactttgtgccctcacctcttacctaccttcagccaccgctggtgatgtggtcgacactgatggtaatcctgttgaaaatggaggcacatactttgtgttgccaactataatattaaacggcggtggaatagaatatgccacatttggaaatgaaacttgccctgtcactgttgcgcaatctcgcgatcagttctgcaagggctttccgataaccatttcatccccagcccgaatccgtcacatcagcgaaggccttagtttgaacattgggttcactttcgc

SEQ ID NO: 257696 - DNA, 359 bp, Glycine max
gaatcccaatcccatttcaacctctctttcttttcttctcgcagagcgaaatcccaatcccacacaaatggcatgctcagccacctctgcttctctcttctccgcaaaccccacacctctcttctctcccaaatcctccctctccctccctaacaactctctccacctcaaccctctccccacgcgcccttctctctccctcacgcgcccctcgcacactcgccgctccttcgtcgtcaaagccttctccggcgagcttccgctagttggaaacaccgcaccggatttcgaagcagaggctgtgtttgaccaggagtttatcaacgtgaaactatctgattacattgggaagaaatatg

SEQ ID NO: 257697 - DNA, 355 bp, Glycine max
  unsure (1)..(355): unsure at all n locations
ggataaattgaagtatagattgaacacacacatagaaacccaacaacaagaatgaagaaggtgattctaaccctcttcttcaatatcattttatctctcctctccctctcccacgcctccgtggtggatttctgcgtagcagactacacaggccccaatggccccgcagggtactcatgcaagagcccagcaaaggtcacggtggacgacttcgtctactccggccttggcaccgncggcaacacctcaaacatcatcaaagccgcggtgacgccggcgttcgacgcgcaattccccggcgtcaacgggcttggaatctccattgcacgcctagacctagcagcccgtggagtca

SEQ ID NO: 257698 - DNA, 435 bp, Glycine max
gattcagattacattgcaaaaatggcatcattcaccatgacagcttccatccttggcagcccagccgtcaccaaccggtcggcagtagcaacgcagaggagatcactcgtagtgaatgctgccaaagctgttgaagcagaaaaggtcagttatgacaatgacatggatggtagcaatggaaggaggaacttgatgttcgccgcggcggcggctgctgtttgctctgttgctgggatggcagtggcagatgagcctaaaccaggaaccccagaagccaagaaaaagtatgctccgatttgtgtcaccatgccaactgctaagatttgtcgcaattgagggactttggtttttattttacttctgatgattggaaatgtacaatggggttgttggaatgctttgatgatttcatttgatcctcactgtacaagatgt

SEQ ID NO: 257699 - DNA, 437 bp, Glycine max
acaactacaataatccaccagtgtacattaccgaaaatggcgttgcggaatcaaagaatgactcacttgcaatcaatgaagcccgaaaggatggtattcgaattagataccatgatggccatctcaaatccctgcttcatgcgatcaaagatagagttaatgtgaagggctactatatatggtcattttcagatagctttgaacgggatgctggttacacagctcgatttggcatcatatatgtggattacaagaacaatttgagtagataccctaagtcctctgcgttttggctgaaaaaattccttctcaagtgatctaagtctattgttcctttggcatgcatgcccagtttttcttcttgtttgtttcctggatatcacagacatgcagtgtgtatcacttgctcttcgattcggatcaatgtaatcaagtca

SEQ ID NO: 257700 - DNA, 374 bp, Glycine max; identical to SEQ ID NO: 240730

SEQ ID NO: 257701 - DNA, 395 bp, Glycine max
gatagcgtttttcattgtgcattattcaatgggcaccacagcagctctatccggaaccatggtgagcacctccttcatgaggaagcaacctatgacgaccaagagcctaaagacattccccaacgctctttttggtctgaaaggtggacgaggtggtcgtgtaacttgcatggcctcgtacaaggtgaagctcataaccccagaaggagaagtggagtttgaatgcccagatgatgttttcattgttgacaaggctgaggaagaaggcattgaacttccctactcgtgcagggctggttcttgcgtttcatgtgttgggaaaattgtgaaaggtgacgtggaccagtcagatggtagcttccttgatgatgaacaaatagaaagtggatgggttc

SEQ ID NO: 257702 - DNA, 389 bp, Glycine max
ggtttgattgtttgttgttgtaactcgttcttgttctttggttgttctgtgtttgtgtttgttttttctctcacctgaaaatgtcttgctgcggtggtaactgtggttgccgaagctcctgcaagtgcggcaacggctgcggaggctgcaagatgtacccagacttgagctacactgagtcaaccaccaccgagaccttggtcatgggagtggcacctgttaaggctcaatttgagggtgctgaaatgggtgtgcccgctgagaactatggctgctaatgtggaccatactgctcctgcaacccctgcacttgcaagtgaagcgttgggagagcaagcttcaagcatacatagcccttaattaggaataatgatcaactattaatgtgt

SEQ ID NO: 257703 - DNA, 299 bp, Glycine max
  unsure (1)..(299): unsure at all n locations
gggtcttggtgtgaaccatagccatggctacttcatcaaccacattattgctatcatcactcatacctgcaagcatcccatcattcaactctggaaaccattcagtttttttgcttcaaaaccgttctttgaatcgacccaagaagagagtttccttcgttgttcaagcagccaagccccctattggtgtggaaattccaaaggtgcagcctcaatttaagcctccgtttcttgggttcactaagactgcagaagtatggaactctagagctngcatgattgggatcaatggaagtttt

SEQ ID NO: 257704 - DNA, 301 bp, Glycine max
tcttttatgctagtgaacgcgaagttcatcacaacgacatatttatattcggcatagataacaccgtactctctaatatcccatactatgaaaaacatggatatggggtggaggaatttaatgaaaccttatatgatgaatgggttaacaagggcgacgcaccggcattgccagagactcttaagaattacaacaagctgatgactcttggcttcaagattgtattcttgtcaagaagatatcttgacaaaatggctgtaacagaagcaaacctaaagaagcttgctttcacacatgggag

SEQ ID NO: 257705 - DNA, 253 bp, Glycine max
  unsure (1)..(253): unsure at all n locations
ggtgtgattgtttgttgttgtaactcgttcttcttcttttgttgttctgtgtttgtgtttgttttttctctcacctgaaaatgtcttgctgctgtggtaactgtggttgcggaagctcctgcaagtgcggcaacggctgcngaggctgcaagatgtacccagacttgagctacactgagtcaaccaccaccgagaccttggtcatgggagtggcacctgttaaagctcaatttgaaggtgctgaaatgggtgt

SEQ ID NO: 257706 - DNA, 425 bp, Glycine max
  unsure (1)..(425): unsure at all n locations
gatgatatctctgctggtgaaaatggattaattagattttggttggaggaaaatacccacccaaccatggcagcaaccattcctttctctctgcttaggaactgcgcgccattgaaactagcaacacctttcgctcgcaaagcctccaactttaatcttcttctccctcttcaaccacgcaggttggtctctagtacctgtgctgtgaacaatgaagaggctgcagcaaaaacagcagctgttaattttgatagtgaagctccaacaatatttgataagatcataaataaagaaatcccttcgagcattgtatatgaggatgaaaaggttcttgcatttcgtgacattaatccacaggcttccgttcatgtcctagtcattccanaattaagagaatgattaacacaacttgggaaggctgatag

SEQ ID NO: 257707 - DNA, 462 bp, Glycine max
ggtcgaccacgcctgctacggctgcagaagacccacatttggggtattggagcatgcttttaatttccgagatcggccaaacaaatagtagcataagtcccatggcctaagagactacagttgtttatctatatcccagcaaatcacacgttttgggtgagaattttgatcataataaacttgtaataacaacactagctgctaatggaaccgaaggaggagagtaatggagcacctaatgacacatatcctgcttttaccgattggtatgctgatgtttcctggccactagaagcacacacatataaaatagataagattctattccacggtaaatcagaattccaatagcttcttgtatttgagtcttctatacaatgcaaggttgcaattcttgatgggcatatccagctcacagaatactatgaatttgcttaccaagagatgctcactcaccttgca

SEQ ID NO: 257708 - DNA, 412 bp, Glycine max
  unsure (1)..(412): unsure at all n locations
agaatagaatatgaaaaagaaaaaaaagattctaaagaaatataactaatattctttagaataatcaaaaagaatattaaattcaaataaattttagatagaaaaaagacttaaaaaggaggatttgaaatgcgagatctaaaaacgtatctttccgtggcaccagtagtaagtactctatggttcggggctttggcgggtctcttgatagagatcaatcgtttttttccagatgcattgatattcccttttttttcattctagttattgacacggaaaggggtgaagaagattatagatccaattaagtattaaatatatgtaattaatatgtaattaatctcctcttctttatttcgtcttttatttcttcttttttttacaaatggtnatagaataggntaccananaa

SEQ ID NO: 257709 - DNA, 382 bp, Glycine max
gatgtgaatggtgtgtgtgttgatgctgctgaggatgagttcttcaggttgactaccaaggaaggaaagttgactgtggagagagatgttgtgaggactaaaaccgcggatttttcgccaattttgcagtttgaacaagactccgttcagatccttgatgcactgctgccactgtatttgaacagccaggttctgagggcattgcaggagtccttggcgagtgaactcgccgccagaatgagtgccatgagcaatgccacagataatgctattgagttgaagaagaacttgtccaatgtgtacaatatggagcgccaggcttagatcactggtgaaattctggaaaatgtggctggtgccaatgccttgcaatagtgcaatt

SEQ ID NO: 257710 - DNA, 377 bp, Glycine max
ggaagaagaagaagaagaagatggcattgggtgttcctgctcttcccctgacatacgtggctcacgttctggcacttgttgccagcatcttggtcgtgctctgggtcctcaattttaggggtggcttggcttgggattctgataacaaggccctaatcttaaattttattccggtcctatatggcattggcttactagtccctgggggtgaaactattataagctacaaagcattacccctgaagaaggaagtgaagaaattgatacaccttgttttccatgccatcgcattaatacttggaatagttggaatttatactgccttcaagtatcacaatgaaagtgggattgccaatctctacagcttgcattcatgg

SEQ ID NO: 257711 - DNA, 414 bp, Glycine max
ggtgtctgctcactcgctcttctccgccacttgtgaatctattgaatcaacaatcatgtcggacgaagagcaccatttcgagtccaaggccgacgccggagcctccaaaacctaccctcagcaagccggtaccatccgcaagaacggctacatcgtcatcaaaggccgcccctgcaaggttgtggaagtttcgacttccaaaactggaaagcacggtcacgctaagtgtcactttgttggaattgatattttcactgccaagaaacttgaggatattgtgccctcttctcacaactgcgaagttcctcatgtgaatcgtacttgataccaacttaatggaaatggctgaggatggattttggagcctgctaactgaaaatggtaccactaaggatgacctcaagcttcccactg

SEQ ID NO: 257712 - DNA, 170 bp, Glycine max
ggcacaagtgagtttgttgatcgagataactagaaacagtgtgatgaaaatgaaggtccttggtttcttcgttgctacaattttggtagcatggcaatgccatgcgtacgatatgttccctcttcgaatgaacgcttgctattgtgcccgtacttcggaagtgaaatgtg

SEQ ID NO: 257713 - DNA, 410 bp, Glycine max
gtggcagcagaagaacaagtagttgagaactaagaaggagaagcaaatggcttcctcaatgatctcttccccagctgttaccactgtcaaccgtgccggtgccggcatggttgctccattcactggcctcaagtccatggctggcttccccaccaggaagaccaacaatgacattacctccattgctagcaacggtggaagagtgcaatgcatgcaggtgcggccaccagttggcaagaagaagtttgagactctttcctacctgccagaccttgatgatgcacaattggcaaaagaagtagaataccttcttaggaagggatggattccttgcttggaattcgagttggagcacggtttcgtgtaccgtgagcacaacaggtcaccaggatactacgatggacgctact

SEQ ID NO: 257714 - DNA, 301 bp, Glycine max
gaaggagcaagaaggtgaagcccaagtacaagcagcattatctgctttaaaagatgggcaagtcatgggtattcactctagtggtgaattggaaaagaagttaagtgctgcatcaaagacatcacgcttggcgatcctgtattttactgcaacatggtgtggcccttgtcgcttcatttcccctatttatacaagcttggctgaaaagtacccaaaagtggtttttttgaaagttgacatagatgaggccagggacgttgctgcaggttggaatattagcagtgttccgacatttttcttt

SEQ ID NO: 257715 - DNA, 415 bp, Glycine max
gcagctgaacagtcactgaaaggatacgaggctgcttcagccactgcaaacacagatcttccatcaacacatccaatccgtcttggacttgcactcaatttctctgtcttttattatgagataatgaactctcctgaaagggcctgccatttggctaagcaagcttttgatgaggcaattgcggagttggacaccctgagtgaagagtcatacaaggacagcactttgatcatgcagctgttgagagacaacctgactctctggacctctgatttgcctgaggatggaagtgaggacagcataaaagctgaagaaaccaaaccttctgagcctgagcattgatgtgattcaatagtcagaaatctaaggtactctcaaagaggacattttctagcaatggatttggaccccgaca

SEQ ID NO: 257716 - DNA, 420 bp, Glycine max
gaacactttcacactctttctctctctctctctctctctcagaattttctcctctctccgattccttttattaattggagttttctcgctcctttttctttccctgaaaacatttcatcttcgtattgatgtcggaaaagggtcggccacttcccaaatttggtgaatgggatgtcaatgatccagcctcagctgaggggctcacagtgatttttaataaggccagggatgagaaaaagacaggtggcaacccagagtcaccaggaaagactgctactgatcctcatagcaaacctgcagtagagcctggcaaaactcagactaaaaaatggttttgctgcatgcaaaacccttctgccgaatcatagcatagcaatggttgcgcctgtgaaaagcctgaacagaagaacaatgtttatg

SEQ ID NO: 257717 - DNA, 420 bp, Glycine max
gatagaagaagcagaaagagaagcattagcaaaagcaagaagaactagtctaagcagaaatggcctcttcagtgatggcatctgtggccctcaaacctgcccctttcactgttgagaagtcctcagttagaggccttccctccctctcaaggaactcctcttcattcagagttgtggccagtggtggcaagaagatcaagacagacaagccttatggaattaatggtggcatggctttgagggaaggagttgatgcatctggcaggaaaggaaagggaaagggcgtttaccagtttgtagacaaatacggtgctaatgtcgatggttacagtcctatctacgacaccaaggactggtctccaaccggtgatgtctacgctggcggtacgactggcttggctatctgggctgtgactctac

SEQ ID NO: 257718 - DNA, 409 bp, Glycine max
  unsure (1)..(409): unsure at all n locations
gatctggcagcagaaaaacaagtagttgagaactaagaagaaggaaatggcttcctcaatgatctcctccccagctgttaccaccgtcaaccgtgccggtgccggcatggttgctccattcaccggcctcaaatccatggctggcttccccacgaggaagaccaacaatgacattacctccattgctagcaacggtggaagagtacaatgcatgcaggtgtggccaccaattggcaagaagaagttcgagactctntcctacttgccagacctcgatgatgcccaattggcaaaggaagtcgaataccttctaaggaaaggatggattccttgctcggaattcgagttggagcacggtttcgtgtaccgtgagcacaacatgtcacctggatactatgatggacgctac

SEQ ID NO: 257719 - DNA, 399 bp, Glycine max
  unsure (1)..(399): unsure at all n locations
gacaccaacaccaaaacaaacccactaagatggcttcctttgtatccttcctagtgctgcttcttgcagcccttatcctcatgcctcaagggcttgctacttactacaaaccaattaagaagccaccagtgtacaagcctncagtgtacaagccaccagtgtacaaaccaccggtttataagccaaaaccaccggtttacaagccgaaaccaccggtttacaagccaccatataagaagccaccatacaagaaaccaccttatggaaagtaccctccagtagaggacaacacccatgcctaaagcaagcaatgaggtctattatctacttaataaataagaggaactgctttgtgttttctagcattgtgatttacaacttcgtagcaatgcatattct

SEQ ID NO: 257720 - DNA, 400 bp, Glycine max
  unsure (1)..(400): unsure at all n locations
gactcaccaagtgaaccaatgtagcccaagccctatacaaccaaaccctaacacgcacccatttgattcagtttccatggctagcctcaaggttgcatttttggctgcagtgctctgcatggttgtggtgagtgcacccatggcacatgcagctatcacgtgcgggcaggtgacgagtagcctggccaattgcatcggttacctccagaagggaggaacgccgtcgtcgggatgctgcaacggagtgaagagcctcaatgccgncgccaagaccaccgtcgaccgccagacggcgtgcaactgcctcaagtcggccgccagccaaatctccggcttcaacgccaacaacgccgnctcgctccccggcaaatgcggagtctccatcccctacaagatcagc

SEQ ID NO: 257721 - DNA, 399 bp, Glycine max
  unsure (1)..(399): unsure at all n locations
ggagaattgataaacaaatcgttagggttttttggttgtgcgagtgagagtgagagagaacaatggaagacataacagagggagtgaacaacatcaacatctctgattcgtataagaaaaatcgcattcaggtctctaacaccaagaagcccctcttcttctacgttaatctggccaagagatatatgcaacagcatgatgaggtcgagctctcagctctaggaatggctattgccacagtagtaactgttgctgaaattttgaaaaacaacagacttgctgttgaanagaanatcaggacatcaactgttgacataaaggatgactctagaggtcgacctgttcaaaaggccaagattgaaatagtactagggaagacagcanacttcgatgagttga

SEQ ID NO: 257722 - DNA, 386 bp, Glycine max
  unsure (1)..(386): unsure at all n locations
gaaggcatttcattagcagcgttaaagaagagagaagaaaaatgcgaaagttcgatccatggcccgttttcttcaagcgcgagtggaaacgcaactggcccttcctcgttggattcgcagtcaccggagctctaatcaccaaactttcccttggccttaccgaggaagatgctaagaattccaaattcgttaaggcgcacaaaaggtgatttctgaatcgtgacatctgcctggctttgcactttatgttaggtttgtcaagattactttgcttgtcttgattntatggattgtaataacagaagagagatgctctagatagtctctttaagtctgtatcccatgttcttaatttcagtttttgtttggttacctaaatctgtttg

SEQ ID NO: 257723 - DNA, 415 bp, Glycine max
gagcgccaatgtttttttcagaggagtttcatgttgtaatcaaaagagtttatcttatagtaagaaatcgatgtcttactccattttaaggaacaaaacaagagaacaatagcctgacaaagggtttagccataaaatcgaatccatcattgatttgagatattgataaggtgaatactcatttctcgtcaatgctaggcataatgcgggtatagggacctaaaaaagattatcttttcttcctatcttatggactttaaggtgtatgaagtgtcatttcctatcttagattttaattttagtaggtagataaagagtccatttaacttaagttgatctaagccagaagcagacctacgtcaagataattcttctttgaaacactttggtagtgctcttagattgtaatccaaaa

SEQ ID NO: 257724 - DNA, 386 bp, Glycine max
gaagtaacttaaggtttcaaacctaggaagttggaagtcatggcagcaacattgatggcagcaacaacaagttctggtactcttaaagcaactcctttccttggccaaggcaagggtgccaatgccaatgctcttagggatgttgtctccatgggaactgggaagtacaccatgggcaatgatttgtggtatggaccagacagagtgaaatacttgggacccttctcagctcagaccccttcatacttgaaaggagaattccctggggattatggatgggacactgctggcttatctgctgacccagaagcatttgccaagaacagggctcttgaagtgatccatgggcgatgggccatgcttggagcactaggatgcatcacccc

SEQ ID NO: 257725 - DNA, 379 bp, Glycine max
gaaggaaggaaggaaggaagagtgagcgtgaaagatgccttcggcgaggctttcagggtcaccaaggctcgacgttgctattgacatgggcaatccatttctcaatctcactgttgatggtttccttaagatcggagctgtcgcagccacgcgatcagctgctgaagatacttatcatattatccgaaacggcctttgttgtaattcaacatgtctgttccagggaatatttcaagtcatgatttcgagaaaacgttgaagaagatgtgtaaagaaggtgtatattggggaactttagctggtgtttatcttggaatggaatatggggtagaaaggatccgtggcaccagaaattggaagaatgccatgattgggggtg

SEQ ID NO: 257726 - DNA, 263 bp, Glycine max
gtctcaagtgagtatgatgatctatataactagacacagtgtgatgaaaatgaaggttcttgttttctgcgatgctacaaatttggtagcatggcattgccatgcgttcgatatgtttactctactaatgaacactggctatcgagcccgtactacgcatgtgaaatgcacacaatggaggctcgctgtggaagctcacaacatgtgtggctttgagaccattactgatgagcgcggtgaagcatcatacgaacacatacatg

SEQ ID NO: 257727 - DNA, 420 bp, Glycine max
catttgaagccatccaacgtgtgcttccaaggtcttagacccctcgcaaggttcaccaaagcctcatcaaccaaagtgagcaccaccaccaaaagggttattccaaagggtggtgttagagctgaactcaactcagcccttgtgataagcctcagcactggcctctccctcttcttgggaaggtttgggttcttcaacttccaaagggagaacgtggcaaagcaagtgcctgagcagaacggcctcacacactttgaagctggtgatacacgtgccaaggagtatgtcagccttctcaaatccaatgaccctgttggattcaacattgttgatgtcttggcttggggctccattggccactgttgtgcttactacatcttggccaccactagcaatggctatgaccctgcattctttggc

SEQ ID NO: 257728 - DNA, 408 bp, Glycine max
gactcaagcacaacatctctatcgagtaaattagctatgaagcctaccctactattatccctttccttcctgcctctctttgctttcctggctctttcagaagatgttgaacaagttgtggacataagtggcaaccccattttcccaggtggcacatattacattatgccatcaacttggggcgctgccggtggtggattgaaactaggccggacaggaaactcaaactgcccagttactgttttgcaagattactcagaaatcttccgtggcacaccagtcaaattcagcatacctgggataagccctggaatcatctttacaggtactccacttgaaatcgagttcgcagagaaaccttattgtgctgaatcctccaaatgggtggcgtttgtggacaatgaaatc

SEQ ID NO: 257729 - DNA, 420 bp, Glycine max
gataaaaaaaagaaacatattgagcaatgaatgtgtaaatagggcaaaagtaatggataaggaattaatttctctggatatattagaaaaccgaattcgattgtctaatgatgaaactaaaacaaaatatttaactaaaatatatgatcctttcctgaacggacgctttcgtggacaaatcgaaaatgtttttttaacctcaatccaatatgaaaaaaatgaaaaaaaaaataccattttgataaataaaattcatggtatccttatttctaataatacttataaaaaaaataatagtaattatccagaattagagaaaaaaataaatatatttgatagaaaatctttagtaactacgttttttttttttcaatctaatcagtaaattttcaaaaaaattagtatcaagcttgagttttg

SEQ ID NO: 257730 - DNA, 399 bp, Glycine max
ggttctagtgtatgtgattgttgtgactcgttcttcttcgtcgttatcttcttcttttgttgtttgtgtgtttgttttttctctcacctgaaaatgtcttgctgcggtggtaactgtggttgcggaagcgcctgcaagtgcggcaacggctgcggaggctgcaagatgtacccagacttgagctacaccgagtcaaccaccaccgagaccttggtcatgggagcggcaccagttaaggctcaattcgagagtgctgaaatgggtgttcccgctgagaacgatggctgcagatgtggagctaactgcacctgcaacccctgcacttgcaagtgaggtgttggagagctaaagcttcaagcagagatggcccttagaaataatgataaaaactatatgtag

SEQ ID NO: 257731 - DNA, 246 bp, Glycine max
ggcacaagtgagtttgttgatcgagataactagaaacagtgtgatgaaaatgaaggtccttggtttcttcgttgctacaattttggtagcatggcaatgccatgcgtacgatatgttccctcttcgaatgaacactggctatggtgcccgtactccggaggtgaaatgcgcaagttggaggcttgctgtggaagcacacaacatctttggctttgagaccattcctgaagagtgcgttgaagcaac

SEQ ID NO: 257732 - DNA, 411 bp, Glycine max
agatatatatataatagaacgtaaaaaaaaaggggaataataaatagaaaaaggagcatgttgattatatagaaagtaaagggcaacaatcatttttgtttaccatgggtaaggacaccatcgctgacataataacctatataagaaatgctgacataaataaaaaaggaatggttcaaataccatttactaacataacagaaaacattgtaaaaatacttttacgcgagggttttgttgaaaacgtcagaaaacatagagaaaacgacaaatattttttagttttaactctacggtatagaagaaatagaaaaggatcatataaaagttttttaaatttaaaacggatcagtacacccggtctacgaatatattctaattatcaacgaatccctcgaatttaaggggcat

SEQ ID NO: 257733 - DNA, 349 bp, Glycine max
agaagaagaagaaggagcatggccatgagcatggcgcatgacagcagcagcagcagtgacagtgattaaactgctgcatcacctatatatttaaaaggtttatgggaccatagtagcgagggctgtgccttaatttctctctctctctatctctctctctctctctctctttttcctttttccctatcttgtgatctatttatgagtgagaaaaacaaaagtgagaaattgtgcgtgtatctggttgctaattcgagtgctattagtctgaggtttggttggtttgtaaccccgctacttgggttatgtttgattgtatattatcctagagaaatgcagatttaaatta

SEQ ID NO: 257734 - DNA, 410 bp, Glycine max
gacagctattcctcttaagcttgctactgagtgtccacactgcataccttaggtcttccgaattcgaagttaatttgcgagatggctaaggaaaaggctcagatcaacattgtggtggttggtcatgtggaccctgaggaggcaaccaccattaacgagctgaagaagcctgttgtggagaaagaagctccagggcatgccatatgagggcatgcacgtacggcctcggaggggaaccagaaaattatgttaacaaaataatctggaaccctaatgtatcagtgtcatcatcagtgtgtagtttaagctagctttgctatggttacgttctttgagatgagagtcttgatgaacagtaccatcctgatgtattgctttccttgaaagttaatgcatgcttcttatcttct

SEQ ID NO: 257735 - DNA, 369 bp, Glycine max
gaccaaaccaaagtaagagtgagcaacttccaacaccatagtgaaatggcttccaaggctgcacttctcttgtgtttcaatgttctcttcttcaccgtggttagctccacatatgtgccatgcaacccaccccccaaaactccaaaacacccacctgtcccaaagccaccttccccaaagcaagcaagttgccccaaagacactattaagtttggtgtgtgtgctgatgtgttaggtttgatcaacgtgcaacttgtgaagccaccaaagaccccatgctgcaacctcattgagggtctcgctgatcttgaagctgcaatgtgcctctgcactgctctcaaagctaatgtgttgggcatcaacctcaat

SEQ ID NO: 257736 - DNA, 411 bp, Glycine max
  unsure (1)..(411): unsure at all n locations
gctttagaatgggttcaccgtgagatggaggtataccccatttggctctgcccacacaaattgttcaagctgcctgtcaaaactatgatttacccagggccagggttcgaactacatcgcaggcaaggagacacccaaactgctcaaatgtacacagatgttggagtttactatgcaccaggtcctgtttttaggggtgaggtatttgatggggcagaagcagtgcgtaaaatggagaactggttgattgaaaatcatggttttcagccacagtatgctgtgtctgagctgtctgagaaaaacttctggaggatgtttgatgctggtttgtatgagcatactangaagaagtatggagcttgtgggacctttatgagtgtatactacaaatcaaagaagggcangaaaact

SEQ ID NO: 257737 - DNA, 318 bp, Glycine max
ggtagcgcagagaaagaactagaactagaactagggtttcatctttgccatcagaaacaacaatgatttacgacgttaactctccccttttccgatccttcctcagccagaagggaggctcccccgataagaggaaaacggatgaacagaagccaaaagagcagaaacccaaagccagcgagaacaaacctataatgacagagtgacaacaaatttgctgcattcagttgtagaatgataataggtggtagatattgcatttggttctacaaaattaagatcattttggctgtgttctgaggtatatgtggtggttta

SEQ ID NO: 257738 - DNA, 286 bp, Glycine max
  unsure (1)..(286): unsure at all n locations
tacggctgcgaaaggacaacgaaaggggccccaactggacaggataggctatccatagcagncaaagaaatgaagagtaccttgttcgccctctttctactttgtgccctcacctcttacctaccttcagccaccgctggtgatgtggtcgacactgatggtaatcctgttgaaaatggaggcacatactttgtgttgccaactataatattaaacggcggtggaatagaatatgccacatttggaatgaaacttgccctgtcactgttgcgcaatctcgcgatca

SEQ ID NO: 257739 - DNA, 399 bp, Glycine max
ggcacaagtgagtttgttgatcgagatagctagaaacagtgtgatgaaaatgaaggtccttgttttcttcgttgctacaattttggtagcatggcaatgccatgcgtacgatatgttccctctccgaatgaacactggctatggtgcccgtactccggaggtgaaatgcgcaagttggaggcttgctgtggaagcacacaacacctttggctttgagaccattcctgaagagtgcgttgaagcaacaaaggaatacatgcatggcgaacaatatagatcagactccaaaacagttaaccaacaagcttacttttatgccagagacctcgaagtccaccccaaggacacatttgtgttcagtatagatggcaccgtactctctaatattccatactacag

SEQ ID NO: 257740 - DNA, 368 bp, Glycine max
tgtgttacaactgaatttggtgatcgacatagctagaatcagctttatgaaaatgaaggtccttgttatcttaccttctacaatcttggtataatgtcaatgccatgcttacaacttccttcactctcacaatgaacacttgctatacactccttactctccaggtgaaatgcgcagctcatactcttgctttccaactatactattaaatttggctttgaaaccattattgcacatttcgaaattaaaactaacctgtacatgcatggcaatcaatatatctcatactccaaagcttttcaataaccattttatttctatgccaaatacctcacattccaccccgacgtcacattaacattcagtat

SEQ ID NO: 257741 - DNA, 299 bp, Glycine max
  unsure (1)..(299): unsure at all n locations
agaagacgacagaagagaagcgtggacaattcactcttgtagttggaggtttgttggtcattgcatttgttgttcctatggcacagtactatgcctatgtatccaaaaaataagataatataaatagatctgtttttcaaattctcactgttcaaattcagatgtataatgtgcagttgtaaccatgctcatgttacaattgagtttgagaaagctgaagaagaataagatgacagtttttgcttgtaaatgctattccaaagtatatgtatttgaccatttttaagaaaaaaaaanaa

SEQ ID NO: 257742 - DNA, 412 bp, Glycine max
gatcaaaagcttttagttttctatatcactctcaactttactcctcttcaatcagttgcatattctttgctattccaatggccactgttgaggttgtgtcagccaaggttgccctcccagaggacacaaaagaggcatcattgaaggttgacgaggagaagaacacagaagaagttgttgagactccaacaccagaaactgtagtcactgagcaaaccaaggaggaaagtactgaggccccacgacctgcagcttcagaagacaagccctcggttgaagttcagactaaagaggtggcagaggaagttgtgtctgagaccgtcacacaagagccaacagttgagaaacaagaagctgcttgagggaacaaagaaaatgccgatcctgctgagattaagacaccagaagctgc

SEQ ID NO: 257743 - DNA, 418 bp, Glycine max
gagtctagggttacgccgtcgtcgctgtttgtgtgtgtatcaggtgcagctaccaacgatggtgaagggtcgtcaaggagagcgcgtcagactctacgtgaggggtacaatccttggatacaaaaggtccaagtccaaccagtacccaaacacatccctgatccaaattgagggagtgaacaccaaagaagaagtaggatggtatgctggcaagaaaatggcctatatctacaaggctaaggtgaaaaaggatggaagccattaccgctgcatatggggcaaggttacgaggcctcacggcaacagtggtgttgtccgtgcaaaattcaagtcaaacctttcacccagatcgatgggagctcgagtaagagtattcatgtatccaagtaatatatgagattcaggtgataagacgctc

SEQ ID NO: 257744 - DNA, 425 bp, Glycine max
gagtttagggttacgccgtcgtcgctgtttgtcggtgggttatgtgcagctaccaacgatggtgaagggtcgtcaaggagagcgcgtcagactctacgtgaggcgtacaatccttggatacaaaaggtccaagtccaaccagtacccaaacacatccctgatccaaattgagggagtgaacaccaaagaagaagtaggatggtatgctggcaagaaaatggcctatatctacaaggctaaggtgaaaaaggatggaagccattaccgatgcatatggggcaaggttacgaggcctcacggcaacagtggtgttgtccgtgcaaaactcaagtcaaaccttccacccagatcgatgggagctcgaataagagtattcatgtatccaagtaatatatgagattcaagtgatcagacgctcagaattc

SEQ ID NO: 257745 - DNA, 419 bp, Glycine max
  unsure (1)..(419): unsure at all n locations
gatctggcagcagaaaaacaagtagttgagaactaagaagaaggaaatggcttcctcaatgatctcctccccagctgttaccaccgtcaaccgtgccggtgccggcatggttgctccattcaccggcctcaaatccatggctggcttccccacgaggaagaccaacaatgacattacctccattgctagcaacggtggaagagtacaatgcatgcaggtgtggccaccagttggcaagaagaagttcgagactctntcctacttgccagacctcgatgatgcccatttggcaaaggaagtcgaataccttctaaggaaaggatggattccttgcttggaattcgagttggagcacggtttcgtgtaccgtgagcacaacaggtcacctggatactatgatggacgctactggaccatgt

SEQ ID NO: 257746 - DNA, 415 bp, Glycine max
  unsure (1)..(415): unsure at all n locations
ggcacaagtgaattttggtgatcggggatacttagaaacagtggtgatgaaaaggaaggtcctttgttttcttcgntgctacaattttggtagcatggcaatgccatgcgtacgatatgttccctctccgaatgaacactggctatggtgcccgtactccggaggtgaaatgcgcaagttgggaggcttgctgtggaagcacacaacatctttggctttgagaccattcctgaagagtgcgttgaagcaacanaggaatacatccatggcgaacaatatagatcagactccaaaacagttaaccaacaagcttacttttatgccagagacctcgaagtccatcccaaggacacatttgtgttcagtatagatggcaccgtactctctaatattccatactacaaaaaacatggat

SEQ ID NO: 257747 - DNA, 409 bp, Glycine max; identical to SEQ ID NO: 257263

SEQ ID NO: 257748 - DNA, 325 bp, Glycine max
ggaccattctataaaatcaaaataattgaaaccgaagattctctctctctctctcatgatccctacgccatggaaccatttccctcataaaattctctcttcctttttgggttctcctcaatccattccaagcttcaatcttttctctcttctgccctctgcacctcccctcacacccttcctcattcgcaagaagtgaagatgtcgaccccggcaaggaaagagactgatgagggattttaaaaagattgcaacaagatcctcctgctggcatcagtgggggctccccaggacattaatataatgcttggaaatgctgttatct

SEQ ID NO: 257749 - DNA, 425 bp, Glycine max
  unsure (1)..(425): unsure at all n locations
gattctgttccgcagaaaaccctagcccaaccggatcctcacgactaggagatggcaaagtcgaagaaccacaccgctcacaaccagtcctacaaggcccataagaatggcatcaaaaagccaaagaggcatcgccacacttccaccaaagggatggatccaaagtttctgaggaaccagaggtacgcgaggaagcataacaagaagagcggtgaaacagccaccgaagaagagtaaagtgccactctcaaatgggcctattaggaattgatttgttatttaagccccatatgntttgtgtcgaatctgtctttagtaggatagtaatttttatgagttaacttattccagagagaatgcagtacttactctaatagcatcgttgttggtttttgttaaggacccttgaaattttatcaatggat

SEQ ID NO: 257750 - DNA, 415 bp, Glycine max
gaagaccacatttttttgttttgcaactacattgtagcaatcgacaaaacacaacacggagtaatggggaggttgtttgtggtgaatctggaaggaaagatctatagctgcaaacactgccatacccatcttgcgctttacgatgacatctactccaggacattccattgcagacatgggaaagcttatctcttcaataatgttgtgaatgtttctgttggcgaaatggaggacagaccgatgatgactgggttacatacggtggctgacattttctgtgtgggttgtggatcgattgtgggttggaaatatgaaactgcatatgaaaaaaaccagaagtacaaggaaggaaaatcggtgcttgaacggtacaaagtgtcaggtcctgatggaagcaattatttgatcagcaatg

SEQ ID NO: 257751 - DNA, 398 bp, Glycine max
ccaaataaatttttcttttcctatgttaaaaaaggaaaaaaaaaaaaaaaaaaaaaaaaaaaaaaaaaaaaaacaaaaaaaaaaaaaaaaaaaaaaaaaaaaaaataaaaaaaaaaaaaaaaaaaaaaaaaaataaaaaaaaaaaaaaaaaaaaaaacccctaaaaaaaaaaaaaaaaaaaaaaaaaaatgccccctttttaaaacatccatttttttaccccattactacacaataatacttttttttataagaccaccaaattatactccttctccattattttaaaaaattataccttaaaaaacccttggcttccccctttttttaccctttttaaaaaatcccttttttccaaatgggctaaataccaaatatccccatccaaacttcctttc

SEQ ID NO: 257752 - DNA, 427 bp, Glycine max
ccgtgaagaagcccaagagcgtcgtgaagaaacctaagagcgtggaaatctccagcgaaaaaggccaaggctaagaagtgagggattggagtgggttttagtttggcgttatagtgtttatgtatttcgggttgaatcgtagtataggtggatatatttttagaagagtattgatgtaaattcctttgctagaaattttatcaagtgttcttcttttgcattgaaaaaaaaaaaaaaaaaaaaaaaaaaaaaaaaaaaaaaaaaaaaaaaaaaaaaaaaaaaaaaaaaaaaaaaaaaaaaaaaaaaaaaaaaaacccccaaaaaaaaaaaaaaaaaaaaaaaaaaaaggggccctttttaagggcccaaatttttttccccgggttttgcaacttaaaactttttttttggggcccccaaattaaat

SEQ ID NO: 257753 - DNA, 417 bp, Glycine max
gaaggaagggagggaagaatagaatgggatctggaagtggaaaacacactggagagttcttcaggagaagggatgcatggaggaagcatccgatgcccaccaatcagctccgccacgccacccctggccttggcatcgccgtcgtcgccttcggtatctacctcgtcggcgaacaagtctacaataggctctatgctcccgatcctcattcgatttctcacgtgaaagccggggatcaccactaaacgtttggacggacgcactccattccatcatcacttaataagcttgctagcatgttctcgcagcctttaatggttaaatttcagaccgtgttcgcttcttcggcactcactatgttgtcttgtatgcctacattttatgccttcaatttgcattcacaatgaaactcaattt

SEQ ID NO: 257754 - DNA, 322 bp, Glycine max
acctgtgaagccaccaaatgtctgtgacaactactacagctgtgctgatagtgctacttgttgctgtattttcgagttcggaaatgcttgctttgagtggggttgctgtcctcttgagggtgctacctgctgtgatgaccactacagttgctgccctaacgactatcccatctgcaacacttatgctggaacttgtctcaagagcaagaacaacccattcggagtgaaggcattgaggcgtactccggctaaaccccattggaccttttggcgtaagaacaaggtcagcagtgcttaagcagataaaggaaatgtgaaacgt

SEQ ID NO: 257755 - DNA, 438 bp, Glycine max
  unsure (1)..(438): unsure at all n locations
agacgacagaaggggatagcagcatcatacaaagcattgaattcaaaaactaagttcatttcttgtgctttgctttattcctcaaaaccaaacatgtcgaacacatgcggcaactgtgactgcgctgacaagactaactgcaccaagggaaacagctatggtgttatagtagagactgagaagagctacatcgagactgttgacatggatgttccagcagctgagcatgatgggaagtgcaagtgtggcactaactgcacttgcacggactgcacttgtggccattaaggaatatgtatgaaaatgtaattgccatgtgtttggcaatacaaatctccaaataatgtaatcttcgtatgaataaatgtgtgctgntatcccaaaaaaaaaaaannnnnnnaaaaaaaaaaagcggccgctctaaaggatccaagctta

SEQ ID NO: 257756 - DNA, 420 bp, Glycine max
gatatttgagttcaaacaaatcaaagccatgggcacctgcaacttctctattgttctctccgtctccctagccttctttttggtgctacttaccaaggcacactcgaccgataccgtttctttcaccttcaacaagttcaactcagtccaaccaaacattatgctccaaaaagatgctagtatttcatcctctggggtgttacaactcaccaaagttggcagcaacggcgtgcccacctcgggatctctcggtcgtgccctttacgctgccccaatccagatttgggacagcgaaaccggcaaggtagccagctgggctacatcctttaaattcaacattttcgcacccaacaaatcaaactcagctgacgggcttgccttcttcttggcacccgtcgggtctcagccccaatccgacga

SEQ ID NO: 257757 - DNA, 380 bp, Glycine max
gaggtgcagagtactacagaattattaatggcctgaatttcgaagacaaacttcatccaggtggtccatttgacccattggggcttgcaaatgatccagaccaagctgcactgctaaaggtgaaggaaattaaaaatggaagacttgctatgtttgccatgcttggtttctacttccaagcttatgtcactggagaaggtcctgttgagaaccttgcaaaacatctcagtgacccttttggcaacaacttgctcactgtcatttctggatctgctgagagagctccaactctctaaatcattcatcttcatgtttttctccaatcttacttaatgtacaatacatatcactgagatattaaaggcatttggcttggtccc

SEQ ID NO: 257758 - DNA, 422 bp, Glycine max
gatctggcagcagaagaacaagtagttgagaactaagaaggagaagcaaatggcttcctcaatgatctcttccccagctgttaccactgtcaaccgtgccggtgccggcatggttgctccattcactggcctcaagtccatggctggcttccccaccagaaagaccaacaatgacattacctccattgctagcaacggtggaagagtgcaatgcatgcaggtgtggccaccagttggcaagaagaagtttgagactctttcctacctgccagaccttgatgatgcacaattggcaaaggaagtagaataccttcttaggaagggatggattccttgcttggaattcgagttggagcacggtttcgtgtaccgtgagcacaacaggtcaccaggatactacgatggacgctactggaccatgt

SEQ ID NO: 257759 - DNA, 412 bp, Glycine max
gaattcaagttcgcaccaaatcttcctcccaaaatgtcaggccgtggaaaaggtgggaagggtttgggaaagggaggagctaagaggcacagaaaggttctttgtgacaacattcaaggaatcacgaaacctgcgattcgtaggttagcgagaagaggtggcgtgaagaggatcagtggtttgatttacgaggaaaccagaggagttctgaagatattcttggagaacgtgattcgcgatgctgtaacctacactgagcacgctaggaggaaaactgttactgctatggatgtcgtttatgctctcaagagacagggaaggaccctctatggctttggaagctaaagaatagaatctttaagtttaatgactgtgttgcaagataaaacattggttcttttgaatttgcgtg

SEQ ID NO: 257760 - DNA, 305 bp, Glycine max
ccccgcgccgtacggctgaagacgacagaagggggaagcttcaataagtaagtatcaatggcttccgaagaatcccagaacaagccccccagcgagcagtccactaccgaactcatcacgagcgcgaagctggtggcggatgcggcgcagtcggctctgaagagcgacagcgacaaagtggacaaggccaaagtggctgacgctgccggcgatcttctcgacgcggcggggaagtatggaaaacttgatgacaaacaaggcatagggcaatatgttgacaaggctgctgattacctgcataatta

SEQ ID NO: 257761 - DNA, 399 bp, Glycine max
  unsure (1)..(399): unsure at all n locations
taaaacagttaaccaacaagctttcttttatgctagtgaacgcgaagtccatcacaacgacatatttatattcggcatagataacaccgtactctctaatatcccatactatgaaaaacatggatatggggtggaggaatttaatgaaaccttatatgatgaatgggttaacaagggcgacgcaccggcattgccagagactcttaaaaattacaacaagctgttgtctcttggcttcaagattgtattcttgtcaggaagatatcttgacaaaatggccgtaacagaagcaaacctaaagaaggctggcttncacacatgggagcagttaattctcaaggatccacatcttatcactccaaatgcactttcatacaaatcagcaatgagagagaatct

SEQ ID NO: 257762 - DNA, 377 bp, Glycine max
taccggtgcggggagaccaccaaatgggggccgcagaagaaccagtagttgagaactaagaaggagaagcaaatggcttcctcaatgatctcttccccagctgttaccactgtcaaccgtgccggtgccggcatggatgctccattcactggcctcaagtccatggctggcttccccaccaggaagaccaacaatgacattacctccattgctagcaacggtggaagagtgcaatgcatgcaggtgtggccaccagttggcaagaagaagtttgagactctgtcctacctgccagaccttgatgatgcacaattggcaaaggaagtagaataccttcttaggaaaggatggattccttgcttggaattcgagttgga

SEQ ID NO: 257763 - DNA, 398 bp, Glycine max
gataccaaaaacaaaacacaagccaagtgaaagtgagaaaaaataaaaatcaaagagcataatgtcagggatcattcacaagattggggagacccttcatgtgggagggcacaagaaggaggaggagcataagggtgagcaccatgctggagaatacaaaggggagcaccatggtgaacacagtagtgagtacaaaggagagcatcatggtgaacacaaagctggagagtaccatggtgagcacaagccagagcacaaagaggggttcctagacaaagtcaaggacaagatccatggtgagggcggcgccgccgagggcgagaagaagaagaaggagaagaagaagaaggagcatggccatgagcatggccatgacagcagcagcagcagtgacagtg

SEQ ID NO: 257764 - DNA, 413 bp, Glycine max
agatacatatgccattcacataccatcaagacacgggatatgctggagaaactaaagagtatataccccaactacaaataccctgcgaagtatactgaggtggatgattacataagtttcagctcagagaaactgcaaaggttgggttggaaatacaggtcactggaggaaacactcgttgattctgttgagagctatcgggaagctggccatctgcaatcagaataaatgtgacttagtagaatagaataaaactaagtgctatatgatagtagatacttcagttttttaaaatctttattaggattcgattcgattctagtgtgagtatgaaaaagactatataatgagggatgttgtaggtagtttggtaatctcgggttagtctccagcgtccggaggaatattctagt

SEQ ID NO: 257765 - DNA, 412 bp, Glycine max
  unsure (1)..(412): unsure at all n locations
ggggtttgaagaattgcacccaaaaggaagagtggtacagtgacactgtgactgctgttcttgttcctgcttacattgatagtactgaaatagttaggagggcatggaagagatacaatttgagcttaggtcttggactgaacaaagttgctgggaaggttttcaggattggacatcttggccacttgaatgagttgcaactgttgggatgtctagctggtgtagagatgatactcaaagatgtgggttatcctgtaaagcttggaagtggagttgctgctgccagtgcatacttacagaacactattcctatgatcccttccaggatttgagtcacaaatcattcttgtctttacttcctttntctgctctttcagaaattctgtanaatatatattaccctcttttacac

SEQ ID NO: 257766 - DNA, 407 bp, Glycine max
  unsure (1)..(407): unsure at all n locations
gaatcagaagaagaagcaggcgagttgagagagaatgggaaggaagaaggggtatgttgagttcgaggagtcgccgccggacgatttcgatccggcgcatccgtacaaggacccggtggcgatgctggagatgagggagcacatcgtgagggagaagtggatccaaatcgagaaggccaagatcattagggagaagctccgatggtgctaccgcatcgaaggcgtcaaccaccttcagaagtgccgtcacctcgtcaaccagtatctcgagtccacccgcggcatcggttggngcaaggacggtcgtcatccttcttttcacgctccccagggtgagccctgtgaatctgattgactgtcctgtggggataataatannnagaagggaagactgtttatccaactga

SEQ ID NO: 257767 - DNA, 351 bp, Glycine max
ggatcatacagaaagccatggcttctctggcaagcttagctgttgttcaaccatctactgttaagggccttgctggaactaagctctctttcaagccctctcgccagagtttcagacccaagaatttcaggagtggtgctgtggtagcaaagtatggtgacaagagtgtgtactttgatttggaggatctaggcaacactactggtcagtgggacttgtacggctccgatgcaccttcaccctacaaccctcttcagagcaagttcttcgagacatttgcctctccattcacaaaaaggggattgttactcaagtttttgatccttggaagtggttccacccttgcatact

SEQ ID NO: 257768 - DNA, 416 bp, Glycine max
ggatcctttgtattctattcttcaagattcaggtgctgcgtttcggaagcagacacagatggctcgtacgaagcaaaccgctcgtaagtccacaggaggaaaggctcctaggaagcagcttgcaaccaaggctgcacgtaagtctgcaccaactactggtggtgtgaagaagccccaccgttatcgtcctggtaccgttgctcttcgtgaaattaggaaataccagaagagtaccgagcttttgatccggaagctccccttccaaaggctggttcgtgaaattgctcaggacttcaagactgatctgcgcttccagagccacgccgtgcttgcattgcaagaagctgctgaggcataccttgttaggctctttgaggacactaacctgtgtgccattcacgccaagcgtgtaacca

SEQ ID NO: 257769 - DNA, 407 bp, Glycine max
  unsure (1)..(407): unsure at all n locations
ggcacaagtgagttcgttgatcgagataactagaaacagtgtgatgaaaatgaaggtccttgttttcttcgttgctacaattttggtagcatggcaatgccatgcgtacgatatgttccctctccgaatgaacactggctatggtgcccgtactccggaggtgaaatgcgcaagttggaggcttgctgtggaagcacacaacatcttttggctttgagaccattcctgaagagtgcgttgaagcaacanaggaatacatncatggcgaacaatatagatcagactccaaaacagntaaccaacaagcttacttttatgccagagacctcgaagtccatcccaaggacacatttgtgttcaagatagatggcaccgtactctctaatattccatactacaaaaaacat

SEQ ID NO: 257770 - DNA, 281 bp, Glycine max
ttttgttctcctgcataagactacagaacggggatcgggcacaaagccatggcttctttggcaagcttaactgatgttcaaccatcgtactgttaaaggccttgctctaactaagatctcttttaagacctctcggcaaagtttcagacccaaaaatttcaagaatgctgctgtagtaacaaactatggtgacaacaatgcgtactctcatttcgaggatctaggctccactactggtcaatgggacttgtacggatcctatgcacctttaccctacaacc

SEQ ID NO: 257771 - DNA, 392 bp, Glycine max
  unsure (1)..(392): unsure at all n locations
ggctgccgttctctgagaaaaacagatagtgtggaagagagaaaagcggaagagaaaatgacgaccaggttcaggaggaacaggaggaagaaaggtcacgtcagcgccggaaacggccgtatcggaaagcaccgcaagcatcccggaggtcgcggtaacgccggtggcatgcattaccaccgtatcctcttcgacaagtaccatcctggtttcttcgggaaggtaggcatgcgctactttcacaaacttcgcaacanattctacaatccgatcatcaacatcgacaagctgtggtccctcctcccccaggagccaaagacaaggccaccgncgacaaggcacccttgctcgatgtcacccagttcggttactttaaggttttgggtaaaggg

SEQ ID NO: 257772 - DNA, 397 bp, Glycine max
  unsure (1)..(397): unsure at all n locations
gaccaagtgaaccaatatagcccaagccctatacaagcaaaccctaacacacacccatttgattcagtttccatggctagcctcaaggttgcatttttggctgcagtgctctgcatggttgtggtgagtgcacccatggcacatgcagctatcacgtgcgggcaggtgacgagtagcctggccaattgcatcggttacctccagaagggaggaacgccgtcgtcgggatgctgcaacggagtgaagagcctcaatgccgtcgccaagaccaccgccgaccgccagacggcgtgcaactgcctcaagtcggccgccagccaaatctccggcttcaacgccaacaacgccgnctcgctccccggcaaatgcggagtctccatcccctacaagatcagca

SEQ ID NO: 257773 - DNA, 406 bp, Glycine max
ggcacaagtgagtttgttgatcgagataactagaaacagtgtgatgaaaatgaaggtccttgttttcttcgttgctacaattttggtagcatggcaatgccatgcgtacgatatgttccctctccgaatgaacactggctatggtgcccgtactccggaggtgaaatgcgcaagttggaggcttgctgtggaagcacacaacatctttggctttgagaccattcctgaagagtgcgttgaagcaacaaaggaatacatccatggcgaacaatatagatcagactccaaaacagttaaccaacaagcttacttttatgccagagacctcgaagtccatcccaaggacacatttgtgttcagtatagatggcaccgtactctctaatattccatactacaaaaaacat

SEQ ID NO: 257774 - DNA, 394 bp, Glycine max
gatagcaagtagcaaggagactagttctgtattcagattacattgcaaaaatggcatcattcaccatgacagcttctatctttggctgcccagctgtcaccaaacggtcggcagtggctgcgcagaggagattactcgtagtgagtgctgccaaagctgaaggggaaaaggtcagttatgacaacaatgatagcaatggaaggaggaacttgatgttcgctgtggctgctgctgctgttttctctgtcgctgggatggcagtggcagatgagcctaaaccaggaacctcagaagccaagaaaaagtatgccccggtttgtgtcgccaatcctacagctaggatttgtcgcaattgaggatctcctgtttcattttacctctgatgatcggaaat

SEQ ID NO: 257775 - DNA, 358 bp, Glycine max
  unsure (1)..(358): unsure at all n locations
ggattgattccctcattcttcatccatagacatggccaccgtcacttctgcagccgttgctattccctcattcactggcctcaaggcaagcgcaggcaaagtgagtgccgcagttaaagtctcagctccccaagccacaaggttgggcatcaaggcttcgctgaaagacgttggagtcgctgttgtggccactgccgcgagtgcagtgctggctagcaacgccatggccattgaagtgttgctgggtggtgatgacgggtctctggctttcgttcccaacaatttctccgtggcctctggggagaagatcgtgttcaagaacaacgcangtttcccccacaacgttgtgttcgacgag

SEQ ID NO: 257776 - DNA, 400 bp, Glycine max
gatctggcagcagaaaaacaagtagttgagaactaagaagaaggaaatggcttcctcaatgatctcctccccagctgttaccaccgtcaaccgtgccggtgccggcatggttgctccattcaccggcctcaaatccatggctggcttccccacgaggaagaccaacaatgacattacctccattgccagcaacggtggaagagtacaatgcatgcaggtgtggccaccaattggcaagaagaagttcgagactctttcctacttgccagacctcgatgatgcccaattggcaaaggaagtcgaataccttctaaggaaaggatggattccttgcttggaattcgagttggagcgcggtttcgtgtaccgtgagcacaacaggtcacctggatactatgat

SEQ ID NO: 257777 - DNA, 404 bp, Glycine max
  unsure (1)..(404): unsure at all n locations
gacaccaacaccaagacagacccactaagatggcttcctttgtatccttcctagtgctgcttcttgcagcccttatcctcatgcctcaagggcttgctacttactacaaaccaattaagaagccaccagtgtacaagcctacagtgtacaagccaccagtgtacaaaccaccgagttataagccaaaaccaccggtttacaagccgaaaccaccggtttacaagccaccatataagaagccaccatacaagaaaccaccttatggaaagtaccctccagtagaggacaacacccatgcctaaagcaagcaatgaggtctattatctacttaataaatnagaggaactgctttgtgttttctagcattgtgatttacaacttcgtagcaatgcatattcttgact

SEQ ID NO: 257778 - DNA, 377 bp, Glycine max
  unsure (1)..(377): unsure at all n locations
ggtcaagcctgccgagaaaaccctagttcgcttgcagtcacacaagaggccaatcctattcatagctcgagatgggtgaggaagtgaaggtagttgttccagaatcagtgttgaagaagcgcaagagggaggaggaatgggcgttggccaagaagcaagaactcgatgctgccaagaagaagagagccgagagccgcaaactcatctacaacagagctaagcagtacgctaaggagtacgatcaccaggagaaggaattgattcggttgaaacgcgaggccaagctgaaaggtggtttctatgtggatccagaggctaagctgttgnttattattcgcattcgtggtattaatgccatggaccccaaatcaaggaag

SEQ ID NO: 257779 - DNA, 401 bp, Glycine max
  unsure (1)..(401): unsure at all n locations
gacacacaaaaaagcaaagcagaaaacaactgttgatttggtatcaagactactacaatactcccctaacttgcggtgcacagctttagatgccttgacgcatcctttctttgacgaacttcgtgatccaaattctcgcttgccaaatggccgattccttccaccactatttaatttcaaatcccatgaactgaaaggtgtcccagctgagattttggtgaaattggttccagagcatgcaaggaagcaatgcccgtttcttggcttgtgaagtgtaacagaactgcaagtgttgtttccatatgagaatgccgcactttccttctatttaaaatgatatttgntggtatctttattgtattcggttgccctgtaaaatcagatttagagatacatgctac

SEQ ID NO: 257780 - DNA, 410 bp, Glycine max
gatagaagaagcagaaagagaagcattagcagaagcgagaagaactagtctaagcagaaatggcctcttcagtgatggcgtctgtggccctcaaacctgcccctttcactgttgagaagtcctcagttagaggccttccctccctctcaaggaactcctcttcattcagagttgtggccagtggtggcaagaagatcaagactgacaagccttatggaattaatggtggcatggctttgagggaaggagttgatgcatctggcaggaaaggaaagggaaagggcgtttaccagtttgtagacaaatacggtgctaatgtcgatggttacagtcctatctacgacaccaaggactggtctccaaccggtgatgtctacgctggcggtacgactggcttggctatctgggct

SEQ ID NO: 257781 - DNA, 239 bp, Glycine max
gattcagattacattgcaaaaatggcatcattcaccatgacagcttccatccttggcagcccagccgtcaccaaccggtcggcagtagcaacgcagaggagatcactcgtagtgaatgctgccaaagctgttgaagcagaaaaggtcagttatgacaatgacatggatggtagcaatggaaggaggaacttgatgttcgccgcggcggcggctgctgtttgctctgttgctgggatggc

SEQ ID NO: 257782 - DNA, 397 bp, Glycine max
gacaccaacaccaaaacaaacccactaagatggcttcctttgtatccttcctagtgctgcttcttgcagcccttatcctcatgcctcaagggcttgctacttactacaaaccaattaagaagccaccagtgtacaagcctccagtgtacaagccaccagtgtacaaaccaccggtttataagccaaaaccaccggtttacaagccgaaaccaccggtttacaagccaccatataagaagccaccatacaagaaaccaccttatggaaagtacccttcagtagaggacaacacccatacctaaagcaagcaatgaggtctattatctacttaataaataagaggaactgctttgcgttttctaacattgtgatttaccacttcggaacaatgcatatt

SEQ ID NO: 257783 - DNA, 412 bp, Glycine max
gaaggtgcaagagtttgttgtgagctataagctagtttatcgtgaggagaatatgaagttgtttgttttctttgttgctgcagtagttttggtagcatggccatgccatggcgcaggctaccaaaggttccctctccgaatgaaaactggctatggtgagcgttcttcggaggtaaaatgcgcaagttttaggcttgctgtggaagcacacaacatccgagcctttaaaaccattcctgaagagtgcgttgaaccaacaaaggactacattaatggcgaacaatttagatcagactctaaaacagttaaccaacaagctttcttttatgctagtgaacgcgaagtccatcacaacgacatatttatattcggcatagataacaccgtactctctaatatcccatactatgaa

SEQ ID NO: 257784 - DNA, 354 bp, Glycine max
ggaagtgatagaggaaactgtagaagcgcacagagagagctaagtggaggaagaaaatgaaggcattgggatggtggctgatagcggtaggcacgcttcgattagcttccgtgtggttcggtttcttcgacatttgggctcttcgtctcgccgtcttctgcaacactacaatgactgaagttcatgggcgcacatttggaacttggacactgttgacctgcaccctttggtatatctgcgcattcaaccttgaaaataagcctctctacctggctacttttttggcattcatctatgcattcggtcatttcttgaccgaatatctaatttatcatacaatggagattaagaatc

SEQ ID NO: 257785 - DNA, 316 bp, Glycine max
ggcacaagtgagtttgttgatcgagataactagaaacagtgtgatgaaaatgaaggtccttgttttcttcgttgctacaattttggtagcatggcaatgccatgcgtacgatatgttccctctccgaatgaacactggctatggtgcccgtactccggaggtgaaatgcgcaagttggaagcttgctgtggaagcacacaacatctttggctttgagaccattcctgaagagtgcgttgaaacaacaaaggaatacatccatggcgaacaatatagatcagacttccaaacagttaaccaacaagcttacttttat

SEQ ID NO: 257786 - DNA, 398 bp, Glycine max
ggagtacaacttcacattttagaagaataccccctcttttgctgcatcagaggagttgtaaattaagagcatggctgcacaagctcttgtatcatcatcttctcttaccttctcagcggaggctgcaagacaaagtcttggaccaagatcactccaatctccatttggcttctccagaaaagcctcctttcttgttaaggcagctgctaccccccctgtcaagcaaggatcagacaggcctttgtggtttgcatcaaagcaaagtctttcttacttggatggcagccttccgggtgactatggatttgaccctctgggactttcagaccctgaaggaacaggagggttcattgagccgaaatggctagcatatggtgagataatcaatgggtcgtatg

SEQ ID NO: 257787 - DNA, 388 bp, Glycine max
gatctggcagcagaagaacaagtagttgagaactaagaaggagaagcaaatggcttcctcaatgatctcttccccagctgttaccactgtcaaccgtgccggtgccggcatggttgctccattcactggcctcaagtccatggctggcttactcaccagaaagaccaacaatgacattacctccattgctagcaacggtggaagagtgcaatgcatgcaggtgtggccaccagttggcaagaagaagtttgggactctgtcctacctgccagaccttgatgatgcacaattggcaaaggaagtagaataccttcttaggaagggatggattccttgcttgaaattcgagttggagcacggtttcgtgtaccgtgagcacaacaggtca

SEQ ID NO: 257788 - DNA, 366 bp, Glycine max
  unsure (1)..(366): unsure at all n locations
cgagaaagacattaccccaatgggtggtttccctcactatggtgttgttaaggatgattttatcatggtcaagggatgctgtgttggtcccaagaagagggtcattacattgcgtcaatcccttcttaagcagacttctcgtgttgctcttgaggagatcaaactcaagtttatcgatacctcttcaaagtttgggcatggtcgcttccagaccacacaggagaagcagaagttctttggacgcctcanagcataattatgttaattggatggaaatgctggaattctatttggttgccatcacttataaactntgtagtgtttctggtttgatattatggattctcgggtagtgagttttttttc

SEQ ID NO: 257789 - DNA, 401 bp, Glycine max
gagactcaacaagcattccactcacacctcatcgtttctctctctagatctctgtttcttctttttctccaaccttcgtttcaccaccacacttacattactttgtcgaaatggctccaccaattgagaccccaaacaaggtttccagctatcaacagtccccaaaccctcgtcttaacgagaggattctttcatccatttccaggagacacgttgctgcacacccgtggcacgatcttgagataggacccgaagctccaaagatcttcaactgtgtggtcgaaatagggaaaggaagcaaggtgaaatatgaacttgtcaaaagaactggacttattatggttgatcgtatactttactcatcagttgtttatcctcacaactatgggtttattccacgt

SEQ ID NO: 257790 - DNA, 409 bp, Glycine max
  unsure (1)..(409): unsure at all n locations
atagcaagtagcaaggagactagttctgtattcagattacattgcaaaaatggcatcattcaccatgacagcttctatctttggctgcccagctgtcaccaaacggtcggcagtggctgcgcagaggagattactcgtagtgagtgctgccaaagctgaaggggaaaaggtcagttatgacaacaatgatagcaatggaaggaggaacttgatgttcgctgtgactgctgctgctgttttctctgttgctgggatggcagtggcagatgagcctaaaccaggaacctcagaagccaagaaaaagtatgccccggtttgtgtcaccaatcctacagctagcatttgtcgcaattgaggatctcctgtttcattntacctctgatgatcggaaatgtacgttggggatgta

SEQ ID NO: 257791 - DNA, 411 bp, Glycine max
ggtttctaaaacactatcccttttactgtttattgacaaagagaaacaatcggaggatctgttctgttccataagatggctggacttttaggatataggagccttccacctaaggcaaagaatctggtagttgctgggggtttgacagcttttgtctttggtgcatacttctacaccatgagggctgttggaggcactgatgaactgcaggtagcaattgataagtttgaagctgacaagagcaagaatgagggtgatgccaacatgccatcaaaggtctaaagcttgtacaataaagcaatactttgggtgtattcactgttttggtttgggatcaagctttttacttagtatgagaatgttctaaaaggaatgatattgaatctagttgctaataagtttcaaccagct

SEQ ID NO: 257792 - DNA, 293 bp, Glycine max
ggagcaaaaccctaatccctatttttcttcctcagtagtgtcatttacgcttctcttctctgcagcaactatgcctaaccctaaggtcttcttcgacatgaccatcggcggtcaatctgctggccgcatcgtgatggagctctacgccgacgtcactccccgcaccgccgagaacttccgcgcgctttgcaccggcgagaagggcgtagggcggagcggcaagcccctccactacaagggctcgtccttccaccgcgtggtcccgagtttcatgtgtcagggtggcgacttca

SEQ ID NO: 257793 - DNA, 395 bp, Glycine max
gattgtaaagcattcttctcttttctttctttgctctttcctctctctctctacgctttctcgcttgagatccctcaagggatccactaactgaaggagcaatggggttgacatttaccaagctttttagccggcttttcgccaagaaggaaatgcgaattctaatggttggtcttgatgccgctggtaagaccaccatcctgtacaagctcaaacttggagagatcgttaccacaattcccaccattgggttcaacgtggagactgtggaatacaagaacattagtttcactgtctgggatgttggtggccaggacaagattcgtcccttgtggaggcactacttccaaaatacacagggtctcatttttggtgttgacagcaatgacagggac

SEQ ID NO: 257794 - DNA, 406 bp, Glycine max
gattagaaagaggatcaaaagagaaaagagaagacaaagggcaacactggatggctttaccgacatcaccggagcacagaacagcatcgatatcgaaaatctcgctcgctctgctgttgatgaacacaacataaaagagaatgcagatctggagtttgtgaaggtgattagtgcacagaaacaagtggattctggcaccttgtactatatcactctggaggcaaatgatggtgtgacgaaaaaggtttatgaaactaacgtgttggagaaaccacggttgaacatcaaggaggttcaggaattcaagcccatcactgttgctgttaatcctctttcggtgacggtctagcacatagctaggttatggaagtgactagctttgccgcaagagttataatatgtatga

SEQ ID NO: 257795 - DNA, 358 bp, Glycine max
gcttctgagtcgtggtttacttctcagcagcttcggctagggttcagaaacgaaaaagggttcggtgttctgttcgcgatgagagccaagtggaagaagaagcgtatgaggaggttgaagaggaagcgccgaaagatgagacagagatccaagtagtgcgttaaacctagtttgtttctgttgcttttacaattgcttatgttgtcgaatgggacacccagttgttaatggcactggtttctcctttttgatgtttgatacattttgttggattcaagtagtctatgttcgtcttatgttattagctcaaaacaatgttgttactgcttttgctaatcaacatgatctcctatttgga

SEQ ID NO: 257796 - DNA, 365 bp, Glycine max
catgagggagggtcccaaccttctcaagttggcgaggaaggagcagtgcttggctcttgggactaggctcaggtcaaagtacaagatcaagtaccagttttacagggtcttccccaatggggaggttcagtatttgcaccccaaggatggtgtgcaccctgagaaggtcaacgccggacgccaaggggttggtcagaacttcaggtctattggtaagaatgttagtcctattgaggtcaagttcactggcaagcaaccctatgatttgtgagcaactctatcatcattcccccatgcttcttccattcgtttatatgctatattgtcatctcatgtcatgccaagaatgctataactctttaccc

SEQ ID NO: 257797 - DNA, 440 bp, Glycine max
  unsure (1)..(440): unsure at all n locations
cggaattgcagtttcgacctacacgtacgcgtacgcatgcgtgcacgcatacgaccggttgcgataagacaacatanggggcttctgagtcgcgtttgacttctctgcatgtttggatcgggttcacagacgaacaaggcatcatcgatctgttcgatgatgagagcctatggtgaagatgaagcctatgaggaggatgatgaggaagcgccgattgatgagacagatatccaagtagtgcgttaaacctaggtcgcctctgacgctattacaattgcttatgttgacgaatgggacacccagttgttaatggcactggtttctcctttatgatgtttgatacattttgatggattcaagtagtctatgatcgtctgatgctattagctcataacaatgatggtactgcttatgctaatcaacatgatctgctatttgga

SEQ ID NO: 257798 - DNA, 409 bp, Glycine max
  unsure (1)..(409): unsure at all n locations
ggcacaagtgagtttgttgatcgagataactagaaacagtgtgatgaaaatgaaggtccttgttttcttcgttgctacaattttggtagcatggcaatgccatgcgtacgatatgttccctctccgaatgaacactggctatggtgcccgtactccggaggtgaaatgcgcaagttggaggcttgctgtggaagcacacaacatctttggctttgagaccattcctgaagagtgcgttgaagcaacaaaggaatacatccatggcgaacaatatagatcagactccaaaacagttaaccaacaagcttacttttatgccagagacctcgaagtccatcccaaggacacatttgtgttcagtatagatggcaccgtactctctaatattccatactacaaanaacatgga

SEQ ID NO: 257799 - DNA, 399 bp, Glycine max
  unsure (1)..(399): unsure at all n locations
gaccaagtgaaccaatatagcccaagccctatacaaccaaaccctaacacacacccatttgattcagtttccatggctagcctcaaggttgcatttttggctgtagtgctctgcatggttgtggtgagtgcacccatggcacatgcagctatcacgtgcgggcaggtgacgagtagcctggccaattgcatcggttacctccagaagggaggaacgccgtcgtcgggatgctgcaacggagtgaagagcctcaatgccgccgccaagaccaccgccgaccgccagacggcgtgcaactgcctcaagtcggccgccagccaaatctccggcttcaacgccaacaacgccgnctcgctccccggcaaatgcggagtctccatccnctacaagatcagcacc

SEQ ID NO: 257800 - DNA, 156 bp, Glycine max
tcaaacgaagaaaggcttatggtggatacctaggcacccagagacgaggaagggcgtagtaagcgacgaaatgcttcggggagttgaaaataagcgtagatccggggattcccgatataggtcaacctttcgaactgctgctgaatccacgggcag

SEQ ID NO: 257801 - DNA, 373 bp, Glycine max
  unsure (1)..(373): unsure at all n locations
ggacacacagctattcctcttaagcttgctactgagtttccacactgcataccttaggtcttccgaattcgaagttaatttgcaagatggctaaggaaaaggctcagatcaacattgtggtggttggtcatgtggaccctgaggaggcaaccaccattaacgagctgaagaagcctgttgtggagaaagaagctccagggcatgccatatgagggcatgcacgtacggcctcggaggggaaccagaaaattatgttaacaaaataatctggaaccctaatgtatcagtgtcatcatcagtgtgtagtttaagctagctttgctatggntacgttctttgagatgagagtcttgatgaacagtaccattctgat

SEQ ID NO: 257802 - DNA, 413 bp, Glycine max
  unsure (1)..(413): unsure at all n locations
gatctggcagcagaagaacaagtagttgagaactaagaaggagaagcaaatggcttcctcaatgatctcttccccagctgttaccactgtcaaccgtgccggtgccggcatggttgctccattcactggcctcaagtccatggctggcttccccaccaggaagaccaacaatgacattacctncattgctagcaacggtggaagagtgcaatgcatgcaggtgtggccaccagttggcaagaagaagtttgagactctttcctacctgccagaccttgatgatgcacaattggcaaaggaagtagaataccttcttaggaagggatggattccttgcttggaattcgagttggagcacggtttcgtgtaccgtgagcacaacaggtcaccaggatactacgatggacgctact

SEQ ID NO: 257803 - DNA, 402 bp, Glycine max
gaagaagaagaattggattcgaaaatcgtagcgtagcgttggtgcgattgaacgatacgatgggaagaggaaaattcaagagcaagcccactggtcgccgccagttctccaccccggaagatatgcttgctggaacctctaaccgtcctcgaacttttagacagaaagaagctgagcatgaagaggaagaacccgaggaagtatctggagatgaatctggagaagaatctgaagaagaaacttctaagaaaaaaggaacacaaggggttattgagattgaaaatcccaacttagtaaagccaaagaccttgaaagctagagatgttgatgttggaaaaacaacagaactttcaaggcgtgaaagggaagagatagagaaacagagagcccatgagcgctata

SEQ ID NO: 257804 - DNA, 408 bp, Glycine max
gacaagtgagtttgttgatcgagataactagagacagtgtgatgaaaatgaaggtccttgttttcttcgttgctacaattttggtagcatggcaatgccatgcgtacgatatgttccctctccgaatgaacactggctatggtgcccgtactccggaggtgaaatgcgcaagttggaggcttgctgtggaagcacacaacatctttggctttgagaccattcctgaagagtgcgttgaagcaacataggaatacatccatggcgaacaatatagatcagactccaaaacagttaaccaacaagcttacttttatgccagagacctcgaagtccatcccaaggacacatttgtgttcagtatagatggcaccgtactctctaatattccatactacagaaaacatggat

SEQ ID NO: 257805 - DNA, 413 bp, Glycine max
  unsure (1)..(413): unsure at all n locations
ggtagtgttgttgaggttttttgtagcagaatgcagtgcggtgtgttgtagcagcgattagaaggaaggaggaaagatgaacacagacatcactgcatcgacgaagccagagtacccagtcattgatcgcaaccctcctttcaccaaagtcgtcggcaacttcaacaccctcgactatctccgattcgtcacaatcaccggcgtttccgtcaccgtcggctacctctccgggattaagcctggaattaggggtccttcgatggtgacagggggtttgatcggagtgatgggtgggttcatgtatgcttaccagaactccgctgggagactcatgggtttcttccccaacgatgatgaggtagctcgctacaacaaanaataattcctttttttgtgctcatcaaaaaaacaaa

SEQ ID NO: 257806 - DNA, 396 bp, Glycine max
  unsure (1)..(396): unsure at all n locations
gagtattcagattacattgcgaaaatggcatcattcaccatgacagcttccatccttggcagcccagccgtcaccaaccggtcggcagtagcaacgcagaggagatcactcgtagtgaatgctgccaaagctgttgaagcagaaaaggtcagttatgacaatgacatggatggtagcaatggaaggaggaacttgatgttcgccgcggcggcggctgctgtttgctctgttgctgggatggcagtggcagatgagcctaaaccaggaaccccagaagccaagaaaaagtatgctccgatttgtgtcaccatgccaactgctaggatttgtcgcaattgagggactntggtttttattntacttctgatgattggaaatgtacaatggggttgttgt

SEQ ID NO: 257807 - DNA, 411 bp, Glycine max
gacacttactagtagtaagcatggagtcctcaagagatctatgcttacctcttcctctgcatgatctttctctcttccgccactcccattctcggttgtggctactgtggcaaaccccccaaaaagcacaagcctggtaaaacaccaaagacacccaaaacacccgttgttaagccaccagtcaccatccctcccattaatgttcctcccgttgttcttccaccaatagtgaagcccccaggtattctccccccaattccaattattaacccaccaaccacaccagggaagggagggaacactccatgcccaccaccaaagtctcctgcgcaggctacgtgccccattgacacgctcaaacttggtgcctgtgtggatcttcttggagggttggttcacattggtttgggt

SEQ ID NO: 257808 - DNA, 418 bp, Glycine max
gaccacattccaaaacacaaacacatacattgtagtatcacttttgtctcggaatttgttcttttgagttatggcaagcttaaaggttgcatgtgtggttttgatgtgcatggctgtgatgagtgcaccaatgatggtgcaagccgtgtcatgcaatgatgtttctgtgaacctagcaccgtgcctatcttacctgatgcagggtggagatgttccagaatcgtgctgtagcggagtgaggaacattctgggttctgccagcaccacctttgacaaacaaaccgtgtgcaaatgtcttcagcaagctgctaataactatggcatcaacgacgaatacgctcaggcactccccgcccgctgcaatgtcagcgtcccttacaagatcagccgatccaccaactgcgactccatcaagttc

SEQ ID NO: 257809 - DNA, 361 bp, Glycine max
ggtgatttagagcgctcaattaagttttatgaaaaggctttgggcatgaaggtggtgaggaaggttgataagcctgagtacaagtacactatagctatgctcgggtatggagaggagcacgagacagctgtgttggagttgacatataactatggtgtgactgaatactctaagggaaatgcttatgcacagattgccattggtactgatgatgtatataagagtgctgaggtagttaaccaagtcataaaagaggttggagggaagattactcggcaaccagggccaattcctgggcttaatacaaaaaccacttcgtttttagatccagatggatggaaaactgtcttggttgacaacg

SEQ ID NO: 257810 - DNA, 351 bp, Glycine max
ggagcatgcttacggttctggaatccatcgtgtaaaagctcaaatccaaaccctaaaataccaccgccgttctcatctctcttcccagccctcacctcaacgctgcatcttcacgtcgtctcacgaggtgcatatagtagagagggaaaatgagtcgaggaggcgcagtagcagcagcgaagggaaagaagaagggtgctacattcaccattgactgtgcaaagccagtggaagataagatcatggacattgcttctctcgaaaagtttcttcaagagaggatcaaggttggtggcaaagctggtgctcttggtgacagtatcactgttacccgcgagaagaccaagatca

SEQ ID NO: 257811 - DNA, 356 bp, Glycine max
catgatactacgatggacgctactggaccatgtggaagctgcctatgtttggttgcactgatgcttctcaggtgttgaaggagcttcaagaggctaagactgcataccccaacggcttcatccgtatcatcggattcgacaacgttcgccaagtgcagtgcatcagcttcatcgcctacaagcccccaggcttctaagtgtgaaaaatttgcaaagcatttgtagccgccaccccactttgtttgtttgcacttaaactacattcccatttgtttttgctttttgagatttcatcatcctgtatttttggtttctgttttcggacttcaatggaaattaatggatgagaactaatg

SEQ ID NO: 257812 - DNA, 316 bp, Glycine max
ggcacaagtgagtttgttgatcgagataactagaaacagtgtgatgaaaatgaaggtccttgttttcttcgttgctacaattttggtagcatggcaatgccatgcgtacgatatgttccctctccgaatgaacactggctatggtgcccgtactccggaggtgaaatgcgcaagttggaggcttgctgtggaagcacacaacatctttggctttgagaccattcctgaagagtgcgttgaagcaacaaaggaatacatccatggcgaacaatatagatcagacttcaaaacagttaaccaacaagcttacttttat

SEQ ID NO: 257813 - DNA, 371 bp, Glycine max
gacaacccatctttcatatccaaattccaatgcttcttcttccttcttatttcaatttcaatcactactattattactctttcacgcttttgcttctcgatttttaaaccctaaatctatctatctgtctgatagataagatagggcaaaaacaaaacaaaacaaaataaaaccctagccaaagaaagaccttgttgagcagcagcagcagagagagaggcttatggaaggagtaccgtacccaatacccagaactgtcgaagaggttttcaccgattttaagggcagacgcgctggtttgattaaggccctcactactgacgttgaaaagttttaccagcagtgcgatcccgagaaggagaatttgtgtc

SEQ ID NO: 257814 - DNA, 411 bp, Glycine max
ggcacaagtgagtttgttgatcgagataactagaggcagtgtgatgaaaatgaaggtccttgttttcttcgttgctacaattttggtagcatggcaatgccatgcgtacgatatgttccctctccgaatgaacactggctatggtgcccgtactccggaggtgaaatgcgcaagttggaggcttgctgtggaagcacacaacatctttggctttgagaccattcctgaagagtgcgttgaagcaacgaaggaatacatccatggcgaacaatatagatcagactccaaaacagttaaccaacaagcttacttttatgccagagacctcgaagtccatcccaaggacacatttgtgttcagtatagatggcaccgtactctctaatattccatactacaaaaaacatggata

SEQ ID NO: 257815 - DNA, 384 bp, Glycine max
cgccggaggtagaaagggcggcggcccaaagaagaagccggtttcaaggtccgtcaaagccggtctccaattccccgtcggaagaattggccgttatttgaagaaaggaaggtacgctcagcgtgtcggtaccggtgctcccgtatacttggctgcagttctcgaatacctagctgccgaggtgcttgagttggctgggaatgccgcacgtgacaacaagaagaacaggattattccaagacacgtgcttttggcagtgaagaacgatgaggagttggggaaattgcttgctagagcgacaattgcacatggtggcgtgcttccaaacattaacctttgtttgttgcctaagaagaccgagagggcttccaaggaacctaaatc

SEQ ID NO: 257816 - DNA, 416 bp, Glycine max
gatctggcagcagaagaacaagtagttgagaactaagaaggagaagcaaatggcttcctcaatgatctcttccccagctgttaccactgtcaaccgtgccggtgccggcatggttgctccattcactggcctcaagtccatggctggcttccccaccagaaagaccaacaatgacattacctccattgctagcaacggtggaagagtgcaatgcatgcaggtgtggccaccagttggcaagaagaagtttgagactctttcctacctgccagaccttgatgatgcacaattggcaaagggaagtagaataccttcttaggaaggggatggattcctttgcttggaattcgaagtggagcacggtttcgtgtaccgtgagcacaacaggtcaccaggatactacgatggacgctact

SEQ ID NO: 257817 - DNA, 403 bp, Glycine max
gacaccaacaccaaaacaaacccactaagatggcttcctttgtatccttcctagtgctgcttcttgcagcccttatcctcatgcctcaagggcttgctacttactacaaaccaattaagaagccaccagtgtacaagcctccagtgtacaagccaccagtgtacaaaccaccggtttataagccaaaaccaccggtttacaagccgaaaccaccggtttacaagccaccatataagaagccaccatacaagaaaccaccttatggaaagtaccctccagtagaggacaacacccatgcctaaagcaagcaatgaggtctattatctacttaataaataagaggaactgctttgtgttttctagcattgtgatttacaacttcgtagcaatgcatattcttgac

SEQ ID NO: 257818 - DNA, 360 bp, Glycine max
gctctctttttgctgtgggaagaggaaccctagctagggtttggaagaagctgatccgagaagatggtgcagcgtctcacctaccgcaaacgccacagctatgctaccaaatccaaccagcacagagtcgtcaagactcccggtggcaagcttgtttatcagaccacgaagaagagggccagcggacccaagtgccctgtcactggaaagaggattcaagggattccacatttaaggccagcagagtataatagatcaaggttacacagaaaccgaaggactgtgaaccgtgcatatggtggtgtgatgtctggcagtgctgttagagaaagaatcattcgagctttcttggccgaagag

SEQ ID NO: 257819 - DNA, 418 bp, Glycine max
  unsure (1)..(418): unsure at all n locations
gaaggtgcaagagtttgttgtgagctataagctagtttatcgtgaggagaatatgaagttgtttgttttctttgttgctgcagtagttttggtagcatggccatgccatggcgcangctaccaaaggttccctctccgaatgaaaactggctatggtgagcgttcttcggaggtaaaatgcgcaagttttaggcttgctgtggaagcacacaacatccgagcctttaaaaccattcctgaagagtgcgttgaaccaacaaaggactacattaatggcgaacaatttagatcagactctaaaacagttaaccaacaagctttcttttatgctagtgaacgcgaagtccatcacaacgacatatttatattcggcatagataacaccgtactctctaatatcccatactatgaaaaacat

SEQ ID NO: 257820 - DNA, 401 bp, Glycine max
gatagcgtttttcattgtgcattattcaatggccaccacagcagctctatccggaaccatggtgagcacctccttcatgaggaagcaacctatgacgaccaagagcctaaagacattccccaacgctctttttggtctgaaaggtggacgaggtggtcgtgtaacttgcatggcctcgtacaaggtgaagctcataaccccagaaggagaagtggagtttgaatgcccagatgatgttttcattgttgacaaggctgaggaagaaggcattgaacttccctactcgtgcagggctggttcttgcgtttcatgtgttgggaaaattgtgaaaggtgacgtggaccagtcagatggtagcttccttgatgatgaacaaatagaaagtggatgggttctcacct

SEQ ID NO: 257821 - DNA, 400 bp, Glycine max
gaccatagcaagtagcaaggagactagttctgtattcagattacattgcaaaaatggcatcattcaccatgacagcttctatctttggctgcccagctgtcaccaaacggtcggcagtggctgcgcagaggagattactcgtagtgagtgctgccaaagctgaaggggaaaaggtcagttatgacaacaatgatagcaatggaaggaggaacttgatgttcgctgtggctgctgctgctgttttctctgttgctgggatggcagtggcagatgagcctaaaccaggaacctcagaagccaagaaaaagtatgccccggtttgtgtcaccaatcctacagctaggatttgtcgcaattgaggatctcctggttcattttacctctgatgatcggaaatgta

SEQ ID NO: 257822 - DNA, 408 bp, Glycine max
ggcagcagaagaacaagtagttgagaactaagaaggagaagcaaatggctccctcaatgatctcttccccagctgttaccactgtcaaccgtgccggtgccggcatggttgctccattcactggcctcaagtccatggctggcttccccaccaggaagaccaacaatgacattacctccattgctagcaacggtggaagagtgcaatgcatgcaggtgtggccaccagttggcaagaagaagtttgagactctttcctacctgccagaccttgatgatgcacaattggcaaaggaagtagaataccttcttaggaagggatggattccttgcttggaattcgagttggagcacggtttcgtgtaccgtgagcacaacaggtcaccaggatactacgatggacgctact

SEQ ID NO: 257823 - DNA, 423 bp, Glycine max
  unsure (1)..(423): unsure at all n locations
ggcacaagtgagtttgttgatcgagataactagaaacagtgtgatgaaaatgaaggtccttgttttcttcgttgctacaattttggtagcatggcaatgccatgcgtacgatatgttccctctccgaatgaacactggctatggtgcccgtactccggaggtgaaatgcgcaagttggaggcttgctgtggaagcacacaacatctttggctttgagaccattcctgaagagtgcgttgaagcaacaaaggaatacatccatggcgaacaatatagatcagactccaaaacagttaaccaacaagcttacttttatgccagagacctcgaagtccatcccaaggacacatttgtgttcagtatagatggcaccgtactctctaatattccatactacaaaaaacatggatatggngtggagaa

SEQ ID NO: 257824 - DNA, 437 bp, Glycine max
  unsure (1)..(437): unsure at all n locations
acgacagaagggggttctagtgtatgtgattgttgtgactcgttcttcttcgtcgttatcttcttcttttgttgtttgtgtgtttgttttttctctcacctgaaaatgtcttgctgcggtggtaactgtggttgcggaagcgcctgcaagtgcggcaacggctgcggaggctgcaagatgtacccagacttgagctacaccgagtcaaccaccaccgagaccttggtcatgggagtggcaccagttaaggctcaattcgagagtgctgaaatgggtgttcccgctgagaacgatggctgcaaatgtggagctaactgcacctgcaacccctgcacttgcaagtgangtgttggagagctaaagcttcaagcagagatggcccttagaaataatgataaanactatatgtagtttcaaaacttcaaaattatgtagta

SEQ ID NO: 257825 - DNA, 407 bp, Glycine max
  unsure (1)..(407): unsure at all n locations
gagagcgaaagagatgtcgttggtttcaagcatgttcgggtgtggagtggtgatggcggcgtcgcaagcaatgggaattggaaggagaagcgatggtggattgacgatagtgtgttcgtctaggccgcagaagaaagcgacggcgcatcacatgaagactcggcctcggaagacgcaggcatgggatagaaaccgcaagcccaccgtctacgatccactccctcctcttcctcctgattggaccctcgttattcccgctgacgcttcttctgctcccgttacgccttcgncttcaactccctctgcctagtcactctctcggtactctctctcgntttcatgtagtcttatctttaattccagcagcttttctttcatgttttcatctcaaatcaaaccttcatcat

SEQ ID NO: 257826 - DNA, 410 bp, Glycine max
gacagcagcagagcaaaagagggaaagaaggaaagtgcaacttcctctgttttgctcccctgtttaagccttatcataagcttagaatggcacacaaggaattttccattgccctagtgactctcattgttctctttgtcaacacgaacctccatggtgccatggctgactatggtggtggttggcagagtgctcatgccactttctatggtgggggtgatgcttctggcacaatgggtggagcatgtgggtatggaaatttgtatagccagggatatggaactgacactgtggctctaagcactgctttgttcaacaatggcttaagctgtggatcttgctatgaaatgagatgtgatgatgacccaagatggtgcaaacctggctctattaccggcactgctactaac

SEQ ID NO: 257827 - DNA, 421 bp, Glycine max
gaacacagaacataaacaaagaaaaaaaaaacgcttagccaacacaaccatcatggccacctctgctattcagcaatcagcattcactggtcaaactgctctgaagcagctcaatgagttcgtccgcaagaccggcggcgccggcaaaggtcgcactaacatgcgccgcaccgtcaagagtgctcctcagagcatttggtatggccctgaccgtcccaagtacttgggtccattctcggagcagattccatcatacctgaccggagaattccctggtgactacggatgggacactgctggattatcagctgacccggaaaccttcgccaggaaccgggagctggaggtgattcacagcagatgggcaatgcttggtgcccttggctgcaccttcccagagatccttgagaagaatggtgtc

SEQ ID NO: 257828 - DNA, 415 bp, Glycine max
ggcagttcaattccaatatattccattctctctgggtatttccctacctctcccttcaagatgcagatcttcgtcaagaccctcaccggcaagaccatcacccttgaggtggaaagctctgacaccatcgacaacgtcaaggccaagatccaggacaaggaaggaatccccccggaccagcaacgtctcattttcgccggaaagcaacttgaggacggccgtacccttgctgactacaacattcagaaggagagtactcttcacctcgtcctccgtctccgtggtggcatgcagatcttcgttaagacactcaccggcaagaccataaccctagaggttgaaagctccgacaccatcgataacgtcaaggccaagatccaggacaaggagggtatccccccggaccagcaacgtc

SEQ ID NO: 257829 - DNA, 412 bp, Glycine max
ggtgctctgctcgtgcctctagggttatcattgctccatttccattttctctctctcacttttcaagaatcgtaagctatgggaaagtcttacccaactgtgagtgctgattaccagaaggccgttgagaaggcgaagaagaagctcagaggcttcatcgctgagaagagatgcgctcctctaatgctccgtttggcatggcactctgctggaacctttgacaggggcacgaagaccggtggacccttcggaaccatcaagcaccctgccgaactggctcacagcgctaacaacggtcttgacatcgctgttaggcttttggagccactcaaggcggagttccctattttgagctacgccgatttctaccagttggctggcattgttgccgttgaggtcacgggtggacctg

SEQ ID NO: 257830 - DNA, 412 bp, Glycine max
ggcacaagtgagtttgttgatcgagataactaggaacagtgtgatgaaaatgaaggtccttgttttcttcgttgctacaattttggtagcatggcaatgccatgcgtacgatatgttccctctccgaatgaacactggctatggtgcccgtactacggaggtgaaatgcgcaagttggaggcttgctgtggaagcacacaacatctttggctttgagaccattcctgaagagtgcgttgaagcaacaaaggaatacatccatggcgaacaatatagatcagactccaaaacagttaaccaacaagcttacttttatgccagagacctggaagtccatcccaaggacacatttgtgttcagtataaatggcaccgtactctctaatattccatactacaaaaaacatggatat

SEQ ID NO: 257831 - DNA, 353 bp, Glycine max; identical to SEQ ID NO: 257671

SEQ ID NO: 257832 - DNA, 405 bp, Glycine max
caagtactttcaagttcctgtggcaataaggaagagcaatacactgtggaaggagtgcagaatcttggagacaaagcagtgatgtgtcatgggctaaatttcagaactgcagtattttactgccataaagtccgtgaaacaacagctttcatggttccattggtggctggtgatggaaccaaaactcaggcacttgctgtttgccactcagatacttctggaatgaatcatcacatgcttcatgaactcatgggagttgatcctggaactaaccctgtttgccatttccttggaagcaaggccattttatgggtacccaatatatctatggacactgcctatcagactaacgttgctgtttaattagtccatgcatctgcatcttgggcaccataagattgtata

SEQ ID NO: 257833 - DNA, 415 bp, Glycine max
gaagcttcaatcagtaagtatcaatggctttcggagaatccgggaacaagccccacagcgagcagtccactaccgaactcatcacgagcgccaagctggtggcggcggcggcgcagtcagctctgaagagcgacagcgacaaagcggacaatgccaaggtggctgacgctgccggcgatcttctctacgcggtggggaagtatggaaaacttgatgacaaacaaggcatatggcaatatgttgacaaggctgctgattatctgcataattaccagggtgataataccactgctgcttcacagcctgcagagtctaaaggtgaagaaagcggtggtgggttaagtggtcttgcaaacttggctggaggcttcttcaaaagtagttacaaagcaactaaataagaccttaattgagt

SEQ ID NO: 257834 - DNA, 426 bp, Glycine max
aagacgacagaaggggtgttggggatgttgctgatggtgtgggttgttaaggtttcgtctgatccaaagagagaagaagaaatactggaagaagaactacattttcccgataacgagccacttattgtgagagacgggaacagaaggctaatgcaagacatagattgtggtgggttgtgcaagacgaggtgcagtgcacattcgagacccaacttgtgcactagggcgtgtggcacgtgctgtgtgaggtgtaagtgtgtcccacctggcacatctggaaatagggaactatgtggaactttctacactgatatgactacccatggcaacaagaccaagtgcccttagagaaaaaacccattgggaaatatgtgcttcattgattatgcaccgaagttcaagtgtactagtatgtggtggttcaat

SEQ ID NO: 257835 - DNA, 333 bp, Glycine max
gacaccaacaccaaaacaaacccactaagatggcttcctttgtatccttcctagtgctgcttcttgcagcccttatcctcatgcctcaagggcttgctacttactacaaaccaattaagaagccaccagtgtacaagcctccagtgtacaagccaccagtgtacaaaccaccggtttataagccaaaaccaccggtttacaagccgaaaccaccggtttacaagccaccatataagaagccaccatacaagaaaccaccttatggaaagtaccctccagtagaggacaacacccatgcctaaagcaagcaatgaggtctattatctacttaat

SEQ ID NO: 257836 - DNA, 250 bp, Glycine max
ggggcagcagaagaacaactagttgataactaggaaggagaagcaaatggcttcctcaatgatctcttacccagctgttaccactgtcaaccgtgccggtgccggcatgggttctccattcactggcctaaagtccatggctggctgttccaccatgaagaccaacaatgacattacctacattgctagcaacggttgaagagtgcaatgcatgcaggtatggccaccagttggcaagaagaagtttgag

SEQ ID NO: 257837 - DNA, 420 bp, Glycine max
gacaacacagaacaaaaacaaagaaaaaaaaagcgccttagccaacacaaccatcatggccacctctgctattcagcaatcagcattcactggtcaaactgctctgaagcagctcaatgagttcgtccgcaagaccggtggcgccggcaaaggtcgcactaacatgcgccgcaccgtcaagagtgctcctcagagcatttggtatggccctgaccgtcccaagtacttgggtccattctcggagcagattccatcatacctgaccggagaattccctggtgactacggatgggacactgctggattatcagctgacccggaaaccttcgccaggaaccgggagctggacgtgattcacagcagatgggcaatgcttggtgcccttggctgcaccttcccagagatccttgagaagaatgg

SEQ ID NO: 257838 - DNA, 420 bp, Glycine max
ggcacaagtgagtttgttgatcgagataactagaaacagtgtgatgaaaatgaaggtccttgttttcttcgttgctacaattttggtagcatggcaatgccatgcgtacgatatgttccctctccgaatgaacactggctatggtgcccgtactccggaggtgaaatgcgcaagttggaggcttgctgtggaagcacacaacatctttggctttgagaccattcctgaagagtgcgttgaagcaacaaaggaatacatccatggcgaacaatatagatcagactccaaaacagttaaccaacaagcttacttttatgccagagacctcgaagtccatcccaaggacacatttgtgttcagtatagatggcaccgtactctctaatattccatactacaaaaaacatggatatggggtgga

SEQ ID NO: 257839 - DNA, 396 bp, Glycine max
gatataagcctaacgcaaaagcctagtttggtcttgcaggcgaaagagaagatggccaccgttccagggcagctcgtgtgggagatcgtgaagaaaaacaactcctttttggtcaagcagttcggaagggggacccagagcgtcgaattcagcagagagagcaacaatctctacaacctcaattcgttcaagtactctggtttggcaaacaagaaaactgttacggtacagcctgagggtaaagatcaggctgtgttgttggctacaacaaagacaaagaagcaaaacaagcctgctgcattgcttcacaaatctgtgatgaagaaggagttcaggaggatggcaaaggctgttgaaaatcaggtggcagaaaattactacaggcccgatctcaag

SEQ ID NO: 257840 - DNA, 415 bp, Glycine max
agaataagaagaaggagcatggccatgagcatgggcatgacggcagcagcagcagtgacagtgattaaactgctgcatcacctatatatttaaaaggtttatgggaccatagtagcgagggctgtgccttaatttctctctctctctctctctctctctctctatctcactctttttcctttttccctatcttgagatctatttatgagtgagaaaaacataagtgagaaattgtgcgtgtatctggttgctaattcgagtgctattagtctgtggtttggttggtttgtaaccccgctacttgggttatgtttgattgtatattatcctagagaaataaaaattttaaattatcagtcgctaaaaaaaatgacaacacacaaaaatagcggccgctctagaggatccaagctta

SEQ ID NO: 257841 - DNA, 406 bp, Glycine max
gaaaataaaaagaacattactagggagaaatgagatgaatctcttgaatcggagttagagactcgaaatcgggcaaaagcagaataccctgatcaacgaaatcttgaatcatctatctcaaaccaagaaaaagatattgaaaacgattatgtaggatcagacagtgaaaagaatagtaagggtataaagaaaaagaaagacaagaacaagatggaggcagaacttaatttcttactaagaaatgttttgattatacatttaaattggaataatttcttaggtcaaagaatatttaacaatgtcaaagtatattgtctcctgattagattaaaaaatttaagagaaattacaatagcctctattcaaagatgagaactacgtctagatatcatggtgattcaaaatc

SEQ ID NO: 257842 - DNA, 93 bp, Glycine max
gaatggtccggtgaagtgttcggattgcggcgacgtgagcggttcgctgcccgcgacgttgtgagaagtctactgaaccttatcatttagagc

SEQ ID NO: 257843 - DNA, 374 bp, Glycine max
ggaatgattgattatttttatgccaaactttataggattccaattccctccctttgagggatagaaagaacgcagcattcaaaatttagtagtactaattttgatctttctcttagcatctaattctacttgctcttgttcttcttctttcattcaagctttgtgagtgattcttagaaatcgatctctagctacaatgaacgattgggctcctcctctcatagctgcggctttgttttggctcttgagcccgggaatgatctttcagttgccggggaagaatgcaccctttcagtttatgaacatgaagaccactgttgcatccatgtttgtgcgcactgttatttatggtctgtttctgatgttgttcttcg

SEQ ID NO: 257844 - DNA, 421 bp, Glycine max
  unsure (1)..(421): unsure at all n locations
tgcacaagtgagtttgttgatcgagataactagaaacagggtgatgaaaatgaaggtccttgttttcttcgttgctacaattttggtagcatggcaatgccatgcgtacgatatgttccctctccgaatgaacactggctatggtgcccgtactccggaggtgaaatgcgcaagttggaggcttgctgtggaagcacacaacatctttggctttgagaccattcctgaagagtgcgttgaagcaacaaaggaatacatccatggcgaacaatatagatcagactccaaaacagttaaccaacaagcttacttttatgccagagacctcgaagtccatcccaaggacacatttgtgttcagtatagatggcaccgtactctctaatattccatactacaaaaaacatggatatggngtggag

SEQ ID NO: 257845 - DNA, 146 bp, Glycine max
cgtagtaagcgacgaaatgcttcggggagttgagaataagcgtagatccggggattcccgatataggtcaacctttcgaactgctgctgaatccacgggcaggcaagagacaacctggtgaactgaaacatcttagtagccagagc

SEQ ID NO: 257846 - DNA, 406 bp, Glycine max
acagaagggggcacaagtgagtttgttgatcgagataactagaaacagtgtgatgaaaatgaaggtccttgttttcttcgttgctacaattttggtagcatggcaatgccatgcgtacgatatgttccctctccgaatgaacactggctatggtgcccgtactccggaggtgaaatgcgcaagttggaggcttgctgtggaagcacacaacatctttggctttgagaccattcctgaagagtgcgttgaagcaacaaaggaatacatccatggcgaacaatatagatcagactccaaaacagttaaccaacaagcttacttttatgccagagacctcgaagtccatcccaaggacacatttgtgttcagtatagatggcaccgtaccctctaatattccatactac

SEQ ID NO: 257847 - DNA, 441 bp, Glycine max
acagaagggcgttctagtgtgtgattgtttgttgttgtaactcgttcttcttcttgggttgttctgtgtttgtgtttggtttttctctcacctgaaaatgtcttgctgcagtggtaactgtggttgctgaagctcctgcaagtgcggcaactgctgctgaggctgcaagatgtacccagacttgagctacactgagtcaaccaccaccgagaccttggtcatgggagtggcacctgttaaggctcaatttgagggtgctgaaatgggtgtgcccgctgagaacgatggctgccaatgtggaccaaactgctcctgcaacccctgcacttgcaagtgaagtgttgcgagagcaagctctcagcacagatagcccttaattaggaataatgatcaactattaatgcgtagctaagaacttatgtattatgtctgagatgggtt

SEQ ID NO: 257848 - DNA, 377 bp, Glycine max
gacaacccgtctttcatgtccaaattccaatgcttattcttccttcttatttcaatttcaatcactactattattactctctcacgcttttgcttctcgatttttaaaccctaaatctatctatctgtctaatacataagatacggcaaaatcaaaacaaaacaaaatataaccctagccaaagaaagaccttgttgagcatcagcagcagatagagagaggcttatggaatgagtaccgtacccaatacccagaactgtctaagaggttttcaccgattttaagggcagacgcgctggtttgattaaggtcctcactactgacgttcaaaagttttaccatcgatgcgatctcgataaggagaatttgtgtctata

SEQ ID NO: 257849 - DNA, 414 bp, Glycine max
ggcacaaagcagagctaaattcaaccaacaacaggcgcaacggtttcatttcccattatacccctctgcgcagaagacctcagaaaatattgcgatggcgggaaccctaaatctcacgcctctcaccggtgccggcaggactctccggcctccgttcaggatctcaattcgggcattcacggcgacggcgatcgattcccggcgagcggcgagcctctatgaagtgctccggatcaagcagaacgcttcagcggtggagataaagtcagcataccggaaccttgcgaaggtgtatcaccctgattcggcgttccgtcggtcggaatcggacgaacgggacttcatcgagatccacgacgcttacgagacgctgtcggatccgtcggcgagagcactgtatgatctgtcgctgat

SEQ ID NO: 257850 - DNA, 410 bp, Glycine max
ggcacaagtgagtttgttgatcgagataactggaaacagtgtgatgaaaatgaaggtccttggtttcttcgttgctacaattttggtagcatggcaatgccatgcgtacgatatgttccctctccgaatgaacactggctatggtgcccgatactccggaggttaaatgcgcaagttgaaggcttgctgtggaagcacacaacatctttggctttgagaccattcctgaacagtgcgttgaatcaacaaaggaatacatccatggcgaacaatatagatcagactccaaaacggttaaccaactagcttacttttatgccagagacctcgaagtccatcccaaggacacatttgtgttcagtatagatggcaccgtactctctaatattccatactacaaaaaacatgga

SEQ ID NO: 257851 - DNA, 367 bp, Glycine max
ggtgatttcattgcataatccattgactagcagagcccatattttccccccacattaactcacccaacccctctttctaaaaggcctcaaggatacactccggacttaattacgttattttgttagggtcaccgtttcgagatattctaaacttgtactgaaaaatatggagggaaaagaagaggacgtaagagttggagccaacaggtacggagagaggcagcccatacggacccgtgctcacgctaaagactacagagagccaccgtcggcgcctcttttcgaaccgggagagttgccatcgtggtctttctatagggctcgcatagcaaaagttgtggccactttcttggtactctacattaca

SEQ ID NO: 257852 - DNA, 307 bp, Glycine max
gaggtcaaacatcatcatgtcggacgaagagcggcatttcgagtccaaggcagacgccggtgcctccaaaacctaccctcagcaagccggtaccattcgcaagaacggctacatcgtcatcaaaggacgcccctgcaaggttgtggaagtttcgacttccaaaactggaaagcacggtcacgccaagtgccactttgttggaattgatattttcactgccaagaaacttgaggatattgtgccctcttctcacaactgtgatgttcctcatgtgaatcgtactggataccagctcattgatattgct

SEQ ID NO: 257853 - DNA, 364 bp, Glycine max
gacatcactcatagtagagtaacggaaaggagagggcaataactcgttgtacattcctagtgtgtgggagagacatggctaagatgtgtgttttggtgttggttcttgctctggctgtggacacaagtgccagaaacgttcccaaccccaaggatgctggtcttaaggaccagaagaacttcatcagctatggtggagttggtggttattacgggattgtgaacaatggactgccttttggaggagctggtgcctgaataagtggtggtattggagtaggtggtggacttggtggaggacttggtggtggacttgatggtggactctgcagtcctaccactggaatcggaaggtttgacggtac

SEQ ID NO: 257854 - DNA, 413 bp, Glycine max
ggaaaagttacaagtaaagtaaattaagaagatgattaatggcttctcttgcaaccttagctgctgttcaaccagctgcgctcaatggccttgctggaagttccctctctggaactaagctctccttcaagccctctcgccacactgtcaaatccaagaacttcaggagtggtgccgtggtagcaaagtatggtgacaagagtgtgtactttgatttggaggatctgggcaacactacggggcagtgggacttgtatggctcagatgcaccttcaccctacaaccctcttcagagcaagttcttcgagacatttgctgctccattcacaaagaggggattgttactcaagtttctgatattgggaggtggttccacccttgcatacttcagtgcaacagcctcaggtgacatt

SEQ ID NO: 257855 - DNA, 402 bp, Glycine max
  unsure (1)..(402): unsure at all n locations
gacagcatatcaataatctatgttataccatacccacattttgataattatatttctagttgataagccatggctactcgaggaaagcttgaggttgacgttgatctcaagtctaacgcagacaagtactggcaaacccttaggaactccactgaaatattccccaaggccttccccaatgattacaaaagcattgaggttcttgagggtgatggcaaatcacctggttctatccgccacataagttatggtgaaggttcaccacttgcgaagtcatcctttgagaagattgaggctgttgatgaagaacagaaggtagtgtcgtacactatcattgatggagaactcctncaggactacaaaacattcaagggagacatttctgtgactccagttggcgat

SEQ ID NO: 257856 - DNA, 345 bp, Glycine max
agaagggggtgtacctgtggagcaatagcagcagaacagagagagcaaaaccctagagcatccatcacaagcagaggaagaagatggtgaagttcctgaagcctaacaaggcagtgatcgtcctgtagggccgctacgccgggcgcaaggcggtgatcgtgaggaccttcgacgagggaaccagggagcgcccctacggccactgcctcgtcgccggaataaagaagtacccaagcaaggtcatcaagaaggactccgcgaagaagaccgcgaagaaatctagggttaaggccttcgtgaagctcgtgaactaccagcacctcatgcccacgcgctacacgctcg

SEQ ID NO: 257857 - DNA, 403 bp, Glycine max
gatctggcagcagaagaacaagtagttgagaactaagaaggagaagcaaatggcttcctcaatgatctcttccccagctgttaccactgtcaaccgtgccggtgccggcatggttgctccattcactggcctcaagtccatggccggcttccccaccagaaagaccaacaatgacattacctccattgctagcaacggtggaagagtgcaatgcatgcaggtgtggccaccagttggcaagaagaagtttgagactctttcctacctgccagaccttgatgatgcacaattggcaaaggaagtagaataccttcttaggaagggatggattccttgcttggaattcgagttggagcacggtttcgtgtaccgtgagcacaacaagtcaccaagatactacgat

SEQ ID NO: 257858 - DNA, 424 bp, Glycine max
ggaacctttgcattgtattcattcatgattcagcacgtgcggggggaagcagagaccgaaatacttcgagatggcccgtacaaagcaaactgctcgtaagtcaactggaggaaaagctctcaggaagcagcttgcaaccaaggctgcacgcatgtctgcaccaacaactggtggtgtgaagaagcctcatcgttatcgccctgtaactggcgctgttagcgagattaggaaataccagaagagcactgagctcctaatcaggaagcttcctttccagaggttggttcgtgaaattgcccaggatttcaagactgatctgcgttaccagagccatgctgtgcttgcattgcaagaggctgctgatgcataccttgttgggctctatgaggacactaacttgtgtgccattcacgccaagcgtgtg

SEQ ID NO: 257859 - DNA, 411 bp, Glycine max
gactgatacaggaacagcagagaaacaaagtgagaagtaaagaagatcatggcttctctagcaaccttggctgctgttcaaccagctacgatcaatggccttgctggaagttccctctctggaactgagctctctttcaagccctctcgccacagtgtcaaatccaagaacttcacgagtggagccgtggtagcaaagtatggtgacaagagtgtgtacttagatttggaggatctgggcaacactacagggcagtgggacttgtatggctcagatgcaccttcaccctacaaccctcttcagagcatgttcttcgagacatttgctgctccattcacaaagacgggattgatactcaagtatctgatatcgggagggtgtttcacccttgcatacttcagtgcaactgcc

SEQ ID NO: 257860 - DNA, 382 bp, Glycine max
gatatggggcagcagaagaacaagtagttgagaactaataaggagaagcatatggctttctcaatgatctcttccccagctgttaccactgtcaaccgtgccggtgccggcatggttgctacattcactggcctcaagtccatggctggcttccgcaccaagaagaccaacaatgacattacctccattgctagcaacggtggaagagtgcaatgcatgcaggtgtggccaccatttggcatgaagaagtttgagactctttcctacctgccagaccttgatgatgcacaattggcaaaggaagtagaataccttcttaggaagggatggattccttgcttggaattcgagttggagcactgtttcgagtaccgtgagcaca

SEQ ID NO: 257861 - DNA, 456 bp, Glycine max
atctcccgtctcgacccacgcgtgagacaggcgttagaacaccacagaaagggatctgacagcactacagcaagtgatcaacaaggaagatagaggatcaaatggctacctcaatgatctctaccgcaactgttaccactgtataccgttccatagccagcatgtgcgttatcattcactggcactaagtccactagatgccttacctaccttaaagaccatcaatgacatcacctacattgctaacatcggtagaagacttcaatgcatcgcatcaaggccaacatttatacccaagaaggataagactctttcgtatgtgccatacattgatgatacacaatcgacactggaagtagaataccttaatatgaatgaatggatcccttgcttgcaattctagcaggagcacggaaacgtgtaccgtgagcacaacacgtcaccatgatactacta

SEQ ID NO: 257862 - DNA, 382 bp, Glycine max
gacctcacccagctgcagaaagaaaagaccatcagagtttcacttcagccttatccggattagggtttcagtttttgacccaacctttgacgtatcgaaaccttaagtttcggatcaggtctgagcaatctggatggtagaacctttggtcttagagagtcaagttttatgtctgaattagacgatcaaattcctactgccttcgatccttctgctgatgcaaatgctgatgactcgggtgctgggtcaaaggagtatgtgcatattcgcgtacagcagcgaaatggaaggaaaagcctgacaaccgttcagggattgaaaaaagaattcagctataacaagatacttaacgatgttaagaaagagttctgctgcaatggaa

SEQ ID NO: 257863 - DNA, 405 bp, Glycine max
gagcgccaatgtttttttcagaggagtttcatcttgtaatcaaaagagtttatcttatagtaagaaatcgatgtcttactccattttaaggaacaaaacaagagaacaatagcctgacaaagggtttagccataaaatcgaatccatcattgatttgagatattgataaggtgaatactcatttctcgtcaatgctaggcataatgcgggtatagggacctaaaaaagattatcttttcttcctatcttatgaactttaaggtgtatgaagtgtcatttcctatcttagattttaattttagtaggtagataaagagtccatttaacttaagttgatctaggccagaagcagacctatgtcaagataatccttctttgaaacactttggtagtgctcttagattg

SEQ ID NO: 257864 - DNA, 391 bp, Glycine max
  unsure (1)..(391): unsure at all n locations
gaccaacacagacaatagtggatagcgtttttcattgtgcattattcaatggccaccacagcagctctatccggaaccatggtgagcacctccttcatgaggaagcaacctatgacgaccaagagcctaaagacattccccaacgctctttttggtctgaaaggtggacgaggtggtcgtgtaacttgcgtggcctcgtacaaggtgaagctcataaccccagaaagagaagtggagtttgaatgcccagatgatgttttcattgttgacaaggctgangaagaaagcattgaacttccctactcgtgcaaggctggttcttgcgtttcatgtgttgggaaaattgtgaaaggtgacgtggaccagtcagatggtagcttccttgatgatg

SEQ ID NO: 257865 - DNA, 397 bp, Glycine max
ggcacaagtgagtttgttgatcgagataactagggacagtgtgatgaaaatgaaggtccttgttttcttcgttgctacaattttggtagcatggcaatgccatgcgtacgatatgttccctctccgaatgaacactggctatggtgcccgtactccggaggtgaaatgcgcaagttggaggcttgctgtggaagcacacaacatctttggctttgagaccattcctgaagagtgcgttgaagcaacaaaggaatacatccatggcgaacaatatagatcagactccaaaacagttaaccaacaagcttacttttatgccagagacctcgaagtccatcccaaggacacatttgtgttcagtatagatggcaccgtactctctaatattccatactac

SEQ ID NO: 257866 - DNA, 415 bp, Glycine max
gatacggcatttgtcggcggtgacgaaaggagggaagaagaagaagcgttctttcggagagttcgaagatgtcgggcgttaccaacaacaacgaggaagacaagaagccaaccgaacagggagcacacatcaaccttaaggttaaggggcaggatgggaatgaagtttttttcaggatcaagagaagcactcaattgaagaagcttatgaatgcttactgtgaccgacagtcggtggatttcaactccattgcttttctgttcgatggacgccgccttcgagctgagcagactccagatgagttggaaatggaggacggggacgagattgatgccatgcttcaccagacaggaggttctgttgtctgaaggatgtgattactttgctcctcattataagtaggaattagttaact

SEQ ID NO: 257867 - DNA, 415 bp, Glycine max
gtgttggggatgttgctgatggtgtgccttgtgtgaggtttcgtctgatccaaagagagaagaagaaatactggaagaagaactacattttcccgataacgagccacttattgtgagagacgggaacagaaggctaatgcaagacatagattgtggtgggttgtgcaagacgaggtgcagtgcacattcgagacccaacttgtgcactagggcgtgtggcacgtgctgtgtgaggtgtaagtgtgtcccacctggtacatctggaaatagggaactatgtggagcttgctacactgatatgactacccatggcaacaagaccaagtgcccttagagaaaaaacccattgggaaatttgtgcttcattgattatgcaccgaagttcaagtgtactagtatgtggtggttcaattct

SEQ ID NO: 257868 - DNA, 420 bp, Glycine max
cggggagtgtgtgagagagcgagcgagcgagcagggtcaaagagaggatttgggattgggaaggcgagggattgcgctgcgtctcttactcttctgtttcgattcatcccccattcataatcttgcaatccaacaacctcagtctcacactgacacatacacacatctgaacgcgtatcgtccctcccatggcttcaaagcgcatcctcaaggagctcaaggacttgcacaaagacccaccaacttcttgcagcgctggtccagtagctgaggacatgttccatgggcaagcaacgattatgggtactgctgatagtccttatgctggaggtgtattcctagtcactattcactttcctccggattatcctttcgaaccttccaaggatgcctctaggactaatgagtttcatccgaaca

SEQ ID NO: 257869 - DNA, 419 bp, Glycine max
taatttgggaattattgctcccatcgccattggtttcattgggggcgctagcattttgttgggtagggccttctctggagcggccatgaaccccgctgtgacatttgggcctgctgtcgtgagctggacctggaccaaccactggatctactgggccgggcctctcatcggtggtggaatcgctggccttgtttacgaggttgtctttatcagccacacccacgagcagcttcccaccactgactactagagggggggaaatgaaaatcaacaaaagaaaattgtgcattattgaatttctctggaatcttcttctgtgtatggttatccttccttatgttttcttcctaattcactttccagggttgtacttgatcctttcgtcttaaatacttggatggttgatgatcatgaagatc

SEQ ID NO: 257870 - DNA, 408 bp, Glycine max
catccaggcaaaacaatgaaagtacaattcaccgggcgtccgtgatgcacaaccttatggtgtatatacatggttaacggatattaaagacacctctaaagaaggatatagttttgaagagatatgcatcaagaaagaagcgtttgagggagaagagaagttttgtgcaaaatccttgggaacagtaattggttttgccatttcaaagctgggaaagaacattcaagtactttcaagttcctttgtcaataagcaagagcaatacactgtggaaggagtgcagaatcttggagacaaagcagtgatgtgtcatgggctaaatttcagaactgcagtattttactgccataaagtccgggaaacaacagctttcatggttccattggtggctggtgatggaaccaaaac

SEQ ID NO: 257871 - DNA, 404 bp, Glycine max
gcacaagtgagtgtgttgatcgagataactagaaacagtgtgatgaaaatgaaggtccttgttttcttcgttgctacaattttggtagcatggcaatgccatgcgtacgatatgttccctctccgaatgaacactggctatggtgcccgtactccggaggttaaatgcgcaagttggaggcttgctgtggaagcacacaacatctttggctttgagaccattcctgaagagtgcgttgaagcaacaaaggaatacatccatggcgaacaatatatatcagactccaaaacagttaaccaacaagcttacttttatgccagagacctcgaagtccatcccaaggacacatttgtgttcagtatagatggcaccgtactctctaatattccatactacaaaaaaca

SEQ ID NO: 257872 - DNA, 401 bp, Glycine max
  unsure (1)..(401): unsure at all n locations
ggctttccttttttttaatttgaatgcttctgatgcaactatagtgaggctaagagattggtccataattaatcaaaatgttggctatattccacaaagcttttgctcatccacctgaagagctcaacagccctgcatcttacaaaggttccaagaagcctaaggttcccgaggaaactctcaaagatttcctttcccaccatcctcacaacacttgctctatgagctttggtgatgctgctgttctagcttatgtccgtcctgatcaatctttctctcgtcatcaaaggctgttttgtgggatcgatgacatatattgtctcttcttggggagcttgaacaacttgtccctactcaacangcaatatggattgtcaaagagtactgatgaggccatgttt

SEQ ID NO: 257873 - DNA, 414 bp, Glycine max
gatctggcagcagaagaacaagtagttgagaactaagaaggagaagcaaatggcttcctcaatgatctcttccccagctgttaccactgtcaaccgtgccggtgccggcatggttgctccattcactggcctcaagtccatggctggcttccccaccaggaagaccaacaatgacattacctccattgctagcaacggtggaagagtgcaatgcatgcaggtgtggccaccagttggcaagaagaagtttgagactctttcctacctgccagaccttgatgatgcacaattggcaaaggaagtagaataccttcttaggaagggatggattccttgcttggaattcgagttggagcacggtttcgtgtaccgtgagcacaacaggtcaccaggatactacgatggacgctactg

SEQ ID NO: 257874 - DNA, 418 bp, Glycine max
gataccaaaaacaaaacacaagccaagtgaaagggagaaaaaataaaaatcaaagagcataatgtcagggatcattcacaagattggggagacccttcatgtgggagggcacaagaaggaggaggagcataagggtgagcaccatgctggagaatacaaaggggagcaccatggtgaacacagtagtgagtacaaaggagagcatcatggtgaacacaaagctggagagtaccatggtgagcacaagccagagcacaaagaggggttcctagacaaagtcaaggacaagatccatggtgagggcggcgccgccgagggcgagaagaagaagaaggagaagaagaagaaggagcatggccatgagcatggccatgacagcagcagcagcagtgacagtgattaaactgctgcatcacct

SEQ ID NO: 257875 - DNA, 406 bp, Glycine max
gggtggccacagcaacaatagcaatggcagcctcactacaagctgcagctaccttcatgcaacccaccaaggtgggcatggccactcgcaacctcaaatctacacaatgcatttctaaggcttttggcttggaacccgctgcagctaaactcatttgctcccttaagcccgatctcaaagattttgctcaaaaatgtgtcgacgccaccaaaattgcaggattcgcccttgccacctcagctctcgttgtttctggagcgagtgcagaaggtgttccaaagaggctaaccttcgacgaaatccagagcaagacatacttggaagtgaagggaactggaactgctaatcagtgcccaaccattgaaggtggagtggactcatttgccttcaaggcagggaaatacaa

SEQ ID NO: 257876 - DNA, 407 bp, Glycine max
ggcacaagtgagtttgttgatcgagatggctagaaggagtgtgatgaaaatgaaggtccttgttttcttcgttgctacaattttggtagcatggcaatgccatgcgtacgatatgttccctctccgaatgaacactggctatggtgcccgtactccggaggtgaaatgcgcaagttggaggcttgctgtggaagcacacaacatctttggctttgagaccattcctgaagagtgcgttgaagcaacaaaggaatacatccatggcgaacaatatagatcagactccaaaacagttaaccaacaagcttacttttatgccagagacctcgaagtccatcccaaggacacatttgtgttcagtatagatggcaccgtactctctaatattccatactacaaaaaacatg

SEQ ID NO: 257877 - DNA, 416 bp, Glycine max
  unsure (1)..(416): unsure at all n locations
gagagaagggctacacaaacacaatctctaatggcactcaggatgtgggcttcttccactgccaatgcactcaaactctcttctgtctccagacctcatctcttgcctcctttttctttctccagatgcttatcttccgtcttggatggacttaagtacgctgattcacatgaatgggtcaagcacgaaggctcagtcgccaccattggtatcactgaccatgcccaggaccatcttggagaggttgtgtatgtggagctgccagaaccaggtggcacagtttccaagaagtctggcttcggagccgttgaaagtgttaaagcaacaagtgatataaaccctccaatctcggnggagatcgttgaggttaacaaaaagctcacagaaacgcctggcctggtcaactcaagcccata

SEQ ID NO: 257878 - DNA, 412 bp, Glycine max
ggcacaagtgagtttgttgatcgagataacgagaaacagtgtgatgaaaatgaaggtccttgttttcttcgttgctacaattttggtagcatggcaatgccatgcgtacgatatgttccctctccgaatgaacactggctatggtgcccgtactccggaggtgaaatgcgcaagttggaggcttgctgtggaagcacacaacatctttggctttgagaccattcctgaagagtgcgttgaagcaacaaaggaatacatccatggcgaacaatatagatcagactccaaaacagttaaccaacaagcttacttttatgccagagacctcgaagtccatcccaaggacacatttgtgttcagtatagatggcaccgtactctctaatattccatactacaaaaaacatggatat

SEQ ID NO: 257879 - DNA, 418 bp, Glycine max
gatctggcagcagaagaacaagtagttgagaactgggaaggagaagcaaatggcttcctcaatgatctcttccccagctgttaccactgtcaaccgtgccggtgccggcatggttgctccattcactggcctcaagtccatggctggcttccccaccagaaagaccaacaatgacattacctccattgctagcaacggtggaagagtgcaatgcatgcaggtgtggccaccagttggcaagaagaagtttgagactctttcctacctgccagaccttgatgatgcacaattggcaaaggaagtagaataccttcttaggaagggatggattccttgcttggaattcgagttggagcacggtttcgtgtaccgtgagcacaacaggtcaccaggatactacgatggacgctactggacc

SEQ ID NO: 257880 - DNA, 412 bp, Glycine max
gagccaaagaaaagaaaatcctcaattttgtgagcagccaaacactctctctctgtctctcgaaaattctcagtttgcagagaaaatctgaatcatgtcgtggcaagcgtatgtcgacgatcaccttctgtgtgacatcgaaggtaaccacctcactcacgctgctatcatcggccaagacggcagcgtttgggctcagagtaccgacttccctcagttcaaacctgaggagataactgccatcatgaatgactttaatgagcctggatcacttgctccaactggattgtatctcggtggcaccaaatatatggtcatccaaggtgaacccggtgctgtcattcgagggaagaagggtcctggtggtgttactgtgaagaagaccggtgcggccttgatcattggcatttat

SEQ ID NO: 257881 - DNA, 400 bp, Glycine max
ggagttgagaggatcgcgagaggggcagtaggggagattccgtgagttgcaaaaatgaagacgattctttccaccgagaccatgaacatcccggacggcgtgagcatcaaagttcatgccaaggtcatcgaagttgatggcccccgcagaaaattggtgccagacttcaagcatttgaatctcgattctcagctcattactgacgaatacggttaacgaaagctgtaaatcgacgcgtggtttggttctcggaatacatacggcgtcattcgcaccggcttgagccacgtggagaatcttatcaccggcgtgaccaagggctaccgctacacaatgaggttcgtttatgcccattttgccatcaacgcatgcatcggcaacagcaacaagtctattgaga

SEQ ID NO: 257882 - DNA, 262 bp, Glycine max
agcgcaagcaggacctttaagcttactaataccatgggctacattgagtaataccttaacctctctgaacaatctagactacagtatgctactatctatatgaaacaacggatgctcatatacactaattaaataggaaacattagctatgttagataatgtcactgtacgttatataggatccatcatctaatacacttgaattacatacgatagctgtctcttaccggctccaataaataatttacccttggtccatatt

SEQ ID NO: 257883 - DNA, 416 bp, Glycine max
gaccacagtttacactcacgagagtacccatttgctcttctcaatttctcaagtgtgccgagaaaatcatggtggacgcagcggaacgtagatacttggaggatgatgattcatctctcatgaaaactatcaagggcgcaacaactggtttagtggctggaactatctggggtactgtagttgccacctggtatgatgtcccccgtgtcgagagaaatgttgctcttccagggctgattaggactatcaggatgatgggcaactatggtttgacctttgctgccataggaggagtctacataggtgtagagcagttggtgcagaactataggatgaagagggatttagtcaatggagctgttggcggatttgttgcaggtgcaactattctgggttacagaggaaggagcatcaaa

SEQ ID NO: 257884 - DNA, 326 bp, Glycine max
tgcaatgtatgggatatgaggaattgtcaaaaaaaaaaaagaatctatataaatataaaaataatatatataaggcacaaatagtaaatccaggtacccattttatgataaactatccttccatttttgttactctaataagcctagtattttccgcaatcgcaatgacttctttatttctttatgttcaaaaaaacatgatttcttagatccagaaaacaaagtaaaattctggagttctcaattccccaattataatactaaattcaaaaaaaggaaagtaatgagtataatctttcgctcacacgatgtactgatatattcta

SEQ ID NO: 257885 - DNA, 414 bp, Glycine max
  unsure (1)..(414): unsure at all n locations
gggtgaatgtttgagtgcagaaggtataaaaggtggtggtgaagattcgattggcaaggctcgggtgcaggaaccacccattctatcgcgtggttgttactgatagcataacaacaagagatggcaagcaacttgaagttttaggtttctacaatcccgtcgcaggcaaggatgatgagaaaagaatgagtctcaaactggaaagagtcaagtattggctttctgtcggagctaagccttcagagcctgttgagcatcttctgtttcgagcaggtttagggcaatctcatcaattccctgttgctgctctaaatggacatttcctcaaccaagaccaaccaaccaatgctgatcacaatggtgtatctccagaagctatattntctattggcctacaagtttgaagagaatagc

SEQ ID NO: 257886 - DNA, 317 bp, Glycine max
ggcacacgtgagtttgttgatcgagatagcgagaaacagtgtgatgaatatgaaggtccttgttttcttcgttgctacaattttggtagcatggcaatgccatgcgtacgatatgttccctctccgaatgaacactggctatggtgcccgtactacggaggtgaaatgcgcaagttggaggcttgctgtggaagcacacaacatctttggctttgagaccattcctgaagagtgcgttgtagcaacaaaggaatacatccatggcgaacaatatatatcagacttcaaaacagctaaccaacaagcttacttttatg

SEQ ID NO: 257887 - DNA, 274 bp, Glycine max
taccttcatgcaacaccaccaaggttaggcatagcactctcgcaacctcaaatctacacaatgcatttctaaggcttttggcttggaacctgctgcagctaaactcacttgctcccttcagcctgatctcaaagaatttgctcaaaaatgtgtctacactaccaaaattgcaagattcttccttgccacctctgctctcaatgtttctgaaacaagttcataaagggttccaaaaaggctaaccttctacgaaatccacagcaagacatacttg

SEQ ID NO: 257888 - DNA, 229 bp, Glycine max
ttgggtcacaagtgagtttgttgatcgagagaacgggaatcagtgtgatgaaaatgaaggtccttgttttcttcgttgctacaattttggtagcatggcaatgccatgcgtacgatatgttccctctccgaatgaacactggctatggtgcccgttctccggaggtgaaatgcgcaagttgtgtgcttgctgaggaagcactcaacatctttggctttgagaccattcc

SEQ ID NO: 257889 - DNA, 181 bp, Glycine max
gaaccaagtttgcttgcgtgtatattcatggtaggatcaaggttgaatctcagagaaaaacaaacatcgacaagcatgtctggaagaggaaagggaggcacgggtctcggaaagggaggagccgtacgacaccgtaaagatctgaggaatggcattcaggactttatcaagcctgctattc

SEQ ID NO: 257890 - DNA, 239 bp, Glycine max
gagttttgaaaggtaaggaaagatgcagatattcgtgaaaaccctaaccggtaagacaatcgcccttgaggtggagtcaagcgacaccattgacaatgtcaaagccaagattcaggacaaagaagggattcctccggatcagcacaggttgatcttctcggagaaacatctggaggatggcccgaccctcgccgattactacatccataaagagtctacattgcattttgttttgaggc

SEQ ID NO: 257891 - DNA, 375 bp, Glycine max; identical to SEQ ID NO: 235693

SEQ ID NO: 257892 - DNA, 424 bp, Glycine max
  unsure (1)..(424): unsure at all n locations
gacgacagaaggggacaacacaacacatacacacagagttagaggagaaatcatcggggcatcagcagcatctgggtttgtgttgccacttaatgttgcagctgccaccacaaactcaagggtggtcatgttcaacacaaagaacaacgcttctaggcttgttgtaagggcttcagatgagcctgcagcggcggcacccgccaccgccacacccccagctgaagctgaagctaaaccaaagccaccacctattggccccaagagaggtgctaaagtgaagattcttaggaaggaatcttactggtacaaaagcactggttcagtggtngctgttgatcaggaccccaacactcgctacccttgtgtggttcgattcaacaaagcaactatgccaatgtatcaacaaacaactatgcttttggat

SEQ ID NO: 257893 - DNA, 407 bp, Glycine max
ggcacaagtgagtttgttgagcgagataactagaaacagtgtgatgaaaatgaaggtccttgttttcttcgttgctacaattttggtagcatggcaatgccatgcgtacgatatgttccctctccgaatgaacactggctgtggtgcccgtactccggaggtgaaatgcgcaagttggaggcttgctgtggaagcacacaacatctttggctttgagaccattcctgaagagtgcgttgaagcaacaaaggaatacatccatggcgaacaatatagatcagactccaaaacagttaaccaacaagcttacttttatgccagagacctcgaagtccatcccaaggacacatttgtgttcagtatagatggcaccgtactctctaatttccatactacaaaaacatgga

SEQ ID NO: 257894 - DNA, 407 bp, Glycine max
ggcacaagtgagtttgttgatcgagataaggagaaacagtgtgatgaaaatgaaggtccttgttttcttcgttgctacaattttggtagcatggcaatgccatgcgtacgatatgttccctctccgaatgaacactggctatggtgcccgtactccggaggtggaatgcgcaagttggaggcttgctgtggaagcacacaacatctttggctttgagaccattcctgaagagtgcgttgaagcaacaaaggaatacatccatggcgaacaatatagatcagacttcaaaacagttaaccaacaagcttacttttatgccagagacctcgaagtccatcccaaggacacatttgggttcagtataaattgcaccgtactctctaatattccatactaccaaaaacatg

SEQ ID NO: 257895 - DNA, 158 bp, Glycine max; identical to SEQ ID NO: 256582

SEQ ID NO: 257896 - DNA, 391 bp, Glycine max
gcttctataagactacactattgttaccgcacaaacaattaataaagatgaatggttacatcaaaatggtggtggtaaaaaagtctttcttgcttcttttccttgtcggggttacaacttcacgcattgaactcagcttcttcaaaaatgatcactcatcaacatattatgatgatcagtattctaaaccatgctgtgatctcttcatatgcacacactcaatgccttctcaatgcacctctgaaaatattatgctgaattcatgccactcacattgtaagaactctatgttcacacgctcacaatcaggacaatgtctatgtcttgacaccaaccacttttgctacaaaccttgcaagttcacatatgactataaaaactcatatctctc

SEQ ID NO: 257897 - DNA, 264 bp, Glycine max
ggagagaaactagtgactgacttttcgagaaaggaaaaaaaaaagagtttccggcattattccatcatgaacgctcttcccattcttctcttcttcctctttgtttcggcattagtttatgcgaagaaaactggcgatgtgacggagttgcaaattggcgtgaagcataaaccagcatcatgtgaagttctggcacacaaaggtgacagagtcaaagtacactatcggggaaaactcactgatggaactgttttcgattctagc

SEQ ID NO: 257898 - DNA, 382 bp, Glycine max
ggcatcgaacagagagagagagaatggcagcactgggtgggaatcgtgatgtgacaggaagccagaacagcgttgagatcgatgctctagctcgctttgctgttgaagaacacaacaaaaaacagaatgcccttttggagtttgaaaaggtggtaactgcgaaacagcaagtggtttctggtaccttgtacaccatcactttggaggcaaaagatggtgggcaaaagaaggtttatgaagccaaagtttgggagaagtcatggttgaacttcaaggaggtgcaagagttcaagcttgttggagatgcacctgcatagtctagtgcttaattaggttgctgaagagtgaagaatgagacagcctggttcgaatgggaaaagcc

SEQ ID NO: 257899 - DNA, 355 bp, Glycine max
gacaacatcatcatcaacaacaagcagatcaatctgtggctctctctctcaaccataatagtcatgggtttgaaggaggattttgagcagtatgctgagaaagcaaagactttgccatcgactcaatcaaacgaagacttgcttatcctttatggattgtacaaacaggccaccgttggacctgtcaacaccagccgacctggaatgttcaacatgagggacagagctaaatgggatgcatggaaagctgtcgaagggaaatccaatgacgaatcaatgggtgattacatcattaatgtgaaacagctgctggaagcatctggcttgcctgcttgataacattggcatgccttgc

SEQ ID NO: 257900 - DNA, 456 bp, Glycine max
cccacgcgtccgaagacgacagaaggggacaccaacaccaaaacaaacccactgagagggcttcctttgtatccttcctagtgctgcttcttgcagcccttatcctcatgcctcaagggcttgctacttactacaaaccaattaagaagccaccagtgtacaagcctccagtgtacaagccaccagtgtacaaaccaccggtttataagccaaaaccaccggtttacaagccgaaaccaccggtttacaagccaccatataagaagccaccatacaagaaaccaccttatggaaagtaccctccagtagaggacaacacccatgcctaaagcaagcaatgaggtctattatctacttaataaataagaggaactgctttgtgttttctagcattgtgatttacaacttcgtagcaatgcatattcctgactcttgcatgcacttcaatccttcgta

SEQ ID NO: 257901 - DNA, 250 bp, Glycine max
ggacacaagcgggctttattacatagatctctaatctagtttggactcaacataattaaatacaataaatggaaagaaatcgtttgagacgctttatttcaggacaacctcaattttatcataagacgaatgcatagcatcacaaagctaaactcttaacaggacctggtccccggcaacattcaccatccaatccgtggttcaatgcgctacaagcaacaggaaattttatactaatcaactttggatt

SEQ ID NO: 257902 - DNA, 374 bp, Glycine max
gatagcagcatcatgcagagcattgaattcaaaaacttaagttcattccttgtgttttgctttcttcctcaaaaccaaacatgtcgaacacatgcggcaactgcgactgcgctgacaagactagctgcaccaagggaaacagctatggtgttattgtagagactgagaagagttacatcgagactgttgtcatggatgttccagcagctgagcatgatgggaagtgcaagtgtggcactaactgcacttgcacggactgcacctgtggccattaaggaatatgtatgaaaatgtaattgccatgtgtttggcaatacatatatccaaataatgtaatcttcgtatgaataaatgtgtgtgctgttatcctaact

SEQ ID NO: 257903 - DNA, 368 bp, Glycine max
tacataaacgaacattaaaaaatggcctgcttaaattaaaatactggctcgcatacttcataataaaaactataaacctaaattacttccctacacaaaattacttttaatatcacaaacactattcaaaaataaaattctctaataaaaaaacaacaaacattttataagatcccactttacatactcattcatacaacttattatctcttttattaacacacctaatttcaaaatactttccctcattttacaaccatattactattaaaaccctatcacttcccaacttaatcacctttcaacacattcccctttttccaactctcctaatacccaaaaaacccataccaatctccctttccaac

SEQ ID NO: 257904 - DNA, 392 bp, Glycine max
cgcttctacaagaccacagtttggtattaatacaactatctaataatgtgtatgattaataaaaaagtgtggatcgcatctaaatttattaaatctattgtcctagagtagttccctacacaaaatataagtaagttcacaaacaatattcaagaataagattctctgatcaaaagagaaaaatatgtctcatgatccccttggtataacgaattaaataagggatcatttgtttcttgaacaattcttttaaaaaaattttctatcggatttttgaatcataagggattttatgatttatgacttggaagatttttaagaattcaatagaataactacattgacttcatccattttccctaaatattaatagactcattaattatttttta

SEQ ID NO: 257905 - DNA, 383 bp, Glycine max
gatagcgaaacagagagtggtttcagtgagtgatgggtgttcacttgatccttcataagtcgtcatcatcatcatcatcatcaccgttgattgaagaagatgccgatcagaaacatcgccatcggaaggcctgaagaggctactcaccccgacacgttgaaggcggggttggcggagttcatctccaccttgatcttcgtgttcgccggttcaggttccggcatcgcctacaacaagctcaccgacaacggcgccgccactcccgccggcctcatctccgcttccatcgcccatgctttcgccctcttcgtcgccgtctccgtcggcgccaacatctccggcggccacgtcaaccccgccgtcaccttcggcgccttcgtggg

SEQ ID NO: 257906 - DNA, 413 bp, Glycine max
  unsure (1)..(413): unsure at all n locations
gatactctgattcattagtgaagaaaaatggcaggcatcatcgccggcatcccaactacatcgatcactcgcgcaggtcttgtgctcaaacgacctgttggagcctcgtcctctaccgttcttggattgccagcaatggctaaggcagggaaagtgaggtgctccatggaggaaaagccttcaagcagctcaaatatagggatgggggcatccttgttagcagctgcagttgccgcaaccatgtcaagcccagccatggctntggtggatgagagactcagcactgaaggaaccgggcttccctttgggcttagcaacaacctncttggttggatccttgttggtgtcttcggtcttatatgggctctctancttgtctacgctttcaccccttgagaggatgaaaagtctgg

SEQ ID NO: 257907 - DNA, 274 bp, Glycine max
catttgacttacaaaaaaaaaaaaaaaaaaaaaggaaagcggccgctctacaggatccaaccttactaactcctccatcctacgacataattcttctataatatcacctaatttcaatacactagtcgccgttttacaacatcgtcactactaaaacaatgccgtcaccaaacttattaatcttgtagcacatcatccttttttcagctgctgtaatagtaacgaagacgccaccaatcatccttcttaacaactgctcagcatgaataacgaa

SEQ ID NO: 257908 - DNA, 205 bp, Glycine max
ggtagatcgaaagggaatcttcttcgatgggctccaagcggattctgaaggagcttaaggacctccagaaagaccctccaacctcttgcagcgccggtcctgtagcggaagatatgtttcattggcaagcgactataatgggtccccctgattgcccttatgctgggggtgtcttcatagttactattcatcttcctccggatta

SEQ ID NO: 257909 - DNA, 179 bp, Glycine max
ggcagggatacaatattgttgggatcattggagaccaatggagcgatctcctcggaggccacagatgcgaaagcaggacctttaagcttgctaatcccctgtactacattcagtagttccttcacctctcaacaatctagcttgctcctatctatctatatgtaataagatgcgttcaa

SEQ ID NO: 257910 - DNA, 349 bp, Glycine max
ggattgattccctcattcttcatccatagggatggccaccgtcacttctgcagccgttgctattccctcattcactggcctcaaggcaagcgcaggcaaagtgagtgccgcagttaaagtctcagctccccaagccacaaggttgggcatcaaggcttcgctgaaagacgttggagtcgctgttgtggccactgccgcgagtgcagtgctggctagcaacgccatggccattgaagtgttgctgggtggtgatgacgggtctctgactatcgttcccaacaatttctccgtggccgctggggagaagatcgtgttcaaggacaacgcatgttttccccacaacgttgtg

SEQ ID NO: 257911 - DNA, 396 bp, Glycine max
  unsure (1)..(396): unsure at all n locations
gagaggagagaggagaagagaagctaaagaaagaaaggagatgggagtggagaagcagttgttgaggtctggcaccggtccgaagccaattcccggccagaacgtaaccgttcactgcactggtttcgggaagaacggtgacctttctcagaaattctggagcacaaaggatcctggtcagaacccattcactttcaaaatcggccaaggttctgttatcaaaggatgggatgaaggtgtgcttggcatgcaaattggtgaagttgctcgtcttcggtgctctccggattatgcttatggtgctggtggctttcctgcttggggaatacgngccaactctgtctttggaatttgaaatcgaagtcataagtgcgcaatgaaaacctttggtagtct

SEQ ID NO: 257912 - DNA, 419 bp, Glycine max
gaaggtgcaagagtttgttgtgagctataggctggtttatcgtgaggagaatatgaagttgtttgttttctttgttgctgcagtagttttggtggcataggcatgccatggcgcaggctaccaaaggttccctctccgaatgaaaactggctatggtgagcgttcttcgggggtaaaatgcgcaagttttaggcttgctgtggaagcacacaacatccgagcctttaaaaccattcctgaagagtgcgttgaaccaacaaaggactacattaatggcgaacaatttagatcagactctaaaacagttaaccaacaagctttcttttatgctagtgaacgcgaagtccatcacaacgacatatttatattcggcatagataacaccgtactctctaatatcccatactatgaaaaacatg

SEQ ID NO: 257913 - DNA, 418 bp, Glycine max
gacaccaacaccaaaacaaacccactaagagggcttcctttgtatccttcctagtgctgcttcttgcagcccttatcctcacgcctcaagggcttgctacttactacaaaccaattaagaagccaccagtgtacaagcctccagtgtacaagccaccagtgtacaaaccaccggtttataagccaaaaccaccggtttacaagccgaaaccaccggtttacaagccaccatataagaagccaccatacaagaaaccaccttatggaaagtaccctccagtagaagacaacacccatgcctaaagcaagcaatgaggtctattatctacttaataaataagaggaactgctttgtgttttctagcattgtgatttacaacttcgtagcaatgcataatcttgactcttgcatgcacttc

SEQ ID NO: 257914 - DNA, 425 bp, Glycine max
ggtgcacaagtgagtttgttgatcgagatggctagaaacagtgtgatgaaaatgaaggtccttgttttcttcgttgctacaattttggtagcatggcaatgccatgcgtacgatatgttccctctccgaatgaacactggctatggtgcccgtactccggaggtgaaatgcgcaagttggaggcttgctgtggaagcacacaacatctttggctttgagaccattcctgaagagtgcgttgaagcaacaaaggaatacatccatggcgaacaatatagatcagactccaaaacagttaaccaacaagcttacttttatgccagagacctcgaagtccatcccaaggacacatttgtgttcagtatagatggcaccgtactctcttatattccatactacaaaaaacatggatatgggggtgagaa

SEQ ID NO: 257915 - DNA, 256 bp, Glycine max
ggcacaagtgagtttgttgatcgagatagctggaaacattgtgatgaaaatgaacgtccttgttttcttcgttgctacaattttggtagcatggcaatgccatgcgtacgatatgttccctctccgaatgaacactggctatggtgcccgtactccggaggtgaaatgcgcaagttggaggcttgctgtggaagcacacaacatctttggctttgagaccattcctgaagagtgcgttgaagcaacaaaggaatac

SEQ ID NO: 257916 - DNA, 400 bp, Glycine max
gagtcgccacaaccctctatatgccattacaaagaaccagtttggaatatatttttattccttctttgtttcttcactttcttctatacacataaccatgtcttctcagaccgttgtcctcaaagttggtatgtcatgtcaagggtgtgctggagctgtaaacagggttttggaaaaaatggaaggtgttgagtcatttgacattgatctgaaggagcagaaggtgacagtgaaaggaaatgtgcagccggacgaagttctgcaagccgtttccaaatccggaaagaagacggcattctgggtggatgaagcacaaccacctgaaaacaagccttctgaaactgcaccttgtacctcagctgagaatgattacaaggcttcagaaaagtgacctgttgcc

SEQ ID NO: 257917 - DNA, 396 bp, Glycine max
gagcgaaacagagagtgatttcagtgagtgatcggggttcacttgatctcatcataatcgtcagcgtcaattgaagaagatgccgatcagaaacatcgccgtcggaaggcctgaagaggcgactcaccccgacacgttgaaggcagctttggctgagttcatctcaaccttcatcttcgtgttcgccggctcaggctccggcatcgcctacaacaagctcaccgacaacggcgctgccacccctgccggcctcatctccgcctccatcgcccatgcattcgccctcttcgtcgccgtctccgtcggcgccaacatctccggcggccacgtcaaccccgccgtcaccttcggtgccttcgtcggcggcaacatcaccttcctccgcggcatcgtcta

SEQ ID NO: 257918 - DNA, 353 bp, Glycine max
ggagcagaaggctaatccctatttttcgtcctcagtagtgtcatttacgcttctcttctctgcagcaactatgcctaaccctaaggtcttcttcgacatgaccatcggcggtcaatctgctggccgcatcgtgatggagctctacgccgacgtcactccccgcaccgccgagaacttccgcgcgctttgcaccggcgagaagggcgtagggcggagcggcaagcccctccactacaagggctcgtccttccaccgcgtgatcccgagtttcatgtgtcagggtggcgacttcaccgccggaaacggaaccggcggcgagtcgatttatggcgccaagttcgccgactagaact

SEQ ID NO: 257919 - DNA, 373 bp, Glycine max
gacaacacatcctaaatgagcagcataaattcatagtctttcggtccttccttccttcctctgctctagtgtatgccactctggttaattatcatacccccttctaggcatagttcatctccctctgttctctattctacactgtgaaacccagatgaaggtagcatttgtagctgttctacttatttgccttgtcctaagctcctccttgttcgaggtgtcaatggccggttctgctttctgctcctccaagtgcgcgaagaggtgttctagggctgggatgaaggacaggtgcacgaggttctgcgggatttgctgcagcaagtgtaggtgtgtgccatctgggacttatgggaacaagcacgagtgccct

SEQ ID NO: 257920 - DNA, 386 bp, Glycine max
gaaggtgcaagagtttgttgtgagctataggctagtttatcgtgaggagaatatgaagttgtttgttttctttgttgctgcagtagttttggtggcatggccatgccatggcgcaggctaccaaaggttccctctccgaatgaaaactggctatggtgagcgttcttcggaggtaaaatgcgcaagttttaggcttgctgtggaagcacacaacatccgagcctttaaaaccattcctgaagagtgcgttgaaccaacaaaggactacattaatggcgaacaatttagatcagactctaaaacagttaaccaacaagctttcttttatgctagtgaacgcgaagtccatcacaacgacatatttatattcggcatagataacaccg

SEQ ID NO: 257921 - DNA, 392 bp, Glycine max
  unsure (1)..(392): unsure at all n locations
ttcacaagtgagtttgttgatcgagataagtanagacagtttgataaaaatgaaggtccttgttttcttcgttgctacaattttgttagcatggcaatgcaatgcatacgatatcttctgtcttaaaacgaacacttttctataatcctttactatacatattattagtcctcatattacaatttactattttttaactatacttatattacatattaacaccttcttactcttttttatacatttgttcttactctttgtataaaatgattcttcctatattgtattatttattcttatatttattttatttatactcaatgtgtttttatttttttattttattttatttttcctcttttttttacttttttttcatattttttttttat

SEQ ID NO: 257922 - DNA, 361 bp, Glycine max
aagaataaaaaaataaaggaaagagagaatctatataaatataaaaataatatatataaggtacaaatagtaaatccaggtacccattttatgataaactttccttccattttagtacctctagtaggcctagtatttccagcaattgcaatggcttctttatttctttatgttcaaaaaaacaagattctttagatacatataacaaagtaaaaatctggggtaattcattccccaattataatactaaattcaaaaaaatgctagtaatgagtataatctatcgctcatactatgtactgatatatactatggcataagttccaataacaagcaatttattattgggccgatttcactt

SEQ ID NO: 257923 - DNA, 76 bp, Glycine max
gacgaatggggggccttcactctgaccaaataccatagtcttctctttggccgtgacaaacaagttccacataaaa

SEQ ID NO: 257924 - DNA, 314 bp, Glycine max
ggcacaagtgagtttgttgatcgagataacgagaaacagtgtgatgaaaatgaaggtccttgttttcttcgttgctacaattttggtagcatggcaatgccatgcgtacgatatgttccctctccgaatgaacactggctatggtgcccgtactccggaggtgaaatgcgcaagttggaggcttgctgtggaagcacacaacatctttggctttgagaccattcctgaagagtgcgttggaaccaacaagggattcattcatggcgaacaatatagatcagacttcaaaacagtttacccacaagcttactttt

SEQ ID NO: 257925 - DNA, 330 bp, Glycine max
ggaccacattccaaaacacaaacacatacatggtagtatcacttttgtctcggaatttgttcttttgagttatggcaagcttaaaggttgcatgtgtggttttgatgtgcatggctgtgatgagtgcaccaatgatggtgcaagccgtgtcatgcaatgatgtttctgtgaacctagcaccgtgcctatcttacctgatgcagggtggagatgttccagaatcgtgctgtagcggagtgaggaacattctgggttctgccagcagcacctttgacaaacaaaccgtgtgcaaatgttttcagcaagcttcatataactattgcattaacg

SEQ ID NO: 257926 - DNA, 353 bp, Glycine max
gacaacaacaataacaatggctgcctcactacaagctgcagctaccttcatgcaacccaccaaggttggcatagcctctcgcaacctcaaatctacacaatgcatttctaaggcttttggcttggaacctgctgcagctaaactcacttgctcccttcagcctgatctcaaagaatttgctcaaaaatgtgtcgacgctaccaaaattgcaggattcgcccttgccacctctgctctcgttgtttctggagcaagtgcagaaagtgttccaaaaaggctaaccttcgacgaaatccagagcaagacatacttggaagtgaagggaactggaactgctaaccagtgcccaacca

SEQ ID NO: 257927 - DNA, 396 bp, Glycine max
gacttgaaccactcgcatcttgttcctccgctcaacagctataataacatctttctctctccgaacagatcacactatggccacctcaagcgccaaatcagtccatgatttcaccgttaaagatgccaagggaaatgatattaatcttggtgactacaaaggaaaggtccttatcattgtcaatgttgcctcacaatgtggcttgactaattcaaattacactgagctcagtcagttgtatgagaaatacaaacagaaaggtctggaaattctggcatttccatgcaatcagtttggggcacaggagcctggatctaatgaacagatacaagagtttgtttgtactcgcttcaaggctgagtttcccgtttttgacaaggttgatgtgaatggtga

SEQ ID NO: 257928 - DNA, 357 bp, Glycine max
gatctggcaccagaagaacaggtagttgagaactaagaaggagaagcaaatggcttcctcaatgatctcttccccagctgttaccactgtcaaccgtgccggtgccggcatggttgctccattcactggcctcaagtccatggctggcttccccaccaggaagaccaacaatgacattacctccattgctagcaacggtggaagagtgcaatgcatgcaggtgtggccaccagttggcaagaagaagtttgagactctttcctacctgccagaccttgatgatgcacaattggcaaacgaagtaaaataccttcttatgaagggatggattccttgcttggaattcgagtttgagca

SEQ ID NO: 257929 - DNA, 384 bp, Glycine max
cgcagaaccttggcctgggcccttgccaatgctactcctgaacagcagaggactatgcttggtgaagctttatacccgttagtagataagctggagcatgaagcagcagcaaaggttactggtatgctcttagagatggatcagcctgaggtattacatctgattgagtcaccggatgctctcaaggctaaagttgttgaggccatggatgtgttgaagaaagttacacagcagcaatcaaacagcccagccgatcaactggcttcactctctctgaatgataatgtcgagtcttaagattatgtatgccagtttacaggaatacacatgttcttaaaacagtcacagttgtgtttctggtttttttgtaggattagcaaacac

SEQ ID NO: 257930 - DNA, 379 bp, Glycine max
gacaccgtcaccaaaacaaaacacactaagaggggttcctttgtatacttcctagtgctgcttctttcagcccttatcctcatgcctcaagggcttgctacttactacaaaccaattaagaagccaccagtgtacaagcctccaatgttcaagccaccagtgtacaaaccaccggtttataagccaaaaccaccggtttacaagccgaaaccaccggtttacaagccaccatatatgatgccaccatacaagaaaccaccttatggaaagtaccctccagtataggacaacacccatgcctaaagcaagcaatgaggtctattatctacttaataaataaaaggaactgccttgtgttttctagcattgtgatttacaa

SEQ ID NO: 257931 - DNA, 288 bp, Glycine max
cttcaaaagcgagtttcagaccatatgggatcgactttccattaggaccaactgggagatataccaatggccgaacagaaattgacataatcactcaatttctgggatttgagaaatttatcccaccctttgcaaacactagtggttcagacatacttaaaggtgttaactatgcatcaagtggatctggcatacgcaacgaaactggctggcattatggtgctgctatcggctcgggattacagttagcaaatcacagagtcattgtatctgaaattgctaccaaac

SEQ ID NO: 257932 - DNA, 368 bp, Glycine max
accttaagtcttccgaattcgaagttaattcgggggatggctaaggaaagggctcatatcaacattgtggtggttggtcatgtggaccctgaggaggcaaccaccattaacgagctgaagaagcctgttgtggaaaaagaagctccagggcatgccatattagggcatgcacgtacggcctcggaggggaaccagaaaattatgttaacaaaataatctggaaccctaatgtatcagtgtcatcatcagtgtgtagtttaagctagctttgctatggctacgttctttgagatgagagtcttgatgaacagtaccattctgatgtattgctttcctttgaagttaatgcatgcgtcttatcttctgtc

SEQ ID NO: 257933 - DNA, 377 bp, Glycine max
ggggcagcagaagaacaagtagttgagaacggagaaggagaagcaaatggcttccccaatgatctcttccccagctgttaccactgtcaaccgtgccggtgccggcatggttgctccattcactgacctcaagtccatggctggcttccccaccagaaagaccaacaatgacattacctccattgctagcaacggtggaagagtgcaatgcatgcaggtgtggccaccagttggcaagaagaagtttgagactctttcctacctgccagaccttgatgatgcacaattggcaaaggaagtagaataccttcttaggaagggatggattccttgcctggaattcgagttggagcacggtttcgtgtaccgtgagcaca

SEQ ID NO: 257934 - DNA, 385 bp, Glycine max
accgctcaattaccggggcggggcacgccttcggccaagggttccttccggttgcaaaaaaccacctaaaggggccccaagtaattttgtgggcggggttactagaaacaggggggtgaaaattaaaggccctggtttctttcgtgctacaattttggtagcatggcaattccattcgtacgatattttccctcttcgaatgaacactggctattgtgcccgtactccggaggtgaaatgcgcaagttggaggcttgctgtggaagcacacaacatctttggctttgagaccattcctgaagagtgcgttgaagcaacaaaggaatacatccatggcgaacaatatagatcagactccaaaacagttaaccaacaagcttacttt

SEQ ID NO: 257935 - DNA, 113 bp, Glycine max
ccaaagacactattaagtttggtgtgtgttctgatgtgttaagtttgatcaacgcgcaacttgggaagccacctaagaccccatgctgcaacctcattgaaggtctcgcttat

SEQ ID NO: 257936 - DNA, 417 bp, Glycine max
  unsure (1)..(417): unsure at all n locations
cccggtccggaattcccgggtcgacccacgccttcgttccggtggtagaaggcctccgaaagggaaggccaaaggggaggaaaaaatggaaatggggggggaattgatccagcaaaccgccaaggttttgccggttgaacttccagctccttccggntggaataaactgtttttccctaagaaactgggaacaccaagaaaaagtgagattgtattcattgctccaactggagaggagatcagtgccaaaaaacaattggagcagtacctaaaggcacatcctggcaatcctgtcatttcagagtttgactggggaactggtgagacccctatgcgatcagcaaggatcagtgagaaggtcaagtcaactccaccagcagatagtgatactccaaagaaacgagctcggtaatcatc

SEQ ID NO: 257937 - DNA, 431 bp, Glycine max
  unsure (1)..(431): unsure at all n locations
cggaattcccggtcggaccaagccttccttccggttgcaaaaaaccaacaaaaggggaagggccaggagttggtgggaagctttaggggggttaatcgtgaggagaatatgaagttgtttgttttctttgttgctgcagtagttntggtagcatggccatgccatggcgcaggctaccaaaggttccctctccgaatgaaaactggctatggtgagcgttcttcggaggtaaaatgcgcaagttttaggcttgctgtggaagcacacaacatccgagcctttaaaaccattcccgaagagtgcgttgaaccaacaaaggactacattaatggcgaacaatttagatcagactctaaaacagttaaccaacaagctttcttttatgctagtgaacgcgaagtccatcacaacgacatatttatattcggcat

SEQ ID NO: 257938 - DNA, 318 bp, Glycine max
ggcacaagtgagtttgttgatcgagataactagaggcagtgtgatgaaaatgaaggtccttgttttcttcgttgctacaattttggtagcatggcaatgccatgcgtacgatatgttccctctccgaatgaacactggctatggtgcccgtactccggaggtgaaatgcgcaagttggaggcttgctgtggaagcacacaacatctttggctttgagaccattcctgaagagtgcgttgaagcaacaaaggaatacatccatggcgaacaatatagatcagactccaaaacagtttaccaacaagcttacttttatgc

SEQ ID NO: 257939 - DNA, 355 bp, Glycine max
ggcacaagtgagttgggggatcgagataactagaaacagtgtgatgaaaatgaaggtccttgttttcttcgttgctacaattttggtagcatggcaatgccatgcgtacgatatgttccctctccgaatgaacactggctatggtgcccgtactccggaggtggaatgcgcaagttggaggcttgctgtggaagcacacaacatctttggctttgagaccattcctgaagagtgcgttgaagcaacaaaggaatacatccatggcgaacaatatagatcagactccaaaacagttaaccaacaagcttacttttatgccagagacctcgaagtccatcccaaagacacatttgtg

SEQ ID NO: 257940 - DNA, 391 bp, Glycine max
tggtgacacaccaaaccaaagtaagagtgagcaaggtccaacaccatagtgaaatggcttccaaggctgcacttctcttgtgtttcaatgttctcttcttcaccgtggttagctccacatatgtgccatgcaacccaccccccaaaactcccaaacacccaacctgtcccaaagccaccttccccaaagcaagcaagttgccccaaagacactattaagtttggtgtgtgtgctgatgtgttaggtttagatcaacgtgcaacttgggaagccaccaaagaccccatgctgcaacctcattgggggtctcgctgatcttgaagctgcagtgtgcctctgcactgctctcaaagctaatgtgttgggcatcaacctcaatgttccagtgaac

SEQ ID NO: 257941 - DNA, 363 bp, Glycine max
gataagaaagaagatcaaaagaaaaaagagaggcgggtggcagcactgggtggctttaccgacatcaccggagcacagaacagcatcgatatcgaaaatctcgctcgctttgctgttgatgaacacaacaaaaaagagaatgcagttctggagtttgtgagggtgattagtgcaaagaaacaagtggtttctggcaccttgtactatatcactttggaggcaaatgatggtgtgacgaaaaaggtttatgaaactaaggtgttggagaaaccacggttgaacatcaaggaggttcaggaattcaagcccatcactgttgctgttaatcctctttcggtgacggtctagcacatagctaggtta

SEQ ID NO: 257942 - DNA, 387 bp, Glycine max
cggtccgggaatatcccgggtcggacccaagccttcgtaccggttgcaaaagacacaccaaaggggttaactgggaaaaaaaaaaaggcaaaatgtgggggaaaggcacctttggttcggcggagaacaagttccggatgtcgctgggtctgccggtggcggcgacggtgaactgcgccgacaatacgggggcgaagaacctctacatcatatcggtgaaagggatcaaagggcgtttgaaccgtctcccctcggcttgcgttggcgacatggtgatggccaccgtgaagaatgggaaacccgatctgaggaagaaagttttgccagctgtcattgttcgccagcgcaagccatggcgccaaaaggacggcgtctacatgtatttcg

SEQ ID NO: 257943 - DNA, 335 bp, Glycine max
caaaaaaacaccaaaggggatttcctaagaacctagggttggaatcaccggtttggtttaaccaatttgggccgttaaaataaaaaccaaatcgtgttctcttccattggcaaacatggcaactcaaatgagcaagaagagaaagtttgttgcggacggagtgttctttgccgaactgaacgaggttctgacacgtgaattggcggaggacggttactccggcgtcgaagttagggttacgccgatgcgcaccgagatcatcatcagagccaccagaacccaagccgttctaggtgagaagggaaagagaattaaggaacttacctcagtggtgc

SEQ ID NO: 257944 - DNA, 280 bp, Glycine max
  unsure (1)..(280): unsure at all n locations
gccggaattcccgccgacccactcatccttccactcttcctaacctcatnattttttccacaaaaaccccacacntaaattccagactctttataactataaacagccttaccaacatcaacttccttctcttcttcatttatacaatttttctaccatcttatttccatgcgtacgacatattccctcttctaatgaacactacctatcttacccattctccgcatattaaatactcaattttaacactttctattcaatcactcaacatctttctctt

SEQ ID NO: 257945 - DNA, 333 bp, Glycine max
ctctcaatctcggggagatcgttgatgctaacaaaaagctcacagaaacgcctggccttgtcaactcacgcccatacgaagatggatggatgatcaaagtaaagccaagcgatccatctgaattacattccttgatgggtccaaaggaacacacaaaattttgtgatgaaaaagatgcacgtcattaaagtttgaattgaattggctcctgcagttatgtgtgggactgactgttcttcatatgtttatgatcttattaccttctgaacagttttttaatatgcaacagaactgtttctttccatttttacttcccctgctattgtctcttgt

SEQ ID NO: 257946 - DNA, 443 bp, Glycine max
cggaattcccgggtcgacccacgccttcgacgggttggcaaaaacaccacaaagggggactgttgatgggccatcagccaaggactggggaggtggaagagctgcttcatttaacatcattcctagcagcactggagctgccaaggctgttgggaaagtccttcctgctttgaatggaaaattgactggtatggcattccgtgttcccaccgtggatgtctctgttgttgacctcacggtgaggctggagaaggaagcctcatatgatgaaattaaaaatgctatcaaggaggaatcagagggcaagttgaaggggattcttggttacactgaagatgatgtggtctccaccgactttgttggtgataacagatcaagtatttttgatgcaaaggctggaattgcattgaataagaattttgtgaagcttgtctcttggtatg

SEQ ID NO: 257947 - DNA, 326 bp, Glycine max
aataaaaaggagggtccttgtttttttcgttgctccaattttggtacaatggtattgccatgcttccaatttgttccctctccgaatgaacactggctttggggcccgtactccggaggtgaaatgcgcaagttggaggctcgctgtggaagcacacaacatctttggctatgagaccattcctgaagagtgcgttgaagcaacaaaggaatacatccatggcgaacaatatagatcagactgcaaaacagttaaccaacaagcttacttttatgccagagacctcgaagtgcatgccaaggacacatttgtgttcagtatagatg

SEQ ID NO: 257948 - DNA, 315 bp, Glycine max
gcagccaagaaaagaaagggctcacccattttcttcgtagccaaacactctgaaattctcagttatgtcgtggcaagcgtatgtggatgatcacctactgtgtgaaatcgaaggtaaccacctcactcacgccgctatcatcggccaagacggaagcgtttgggctcaaagcaccaacttccctcagttcaaacctgaggaaataactgccatcaataatgactttaatgagcctggatcacttgctccaactggattgtatatcggtggcaccaaatacatggtcatcccaggtgagcctggtgctgtcattcg

SEQ ID NO: 257949 - DNA, 351 bp, Glycine max
gatctggcagcataagaagaggtatttgaaaactaagaaggagaagcatatggcttcctcaatgatctcttacccagctgttaccactgtcaaccgtgccggtgctgtcatggttgctccattcactggcctcatgtccatggctggcttccccacctggaataccatcaatgactttacctgcattgctagcaacggtggaagagtgcaatgcatgcatgtgtggccaccagttggcaagaataagtttgagactctatcctacctgccagaccttgatgatgcacaattggcacaggaagtagaataccttcttaggaagggatggattccttgcttggaattcgagtt

SEQ ID NO: 257950 - DNA, 439 bp, Glycine max
ggaattaccgggtcgacccacgccttcgttccggttgcaaaaaaccaacaaaagggttcagttttaaaattacattgcaaaaatggcgtgggttcaccatgacagcttccatccttggcagcccagccgtcaccaaccggtcggcagtagcaacgcagaggagatcactcgtagtgaatgctgccaaagctgttgaagcagaaaaggtcagttatgacaatgacatggatggtagcaatggaaggaggaacttgatgttcgccgcggcggcggctgctgtttgctctgttgctgggatggcagtggcagatgagcctaaaccaggaaccccagaagccaagaaaaagtatgctccgatttgtgtcaccatgccaactgccaagatttgtcgcaattgagggactttggtttttattttacttctgatgattggaaatgt

SEQ ID NO: 257951 - DNA, 333 bp, Glycine max
caaaaaaccaccaaaggggggtccaaggggtgaatggttggtggtggtaggtggtctttattatttggtggtactgggttagggttggttttttctctcacctgaaaatgtctggctgcggtggtaactgtggttgcggaagctcctgcaagtgcggcaacggctgcggaggctgcaagatgtacccagacttgagctacactgagtcaaccaccaccgagaccttgttcatgggagtggcacctggtaatgctcaatttgagggtgctgaaatgggtgtgcccgctgagaacgatcgcttgaaatgtggaccaaactgctcctgccacccct

SEQ ID NO: 257952 - DNA, 377 bp, Glycine max
ccggggcgacgcacgcgttcgtagcgagaaaaacaaacaaaagggattttttattggaacccgcgaaaagttggctgttccggcgatcataataacctgatggacggacacaatccacaagacccaaagcagagccctgctgacatgactgcctttgtgcaaaatcttcttcagcagatgcaaaataggttccagacaatgtccgactccattgttacaaagattgatgatatgggaagtcgcataaatgagttggaacaaagcatcaatgacctgagagcagagatgggagtggagtcctctccatcacctgcagcccctgctaagctaacggaggagataaccaaagaagagggttcagcttaagtggcattctg

SEQ ID NO: 257953 - DNA, 338 bp, Glycine max
cataaattgcccgtgcagcagcagagagtgcggggggctcatccgagaccggaagcagcaatggggatcgatctcaaggccggaggtaaaagcaaaaaaaccaaaagaacagcacccaagtccaatgatatctatcttaagctcttggtcaagctttatcgcttccttgttcggagaactggcagcaaattcaatgccgttatactcaagagattgttcatgagcaaggttaacaagcccccattgtctttgtcaaggttgattaagtataccaaggggaaggaagataagattgctgtggtggtgggcaatataaccgatgatattcgtgtttatga

SEQ ID NO: 257954 - DNA, 193 bp, Glycine max
ggcagttcacttccaacatattccatacggggggtgtatattcctacctttgccttcaagattcaaattttcatcaagaccctcaccggcaataccatcacccttgatgtggaaagctataacaccatctacaacgtcaacgccaagatccaggacaaggaatgaatccccccggaccaacaacgtctcattt

SEQ ID NO: 257955 - DNA, 412 bp, Glycine max
cttcctacggctgcggatacaactcaaaggcattttttgcacgtgctttaccatagagtgcgggggggtcatccgataccggaagcagccttggggatcgacctcaaggccggaggtaaaatgcaaaaaaaccaaaggaccagcgcccaagcccaaggatatctatcttaagctcttgatcaagctttatcgtttcattgcacggagaagtgaccgaaaattcaatgccgttatactcaagagattgctcatgagcatggttaacaggcccacattggctttgccaaggttgattcagtattccaaggagaaggaagataaaatcgctgtgggggtggacatgatacccatggatattctatgttatgaaattccagccttataggtgacagcactcatgtttacagagact

SEQ ID NO: 257956 - DNA, 192 bp, Glycine max
gacggggaatacaacctcgaaaagagttctttcaaaatgcaagcaggcttaaccttcgatgcccccaacgttgtgccatttgcacccacaaagagtgtctcccatattaccatctttcccaccaaattgaaagccccgcgctcctcacctcgttactcttcgattagggttggaaccggggagcccgacact

SEQ ID NO: 257957 - DNA, 359 bp, Glycine max
gggcacaagcgagttcgttgatcgacattgcttggagcggggagaagaatgggaacggtcatggtctgctccccaactacatcaatcactcgcacaggtcatgtgctcaaacgacctgttggggcctcatcctctaccgttcttggattgccagcaatggccaaggcggggagagtgaggtgctccatggaggaaaagccttcaagcagctcaaacctagggatgggggcatccttgttagcagctgcagctgccgcaaccatgtcaagcccagcagccatggctttggttgatgagagactcagcactgaaggaactgggcttccctttgggcttagcaacaaccttcttggttggat

SEQ ID NO: 257958 - DNA, 430 bp, Glycine max
tccggaatttccgggtcggaccaacccttccttccggttgcaaaaaaacaacaaaagggggcgtcgggtgaagggaaaaatcaaatcagggggcttttagtgggcgcaaagagggttttggaaaccacgttgtttggggttagggttccggcgaggctgtaccacgagggggttgtggatcactacgacaacccccggaacgttggatcgtttgacaagaacgacccgagcgtggggaccggtttggtgggggccccggcgtgcggcgatgtgatgaagctccagattaaggtcgacgacaaaaccggaaaaatcgtcgatgctcgattcaaaactttcggctgtggctacgccattgcttcttcctccgtcgctactgagtgggtgaagggaaggcaaatggaggaagttctgactataaaaaatacca

SEQ ID NO: 257959 - DNA, 379 bp, Glycine max
  unsure (1)..(379): unsure at all n locations
tcttacttcttctaaagatttcannaaggggcctcattttctatcttccagaccctttcaaatgtctgcctggtccgatcatcacctctccattaaggagattctcggaacatgcgtttcggttggttgcaccgttgatggaaaggatccaaaggacttgcagcaggagatttccgatggtgatgttgaggtccctctcgattgaggaagaagactttgtttctctctctttttccttctctcttatgtttgtttcgtgttttttaaatataaatctggggaaactattgaacgttttgtttaacgctattttactgttttggataatttaaatgatggcttcgagaggttttattatgggcttattagtttatttctc

SEQ ID NO: 257960 - DNA, 348 bp, Glycine max
gaccatagaagaagcacaaagagaagcaggggctctaggagcagcaacaactagtctcagctgaaatggcctcttcagtgatggcatctgtggccctcaaacctgcccctttcactgttgagaagtcctcagtgagaggccttccctctctctcaaggaactcttcttcattcaaagttgtggccagtggcaagaagatcaagactgacaaaccttatggaattaatggtggcatggctttgaaggatggaactgatgcatctggcatgaaaggaaagggaaagggtgtttaccagtttgtagacaaatactgtgctaatgtcgatggatacagtcctatctacgaca

SEQ ID NO: 257961 - DNA, 350 bp, Glycine max
tttaccatagaacaagcacacagagaagcatagacgcttttaacagcagcaactactctcatcttaaatggcctctccagtgatcgcatatgtggccctcaaacctgcccctttcactgttgataagtcctcactatgaggccttccctctctctcaaggaactattcttcattcaaagtttttgccagtgtcaagaagatcaatacttacaaaccttataaaattaactgcggcatggctctaaaaaatcgaactgtatcatctagcttgaaaagaaagggaaaatgtgtttaccattttgtagacatacactattctaatgtctatagttacattcctatctaccaca

SEQ ID NO: 257962 - DNA, 371 bp, Glycine max
ggcctcattttctagcttccggaccctaacacttctcttcctcttcgatcatcacctctccattaaggagattctcggaacatgcgtttcggttggttgcaccgttgatggaaaggatccaaaggacttgcagcaggagatttccgatggtgatgttgaggtccctctcgattgaggaagaagactttgtttctctctctttttccttctctcttatgtttgtttcgtgttttttaaatataaatctggggaaactattgaacgttttgtttaaggctattttactggtttggataatttagatgatggtttcgagagtattattatgggctgattagtttatttctctgctcacagtatgatatgttttt

SEQ ID NO: 257963 - DNA, 155 bp, Glycine max
tcatctggcagcagaagaacaagtagttgcgggggaagaatgacaaccaaatggcttcctcaatgatctcttccccaactgttaccactgtcaaccatgccggttccggcatggatgctccattcactgtcctcatgtccatggcttggcttccc

SEQ ID NO: 257964 - DNA, 385 bp, Glycine max
gagccaagaaaagaaaatcctcacccattttgtgcgtagccaaacactctgagattctcagttatgtcgtggcaagcgtatgtggatgatcacctactgtgtgaaatcgaaggtaaccacctcactcacgccgctatcatcggccaagacggaagcgtttgggctcagagcaccaacttccctcagttcaaacctgaggaaataactgccatcaataatgactttaatgagcctggatcacttgctccaactggattgtatatcggtggcaccaaatacatggtcatccagggtgagcctggtgctgtcattcgagggaagaagggtcctggtggtgttactgtgaagaagaccggtgcggccttgatcattggcatttatgatg

SEQ ID NO: 257965 - DNA, 373 bp, Glycine max
  unsure (1)..(373): unsure at all n locations
caccggtccggaattgggggggacacgcgcttcgttacgctgctaaaaaacaacaaaagggtccttttacaagaagacaacataagggtccgtagtncgataaaacaacagaagggagaataccaaaaagaaaaaaaagattctaaagaaatctaactaatattccttaaaataatcaaaataaatccttaatgcaaattaattttacatagaaaaaagacttaaaaaggatgatttgaactgcgagatctaaaaacatatctttccgtggcaccagtagtaagtactctatggttcgaggctttggcggctctcttaatagagatcaatcgttttttcccaaatgcattgatattccctttttttccattct

SEQ ID NO: 257966 - DNA, 303 bp, Glycine max
cggtccggaattcccgggtcgacgcaagccttcgtccacgccttccttccggttgcaaaaaaacaccaaaagggggaaaaccaaagttccaaggaggagaaattaagaagatcattaatggcttctcttgcaaccttagctgctgttcaaccagctgcgctcaatggtctcgctggaagttccctctctggaactaagctctctttcaagccctctcgccacactgtcaaatccaagaacttcaggagtggtgccgtggtagccaagtatggtgacaagagcgtatactttgatttggaggat

SEQ ID NO: 257967 - DNA, 313 bp, Glycine max
accaccttatcgaatggacttccaaggctgcacttctcttgtgtttcaatgttctcttcttcaccgtggttagctccacatatgtgccatgcaacccaccccccaatactccaaaacacccacctgtcccaaatccaccttacccaaagcaagcaagttgccccaaaaacactattaagtttgctgtgtgtgctgatgcgttacgtttgatcaacgtgcaacttgtgaagccaccaaagaccccatgctgcaacctcattgagggtctcgctgatcttgaagctgcagtgtgcctctgcactgctctcaaaac

SEQ ID NO: 257968 - DNA, 273 bp, Glycine max
  unsure (1)..(273): unsure at all n locations
cgacccacgcaaactacggcttctataatactacatatagtttatagctaaacaganaatggtttcantgagagatcgtgttttaacttgatccttcataacccntcatcatcatcatcatcatcacctttaattgaaaaaaatgccgaccaaaaacatcgccttcgaaaggcctaaatattctactcacccctacactttaaaggcggagttggctaaattcatctccaccttgatcttcttgttcgccggttcaagttccggcatcgccta

SEQ ID NO: 257969 - DNA, 340 bp, Glycine max
ggcctacgcagagagaaattaagtttctgaggagaccacttttctctttgattcatcaatggcaaccgcgaggaccgtgaaggatgtttcgcctcacgatttcgtgaaagcttacgcctcccatctcaagcgttccggcaagatggagcttcctgagtggactgatattgtaaaaacagcaaaatttaaggaattggctccatatgatcctgactggtattatgttagggctgcctcaatggcaagaaagatttatttgagaggcggtcttggtgttggggctttccagaggatctatggtggaagcaagagaaatggaatccgtcccccacatttctgc

SEQ ID NO: 257970 - DNA, 304 bp, Glycine max
cgacgacagaggggggggaatagagatgagaggcacagaagttgtgcttgttcgcacaaccatcaatggcatcagcattatcttctctctcctccacctcttcttcactgttacggcacagtttcaccggaaactcgactgctcctcccaatactcaattccccaacataaatgtacgcttttcggtcttcgctcaatagaaggcaaagtaacttcgacagattattttgaacgaatatgtggcttatgtacggatccaacggcaacttcttgatgtgaatgctggcattttcagaaattacct

SEQ ID NO: 257971 - DNA, 336 bp, Glycine max
ttctttttctcatggtctagtttgtcatctaggattttcttcatcatgtcccttgtgtgcctgggtctcggtccattggcacaaggggaaatgacatgtggccaggttgtgagcaacctgaccccatgcatctcctatgtggtgtatggtggaaccaatgttcctgagcagtgctgcaatgggataagagatctctatggcatggcgcagaccaaaccagaccgccaagctgtttgcaactgcatcaagaacggtgttatgaacagtggggtcaacgtactctgactttacgctcaagcttgctggctgagcttcgcatgaaatgtggggtcatca

SEQ ID NO: 257972 - DNA, 372 bp, Glycine max
gacatactagttcagcagcaactccactcaattgtatgcattgatccatggctagatacattaatattgtacttttgggaatagtgttggtagtggtgagattgaaaggtgcagaggcacagcgggcgttctttgtgtttggggattctcttgtggataatgggaacaacaactttttggcaactacagctcgagcagatgctcctccttatggcattgattacccaaccggaagacccactggccggttctctaatggctacaacattcctgacttcattagtcaatcacttggggccgaatccacattgccttacttagatcccgagctcgacggggaaagattgcttgttggtgccaactttgcttctg

SEQ ID NO: 257973 - DNA, 440 bp, Glycine max
ggaccgacacagatctgtcttccgaagcacgaactaaatatggctgacttgttggaatggtcaaagcaagataagaaacgagtgcttcatgtcgtcgaccgtgttggtgaccttgatcgcaccatcaaattttacacagaatgtttaggaatgaagcttttgaggcacagagatatcccagaggacaaatatgcgaatgcttttcttggatttggccctgacgaatcccattttgttgttgaattaacatataattatggggttacctcgcatgacattggcgatcgctttggacattttgcaattgcaactcaggacatttataaattggctgagcacatcagggccacaggtggaaacatcacactggaacctggtccagttcaaggtggaactaccgcttatcgcctttgttaacgatcctgatggttacacttttg

SEQ ID NO: 257974 - DNA, 407 bp, Glycine max
gattgtgattcatttgcacatttggaaagtgttgtttttctttttttcatttgcattgcaaagcaaaaaccttgcaaattgcaatggcttccaacaaggttattaccaccatcttggttctttctctccttgcctactcaacatcattcaccaatgcatgtggcacatgccacccaaaacctactccttctccccctcctccatcagggaagtgccccaaggacacattgaagctaagggtgtgtgctgatgttctaggacttgttaatgttgttgttggttcccctgtctctagcaagtgttgtgcattgcttgaacgtttggctgattcggaggctgcactttgcctttgcactgctattaaaggcaatgttcttgggatcaacttgaatggtcctatcacactc

SEQ ID NO: 257975 - DNA, 213 bp, Glycine max
agctgcgcagagatagaagggggcacaagtgagtttgttgatcgacatatctagatccagtgtgatgaacatgcaggtccttgttttcttcgttgctacaattttggctagcatgcgagtgccatgcgtaccacatgttccctctccgactgaacactggcgtatggtgcccgtcctcctgatgtgaactgcgcacgttggaggcttgctgtc

SEQ ID NO: 257976 - DNA, 430 bp, Glycine max
tgcgagcatacatagagcgggataactggctgtgagcgggtgtagtttcacaaaccgtggtcttatcaactatggcggagacacttctatcgataacccagccgtgtaccaggctcaccaaaacgtcaatgagatgcactcaggcccttccgatgactacatgagcctcactcttgaggctcatatatttgaatggctgtttgccatcagggggcctcgtaatactgacttatgcggtggcatgtatcactgaccgcttcaactgccttcagaatatcccatcaaacctccttcgtttatgttgctcacacctactagccgttttgagacgcaatccatgatgtgcttgagcacatcagatcatcatcctgagcattggcatccatcatcgagcattacgactgcattacttgcattgattgcattcatg

SEQ ID NO: 257977 - DNA, 243 bp, Glycine max
  unsure (1)..(243): unsure at all n locations
tacggctgcggaggctgcaagatgtacccagacttgagctacactgagtcaaccaccaccgagaccttggtcatgggagtggcacctgttaaggctcaatttgagggtgctgaaatgggtgtgcccgctgagaacgatggctgcaaatgtggaccaaactgctcctgcaacccctgcacttgcaagtgacgtgttgggagagcanacttcaagcagagatacccttaattaagaatatgataa

SEQ ID NO: 257978 - DNA, 229 bp, Glycine max
gactcaccacgtgaaccaatatagcccaagccctatataaccaaaccctaacacacacccatttgattcagtttccatggctagcctcagggttggatttttggctgcagtgctctgcatggctgtggtgagtgcacccatggcacatgcagctatcacgtgcgggcaggtgactagcagcctgtccaatctcatcggttacatccagaagggaggaacgtcgttcctc

SEQ ID NO: 257979 - DNA, 376 bp, Glycine max
gaaaattgcaggtgtagcagcagagagtgcggtaggctcttccgagacccgaagcagccatggggatcgatctcaaggccggaggtaagagcaaaaagaccaaaagaacagcacccaagtccaatgatatctatctcaagctcttggtcaagctttatcgcttccttgttcggagaactggcagcaacttcaatgctgttatacttaagagattgttcatgagcaaggttaacaaacccccattgtctttgtcaaggttgattaagtatacgaacgggaaggaagataagattgcagtggtggtggggtctataaccgatgatattcgtgtttatgaagttccaccattgaaagttacagcactcaggtttacaga

SEQ ID NO: 257980 - DNA, 284 bp, Glycine max
caacaacgactttggttgggatgaaaacgggatcttcggggtgggacaattcatcggtgcacctccttgcagcactctaccaccaggtcgtaatcagggccattcccttcaagtccaagtgattcaatcaaacggttcatgcttaatcaagttgggaacaacaacaacaacaaaaatcaagccaatgtttgtgggttttggtttcatttcattaagatgatctgtttatctcttttcttctttttaaaatttaaagtctttgtattttgtaagtaaagatgtaa

SEQ ID NO: 257981 - DNA, 308 bp, Glycine max
ggagcagaagaacaagtagttgagaactaagaaggagaagcaaatggcttcctcaatgatctcttccccagctgttaccactgtcaaccgtgccggtgccggcatggttgctccattcactggcctcaagtccatggctggcttccccaccaggaagaccaacaatgacattacctccattgctagcaacggtggaagagtgcaatgcatgcaggtgtggccaccagttggcaagaacaagtttgagactcttccctacctgccagaccttgatgatgcacaattggcaacggaactcgaataccttc

SEQ ID NO: 257982 - DNA, 357 bp, Glycine max
gatccttcgtccagctagcaccacattcacctgaggcttccaaagcaatggcttcccttgcagcatccactgctgctgcttcccttggcatgtcagaaatgcttggaaaccccatcaacttcagtggtgccacaaggccagctccatctgcttctagtcctgcctccttcaagactgtggctcttttctccaaaaagaaggctacaccaacacctccaaaaaaagctgctgctgctgctcctgccaatgatgagcttgccaagtggtatggtcctgacagaaggatcttcttgcctgacggtctcttggaccgatccgaaatcccagagtactttgaccgaaaaattcctggagact

SEQ ID NO: 257983 - DNA, 448 bp, Glycine max
ggtgcacaagtgagtttgttgatcgagataactagaaacagtgtgatgaaaatgaaggtccttgttttcttcgttgctacaattttggtagcatggcaatgccatgcgtacgatatgttccctctccgaatgaacactggctatggtgcccgtactccggaggtgaaatgcgcaagttggaggcttgctgtggaagcacacaacatctttggctttgagaccattcctgaagagtgcgttgaagcaacaaaggaatacatccatggcgaacaatatagattagactccaaaacagttaaccaacaagcttacttttatgccagagacctcgaagttcaacccaaggacacatttgtgttcagtatagatggcaccgtactctctaatatttcatactacaaaaaacatggatatggggtggagaaatttaactcgaccttgtatgatg

SEQ ID NO: 257984 - DNA, 421 bp, Glycine max
tggcacaagtgagtttgttgatcgagataactagaaacagtgtgatgaaaatgaacgtccttgttttcttcgttgctacaattttggtagcatggcaatgccatgcgtacgatatgttccctctccgaatgaacactggctatggtgcccgtactccggacgtgaaatgcgcaagttggaggcttgctgtggaagcacacaacatctttggctttgagaccattcctgaagagtgcgttgaagcaacaaatgaatacatccatggcgaatcatatagatcagacccaaaacagttaaccaacaagcttacctttaagccaaaaaccttcaaattcaacccaatggaaaaattggtgtcagtatagatgggaccgttatccccatatatccatactacaaaaaacatggatatggggtggag

SEQ ID NO: 257985 - DNA, 362 bp, Glycine max
gatagaagaagcagaaagagaagcattagcaaaagcaagaagaactagtctaagcagaaatggcctcttcagtgatggcatctgtggccctcaaacgtgcccctttcactgttgagaagtcctcagttagaggccttccctccctctcaaggaactcctcttcattcagagttgtggccagtggtggcaagaagatcaagactgacaagccttatggaattaatggtggcatggctttgacggaaggagttgatgcatctggcaggaaaggaaagggaaagggcgtttaccagtttgtagacaaatacggtgctaatgtcgatgggtacagtcctatctacgacaccaaggactggtctcca

SEQ ID NO: 257986 - DNA, 367 bp, Glycine max
gattatatttgagttcaaacaaatcaaagccatggccacctccaacttctctattgttctctccgtctccctagccttctttttggtgctacttaccaaggcacactcgaccgataccgtttctttcaccttcaacaagttcaacccagtccaaccaaacattatgctccaaaaagatgctagtatttcatcctctggggtgttacaactcaccaaagttggcagcaacggcgtgcccactcgggatctctcggtcgtccccttacgctgcccaatccagatttgggacaaccaaaacggcaacgtaaccaactgggctacaacctttaaattcaacaatttcgcaaccaacaaatcaaactcaact

SEQ ID NO: 257987 - DNA, 342 bp, Glycine max
gtagcgggtatagtttagtggtaaaagtgcgattcgttccatggacccctaaatagttaagggatcccccgtttgattcatattccgatcaaaaactttatttcttacttaaagggaatcctttataccctcaatgaatgatttgcggtataatatacattatcgtaatttgtatacaagaagaatcaattctaaattgacaacttgagttctaaaattatgaaacataagtttttggaattggatctataatccgaatttttttgagtatgacgaaaggatctatggagagatatatagaaagtttctttctaatcgtaactaaatcttccatttttttgt

SEQ ID NO: 257988 - DNA, 452 bp, Glycine max
gataactgaagaaaactaaggaaggaatgaagagtgagcgtgaaagatgccttgggcgaggctttcagggtctccaaggctcgacgttgctattgacatgggcaatccatttctcaatctcactgttgatggtttccttaagatcggagctgtcgcagccacgcgatcagctgctgaagatacttatcatattatccaaaaggggaatatctcaagtcatgatttcgagaaaacgttgaagaagatgtgcaaagaacgtgtatattggggaactatagctggcgtttattttggaatgaataatggggtaaaaaggatccttgcaacaacaaatgggaaaatgccaataatgggggttcaataactggggccctggtatctgcaaccaacaacaacaagaaagaccaaattgcaatatatgccattactggggcagcaattgctactgctgc

SEQ ID NO: 257989 - DNA, 449 bp, Glycine max
  unsure (1)..(449): unsure at all n locations
gatctggcagcagaaaaacaagtagttgagaactaagaagaaggaaatggcttcctcaatgatctcctccccagctgttaccaccgtcaaccgtgccggtgccggcatggttgctccattcaccggtctcaaatccatggctggcttccccacgaggaagaccaacaatgacattacctccattgctagcaacggtggaagagtacaatgcatgcaggtgtggccaccaattggcaagaagaagttcgagactctttcctacttgccagacctcgatgatgcccaattggcaaaggaagtcgaataccttctaaggaaaggatggattccttgcttggaattcgagttggagcacggtttcgtgtancgtgagcacaacaggtcacctggatactatgatggacgctactggaccatgtggaagctgcctatgtttggctgcactgatg

SEQ ID NO: 257990 - DNA, 401 bp, Glycine max
  unsure (1)..(401): unsure at all n locations
ggcacaagtgagtttgttgatcgagataactagaaacagtgtgatgaaaatgaaggtccttgttttcttcgttgctacaattttggtagcatggcaatgccatgcgtacgatatgttccctctccgaatgaacactggctatggtgcccgtactccggaggtgaaatgcgcaagttggaggcttgctgtggaagcacacaacatctttggctttgagaccattcctgaagagtgcgttgaagcaacaaaggaatacatccatggcgaacaatatagattagactccanaacagttaaccaacaagcttacttttaggccaaaaacctcgaattccatcccaaggacacatttgtgttcagtataaatggcaccgtactctctaaaattccatactacaaaa

SEQ ID NO: 257991 - DNA, 397 bp, Glycine max
ggcacaagtgagtttgttgatcgagataactagacgcagtgtggtgaaaatgaaagtccatgtgttcttcgttgctacagttttgggagcatggcaatgccatgcgtacgacaggtgccctcgccgaatgaacactggctatggtgcccgtactccggaggtgaaatgcgcaggttggaggcatgctgtggaagcacacagcatctttggctttgagaccattcctgaagagtgcgttgacgcaagagatgaatacatccatggtgaacaatatagatcagactccaacacagttaaccaacaagcctacttttatgccaaatacctcgaagtccatcccaaagacacagttgtgttcagtatagatggcaccgtactcactaatattccatactac

SEQ ID NO: 257992 - DNA, 302 bp, Glycine max
aggggatgcaactgaataattaataaaagccatttcctaggagcctaagaaaatgcacagcacagcttgttcgctatctttctactttgcgccttcacctcatacctaccttccgccaccgcccaagacgtgctccacgtggatggcgatccgattcgggacggtttcatatactacgttttgccgggactaagaggaaacggtggcggcatataacgagccgcactccggaaagacacttgccctatcacagtagtgcaatctcccaatccaaaactctaaagggggtagaaatttaagtt

SEQ ID NO: 257993 - DNA, 463 bp, Glycine max
  unsure (1)..(463): unsure at all n locations
gggtggcgatacgctggaagatttatcaaatgttgtttcagatgcctgtatatgtcttcagaacaacaacatacctttcaatgttcttatctctgactgtggaaagcaagtctatctgttaccacagtgttatgcagagaaacaagctcttggagaagtggatgccgagcttcttgacacccaagtgaatcctgctgtgtgggaaattagtgggcacatggttctaaagaggaagaaggattatgatgaggcatctgaaggcaatgcttggaggcttcttgcagaggtgtccctctctcaagagaggtttcaagaagtcaatgatcntaattttgaagccattggctgtggtgaattggaggatgtcaacgttgaaagtgtcaaagaagttgatgcagtcagcacaagcgaacaccctactgtggtggtagctggttcacaagaatgtgtgattctacactaa

SEQ ID NO: 257994 - DNA, 375 bp, Glycine max
ggggcacagatgggtctggagttcgtaaatactagagtcactgtcataatggtgacaggccttgatttcatcgtagctattttataggaaacatagcatagcctatgcgtacgatttgttccctcttatttagaacaatgatgaatgtgcacgtacacctttagttttatgatttttttaggagcttactatatgttctttagtgaatcttttagctttcataacttatccttatgtgcgtttagtagtgtccaaagatggtatcaatgggtatccatgaatttcacatacacctgtctataacatttgtctgatcataatactgcagagcatgtcatcaatttaatcgacacatttgtgttcagtatagatggc

SEQ ID NO: 257995 - DNA, 453 bp, Glycine max
ggcattggggcatgcttttaatttcctagatctcccaaacaaattgtagcataagtcccatggccaaagagactagtgttgtttatctatatcccagcaaatcacaagtttggggtgagaattttgatcataaaaaacttgtaataacaacactagctgctaatggaaagaaggaggagagtaatggagcacctaatgacacatatcctgcgtttcccgggtggtatgctgatgtttcctggccaggagaagcacacacatataaaatagaaaagattctattccacgggaaatcagaattccaagagcttcttgtatttgagtcttctggacaaggcaaggttgcaattcttgatgggcatatccagctgacagaaaacgatgaatttgcttaccaagagatgctcactcaccttgcactctgttccattccagattcaaagaacgtgctgc

SEQ ID NO: 257996 - DNA, 224 bp, Glycine max
gggacagggacaacacataataaagatgagttttaaaaaaaaaaatagcggtcgcacaagtggatttgatcgcacctattccttcatgcggtgtcagatgtcttcaatgaagtcaccttccttcaaattaatgactgctccatttcagagtcatgactggtatcaccctgatgctactcatcttacacgtcttgcagcacaacgccctttcaacagctggcgta

SEQ ID NO: 257997 - DNA, 392 bp, Glycine max
gaagacacacaacacaacacaaacacacagagttagaggagaaatcatcatggcatcagcagcatctgggtttgtgttgtcacttaatgttgcagctgccaccacaaactcaagggtggtcatgttcaacacaaagaacaacgcttctaggcttgttgtaagggcttcagatgagcctgcagcggcggcacccgccaccgccacacccccagctgaagctgaagctaaaccaaagccaccacctattggccccaagagaggtgctaaggtgaagattcttaagaaggaatcttactggtacaaaggcactggttcagtggttgctgttgatcaggaccccaacactcgctaccctgttgtggttcgattcaacaaagtcaactatgccaatg

SEQ ID NO: 257998 - DNA, 201 bp, Glycine max
gacagctgcaccattacaaccacactaaaatggcttcatttgaatccttccaaatgctgcttcttgcaacctcatacacctcatgactcacagccttgttatgttactgacactctattttacaagctaccactgtacatcactcgagtgtatattccaccaatgtacaaaccattcgattattgtctaaaaggattcatt

SEQ ID NO: 257999 - DNA, 417 bp, Glycine max
gatctggcagcagaaaaacaagtagttgagaactaagaagaaggaaatggcttcctcaatgatctcctccccagctgttaccaccgtcaaccgtgccggtgccggcatggttgctccattcaccggcctcaaatccatggctggcttccccacgaggaagaccaacaatgacattacctccattgctagcaacggtggaagagtacaatgcatgcaggtgtggccaccaattggcaagaagaagctcgagactctttcctacttgccagacctcgatgatgcccaattggcaaaggaagtcgaataccttctaaggaaaggatggattccttgcttggaattcgagttggagcacggtttcgtgtaccgtgagcacaacaggtcacctggatactatgatggacgctactggaccat

SEQ ID NO: 258000 - DNA, 424 bp, Glycine max
ccttcagggttaagcggtgagatttgcgaatctgagaaatggcggattcttctcgggaggagaacgtttacatggcgaaattggcggagcaggccgagcgttacgaggagatggttgagttcatggagaaggttgcaaagactgtggaggttgaggagttgacggtggaggagaggaatctcctctctgtggcttacaagaacgtgattggtgcgaggagggcttcgtggaggatcatatcctccattgagcagaaggatgagagcaagggcaatgacgaccacgtggccattataaaggagtacacgggcaaaattgaggctgaactcagcaagatctgtgatgggattttgaacctccttgagtccaacctcattccttccgctgcatctcccgagagcagagtcttttaccgtaaaatgaa

SEQ ID NO: 258001 - DNA, 327 bp, Glycine max
gatagcatattccagtgtttttcatttcatcgtgcattcaatggccaccacagcatctctatccggaaccatggtgagcacctccttcatgaggaggcaacctatcaccaccatcaagccgggacacattctccaccgttgcgtgaagctctttttggtcagattattggtccaagtgttcgtgtcacttgcatggcctcgtcacatggtgaatctcataaccccagactgataactggagtttgaatgcccatctgatgttttcactgtttacaatgcataggatgaacgcattgatcttccctactcgtgcagggccggttcttg

SEQ ID NO: 258002 - DNA, 161 bp, Glycine max
ggcacaagtgagtttgttgatcgagataactagaaacagtgttgagtgaaaatgaacgtccttgttttcttcgttgctacaattttagtagcatggcaatgccatgcgtacgatatgttccctctccgaatgaagactggctatggtgcccgtagtccgga

SEQ ID NO: 258003 - DNA, 151 bp, Glycine max
gaagtgagtttgttgatcgagataactagaaagagtgtgatgaaaatgaaggtccttgttttcttcgttactacaattgtggtagcatggcaatgccatgcgtacgatatgttccctctccgaatgaggactggctatggtgcccgtagtc

SEQ ID NO: 258004 - DNA, 158 bp, Glycine max
gacaagtgagtttgttgatcgagataactagagacagtgtgatcaacatgaatgtccttgttttcttcgatgctacaattttgttagcatggcaatgccatgcgtactatacgttccctctccgaatgaacactggctagggtgcccgtactccggag

SEQ ID NO: 258005 - DNA, 165 bp, Glycine max
acaagcaacattgctaaccattctctgcacttttcagtgacaaagcatttcattgttggacaatatacaacagcacaatggctgcttcaacaatggctctctcttagtagtcattggctggccaagctatcaagcttgccccctcgagccctgagcttggtgttg

SEQ ID NO: 258006 - DNA, 350 bp, Glycine max
cgggattatatttgagttcaaacaaatcacagccatggccaactctaacttctctattgttctctctgtctccctagccttctttttggtgctacttaccaaggcacactcgaccgataccgtttccttcaacttcaacaagttcaacccattccaaccaaacattatgctccaataagatgctagtatttcatcctctggggtgttacaactcaccatagttggcagcaatcgtgtgcccacctcaggatcactcggtcatgccctttactccgcttccaatccaaattttggacatcgaaactcgcaatgtatccaacttttctacatcccattaaattcaacatttt

SEQ ID NO: 258007 - DNA, 204 bp, Glycine max
gacgacagacgggcaacagatgtcatcgcgaggatctcaaagaccgatcaaggcacgaaagccgggctctttcatacagtggcttcctattccaaaggtgtacagctgcatggataagctcacacggtaccgtcgctttgggatcacattcggttcctgatgaggtaacaggaaggaagtttgggctgtcataatatcaaatca

SEQ ID NO: 258008 - DNA, 387 bp, Glycine max
  unsure (1)..(387): unsure at all n locations
cagangggggcacangtgagtttgttgatcgagataactagaaacagtgtgatgaaaatgaaggtccttgtttgtcttcgttgctacagttttggtagcatggcaatgccatgcgtacgatatgttccgtctccgaatgaacactggctatggtgcccgtagagcggaggtgaaatgcgcaagttggagggttgctgtggaagcactgaacgtgtttgggttgtggcatgggtggtgaagagtgagtgggcggggggaggagataaggcgatggagagcgatatacattagactccaaaacaggtaaccaacaagcttacttttatgccatagacctctgantccatcccaaggaaacatttgtgttgaatataaatggcaccgtac

SEQ ID NO: 258009 - DNA, 200 bp, Glycine max
cccacgcgtccggataggtgccatctcagaatgaacagtggctatggtgcccgtactccggaggtgacatgcgcaagttggaggcttgctggtgaagcatgcaccatctttggctttgaaacgattcctgaagagtgccttgaatcaacacacgaatacatccatggagatcaatataggtcatactccacaacagttaa

SEQ ID NO: 258010 - DNA, 383 bp, Glycine max
  unsure (1)..(383): unsure at all n locations
gagccacaacactttccacttacctccgaattagttatcttgagaaacattagtcccattgctatagattatggctagcatgaaggttacatcggtggttgtgatcatgtgcatggccgtggtgggtgcaccgatgatgcgccaagccatgacatgcaatgatgtgaccgtgaagatggcacactgcccatcctagctgatgcagggacgagcacgtgcgacagctttgggccaggcgagtcaacgacattccgtgctctgctgtcaccaccgttgactgacaaactgtgtgcaactgtctcaaggcggatgctgctangtacaacatcaatgaccagtatgctcaggcactccctggtttctgcaaggtcaatgtcccttac

SEQ ID NO: 258011 - DNA, 163 bp, Glycine max
ggactcgaattgttccacgccacatccaattggcggtgacgaaccgcgaggagttgcacaagcttctatgagatgttaccattgctaactggggtgttgtgcctgtcattcacaaccttcttcttcccaaaagtgctgcgggctcatccaatggtgctgctgc

SEQ ID NO: 258012 - DNA, 374 bp, Glycine max
ggattcagattacattgcaaaaatggcatcattcaccatgacaggttcgatccttggcagcccagccgtcaccaaccggtcggcagtagcaacgcagaggagatcactcgtagtgaatgctgccaaagctgttgaagcagaaaaggtcagttatgacaatgacagggatggtagcaatgggaggaggaacttggtgttcgccgcgtgcggcgcggtgcggggggcggggggtgcggggatggcagtggcggggcggcctaaaccaggaaccccagaacgcaagaaaaagtatgctccgatttgtggcaccattgcaactgctaggatttgtcgcaattgagggactttggtttttattttacttctgatgattg

SEQ ID NO: 258013 - DNA, 365 bp, Glycine max
ggcacaagtgagtttgttgatcgagataactagaaacagtgtgatgaaaatgaacgtccttgttttcttcgttgctacaattttggtagcatggcaatgccatgcgtacgatatgttccctctccgaatgaacactggctatggtgcccgtactccggatgtgaaatgcgcaagttggaggcttgctgtggaaacacacaacatctttggctttgagaccattcctgaagagtgcctttaaacaacaagcgaatacatccatggcgaagaatattacatagactccaaaacagttaaccaacaaacttaactttatgccagagacctcaaattcaacccaaggacacaattgtgttcagtaaaaa

SEQ ID NO: 258014 - DNA, 227 bp, Glycine max
acgtcaggatggggcacaagtgcgcttgttgatcgagataactatgatcattgtgatgatgatgaaagtccttgttttcttcgtggctataatttcggcagcatggcactgctatgcgtatgatatgttcactcttagaatgaatactggctatggtgcacgtattcctgtggtgaaattcgcccgttggtggcttgctgtggttgcacacatcatctttggctttg

SEQ ID NO: 258015 - DNA, 183 bp, Glycine max
  unsure (1)..(183): unsure at all n locations
gatatgttccctctccgaatgaacactggctatggtgcccgtactccggaggtganatgcgcaaattggaggcttgctgtggaagcacgcaacatctttggctttgagaccattcctgaagagtgcgttgaagcaacacaggaatacatccatggcgaacaatatagatcagactccaaaaca

SEQ ID NO: 258016 - DNA, 348 bp, Glycine max
aataatgaataaaaaaatcaataagaattaataaaaagaaaaaagtgtaaatcagatagaaatttataaaatctatgatcctagaagagttccctagacaaaatagaagtaaagtcacaaacaagattcaagaataagattgtctgaagaaaggagagagatgagtcttaggattcgctgggtataaaagaggagaagaaggggataaagggtttcttgaacaattcattgaaaaaaattttctatcggatttttgagtcataggagattttatgatttagtacttggaggatttttaagaatagaagggaataactacattgagttcatcgatttgccctagatatc

SEQ ID NO: 258017 - DNA, 198 bp, Glycine max
ggcacaagtgagtttgttgatcgagataactacgaacagtgcgatgaaaatgagggtccttgttttcgtcgttgctacaattttggtagcatgggaatgccatgcgtacgatatgttccctctccgaatgaacactggctatggtgcccgtactccggaggtgaaatgcgcaagttggaggcttgctgtggaagcaca

SEQ ID NO: 258018 - DNA, 363 bp, Glycine max
tgggtatcgggtatagtttagtggtaaaagtgccattcgggtccatggacccctaaatacttaagggatcccccgtttgatgcatattccgatcaaaaacttgatttcttacttaaagggaatcctttagaccctcaatgaatgatttgcggtataagatacgttatcgtaatgtgtggacaagaggagacaattcgagagtgagagcgtaggttcgggggtggtgacacataggtgtttgcgggttggctctaggatccgaagttgtgtgtgtaagacgaaaggatctatggagagatatacgtaaagtttctttctaatcgtaactaaatcttccattttttgtatagtagagattgaagc

SEQ ID NO: 258019 - DNA, 363 bp, Glycine max
ggcacaagtgagtttgttgatcgagataactagaaacagtgtgatgaaaatgaaggtccttgttttcttcgttgctacaattttggtagcatggcaatgccatgcgtacgatatgttccctctccgaatgaacactggctatggtgcccgtactccggaggtgaaatgcgcaagttggaggcttgctgtggaagcacacaacatctttggctttgagaccattcctgaagagtgcgttgaagcaacaaaggaatacatccatggcgaacaatatagatcagactccaaaacagttaaccaacaagcttacctttatgccaaagacctcgaaatccatcccaatgacacatttgtgtccaatat

SEQ ID NO: 258020 - DNA, 240 bp, Glycine max
gaaagtatgatggcattatcacgtgttagggaggacaactaccggtcatatttgcgcgaagacactgagaagaataccaaatggatatatggtgcccctccacattacgacgttgctcacacgctatatgaccatggcagagtcattgtttgggctcacggttcacttgactagcacgtgcagtctctagtgcatttctgggacatggagatgttccacagtgtcggactgcatgatttc

SEQ ID NO: 258021 - DNA, 384 bp, Glycine max
  unsure (1)..(384): unsure at all n locations
ggccgcaagcagagatgacaacccgatttaagaagaaccgcaagaagcgcggccacgtcagcgccggccacggccgtattggaaagcaccgcaagcaccccggcggccggggaaatgccggcggcatgcaccaccacaggatcctcttcgacaagtaccacccggggttcttcgggaaggtanggatgaggtactttcataagctccgcaacaaattctactcccccatcgtcaacatcgacaagctatggtctctgataccccaagacgcgaaggacaaagccctaaaatcgaaggacactgcccctctaatcgacgtcactcagcacgggtacttcaaggttctcggaaaaggtgtgctgccccaaaaccagcccattgttg

SEQ ID NO: 258022 - DNA, 367 bp, Glycine max
  unsure (1)..(367): unsure at all n locations
gggttgaagggagcttaccttacctgaagatggcttcggtgtcctttgccgtgggacttttaccttacgcttcagttcgatttcccgtattgagcaacgccaactcactgaaactcagttcctcagctagcatctctactccaattcttcagcaaaagctctgctctcttctttcccccctccctctaagccctcgccctcgccctctcaccattgtatccgctaagggctacaaaatgaaaacccacaaggcatctacaaagcggtttaaggtgaccggacgaggcanaatagtgcgtaggagagctggcaagcagcatttgctcgtcaagaagaatacaagcgcaaatcccgactctccaaaatg

SEQ ID NO: 258023 - DNA, 321 bp, Glycine max
gacatcaaacatatacacaaaagagcactgaccaaaccattttattttatttttgaatcaagggtgagggccttccatggcttccgcttgtgcttcctctgcaattacagctgttgccatctctacgccgagttccgggcagaagaatggatcaggaggttgttttcttagtggaaggaaattgagggtgaaaaaggagagagcagcaattggaggacgaccgatgggcactacagtgtgcgcagttgctgagcctgacggacctctatggttcccaagcagcaaccctcctccatggcttgatggcactctacctggaga

SEQ ID NO: 258024 - DNA, 304 bp, Glycine max
ttttttttttttttcaaaaacattagttcgtttttttaactaatttagtattttttattacaataaacaatatctatgtttggaaaattttagaaaaagtattataatattcaatgttttacttgaaatagtaaaaaatgggaattaagatagataaaatatatggctaattaaagataaatatattttcataaaaatgtctttcacatcgaattctataacaatcaaaagctatactaattatatggcagctccaaaaaagcgcacttctatatcaaaaaaaaggattcggaacactttatgg

SEQ ID NO: 258025 - DNA, 413 bp, Glycine max
ggaggagagaggagaagagaagctaaagaaagaaaggagatgggagtggagaagcagttgttgaggtctggcaccggtccgaagccaattcccggtcagaacgtaaccgttcactgcactggtttcgggaagaacggtgacctttctcagaaattctggagcacaaaggatcctggccagaacccattcactttcaaaatcggccaaggttctgttatcaaaggatgggatgaaggtgtgcttggcatgcaaattggtgaagttgctcgtctccggtgctctccggattatgcttatggtgctggtggctttcctgcttggggaatacggcccaactctgtcttggaatttgaaatcgaagtcttaagtgcgcaatgaaaaccttggtagtctgtctctgtcctaaagaataa

SEQ ID NO: 258026 - DNA, 302 bp, Glycine max
ggttctagtgtgtgattgtttgttgttgtaactcgttcttcttcttttgttgttctgtgtttgtgtttgttttttctctcacctgaaaatgtcttgctgcggtggtaactgtggttgcggaagctcctgcaagtgcggcaacggctgcggaggctgcaagatgtacccagacttgagctacactgagtcaaccaccaccgagaccttggtcatgggagtggcacctgttaaggctcaatttgagggtgctgaaatgggtgtgcccgctgagaacgatggctgcaaatgtggaccaaactgct

SEQ ID NO: 258027 - DNA, 313 bp, Glycine max
ggaagcagaaagagaagcattagcaaaagcaagaagaactagtctaagcagaaatggcctcttcagtgatggcatctgtggccctcaaacctgcccctttcactgttgagaagtcctcagttagaggccttccctccctctcaaggaactcctcttcattcagagttgtggccagtggtggcaagaagatcaagactgacaagccttatggaattaatggtggcatggctttgagggaacgagttgatgcatctggcaagaaaggaaacggaaaaggcgtctaacagtttgtagacaaatacggtgctaatgt

SEQ ID NO: 258028 - DNA, 365 bp, Glycine max
ggagttcaccaaaccaacacctttcaaaatgcaaacatccttaacctttgctgcccccaacgttgtgcctttggcacaaacaaagagtttctcccatgttgccatcttccctaccaatttgaaagccccacgctcttcacctcgttactctccgatcagggttgcaatcgtggagcctgacacttcaactgtggactacaactctgcgttctcagtgtttccagcggaagcatgcgaaactgttggaggggaagcctgcatggcagaaatgcaccctgaagtgaagctacagccagaagctaagacaccacgagttgttacagagaacgttgagagagagtatcttgaatacgatgatcctaaaa

SEQ ID NO: 258029 - DNA, 374 bp, Glycine max
aggaacgccgtcgtcgggatgctgcaacggagtgaagagcctcaatgccgccgccaagaccaccgccgaccgccagacggcgtgcaactgcctcaagtcggccgccagccaaatctccggcttcaacgccaacaacgccgcctcgctccccggcaaatgcggagtctccatcccctacaagatcagcacctccaccaactgcgctaccatcaaggtttgaagagaaagtcatggacgcaggaaaccggaaactactcactagtatatgagtagcattattaatattaagaataagatcgagggtgatgagggctccacttatatgcccctctcctcttgtatgagagatttgcattggatagctttaagttgtg

SEQ ID NO: 258030 - DNA, 413 bp, Glycine max
gggccgtcgtgagttgcatctgcgtgtgactgcaagaaatggctcttgttctcaacgtctcattgtgttccatttctaaaccccatctttctctctcaacctccaatcccaacaaagcttcttcaactcttcctcttcctattctgggacttaaaacaaagcaaagtctccaaccatctcagaaactcacattttcattgggtgaatcagtggctggtgccaccctcgttgctctcctctctgcttctttcatctttgttgatcccgcacttgcattcaagggtggagggccatacgggcaggaagtgacaaggggacaagatctcactgggaaggactttagtggcaagactctgatcaaacaagacttcaaaacgtccatactgagacaagccaattttaaaggtgcaaag

SEQ ID NO: 258031 - DNA, 391 bp, Glycine max
  unsure (1)..(391): unsure at all n locations
gagtattcagattattatacattgcaaaaatggcatcattcaccatgacagcttccatccttggctgcccagccgtcaccaaccggtcggcagcgacgcagaggagatcagtggtagtgaatgcagccagcaaatctgttgaaggggaagaggtcagttatgacaacaatggtagcaatgcaaggaggaacttgatgttcgccacggcggcggctgctgtttgctcttttgctgcanggatggcattggcagatgagcctaaaccaggaacctcagaagccaagaaaaagtatgccccggtttgtgtccacaatcctacagctaggatttgtcgcaattgaggaacttttttgtttcacttttgggatttggaaatgtacaatgaatttgt

SEQ ID NO: 258032 - DNA, 413 bp, Glycine max
acgcgtccgagacgacagaagggggagagggagagagggagggagagagagagagagaggaaaagtaactccacacaacacatcacagcctaagagaattggattctaagctcgagagagagagagagagagagagagaagaaagaatcatgtggtgctggaaaggagagggaggctagaagaagaagaaaaaaagaagagctagagagagggtaccctcttgttaatttgcactgtttttgtgtctgttgctgcacttttaggagttcttctattctaacaacctctgccaaccaacacaagcctgaaaataaaataaagatgctgcctccttgctggagatcgttcgggaagaaacagtaatgctactgacatgggaaagaaggggagttggttttctgcaatcaagagag

SEQ ID NO: 258033 - DNA, 303 bp, Glycine max
gggcagcagaaaaacaagtagttgagaactaagaagaaggaaatggcttcctcaatgatctcctccccagctgttaccaccgtcaaccgtgccggtgccggcatggttgctccattcaccggcctcaaatccatggctggcttccccacgaggaagaccaacaatgacattacctccattgctagcaacggtggaagagtacaatgcatgcaggtgtggccaccaattggcaagaagaagttcgagactctttcctacttgccagacctcgatgatgcccaattggcaaatgaagtcgaatac

SEQ ID NO: 258034 - DNA, 401 bp, Glycine max
gaatatagatagatatatataatagaacgtaaaaaacaaaagaataataaatagaaaaaggagcatgttgattatatacaaagtaaagggcaacaatcatttttgtttaccatgggtaaggacaccatcgctgacataataacctatataagaaatgctgacatgaataaaaaaggaatggttcaaataccatttactaacataacagaaaacattgtaaaaatacttttacgcgagggttttgttgaaaacgtcagaaaacatagagaaaacgacaaatattttttagttttaactctacggtatagacgaaatacacaatgatcatataaaagttttttaaatttaaaacggctaagtacacccggtctactattatattcaaattatcaacgaatccc

SEQ ID NO: 258035 - DNA, 409 bp, Glycine max
gagtgcacaagtgagtttgttgatcgagataactagaaacagtgtgatgaaaatgaaggtccttgttttcttcgttgctacaattttggtagcatggcaatgccatgcgtacgatatgttccctctccgaatgaacactggctatggtgcccgtactccggaggtgaaatgcgcaagttggaggcttgctgtggaagcacacaacatctttggctttgagaccattcctgaagagtgcgttgaagcaacaaaggaatacatccatggcgaacaatatagatcagactccaaaacagttaaccaacaagcttacttttatgccagagaacgcgaagtccatcccaaggacacatttgtgttcagtatagatgggcacgtactccccaataatccatactacaaaaaacat

SEQ ID NO: 258036 - DNA, 231 bp, Glycine max
gagtgaattacattgcattgggttctatcagcgtatttcactcaccatgcagaaatgaatttgtgagttttatgtacgctagtgatacgtttaacatcaattctcagctcgagcatctccaagtcaaatatgttgggactggccatgctgatttgcacagatttgagtgggcagtgaacattcaacgtgatacctatgcatcatatattgggcactaccctttactgggat

SEQ ID NO: 258037 - DNA, 412 bp, Glycine max
  unsure (1)..(412): unsure at all n locations
ggaacggaaaagcactggcgcagctaccctgaggcttctcttctcttctcttctctgtcgtgagtcaccatggtgggggttagtgtgctgaacgatgctctgaagagcatgtacaatgctgagaaaaggggaaagcgccaagtcatgattaggccatcctccaaagtcattatcaaattccttttggtgatgcaaaagcacggatacatcggagagtttgagtatgttgatgaccacagggctggtaaaatcgtggttgaattgaacggtagactgaacaagtgtggggttattagtccccgttttgatgtgggcgtcaaggagattgaaggttggactgctaggcttctcncctcaagacagtttgggtatattgtattgactacctctgctggcatcatggattatgaag

SEQ ID NO: 258038 - DNA, 323 bp, Glycine max; identical to SEQ ID NO: 241465

SEQ ID NO: 258039 - DNA, 194 bp, Glycine max
ggatctggcagcagaagaacaagtagttgagaactaagaaggagaagcaaatggcttcctcaatgatctcttccccagctgttaccactgtcaaccgtgccggtgccggcatggttgctccattcactggcctcaagtccatggctggcttccccaccaggaagaccaacaatgacattacctccattgctagc

SEQ ID NO: 258040 - DNA, 151 bp, Glycine max
gaagaaaggcttatggtggatacctaggcacccagagacgaggaagggcgtagtaagcgacgaaatgcttcggggagttgaaaataagcgtagatccggggattcccgatataggtcaacctttcgaactgctgctgaatccacgggcagg

SEQ ID NO: 258041 - DNA, 377 bp, Glycine max
ggctccttccattttctatgtatcgtcaacgttagtgctttatttaggtgacaagactactcacagagaaagacactcggagaccttgcaagacttcatcaatggctgtcaaagtttatattgtgtactactccatgtatgggcatgttgagaaactagcagaagatataaagaatggggtttcctctgtggaacgtgttgaagccatattatggcaagtacctgagacgctgcaggatgaggtgctcggtaagatgagtgcaccacccaatagcgatgtaccactcattaccccgaatgaactatccgaggctgatggctttgtattcggcttcacaacaatgtttggaatgatggctgctcagtttaaagctttt

SEQ ID NO: 258042 - DNA, 411 bp, Glycine max
gaaaaagaaaaaaaagattctaaagaaatataactaatattctttagaataatcaaaaagaatattaaattcaaataaattttagatagaaaaaggacttaaaaaggaggatttgaaatgcgagatctaaaaacatatctttccgtggcaccagtagtaagtactctatggttcggggctttggcgggtctcttgatagagatcaatcgtttttttccagatgcattgatattcccttttttttcattctagttattgacacggaaaggggtgaagaagattatagatccaattaagtattaaatatatgtaattaatatgtaattaatctcctcttctttatttcgtcttttatttcttcctttttttacaattgtaatagaataagttagcacaaaattaggaaacaaa

SEQ ID NO: 258043 - DNA, 439 bp, Glycine max
  unsure (1)..(439): unsure at all n locations
aagaagacgacagaagggggttctagtgtgtgattgtttgttgttgtaactcgttcttcttcttttgttgttctgtgtttgtgtttgttttttctctcacctgaaaatgtcttgctgcggtggtaactgtggttgcggaaactcctgcaagtgcggcaacggctgcggaggctgcaagatgtacccagacttgagctacactgagtcaaccaccaccgagaccttggtcatgggagtggcacctgttaaggctcaatttgagggtgctgaaatgggtgtgcccgctgagaacgatggctgcaaatgtggaccaaactgctcctgcaacccctgcacttgcaagtgaggtgttgggagagcaagcttcaagcagagatagcccttaattaggaataatgataaactattaatgtgtagctaanaacttatgtattatgtc

SEQ ID NO: 258044 - DNA, 396 bp, Glycine max
ggcacaagtgagtgtgccgatcgagataactagaaacagtgtgatgaaaatgaaggtccttgttttcttcgttgctacaattttggtagcatggcaatgccatgcgtacgatatgttccctctccgaatgaacactggctatggtgcccgtactccggaggtgaaatgcgcaagttggaggcttgctgtggaagcacacaacatctttggctttgagaccattcctgaagagtgcgttgaagcaacaaaggaatacatccatggcgaacagtatacattagactccaaaacagttaaccaacaggcttacttttatgccagagacctcgaagtccatcccaaggacacatttgtgttcagtatagatggcaacgtactctctaatattccatacta

SEQ ID NO: 258045 - DNA, 393 bp, Glycine max
caagcctccgatacggtgccaagacgacagaagggggcacaagtgagtttgttgatcgagataactagaaacagtgtgatgaaaatgaaggtccttgtcttcctcgttgctacaattttggtagcatggcaatgccatgcgtacgatatgttccctctccgaatgaacactggctatggtgcccgtactccggaggtgaaatgcgcaagttggaggcttgctgtggaagcacacaacatctttggctttgagaccattcctgaagagtgcgttgaagcaacaaaggaatacatccatggcgaacaatatagatcagactccacaacagtttaacaacaagcttacatttatgccagagacctcgaagtccatcccaaagacacatttgtgttc

SEQ ID NO: 258046 - DNA, 367 bp, Glycine max
gaaggtgcaagagtttgttgtgagctataagctagtttatcgtgaggagaatatgaagttgtttgttttctttgttgctgcagtagttttggtagcatggccatgccatggcgcaggctaccaaaggttccccctccgaatgaaaactggctatggtgagcgttcttcggaggtaaaatgcgcaagttttaggcttgctgtggaagcacacaacatccgagcctttaaaaccattcctgaagagtgcgttgaaccaacaaaggactacattaatggcgaacaatttagatcagactctaaaacagttaaccaacaagctttcttttatgctagtgaacgcgaagtccatcacaacgacatatttata

SEQ ID NO: 258047 - DNA, 296 bp, Glycine max
ggaagaagaagaagaagaagatggcattgggtgttcctgctcttcccctgacatacgtggctcacgttctggcacttgttgccagcatcttggtcgtgctctgggtcctcaattttaggggtggcttggcttgggattccgataacaaggccctcatcttcaatcttcatccagttcttattgtcattggcttactagtccttgggggtgaagctattataagctacaaagcattacccctgaagaaggaagtgaagaaattgatacaccttgttttccatgccatcgcattaata

SEQ ID NO: 258048 - DNA, 274 bp, Glycine max
gggcagcagaaaaacaagtagttgagaactaagaagaaggaaatggcttcctcaatgatctcctccccagctgttaccaccgtcaaccgtgccggtgccggcatggttgctccattcaccggcctcaaatccatggctggcttccccacgaggaagaccaacaatgacattacctccattgctagcaacggtggaagagtacaatgcatgcaggtgtggccaccaattggcaagaagaagttcgagactctttcctacttgccagacctccatg

SEQ ID NO: 258049 - DNA, 239 bp, Glycine max
  unsure (1)..(239): unsure at all n locations
gtcctcagtgagaggccttccctctctctcaaggaactcttcttcattcatagttgtggccagtggcaagaagatcaagactgatataccttatggaattaatggtggcatggctttgagggatggaactgatgcatctggcaagatcgggaaatggtgtttactacgtttgtanacaaggacagtgcaaaagtcgatggatagaatcatatctacgacacgaaggactggtcttcata

SEQ ID NO: 258050 - DNA, 417 bp, Glycine max
gaaggtgcaagagtttgttgtgagctataagctagtttatcgtgaggagaatatgaagttgtttgttttctttgttgctgcagtagttttggtagcatggccatgccatggcgcaggctaccaaaggttccctctccgaatgaaaactggctatggtgagcgctcttcggaggtaaaatgcgcaagttttaggcttgctgtggaagcacacaacatccgagcctttaaaaccattcctgaagagtgcgttgaaccaacaaaggactacattaatggcgaacaatttagatcagactctaaaacagttaaccaacaagctttcttttatgctagtgaacgcgaagtccatcacaacgacatatttatattcggcatagataacaccgtactctctaatatcccatactatgaaaaaca

SEQ ID NO: 258051 - DNA, 279 bp, Glycine max
aagaaggaagctgaagtcatagaagagaagaaggaagtggaagtgacggaagagaagaaggaaattgaagtaacagaagagaagaaggaagctgaagtcatagaagagaagaaggaagtggaagtgacggaagagaagaaggaaattgaagtaacagaagagaagaaggaagcagaagtgaaagaagagaagaaggaaggggaagtgacggaagagaagaaggaagttgaagtgacggaagagaagaaggaagcggaagtgacaaaaaaaaaacaaaaa

SEQ ID NO: 258052 - DNA, 406 bp, Glycine max; identical to SEQ ID NO: 238295
  unsure (1)..(406): unsure at all n locations

SEQ ID NO: 258053 - DNA, 413 bp, Glycine max
ggttctagtgtgtgattgtttgttgttgtaactcgttcttcttcttttgttgttctgtgtttgtgtttgttttttctctcacctgaaaatgtcttgctgcggtggtaactgtggttgcggaagctcctgcaagtgcggcaacggctgcggaggctgcaagatgtacccagacttgagctacactgagtcaaccaccaccgagaccttggtcatgggagtggcacctgttaaggctcaatttgagggtgctgaaatgggtgtgcccgctgagaacgatggctgcaaatgtggaccaaactgctcctgcaacccctgcacttgcaagtgaggtgttgggagagcaagcttcaagcagagatagcccttaattaggaataatgataaactattaatgtgtagctaaaaacttatgt

SEQ ID NO: 258054 - DNA, 368 bp, Glycine max
ggcagccaagaaaagaaaatcctcacccattttcttcgtagccaaacactctgaaattctcagttatgtcgtggcaagcgtatgtggatgatcacctactgtgtgaaatcgaaggtaaccacctcactcacgccgctatcatcggccaagacggaagcgtttgggctcagagcaccaacttccctcagttcaaacctgaggaaataactgccatcaataatgactttaatgagcctggatcacttgctccaactggattgtatatcggtggcaacaaatacatggtcatccaaggtgagcctggtgctgtcattcgagggaagaagggtcctggtggtgttactgtgaagaagacggtgcggccttga

SEQ ID NO: 258055 - DNA, 158 bp, Glycine max; identical to SEQ ID NO: 256582

SEQ ID NO: 258056 - DNA, 444 bp, Glycine max
gaagacgacagaagggggcacaagtgagtttgttgatcgagataactagaaacagtgtgatgaaaatgaaggtccttgttttcttcgttgctacaattttggtagcatggcaatgccatgcgtacgatatgttccctctccgaatgaacactggctatggtgcccgtactccggaggtgaaatgcgcaagttggaggcttgctgtggaagcacacaacatctttggctttgagaccattcctgaagagtgcgttgaagcaacaaaggaatacatccatggcgaacaatatagatcagactccaaaacagttaaccaacaagcttacttttatgccagagacctcgaagtccatcccaaggacacatttgtgttcagtatagatggcaccgtactctctaatattccatactacaaaaaacatggatatggggtggagaaattta

SEQ ID NO: 258057 - DNA, 140 bp, Glycine max
ggggatatggcgaaattggtagacgctacggacttaattggattgagtcttggtatggaaacttaccaagtgagaactttcaaattcagagaaaccctggaattcacaaagggcaatcctgagccaaatcctgttttccg

SEQ ID NO: 258058 - DNA, 397 bp, Glycine max
gaggcgcggcgggatcagcacaagattgcaaaatgaagttcaacattgcaaatcccaccactgggtgccagaagaagctggaaatcgatgacgacctgaagcttcgagcattttgggacaagaggatctcccaggaggttcttggtgatgctctgggtgaggagtttaaaggatatgttttcaaaatcaccggtgggtgtgacaaacaaggattccctatgaagcagggagtgctgacccctggtcgtgttcgacttttgctccatagaggaactccttgtttccgtggatatggaaggcgcaatggagagcgtagaaggaagtctgttcgtggttgcattgtcagcccagatctctctgttttgaacctggtaattgtgaagaagggtgggagtga

SEQ ID NO: 258059 - DNA, 414 bp, Glycine max
gagaacccaagagcagagaagaatcagagaatggcaactatgactggtgtgagcctttcatgccccagggttttcttcaacgcatcaggctcaccgcaaaacgcgcatgcttattgtattttgtccagcagattctatgacttgacaggactgcagaatggaattctgaagcgagggagagagattttcctcactggttgctacctccgaactcccactggaggttctggacattcacgtcttttgccaacagagtatcttgtgattctattggatgaagacttccagaaggaaattgttaaagcagcagaaacatttacagctataggttataagcatattgaaacacgtgaagattagcttttgtttcttttttcctttactttgactagtccttgtatgcaatcactgtta

SEQ ID NO: 258060 - DNA, 375 bp, Glycine max
  unsure (1)..(375): unsure at all n locations
gaagaagaagcattttgtgactgaaaaaaggttttagatcgtaaaaactaatcactacgaaaacaagagatatcgaagatggctctgcccaaagctaaggagatcgtgtcgtccaattccgtcgtcgttttcagcaaaacctattgccctttctgcgtcgatgtgaagaagctcttcggtgacctcggtgccaattacaaggccatcgaactcgacactgaatccgatggaaaagagctccaagcagcattagttgagtggacggaccagcgaaccgtgcctaatgtgtttattggtggaaaccacattggtggctgtgactcaacaactgccctgcacactcaggggaagctggntcccctgctgatatctgct

SEQ ID NO: 258061 - DNA, 362 bp, Glycine max
  unsure (1)..(362): unsure at all n locations
gaaaggcagtagtagtgttactttccaatttgaattgttccattttcatttctttcgcaaaagttgcaactacttcctcagaaaaaaagtttctaagttaaggaaatccagagagacaaaaatggccggtgacggtgcagctacatgcatagacatcctccttgccatcattctccctcctcttggagtctttctcaaatatggctgccaggtggagttctggatttgtttggtgctgaccctttttggttatatacctggaattatctatgctgtctatgctatcaccaagtgatcaccctttaactttgtgtggacaataaacaaatgtcatgggcgtntctggtcttcaactcagatat

SEQ ID NO: 258062 - DNA, 390 bp, Glycine max
gacagaaattaacaaccatatctattcttacaagttacatccattgagaaacatgaaggtctcccccttagcattttcaatcctttttttgtccttcaccatagaactcttcattggcattgcttcagcagcacaagaaccagtgcttgacacctcaggccggaagctgagaacaggtgtcaagtactacattctaccagtcttcagaggcagaggtggaggcctaacagtttcaagcagtggcaacaacacatgccccctctttgtggtgcaagagaagcttgaagtctcaaagggcaccccagttaccttcacaccctacaatgccgaaagtggtgtcattctaacctcaaacgatctcaacatcaagtcctatgtgaaaagcaacac

SEQ ID NO: 258063 - DNA, 404 bp, Glycine max
ggcacaagtgagtttgttgatcgagataactagaaacagtgtgatgaaaatgaaggtccttgttttcttcgttgctacaattttggtagcatggcaatgccatgcgtacgatatgttccctctccgaatgaacactggctatggtgcccgtactccggaggtgaaatgcgcaagttggaggcttgctgtggaagcacacaacatctttggctttgagaccattcctgaagagtgcgttgaagcaacaaaggaatacatccatggcgaacaatatagatcagactccaaaacagttaaccaacaagcttacttttatgccagagacctcgaagtcatctcgaagacacaattgtgttcagtataaatggcaccgtactctctaatattccaaactacaaaaacat

SEQ ID NO: 258064 - DNA, 125 bp, Glycine max
caccttgcggacccagtcaacaacaatgcctgggcctacgccaccaacttcgtccccggcaagtgagcatgaaagaaaaggatgacttgtggacttttgagagtttttagatttgtgtttggtga

SEQ ID NO: 258065 - DNA, 302 bp, Glycine max
gtcaataggtaagtagcaatggcttccgaagaatcccagttcacgcccccgcaacgagcagtccactagcgaactcatcacgagcgcgaagctggtggccgatgccgcgcaatcggctctgaagagcgacagcgacaaagtggacaaggccaaggtggctgacgctgccggcgatcttctcgacgcggcggtgaaatatggaaaacttgatgacaaacaatgcatacggcaatatgttgacaaggctgctgattatctgcataattagcactgtgataatagcactgctccttcacagcctg

SEQ ID NO: 258066 - DNA, 317 bp, Glycine max
gaaggtgcaagagtttgttgtgagctataagctagtttatcgtgaggagaatatgaagttgtttgttttctttgttgctgcagtagttttggtagcatggccatgccatggtgcaggctaccaaaggttccctctctgaatgaaaactggctatggtgagcgttcttcggaggtaaaatgcgcaagttttatgcttgctgtggaagcacacaacatccgagcctttaaaaccattcctgaagagtgcgttgaaccaacaaaggactacattaatggcgaacaatttagatcagactctaaaacagttaaccaacaag

SEQ ID NO: 258067 - DNA, 345 bp, Glycine max
gacctcacccagttgcagaaagaaaagaccatcaaagtttcacttcagccttatccggtttagggtttcggtttttgacccaacctttgacgtatcgaaaccttaagtttcggatcaggtctgagcaatctggttggtagaacctttggtcttagagagtcaagttttatgtctgaattagacgatcaagttcctactgccttcgatccttttgctgatgcaaatgctgatgactcgggtgctgggtcaaaggagtatgtgcatattcgcgtacagcagcgaaatggaaggaaaagcctgacaaccgttcaaggattgaaaaaagaattcagctattacaagata

SEQ ID NO: 258068 - DNA, 421 bp, Glycine max
gttaatgataagattgccttacacaaggttttactggttggcactgatacatcttgctacattgggaaaccaattgtaacaaatgctgtagtatatgcaacagtggaagagcagggtctagaccccaaagtaattgtcttcaaatataaaaagaagaaacactatcgcagaaacattgggcacagacagccaaatacacgtatacggataaatagcattatgggctatgagaactacccaaaagttactatggacgacatcaaatcagacgaacccggatcatgaacaccttgtttactgtgcctatactgtagcttcttcctctttaaatatgaaattatttcgccattactagttttgctttaattagaaatgtaatttatggcatattgtaatattgtattgttgtaatctcctgttt

SEQ ID NO: 258069 - DNA, 307 bp, Glycine max
gttcaaatattctgtgtgctgagagcagtgaaagacctttgttgaaccgcttgatgttagaattgtacaagttggaaagtgatgttcttgttggacacaatatttctggatttgacctggatgttcttctccacagatcccaggcttgcaaagtagcaagcaacatgtggtctaaattatggcgcctcaaccgttctacaatgcctaaacttagaagaagcaacgtttttggttctggagcagaccctggtatcatgtcctgcaatgctggccgacttctttgggaaacatacttgtgttcccgtga

SEQ ID NO: 258070 - DNA, 94 bp, Glycine max
gaagaaagctgctagcagagggaagttctacacttttttgtttggattgatcgagtgtactttttcttttcgagattggcttggtgtgcagtgg

SEQ ID NO: 258071 - DNA, 317 bp, Glycine max
  unsure (1)..(317): unsure at all n locations
ggttgagccttagtatgtcgttttgaaccaaacgacagttgcgtcagaactacgctgaagaatatcatcaccatcaaagtgtttcgttggaaggggaatttggcagatcattggaagaaaatggcgggtggtggaaaggtttcgttccaagtcacactcacctccgatccaaaattacccttcaaagtgtttagcgttccagaggctgcgccttttactgccgttctcaaattcgccgccgaagaattcaaagtcncgccccagaccagcgctatcatcaccaatgatggtgttggcataaatccccagcagagcgc

SEQ ID NO: 258072 - DNA, 312 bp, Glycine max
gatctggcagcagaaaaacaagtagttgagaactaagaagaaggaaatggcttcctcaatgatctcctccccagctgttaccaccgtcaaccgtgccggtgccggcatggttgctccattcaccggcctcaaatccatggctggcttccccacgaggaagaccaacaatgacattacctccattgctagcaacggtggaagagtacaatgcatgcaggtgtggccaccaattggcaagaagaagttcgagactctttcctacttgccagacctcgatgatgcccaattggcaaaggaagtcgaataccttct

SEQ ID NO: 258073 - DNA, 397 bp, Glycine max
ggcacaagtgagtttgttgatcgagataactagaaacagtgtgatgaaaatgaaggtccttgttttcttcgttgctacaattttggtagcatggcaatgccatgcgcacgatatgttccctctccgaatgaacactggctatggtgcccgtactccggaggtgaaatgcgcaagttggaggcttgctgtggaagcacacaacatctttggctttgagaccattcctgaagagtgcgttgaagcaacaaaggaatacatccatggcgaacaatatagatcagactccaaaacagttaaccaacaagcttacttttatgccagagacctcgaagtccatcccaaggacacatttgtgttcagtatagatggcaccgtactctctaatattccatactac

SEQ ID NO: 258074 - DNA, 404 bp, Glycine max
gcacaattctctcttatcatctttgttattacctctttccaaagtccaaattttctagttccaccaaaccaaaccaaaccaaaatggcagcagcctcagcctcatccatgatatcaacaccagccttatctccaaccatccaaaagcaccatcatttgaagccatccaacgtgtgcttccaaggtcttagacccctcgcaaggttcaccaaagcctcatcaaccaaagtgagcaccaccaccaaaagggttattccaaagggtggtgttagagctgaactcaactcagcccttgtgataagcctcagcactggcctctccctcttcttgggaaggtttgtgttcttcaacttccaaagggagaacgtggcaaagcaagtgcctgagcagaacggcctcacacac

SEQ ID NO: 258075 - DNA, 443 bp, Glycine max
  unsure (1)..(443): unsure at all n locations
aagacgacagaaggggactcacagaaagagaaagtgagagacagagagatgatggagttgaagaaggtggcattggtgaaggtagttttgttgcttttcctgttagggttcagtgcaaccactgcagatgctactcgcttcgacccacgttccttcattactcaggtgctccccaacaattactatgtaaaaatcaaatccacagccactgcatgttgtgatctttgtctttgcacaaaatcaaaccctccccagtgccaatgtgtagatgggagcgagacaggctgccactcatgttgcaaaaattgcatttgcaataagaaatttcctcggacgtgtttttgtggagatataaccaacttctgctatgacaaatgtaactcaactgaagccaattaaagctcactagctangaatatgaatgagcatgtttccataaataa

SEQ ID NO: 258076 - DNA, 414 bp, Glycine max
gaaggtgcaagagtttgttgtgagctataagctagtttatcgtgaggagaatatgaagttgtttgttttctttgttgctgcagtagttttggtagcatggccatgccatggcgcaggctaccaaaggttccctctccgaatgaaaactggctatggtgagcgttcttcggaggtaaaatgcgcaagttttaggcttgctgtggaagcacacaacatccgagcctttaaaaccattcctgaagagtgcgttgaaccaacaaaggactacattaatggcgaacaatttagattagactctaaaacagtttaacaacaagctttcttttatgctagtgaacgccaagttcatcacaacgacatatttatattccgcatagattacaccggtatctctaatatcccatactatgaaaa

SEQ ID NO: 258077 - DNA, 411 bp, Glycine max
  unsure (1)..(411): unsure at all n locations
ggtgcacaagtgagtttgttgatcgagataactagaaacagtgtgatgaaaatgaaggtccttgttttcttcgttgctacaattttggtagcatggcaatgccatgcgtacgatatgttccctctccgaatgaacactggctatggtgcccgtactccggaggtgaaatgcgcaagttggaggcttgctgtggaagcacacaacatctttggctttgagaccattcctgaagagtgcgttgaagcaacaaaggaatacatccatggcgaacaatatagatcagactccanaacagttaaccaacaagcttacttttatgccagagacctcgaagtccatcccaaggacacatttgtgttcagtatagatggcaccgtactctctaatatttcatactacaaaaaacatgga

SEQ ID NO: 258078 - DNA, 386 bp, Glycine max
gaaggtgcaagagtttgttgtgagctgtaagctagtttatcgtgaggagaatatgaagttgtttgttttctttgttgctgcagtagttttggtagcatggccatgccatggcgcaggctaccaaaggttccctctccgaatgaaaactggctatggtgagcgttcttcggaggtaaaatgcgcaagttttaggcttgctgtggaagcacacaacatccgagcctttaaaaccattcctgaagagtgcgttgaaccaacaaaggactacattaatggcgaacaatttagatcagactctaaaacagttaaccaacaagctttcttttatgctagtgaacgcgaagtccatcacaacgacatatttatattcggcatagataacaccg

SEQ ID NO: 258079 - DNA, 411 bp, Glycine max
ggctctcacacctgtgattattcctcttttaacaatccacacccaaattctagggttccgaaatggacgctggcggaaagatcaagaagggcgccggaggtagaaagggcggcggcccaaagaagaagccggtttcaaggtccgtcaaagccggtctccaattccccgtcggaagaattggccgttatttgaagaaaggaaggtacgctcagcgtgtcggtaccggtgctcccgtatacttggctgcagttctcgaatacctagctgccgaggtgcttgagttggctgggaatgccgcacgtgacaacaagaagaacaggattattccaagacacgtgcttttggcagtgaggaacgatgaggagttggggaaattgcttgctggagtgacaattgcacatggtggcgtgc

SEQ ID NO: 258080 - DNA, 395 bp, Glycine max
ggtgcacaagtgagtttgttgatcgagataactagaaacagtgtgatgaaaatgaaggtccttgttttcttcgttgctacaattttggtaacatggcaatgccatacgtacgatatgttccctctccgaatgaacactggctatggtgcccgtactccggaggtgaaatgcgcaagttggaagcttgctgtggaagcacacaacatctttggctttgagaccattcctgaagagtgcgttgaagcaacaaaggaatacatccatggcgaacaatatagatcagactccaaaacagttaaccaacaagcttacttttatgccagagacctcgaagtccatcccaaggacacatttgtgttcagtatagatggcaccgtactctctaatattccata

SEQ ID NO: 258081 - DNA, 396 bp, Glycine max
ggcacaagtgagtttgttgatcgagataactagaaacagtgtgatgaaaatgaaggtccttgttttcttcgttgctacaattttggtagcatggcaatgccatgcgtacgatatgttccctctccgaatgaacactggctatggtgcccgtactccggaggtgaaatgcgcaagttggaggcttgctgtggaagcacacaacatctttggctttgagaccattcctgaagagtgcgttgaagcaacaaaggaatacatccatggcgaacaatatagatcagactccaaaacagttaaccaacaagcttacttttatgccagagacctcgaagtccatcccaaggacacatttgtgttcagtatagatgggaacgtactctctaatattccatacta

SEQ ID NO: 258082 - DNA, 414 bp, Glycine max
  unsure (1)..(414): unsure at all n locations
gaaagaggctcatacaaaggttgctgtangagataagattgcagtagtgctaagtgctaacacctgcagtgaacaatggcctctgcatcagcatctctgctcaagtcttcacttgttcttgacaagtctgagtgggtgaagggacaaacccttcgccaaccttctgcatcagttgtgagatgcaaccccaccaccccatcaggcctcaccatcagagctggttcctatgctgatgagctcgttaagaccgcgaaaacagtggcttcaccagggaggggtattttggccatggatgagtccaatgctacctgtgggaagcgtttggcttcaattgggctagagaacactgaagctaaccgccgggcataccgtaccctcctcgtgacagttccaggccttggtcagtacatctct

SEQ ID NO: 258083 - DNA, 413 bp, Glycine max
ggacattgtgttgatccgagacagaaaaaggggttagggtttgttcttgtgatcgaagctaagcgaagcaaaatgggtggatcagtgagggacgtgaagtcgaagggcgaggtcgacgaggtggtggcgagtggctctccggttatcctccacttctgggcgtcgtggtgcgaagcttccaagcacatggaccaactcttctctcacctttccactgatttccccaacgcccgcttcttaagggtcgaggccgaagagcaacccgagatttctgaggcttactccgtctccgctgttcctttctttgccttctgcaaggatgggaagacctttgatacattggagggagctgattcgtcaagcttagccaataaggttgttaaagtagcaggctcaattaaccctggagaatc

SEQ ID NO: 258084 - DNA, 398 bp, Glycine max
  unsure (1)..(398): unsure at all n locations
gactacaaatcagttttttacttgaattttcttcatccttctctgttctcctagaacttgattacttgaacattccctatgacagatgaggtggttcttctggatttctggccaagtccatttgggatgagggtcaggattgcacttgctgaaaagggtatcgaatatgagtacaaagaagaggacttgaggaacaagagtcctcttctcttacaaatgaacccggttcacaagaagattccggttctcatccacaatggcaaacccatttccgaatccctcattgctgttcagtacattgaggaggtttggaatgacagaaatcccttgttgccttcagacccttaccagagagctcaagctanattctgggctgattatgttgacattaagataca

SEQ ID NO: 258085 - DNA, 408 bp, Glycine max
gacagcagtaaagtgagttaaaagaaccgataatagttgttccttcactctccgctctctctgccactgagccaagaagatggcctcacaggtttgcaaatctgcttccagagccgcgaggtcccttctatcctctcgttttcactctcaaggacgtgcgcttggggctgctgcggctgtttcattgagcagcaaagtgcctcttttttacggaaagaacggttctggaaatggatccgcttcttcatcatcatcatcatcatggatttcaggagctcttgctcttcctgccgcagcttacatgttccaagatcaggacgtgcacgcagctgagctggagcgcactttcattgccattaagcctgatggagtgcagagaggcctgatttctgagattatatctcgttt

SEQ ID NO: 258086 - DNA, 390 bp, Glycine max
gaaaaagttagaagtaaagaagatcatggcttctctagcaaccttggctgctgttcaaccagctacgatcaatggccttgctggaagttccctctctggaactaagctctctttcaagccctctcgccacagtgtcaaatccaagaacttcaggagtggtgccgtggtagcaaagtatggtgacaagagtgtgtactttgatttggaggatctgggcaacactacagggcagtgggacttgtatggctcagatgcaccttcaccctacaaccctcttcagagcaagttcttcgagacatttgctgctccaattcacaaagagggattgttactcaagtttctgatattgggaagtggttcccaccttgcatacttcagtgcaactgcctc

SEQ ID NO: 258087 - DNA, 321 bp, Glycine max
cggggttctagtgtgtgattgtttgttgttgtaactcgttcttcttcttttgttgttctgtgtttgtgtttgttttttccctcacctgaaaatgtcttgctgcggtggtaactgtggttgcggaagctcctgcaagtgcggcaacggctgcggaggctgcaagatgtacccagacttgagctacactgagtcaaccaccaccgagaccttggtcatgggagtggcacctgttaaggctcaatttgagggtgctgaaatgggtgtgcccgctgagaacgatggctgcaaatgtggaccacactgctcctgcaacccctgcac

SEQ ID NO: 258088 - DNA, 406 bp, Glycine max
ggcacaagtgagtttgttgatcgagataactagaaacagtgtgatgaaaatgaaggtccttgttttcttcgttgctacaatttttggtagcatggcaatgccatgcgtacgatatgttccctctccgaatgaacactggctatggtgcccgtactccggaggtgaaatgcgcaagttggaggcttgctgtggaagcacacaacatctttggctttgagaccattcctgaagagtgcgttgaagcaacaaaggaatacatccatggcgaacaatatagatcagactccaaaacagttaaccaacaagcttacttctatgccagagacctcgaagtccatcccaaggacacatttgtgttcagtatagatggcaccgtactctctaatattccatactacaaaaaaca

SEQ ID NO: 258089 - DNA, 361 bp, Glycine max
ggattctctccctttttctctcgcgaaaaccgtatcggcaatgtctggagaatcagccagcgctattcacaagggtcaagtcgatctcttagacttcattgactggtctggggttgaatgcctcaatcaaagctccacccactctctccccaatgctatcaaacagggttatagagaagacgatggtttgcatctggagagtgatgcagacgagcagcttttgctctatattcctttcactcaagtcgttaaactttattcctttgttatcaaaggtcctgaagaagaaggccccaagacagtgaagctcttttctaacaaggagcacatgggatttagtaatgtcaatgattttccccca

SEQ ID NO: 258090 - DNA, 325 bp, Glycine max
gatccacacgctcacaataacacactgtcaccgttccgttccgttttcctctgttttattttcttctttctttcaaatccccgcttcgtggaaatcccgaaccaaaaaccatgcttctccgaaccgctgctgcttctgcttcgtccctctccctcttcagccagaacgccgaacctcaccgttcggttcccgctcgtggattggtggttcgcgcagcgaaaggatccacgaaccatcagcgccctgaacggagtgatttttgaatcgttcgaagaggtgaagaaggaatccaatcccgattcccaccggttccgcaaagcttctc

SEQ ID NO: 258091 - DNA, 257 bp, Glycine max
gacgctgagcgacctttctcctcagtccacataaaccaaatgtcagacaagtgccaccagttcatcacgagagaaacgactacctgagccgaaatcattatataacaagaatttaatactaatacatcatactaacacaatataggtagaactgtcgtatcatatagacatctcttcagcatagcatcggtcatcgagaagatcacgaccacacaccgacacatgaaatccgggatccttcataatatggacaccga

SEQ ID NO: 258092 - DNA, 422 bp, Glycine max
gcagtctctacctcaaaccactccagaaaaaatggcggtgcctcttctctcgaagaagatcgtgaagaagaggctgaagaagttcaagaggcctcaaagtgacaggaagatttctgtgaagacaaactggcgcagaccaaagggtatcgattcccgtgttaggagaaagttcaagggatgcactttgatgccgaacattggttatgcttcagacaagaagacccgccactatctcccgaatggtttcaagaaatttgttgttcacaatgtgaaggatttggaactgctcatgatgcacaacaggacttactgtgctgagattgcccacaatatatccacaagaaagagaaaagatatagtcgagagagccgcgcagcttgatgttgttgtgacaaataatacggccagattacgtagccagg

SEQ ID NO: 258093 - DNA, 379 bp, Glycine max
ggtgtgtggcatcagaaaatgaacagtttatcaatggcacttctccacccaaatcttcttcccactttcaattccaacactcttacctttccttccatcaaactcaaaccctcactctcgcacgtgccttctccaacccccacacgcttcagtctctctgtttccgcggcggaaaccaccgcttttgccgcccctcccactccccaacctgagaagcttggagttgtagttaagccaacggagaagccgagacttgtgttgaagttcaaatggatggagaagaacattggaattgcgcttgaccagatggtaccgggccatggcaccattcctctgaacccataatactttttgccccaaaagaatcctgggaaaaact

SEQ ID NO: 258094 - DNA, 382 bp, Glycine max
gattgggtgctgatcggaacaaacagggaatagaagagaggagaagatgggtttcataatggaatttgcggagaacttggtattaaagttgatggaagatccgaaggaaagggatcggaggttcagggagcacgtttatagagtgaaggacaggtgcgagaagacgaaggagatgtggagctaccctatgcgaccctatgggttttggacattcgaacgccacaattctcagcttgcttgggatgcacagattagccaagtggccgggaggagggacccttatgatgatctcctccaacatttctctaacccacctaagtgagtgttgctgaacttgccacaagcattatcggtgaaaaagatgaatttgtcgtaatttccc

SEQ ID NO: 258095 - DNA, 418 bp, Glycine max
gacaaatctttcgctaacactcattaattgcaagaatggcacttcgttgcttggtgatgtccctttctgttctcttcactcttggtcttgcgagagaaagccatgccagagacgaagatttttggcatgctgtttggccaaacactcccattccaagttcattgcgagatcttctaaagcctggccctgcaagtgttgaaatcgatgatcaccctatgcaaattgaagaaacacagtacccgaaaaccttcttctataaagaagaccttcatccaggcaaaacaatgaaagtacaattcagcaagcctccctttcaacaaccatggggtgttggtacatggttaaaggaaatttaagacactactaaagaaagatatagttttgaacgagctatgcatcaagaaagaagccattgagg

SEQ ID NO: 258096 - DNA, 411 bp, Glycine max
gaaccaagtttgcttgcgtgtatattcattttagcatcaaggttgaatctcagagaaaaacaaacatcgacaagcatgtctggaagaggaaagggaggcaagggtctcggaaagggaggagccaaacgacaccgtaaggttctgagggataacattcagggaatcaccaagcccgcgattcgccgtctggccagacgtggtggcgtcaagcgtatcagtggtcttatctatgaagaaactcgcggtgttctcaagatctttctagagaacgtcattcgcgacgctgtcacctacactgaacacgctcgccgcaagaccgtcactgccatggacgttgtttacgccctcaagaggcaagggaggaccctttacggattcggcggttagacaattggggatttcctgactgcg

SEQ ID NO: 258097 - DNA, 323 bp, Glycine max
ggttggtatttgtttttgttgttggctgtgcgatcactcatcgcacctcttctcatcaacgctgcgaaagacaatggagctgacaccccagcagctgagccaatacaacggcacggacccatcgaagccgatctacgtggcggtgaagggccgcgtctacgacgtcaccaccggaaaatccttttacggccccggcggcccctacgccatgttcgccggcaaagacgccagcagagccctggcgaagatgagcaagatcgacgacgacatctccatctccctcgacggcctctccgacaaggagatccgcgttctcaacgact

SEQ ID NO: 258098 - DNA, 421 bp, Glycine max
aattcccgggtcgacccaagcgtccagaagacgacagaagggggtgagtgaggggtagtgatagaaggataaggtgaggtgacgataaaccgtggaaagtggaaacggtggtgtagtctgtgagtgtcattgtgaagttggagacaatgttagcttcttctctctccttcctccattcttgttcatcttcctctttcttattgtcaatttcacttcctaatcccaaaccctctcattccctacctttcgtgctcgaagccaaagacaggacccgtagggaagacaggtccgcgcgccacactcgcatcagaaagaaggtctaagggacacccgagaggccgaggctgtccgtgttccggtcgaacaagcatctctctgtgcaagtgatagatgacaccaagatgcacacgcccgcttcgat

SEQ ID NO: 258099 - DNA, 426 bp, Glycine max
ggagcgaagaagatattagggtttttgagtgcggtgcggcgatcctagcactctcttctgcagctttcgccgacagcttcattcaccatggctgagcaaaccgagaaggcttttttgaaacaaccaaaagtgtttctcagctcgaagaaaactgggaagggaaagagacccggaaagggtgggaaccgcttttggaaatccattgggcttggatttaagactcccagggaagccatcgaaggaacctacattgacaggaagtgccccttcactggcaatgtttccatccgtggccgtatcttggctggaacatgtcacagtgctaagatgaacaggactattattgttaggaggaattatctccattttatcaagaagtaccagaggtacgagaaaaggcactccaacattcctgctcatatatca

SEQ ID NO: 258100 - DNA, 430 bp, Glycine max
gaaaagaaaagagaaatggcaacagaaacaaaagtgcaagaattaggtggcatcaccgatgtgcatggagctgccaacagcgtcgagatcaacaatctcgctcgctttgctgtagaggaacaaaacacaagagagaattcagttctggagtttgtgagggtgattagtgcaaagcagcaagtggttgctggagtgaattactacataacattggaagcaaaagatggtttgattaaaaatgagtatgaagcggaggtttgggtgagggaatggttgaactccaaagagttgctagaattcaagccagtcaatgtttctagcacaccaataggtggcattaccgatgtgaccgcgaatagcctcgagatcgacattctcgctcgttttgctgttgatcaacacaacaaaaaagagaatgcaaatctggagt

SEQ ID NO: 258101 - DNA, 428 bp, Glycine max
gattcggagctgggtttgttttcggcctttgatcttcgattctctctctttttctctcgcgaaaaccgtatcagcaatgtctggagaatcagccagcgctattcacaagggtcaagtcgatctcttagacttcattgactggtctggggttgaatgcctcaatcaaagctccacccactctctccccaatgctatcaaacagggttatagagaagacgatggtttgcatctggagagtgatgcagacgagcagcttttgctctatattcctttcactcaagtcgttaaactttattcctttgttatcaaaggtcctgaagaagaaggcccaagacagtgaagctcttttctaacaaggagcacatgggatttagtaatgtcaatgattttcccccaagtgatgtggcaaatttgtctgaagaaaaact

SEQ ID NO: 258102 - DNA, 361 bp, Glycine max
ggtagttccaccgagtagcaacaatgtcgaagcgaggtcgcggaggatcggcagggaacaagttccgcatgtcactgggtctgccggtggcggcgacggtgaactgcgccgacaacaccggcgcgaagaatctctacatcatatcagtgaacgggatcaagggaaggctgaaccggttgccgtcagcttgcgtgggtgacatggttatggccaccgtcaataacggaaagcctgatctccgtaaaaaggtgctccccgctgtcatcgtccgtcagcgcaagccgtggggccgaaaggacggtgtttacatgtacttcgaagataatgctggggtcatagtgaatcccaagggtgaaatgaa

SEQ ID NO: 258103 - DNA, 345 bp, Glycine max
gagcgaaacagagagtgatttcagtgagcgatcggtgttcacttgatctcatcataatcgtcagcgtcaattgaagaagatgccgatcagaaacatcgccgtcggaaggcctgaagaggcgactcaccccgacacgttgaaggcggctttggctgagttcatctcaaccttcatcttcgtgttcgccggctcaggctccggcatcgcctacaacaagctcaccgacaacggcgctgccacccctgccggcctcatctccgcccccatcgcccatgcattcgccctcttcgtcgccgtctccgtcggcgccaacatctccggcggccaagtcaaccccgccggtca

SEQ ID NO: 258104 - DNA, 408 bp, Glycine max
gatagcagcatcatacaaagcattgaattcataaacttaagttcattccttgtgttttgctttcttcctcaagaccaaacatgtcgaacacatgcggcaactgcgactgcgctgacaagactagctgcaccaagggaaacagttatggtgttattgtagagactgagaagagttacatcgagactgttgtcatggatgttccagcagctgagcatgatgggaagtgcaagtgtggcactaactgcacttgcacagactgcacctgtggccattaaggaatatgtatgaaaatgtaattgccatgtgtttggcaatacaaatatccacataatgtaatcttcgtatgaataaatgtgtgtgctgttatcctacttcatgtctgtgtagtcatgcggtctgaatcatttc

SEQ ID NO: 258105 - DNA, 407 bp, Glycine max
gaaggtgcaagagtttgttgtgagctataagctagtttatcgtgaggagaatatgaagttgtttgttttctttgttgctgcagtagttttggtagcatggccatgccatggcgcaggctaccaaaggttccctctccgaatgaaaactggctatggtgagcgttcttcggaggtaaaatgcgcaagttttaggcttgctgtggaagcacacaacatccgagcctttaaaaccattcctgaagagtgcgttgaaccaacaaaggactacattaatggcgaacaatttagatcagactctaaaacagttaaccaacaagctttcttttatgctagtgaacgcgaagtccatcacaacgacatatttatattcggcatagataacaccgtactctctaatgtcccatact

SEQ ID NO: 258106 - DNA, 391 bp, Glycine max
gattctgtggaggagcttcttgggttggttctctgagtttttacctcctctgggtctgatccaaaaaggcttaattttctttgttccgaggaaaaaattctgcttttgaatttgttggttttcaagcttggtgtagaaggaaatggcacaacgttctcatgtacccaaatttggcaattgggatagtggagagaatgttccttatacagcatattttgacaaggcgcggaaaggtcgaactggggcaaggataataaatccaaatgaccctgaggaaaatgctgatttaagtctggataatccatcatctgatcacctacctcctaccagacccagagctaattcagaggatcaatccggaaaaggatcattgcctttggaagatgatcct

SEQ ID NO: 258107 - DNA, 425 bp, Glycine max
  unsure (1)..(425): unsure at all n locations
ggcattggggcatgcttttaatttcctagatctcccaaacaaattgtagcataagtcccatggccaaagagactagtgttgtttatctatatcccagcaaatcacaagtttggggtgagaattttgatcataaaaaacttgtaataacaacactagctgctaatggaaagaaggaggagagtaatggagcacctaatgacacatatcctgcgtttcccgggtggtatgctgatgtttcctggccaggagaagcacacacatataaaatagaaaagattctattccacgggaaatcagaattccaagagcttcttgtatttgagtcttctagacaaggcaaggttgcaattcttgatgggcatatccagctgacagaaaacgatgaatttgcttaccaagagatgctcactcancttgcactctgt

SEQ ID NO: 258108 - DNA, 414 bp, Glycine max
gaaggtgcaagagtttgttgtgagctataagctagtttatcgtgaggagaatatgaagttgtttgttttctttgttgctgcagtagttttggtagcatggccatgccatggcgcaggctaccaaaggttccctctccgaatgaaaactggctatggtgagcgttcttcggaggtaaaatgcgcaagttttaggcttgctgtggaagcacacaacatccgagcctttaaaaccattcctgaagagtgcgttgaaccaacaaaggactacattaatggcgaacaatttagattagactctaaaacagttaaccaacaagctttcttttatgctagtgaacgcgaagtccttcacaacgacatatttatattcggcatagataacaccgtactccctaatatcccatactatgaaaa

SEQ ID NO: 258109 - DNA, 412 bp, Glycine max
  unsure (1)..(412): unsure at all n locations
ggtctaaggggtgccctgagatcacattgaacaatggtgaaggctgtggccgttcttggcagcagtgagggtgtcactggaactattcacttcgttcaggagggaagtggtccaaccaccgtaactggatctcttgccggtcttaagcctggtctccatggtttccatgtccatgccttgggggacactaccaatggttgcctctcaactggatcacatttcaatcctaataacaaggagcatggtgcccctgaggatgagaatcgtcatgctggtgatcttgggaatgttaatgtcggtgatgatggtactgtcagcttcactattactgacagccagattcctctcactggaccaaacaacatcatangaanggcggttgttgtccatgctgatcctgatgatcttggga

SEQ ID NO: 258110 - DNA, 415 bp, Glycine max
aggaacgccgtcgtcgggatgctgcaacggagtgaagagcctcaatgccgccgccaagaccaccgccgaccgccagacggcgtgcaactgcctcaagtcggccgccagccaaatctccgacttcaacgccaacaacgccgcctcgctccccggcaaatgcggagtctccatcccctacaagatcagcacctccaccaactgcgctaccatcaaggtttgaagagaaagtcatggacgcaggaaaccggaaactactcactagtatatgagtagcattattaatattaagaataagatcgagggtgatgagggctccacttatatgcccctctcctcttgtatgagagatttgcattggatagctttaagttgtgttgcgttgttatttctctgtatgagttacacatagttatat

SEQ ID NO: 258111 - DNA, 350 bp, Glycine max
tcagtacagcacaaaaaggggagtgtggtacagatccaacaagacaacagtttgaggttgaggatttgggattggtaaagcgatgcaatgcgctgcgtctcgtcatcatctctttcgagtcatccctcagtcatattctgccaatccagcattctcatccttccattcatacatacacacatctgatcgcgtatcatttctcccatggagtcttagcgcatcctcaaggatcctcatcgacctgctccatgacctaccgatttcttgcatggctagtctagtcgctgatgacatgttgcattagcaaccaatgattttgggtcctgctcacattccctaggctagatgtg

SEQ ID NO: 258112 - DNA, 377 bp, Glycine max
gaaggtgcgagagtttgttgtgagctataaactagtttatcgtgaggagaatatgaacttgtctgttttcgttgttgctgcagtacttttggtaacatggccatgccatggcacatgctagtacaggttccctctccgagtgaaaattggctatggtgagcgttcttcggaggtaatgatgcacatgttttaagcttgctgtggcagcatacaacatctgagcctttaacaccattcctgaacagtgcgttgaatcatcattggactatattaatggcgaccactttaaatcagacgcgaacacagtttaccaacgagctttcgtttatgctagtgaacgcgaagtctatcacatcgacatatttatattcggcata

SEQ ID NO: 258113 - DNA, 394 bp, Glycine max
ggcacaagtgagtttgttgatcgagataactagaaacagtgtgatgaaaatgaaggtccttgttttcttcgttgctacaattttggtagcatggcaatgccatgcgtacgatatgttccctctccgaatgaacactggctatggtgcccgtactccggaggtgaaatgcgcaagttggaggcttgctgtggaagcacacaacatctttggctttgagaccattcctgaagagtgcgttgaagcaacaaaggaatacatccatggcgaacaatatagatcagactccaaaacagttaaccaacaagcttacttttatgccagagacctcgaagtccatcccaaggacacatttgtgttcagtatagatggcaccgtactctctaatattcatact

SEQ ID NO: 258114 - DNA, 406 bp, Glycine max
  unsure (1)..(406): unsure at all n locations
ggcacaagtgagtttgttgatcgagataactagaaacagtgtgatgaaaatgaaggtccttgttttcttcgttgctacaattttggtagcatggcaatgccatgcgtacgatatgttccctctccgaatgaacactggctatggtgcccgtactccggaggtgaaatgcgcaagttggaggcttgctgtggaagcacacaacatctttggctttgagaccattcctgaagagtgcgttgaagcaacaaaggaatacatccatggcgaacaatatagatcagactccanaacagtttaacaacaagcttacttttatgccagagaactcgaagtccatcccaaagacacatttgtgttcagtatagatggcaccgtactctctaatattccatactacaaaaaacat

SEQ ID NO: 258115 - DNA, 410 bp, Glycine max
  unsure (1)..(410): unsure at all n locations
gacatcacgacatcacatcgcagagaagaacagagagagatccatccatcaattccaatggccgatcagctcaccgacgaacagatctccgagttcaaggaagccttcagcctcttcgacaaggacggggatggttgtattaccaccaaggaacttgggaccgtgatgcggtcacttggccagaacccaactgaggcagagctgcaggacatgataaatgaggttgatgctgatgggaatggtaccattgatttcccagaattcctgaatctcatggctcgcaagatgaaagacactgattcagaggaggagctganggaggctttccgcgtgtttgacaaggatcagaatggcttcatctctgcagcggagctccgcatgtgatgnacaatctcggtgagaagctgacc

SEQ ID NO: 258116 - DNA, 394 bp, Glycine max
gaagaagaactagtctaagcagaaatggcctcttcagtgatggcatctgtggccctcaaacctgcccctttcactgttgagaagtcctcagttagaggccttccctccctctcaaggaactcctcttcattcagagttgtggccagtggtggcaagaagatcaagactgacaagccttatggaattaatggtggcatggctttgagggaaggagttgatgcatctggcaggaagggaaagggaaagggcgtttaccagtttgtagacaaatacggtgctaatgtcgatggttacagtcctatctacgacaccaaggactggtctccaaccggcgatgtctacgctggcggtacgactggcttggctatctgggctgtgactctacttggtcttc

SEQ ID NO: 258117 - DNA, 352 bp, Glycine max
gaagaagaactagtctaagcataaatggcctcttcagtgatggcatctgtggccctcaaacctgcccctttcagggttgagaagtcctcagttagaggccttccctccctctcaaggaactcctcttcattcagagttgtggccagtggtggcaagaagatcaagactgacaagccttatggaattaatggtggcatggctttgagggaacgagttgatgcatctggcatgaatggaaagggaaacggcgtttaccagtttgtagacaaatacggtgctaatgtcgatggttacagtcctatctacgaccccaacgactggtctccaaccggggatgtctaccctgggggta

SEQ ID NO: 258118 - DNA, 405 bp, Glycine max
gacaacatcatcatcaacaacaagcagatcaatctctctctcaaccataatagtcatgggtttgaatgaggattttgagcagtatgctgagaaagcaaagactttgccaccgactcaatcaaacgaagacttgcctatcctttatggattgtacaaacaggccaccgttggacctgtcaacaccagccgtcctggaatgttcaacatgagggacagagctaaatgggatgcatggaaggctgttgaagggaaatccaaggacgaagcaatgggtgattacatcattaaggtgaaacagctgctggaagcagctggcttgcctgcttgataacattgtcatgccttgcttcctgattctgtgctagaagttcacaacagtttggaaataaacaattgcagtgtttg

SEQ ID NO: 258119 - DNA, 411 bp, Glycine max
gatagaagaagcagaatgagaagcatcagcaaaagcaagaagaactagtctaagcagaaatggcctcttcagtgatggcatctgtgggcctcaaacctgcccctttcactgttgagaagtcctcagttagaggccttccctccctctcaaggaactcctcttcattcagagttgtggtcagtggtggcaagaagatcaagactgacaagccttatggaattaatggtgacatggctttgagggaaggagttgatgcatctggcaggaaaggaaacggaaagggcgtttaccagtttgtagacaaatacagtgctaatgtcgatggttacagtcctatctacgacaccaacgactggtctccatccggtgatgtctacgctggcggtacgactggcttggctatctgggctg

SEQ ID NO: 258120 - DNA, 130 bp, Glycine max
ggcacaagtgagtttgttgatcgagataactagaaacagtgtgatgaaaatgaaggtccttgttttcttcgttgctacaattttggtagcatggcaatgccatgcttccaaaagttccctcccccaattg

SEQ ID NO: 258121 - DNA, 377 bp, Glycine max
gaccacactcttattgttttcttcatatcttccttgtcactgcccgtgtgtcgccgccatggccaccgtcaccacccaagcctccgccgcaattttccggccatgtacctcgaaatcgaggtttttgaccggctcttccggtaaacttaaccgggaagtgactatgcggccaatggggtgccctccttctgcctctttcaaggttgaagccaagaagggagagtggttacctggcttggcctccccaacttacctcaatggcactcttcctggtgacaatggatttgaccctctggggctagctgaggacccagagaacttgaggtggtacgttcaagccgagcttgtgaatggacgttgggccatgttgggtgttg

SEQ ID NO: 258122 - DNA, 415 bp, Glycine max
gatatttgagttcaaacaaatcaaagccatggccacctccaacttctctattgttctctccgtctccctagccttctttttggtgctacttaccaaggcacactcgaccgataccgtttctttcaccttcaacaagttcaacccagtccaaccaaacattatgctccaaaaagatgctagtatttcatcctctggggtgttacaactcaccaaagttggcagcaacggcgtgcccacctcgggatctctcggtcgtgccctttacgctgccccaatccagatttgggacagcgaaaccggcaaggtagccagctgggctacatcctttaaattcaacattttcgcacccaacaaatcaaactcagctgacgggcttgccttcttcttggcacccgtcgggtctcagccccaatcc

SEQ ID NO: 258123 - DNA, 415 bp, Glycine max
gattcaccacaaccctctatattccattacaaagaaccagtttggaatatatttttattccttctttgtttcttcactttcttccatacacataaccatgtcttctcagaccgttgtcctcaaagttggtatgtcatgtcaagggtgtgctggagctgtaaacagggttttggaaaaaatggaaggtgttgagtcatttgacattgatctgaaggagcagaaggtgacagtgaaaggaaatgtgcagccggacgaagttctgcaagccgtttccaaatccggaaagaagacggcattctgggtggatgaagcacaaccacctgaaaacaagccttctgaaactgcacctgttacctcagctgagaatgataacaaggcttcagaaagtggacctgttgcctcagaaaacaagcct

SEQ ID NO: 258124 - DNA, 397 bp, Glycine max
ggagtgcagtgatagagataagaaaatgtggcttgtgcagctctcaaccccatttctgaacggacatggtcattccaccacccttctctccaagcacagttcggcggtgactcagacccactgggccccaccgagtttcctgcctcaaatcaatgcgatgaagacaatgcaggggagagtggtgtgctccaccagcgacaagacggtggcagtggaggtggtgcggctggcccctcacccaaagtacaagaggcgcgtgaggaagaagaagaagtaccaggcccacgaccccgataaccaattcaaagtcggcgacatcgtccagctccagaagaccaggcccatcagcaagaccaaggcctttctcgcactccccgttcccaaaaaggcctccagc

SEQ ID NO: 258125 - DNA, 352 bp, Glycine max
gagtgcacaagtgagtttgttgatcgagataactagaaacagtgtgatgaaaatgaaggtccttgttttcttcgttgctacaattttggtagcatggcaatgccatgcgtacgatatgttccctctccgaatgaacactggctatggtgcccgtactccggaggtgaaatgcgcaagttggaggcttgctgtggaagcacacaacatctttggctttgagaccattcctgaagagtgcgttgaagcaacaaaggaatacatccatggcgaacaatatagatcagactccaaaacagttaaccaacaagcttacttttatgccagaaacctcgaagtccatcccaaggacaca

SEQ ID NO: 258126 - DNA, 361 bp, Glycine max
tccagaattcccgggtcgacccacacgtctgataggttgcagaaaacaacacaaagggagacacatatcacatcacatctctttttctcgtcgataccgctgtcatgtctcaaactgttgttctccacaatggtatgtcatgtgaaagatgtgttggagcagtgaagagagttttaggaaaattggatggtgtggaatcatatgacattgatttgaaggaacaaaaagtggtagttaatggaaatgtccatccagacacaattcttgcgaccgtttccaaaactgggaagaaaactaacttctgggaagggtgagcaacaacatcccagactaacacagcaactgcctagaacatttcgct

SEQ ID NO: 258127 - DNA, 369 bp, Glycine max
gacacaactgaacaagataagctatccatagcagccaaagaaatgaagagtaccttgttcgccctctttctactttgtgccctcacctcttacctaccttcagccaccgctggtgatgtggtcgacactgatggtaatcctgttgaaaatggaggcacatactttgtgttgccaactataatattaaacggcggtggaatagaatatgccacatttggaaatgaaacttgccctgtcactgttgcgcaatctcgcgatcagttctgcaagggctttccgataaccatttcatccccagcccgaatccgtcacatcagcgaaggccttagtttgaacattgggttcactttcgcatcccgtgttcccccg

SEQ ID NO: 258128 - DNA, 411 bp, Glycine max
ggagagagagagagaggagaatggatgaaagatgagtaggtcatcaaggccggtgccgaagagatagagtccatggggagtcaccggagagaatcatcctgaacccaaagctcatcgctgcaatgaccgtgtcaatgacgttattcaggcttgctttgagggaaacccattcaagactgctccaggacctttcaagctcttctggcagtgcatgcgttccaaacccggtgaggaaccaacggccccatttacatatctggatttggagcctctaatgagagaaacggaatctgtgaaacctgagtagtgtcacttttacttacaaatgccttaacagccttggcactgcatggtcctttagtcggttctaaatttccctccgtgtggaattttttttttgagaaaaatatg

SEQ ID NO: 258129 - DNA, 357 bp, Glycine max
gcacaagtgagtttgttgatcgagatacctagaaagagtgtgatgaaaatgaaggtccttgttttcttcgttgctacaattttggtagcatgggaatgccatgcgtacgatatgttccctctccgaatgaacactggctatggtgcccgtactccggaggtgagatgcgcatgttggaagcttgctgtggaagcacacaacatctttggctttgagaccattcctgaatagtgcgttgtagcagcatacgaatacatccatggggatgcaaatagatcagactccagcacagttgacgtacaatcatacgtttatgccagagacctcgaagtctatcccagaggcacatttgtgttc

SEQ ID NO: 258130 - DNA, 440 bp, Glycine max
acgggaagacgacagaaggggatagaagaagcagaaagagaagcattagcaaaagcaagaagaactagtctaagcagaaatggcctcttcagtgatggcatctgtggccctcaaacctgcccctttcactgttgagaagtcctcagttagaggccttccctccctctcaaggaactcctcttcattcagagttgtggccagtggtggcaagaagatcaagactgacaagccttatggaattaatggtggcatggctttgagggaaggagttgatgcatctggcaggaaaggaaagggaaagggcgtttaccagtttgtagacaaatacggtgctaatgtcgatggttacagtcctatctacgacaccaaggactggtctccaaccggtgatgtctacgctggcggtacgactggcttggctatctgggctgtgactctac

SEQ ID NO: 258131 - DNA, 396 bp, Glycine max
ggacaccaacaccaaaacaaacccactaagatggcttcctttgtatccttcctagtgctgcttcttgcagcccttatcctcatgcctcaagggcttgctacttactacaaaccaattaagaagccaccagtgtacaagcctccagtgtacaagccaccagtgtacaaaccaccggtttataagccaaaaccaccggtttacaagccgaaaccaccggtttacaagccaccatataagaagccaccatacaagaaaccaccttatggaaagtaccctccagtagaggacaacacccacgcctaaagcaagcaatgaggtctattatctacttaataaataagaggaactgctttgtgttttctagcattgtgatttacaacttcgtagcaatgcata

SEQ ID NO: 258132 - DNA, 398 bp, Glycine max
gacagctattcctcttaagcttgctactgagtttccacactgcataccttaggtcttccgaattcgaagttaatttgcaagatggctaaggaaaaggctcagatcaacattgtggtggttggtcatgtggaccctgaggaggcaaccaccattaacgagctgaagaagcctgttgtggagaaagaagctccagggcatgccatatgagggcatgcacgtacggcctcggaggggaaccagaaaattatgttaacaaaataatctggaaccctaatgtatcagtgtcatcatcagtgtgtagtttaagctagctttgctatggttacgttctttgagatgagagtcttgatgaacagtaccattctgatgtattgctttccttgaaagttaatgcatgc

SEQ ID NO: 258133 - DNA, 410 bp, Glycine max
gcaagcaactaagcaagatatcatcacattgcaaagaaaatacacattacattactaagtctttgttcatttgagtagtagtgatggctagcctcaaggttgcatgtgtggttgctgtgatgtgcatggttgtggtggccatgagtgctgcacccatggcacaggccgcaatcacgtgcgggcaggtcgtcggcgacatgtctccgtgcttcagttatcttcgaagcggcggaaaaccgtcgcaggcctgctgcaacggagtgaagtccctcagcagcgcggcgaagaccaccgcggaccgccagggggcgtgcagttgcctgaaaaaccttgccaataatatgggacagagtttgaatgccggcaacgcagcctctctccctggcaaatgtggcgtcaacatcccttac

SEQ ID NO: 258134 - DNA, 402 bp, Glycine max
attcagaggcttttggtttacgagtttatgccgaataagagcttggaggatcatctccttgcaagagtgccatcgacgataatcccttggggaaccaggttgaggatcgcgcaggatgcggtgaggggtttggcgtatcttcatgaggaaatggattttcagctaatatttcgggattttaagacatccaacatcttgctggacgagaatttcaatgcaaagctttctgattttggactggctaggcaaggaccctcagaagggtctggctatgtttcaacagcagtaaggatttgtctatactcttgagaaaactcattatattgacaatattgcatcatagtagtaacatcagaatagtgtgcctgctgggagcttatattgagtaaattaactatattt

SEQ ID NO: 258135 - DNA, 240 bp, Glycine max
attcagaggcttttggtttacgagtttatgccgaatcatagcgtggacgatcagctccctgcaagagtgccatcgacgatcatccggtgcggaacgatgttatcgatgtcgcaggatgcggtgaggggtttggcgtaccttcatcatgaaatgcattttcacctaatatttcgggattttaggacctccgtcatcttgcgtggaccacaatgtgaatgcgcagctttgtgattttggacg

SEQ ID NO: 258136 - DNA, 426 bp, Glycine max
gactgatacaggaacagctagcagagaaacaaagttacaagtaaagtaaattaagaagatcattaatggcttctcttgcaaccttagctgctgttcaaccagctgcgctcaatggccttgctggaagttccctctctggaactaagctctctttcaagccctctcgccacactgtcaaatccaagaacttcaggagtggtgccgtggtagcaaagtatggtgacaagagtgtgtactttgatttggaggatctgggcaacactacggggcagtgggacttgtatggctcagatgcaccttcaccctacaaccctcttcagagcaagttcttcgagacatttgctgctccattcacaaagaggggattgttactcaagtttctgatattgggaggtggttccacccttgcatacttcagtgcaacag

SEQ ID NO: 258137 - DNA, 418 bp, Glycine max
gaaggtgcaagagtttgttgtgagctataagctagtttatcgtgaggagaatatgaagttgtttgttttctttgttgctgcagtagttttggtagcatggccatgccatggcgcaggctaccaaaggttccctctccgaatgaaaactggctatggtgagcgttcttcggaggtaaaatgcgcaagttttaggcttgctgtggaagcacacaacatccgagcctttaaaaccattcctgaagagtgcgttgaaccaacaaaggactacattaatggcgaacaatttagatcagactctaaaacagttaaccaacaagctttcttttatgctagtgaacgcgaagtccatcacaacgacatatttatattcggcatagataacaccgtactctctaatatcccatactatgaaaaacat

SEQ ID NO: 258138 - DNA, 247 bp, Glycine max
cacgcgtcccaaagctgtagaatacgacacaatgggaaagtgcaacagtttgttttgaactataaactagattatcgtgaggagaatatgaagttgtttggtttccctgttgctccactaggtgttgtaccaccagcatgccatagcgcacgctactaaaggttccccctcccaaagcaaactggctatagggaacgttcttctcaggggaaatgcgcacattttaagcgtgctgtgggagcacaca

SEQ ID NO: 258139 - DNA, 420 bp, Glycine max
ggccgaaaaccctaacaacacaggcgcagagcgtgatccattgacgaagatggtgcagcgtctcacctaccgcaagaggcacagctatgccaccaaatccaaccaacacagggtcgtcaaaacccctggtgggaagctcgtttatcagaccaccaagaagagggccagcgggcccaagtgccccgtcactggcaagaggattcaagggattccacacttgaggcctgcagagtacaagagatcaaggttacccagaaaccgtacgactgtcaaccgtgcatatggcggagttttgtctggaagtgctgtcagggagaggattatccgagctttcttagttgaagagcaacagattgtgaagaaggtcttgaagatccagaatgcacacgaaaagcaagcctcaaaggcttgaatttgaac

SEQ ID NO: 258140 - DNA, 414 bp, Glycine max
ggccgtcacacagagagagaagagacaatgaagtttaacccaagggtttcctcaagccgtcgaaagagccgcaaggctcacttcaccgctccgtcgagcgtgcgtcgcgtcctgatgagcgcgcctctctcgaccgatctccggtcgaagtacaacgtgcggtccattccggttcgcaaggacgacgaggtgcaagtggtgaggggaacctacaagggccgcgagggcaaagtggtccaggtctatcgccgcaagtgggtcatccacatcgagcgcatcacccgcgagaaggttaacggctccaccgtcaacgttggcattcacccttccaaggttgtcgtcaccaagcttcgaatggacaaggaccgcaaatccttgctcgatcggaaggccaagggtcgcgccgccgccgac

SEQ ID NO: 258141 - DNA, 257 bp, Glycine max
gatagcgtttttcattgtgcattattcaatggccaccacagcagctctatccggaaccatggtgagcacctccttcatgaggaagcaacctatgacgaccaagagcctaaagacattccccaacgctctttttggtctgaaaggtggacgaggtggtcgtgcaacttgcatggcctcgtacaatgtgaagctcataaccccagaaggagaagtggagtttgaatgcccagatgatgttttcattgttgacaacgctg

SEQ ID NO: 258142 - DNA, 371 bp, Glycine max
gagcgccaatgtttttttcagaggagtttcatcttgtaatcaaaagagtttatcttatagtaagaaatcgatgtcttactccattttaaggaacagaacaagagaacaatagcctgacaaagggtttagccataaaatcgaatccatcattgatttgagatattgataaggtgaatactcatttctcgtcaatgctaggcataatgcgggtatagggacctaaaaaagattatcttttcttcctatcttatgaactttaaggtgtatgaagtgtcatttcctatcttagattttaattttagtaggtagataaagagtccatttaacttaagttgatctaggccagaagcagacctacgtcaagataatcc

SEQ ID NO: 258143 - DNA, 245 bp, Glycine max
gggaacccactaaggttgtacctcaggctgatatagtacctgttcgtttggaggagctatcacataaaacagttggtggagatttgctgcgcaagtcagctgttaagtttgagcgatatcatgtgggagaaatcctaactgttggtgctgaagctggagaactaaacgctggaacaaaggtactatgcactgacatgaacgcctacgacgtggatttggggactgatacaacacactgcttctgt

SEQ ID NO: 258144 - DNA, 405 bp, Glycine max
ggggtaaagatatccgatgtgaatctatttgtttagttttctatcggtatgtatataggtgaataatccaacatgcctttttgtgaagtaaaaaaactaccctcgatccatgcctcaaaagggttgataataagtaaaaaaaatcaatgaattcatgataaaacccttctgcgtttttttattataaatttttttgtcaataaagggatcaaggggttgggggatcaaatggtaaagttcttttgttggtaaattggaggattagaaacatgactattgctttccaattagctgtttttgcattaaatgctatttcatttattttactgattagtgtacctgttgtaattgcatctcctgaaggttggtcgaatagcaaaaatgttgtattttccggtacatcat

SEQ ID NO: 258145 - DNA, 418 bp, Glycine max
gaaacagagcataggaaatagctttcctcggttataatcttcaaggtggaaagaaaaacccacccactatcccaattccaataaataccttcctctctatattttcgcacaataccctctcacccttcaacgatgagttactacaatcagcagcaaccacccgtcggtgttcctcctccccaaggttacccaccgtcggattcttacggaaaggacgcgtaccctccgccagggtacccgccgcaaggaggataccctccgcaggcgtatccagcacaggggtaccctccaccctacgcgcctcctcagtacgctcagcctccgccgcaacaacaccagaattcatctggcccaggttgcttagaaggatgtttggctgctctctgctgctgctgtctgttggatgcgtgcttctgag

SEQ ID NO: 258146 - DNA, 368 bp, Glycine max
  unsure (1)..(368): unsure at all n locations
ggccgctctctgagaaaaacagatagtgtgggagagagaagagcggaagagaaaatgacgaccaggttcaagaagaacaggaagaagagaggtcacgtcagcgccggacacggccgtatcggaaagcaccgcaagcatcccggaggtcgcggtaacgccggtggcatgcatcaccaccgtatcctcttcgacaagtaccatcctggtttcttcgggaaggtangcatgcgctacttccacaaacttcgcaacaaattctacaatccgattatcaacatcgacaagctgtggtccctcctcncccaggaggccaaagacaatgccaccgccgacaatgcacccttgctcgatgtcacccagttcggtta

SEQ ID NO: 258147 - DNA, 412 bp, Glycine max
  unsure (1)..(412): unsure at all n locations
gatctggcagcagaagaacaagtagttgagaactaagaaggagaagcaaatggcttcctcaatgatctcttccccagctgttaccactgtcaaccgtgccggtgccggcatggttgctccattcactggcctcaagtccatggctggcttccccaccagaaagaccaacaatgacattacctccattgctagcaacggtggaagagtgcaatgcatgcaggtgtggccaccagttggcaagaagaagtttgagactctttcctacctgccagaccttgatgatgcacaattggcaaaggaagtagaataccttcttangaagggatggattccttgcttggaattcgagttggagcacggtttcgtgntacgtgagcacaacaggtcaccaggataccacgatggacgctac

SEQ ID NO: 258148 - DNA, 412 bp, Glycine max
ggcacaagtgagtttgttgatcgagataactagaaacagtgtgatgaaaatgaaggtccttgttttcttcgttgctacaattttggtagcatggcaatgccatgcgtacgatatgttccctctccgaatgaacactggctatggtgcccgtactccggaggtgaaatgcgcaagttggaggcttgctgtggaagcacacaacatctttggctttgagaccattcctgaagagtgcgttgaagcaacaaaggaatacatccatggcgaacaatatagatcagactccaaaacagttaaccaacaagcttacttttatgccagagacctcgaagtccatcccaaggacacatttgtgttcagtatagatggcaccgtactctctaatattccatactacaaaaaacatggatat

SEQ ID NO: 258149 - DNA, 347 bp, Glycine max
gaagaagaagaaggagcatggccatgagcatggccatgacagcagcagcagtgacagtgattaaactgctgcatcacctatatatttaaaaggtttatgggaccatagtagcgagggctgtgccttaatttctctctctctctctctctctctctctctctctttttcctttttccctatcttgtgatctatttatgagtgagaaaaacaaaagtgagaaattgtgcgtgtatctggttgctaattcgagtgctattagtctgtggtttggttggtttgtaaccccgctacttgggttatgtttgattgtatattatcctagagaaataaaaattttaaattatcag

SEQ ID NO: 258150 - DNA, 423 bp, Glycine max
ggcacaccaacaccaaaacaaacccactaagatggcttcctttgtatccttcctagtgctgcttcttgcagcccttatcctcatgcctcaagggcttgctacttactacaaaccaattaagaagccgccagtgtacaagcctccagtgtacaagccaccagtgtacaaaccaccggtttataagccaaaaccaccggtttacaagccgaaaccaccggtttacaagccaccatataagaagccaccatacaagaaaccaccttatggaaagtaccctccagtagaggacaacacccatgcctaaagcaagcaatgaggtctattatctacttaataaataagaggaactgctttgtgttttctagcattgtgatttacaacttcgtagcaatgcatattcttgactcttgcatgcacttcaat

SEQ ID NO: 258151 - DNA, 376 bp, Glycine max
ggcacaacaaaaggtaggtgaggaaaactttggacaaaaaatggagtgctacacaaggccaaacaggagtgacatccacctctcagcagaggaagaagccaccatagaggcaaagaccagagagtactttgatggggtcgcaccacaacgccacacaaagcctcaacgaagtgactattcagctcaatatgtcgatgctttctccaatgcccatcactcttctttaactataccagaattaacacaattccaactcctccagaacgatccccaagagaagaaattggtgtacaatggaagtcaagtaccggaagaatttgtggaaacagagtattaccaagatctcaacagcgtggacaaacaccaccatacgact

SEQ ID NO: 258152 - DNA, 382 bp, Glycine max
gaacctcaggagtgagttctttcacagatgcaaatcagccttagagcttctgacgcacgacgacgttatgccattggcagacacatacgactgtctcccagggtaccagctttcccaccaaattgaaacacgcgcgctcctcacctcgttactctccgattagggttgcaaccgtggggcccgacacttcaactgtcgactacaactctgcgttctcaggtgtttcctgcagaaacatgcgaaactgtacgaggggaagcctgcatggcggagatgtaccctgaaacgacgctacatccagaggctaagactccacgagtcgttgcagagaatgttgagagagagtagcttgactacgatggtcctaaaacgggtatttcga

SEQ ID NO: 258153 - DNA, 389 bp, Glycine max
tgggattcagattattgagacattgcagaaaatggcatcagttcaccaatgacagcttccatcctatggctgcccagccgtcaccaaccggtcggcagcggcgacgcagaggagatcagtggtagtgaatgcagccagcaaatctgttgaaggggaaaaggtcagttatgacaacaatggtagcaatgcaaggaggaacttgatgttcgccacggcggcagctgctgtttgctcttttgctgcagggatggcattggcagatgagcctaaaccaggaacctcagaagccaagaaaaagtatgccccggtttgtgtcaccaatcctacagctaggatttgtcgcaattgaggaacttttttgttccacttttggaatttggaaatgtaca

SEQ ID NO: 258154 - DNA, 438 bp, Glycine max
agacgacagaaggggagaagataaagaaaagagaaatggcaacagaaacaaaagtggcagtattaggtggcatcaccgaagtgcagggagctgccaacagcgtcgagatcaacaatctcgctcgctttgctgtagaggaacaaagcaaaagagagaattcagttctggagtttgtgagggtgattagtgcacagcagcaagtggtttctggagtgaattactacataacattggaagcaaaagatggtgagattaaaaatgagtataaagcgaaggtttgggagagggaatcccaagagttgctagaattcatgccaacattaggtgcatgaggcgagatcgaccatctcgctcgctttgctgtagaggaacaaaacacaagagagaatgcaaatctggagtttgtgggggtgattacggcaaagcagcacgtggtgg

SEQ ID NO: 258155 - DNA, 391 bp, Glycine max
gattatatttgagttcaaacaaatcaaagccatggccacctccaacttctctattgttctctccgtctccctagccttctttttggtgctacttaccaaggcacactcgaccgataccgtttctttcaccttcaacaagttcaacccagtccaaccaaacattatgctccaaaaagatgctagtatttcatcctctggggtgttacaactcaccaaagttggcagcaacggcgtgcccacctcgggatctctcggtcgtgccctttacgctgccccaatccagatttgggacagcgaaaccggcaaggtagccagctgggctacatcctttaaattcaacattttcgcacccaacaaatcaaactcagctgacgggcttgccttcttcttg

SEQ ID NO: 258156 - DNA, 369 bp, Glycine max
gaaggtgcaagagtttgttgtgagctataagctagtttatcgtgaggagaatatgaggttgtttgttttctttgttgctgcagtagttttggtagcatggccatgccatggcgcaggctaccaaaggttccctctccgaatgaaaactggctatggtgagcgttcttcggaggtaaaatgcgcaagttttaggcttgctgtggaagcacacaacatccgagcctttaaaaccattcctgaagagtgcgttgaaccaacaaaggactacattaatggcgaacaatttagattagactccaaaacagtttgccaacaagctttcttttaagccagtgaacgcgaagttcaacacaacgacatatttatatt

SEQ ID NO: 258157 - DNA, 399 bp, Glycine max
ggcgcacccagagaggaagcttagagagagagagagagagagagaggagagagtattggcgcttcatcaagatgggtatttctagggattccatgcacaagaggcgtgccactggtggcaagaaaaaggcttggagaaagaagagaaagtatgagcttgggcgtcaggcagcaaacaccaagttatcaagcaacaagacaatcaggaggattcgtgttagaggtggcaatgttaaatggagggcattgaggctggatactggcaattactcatggggtagtgaagcagttactcgcaagactcgtattctagatgttgtttacaatgcctcaaacaacgagcctgtgcgaactcagaccctggtcaagagtgctattgtccaggttgatgctgctcctt

SEQ ID NO: 258158 - DNA, 411 bp, Glycine max
aatgtccctaaaagcagaatttttttcattgcatggtcccctgacacatcaagggtgaggagcaagatgatctatgcaagctccaaagacagattcaagagggagctggatggaattcaagtagagctgcgagcaactgatcctactgagatgggtcttgatgtgttcaaaagccgggccaactaaaatgattatagaaaatagtagactttctggtgggagcagcactccttaagccttagttactcatggaaaatatcctagtttgtgggatggtcaacttgggtagttatggtcccaaactctcaattttccaagttgtggcataaattctattgcaccttttaacaagctttgcttgttccagtgtgttttaatatgatctgtgatttatacgaccttgcgtttgag

SEQ ID NO: 258159 - DNA, 400 bp, Glycine max
ggcacaagtgagtttgttgatcgagataactagaaacagtgtgatgaaaatgaaggtccttggtttcttcgttgctacaattttggtagcatggcaatgccatgcgtacgatatgttccctctccgaatgaacactggctatggtgcccgtactccggaggtgaaatgcgcaagttggaggcttgctgtggaagcacacaacatctttggctttgagaccattcctgaagagtgcgttgaagcaacaaaggaatacatccatggcgaacaatatagatcagactccaaaacagttaaccaacaagcttacttttatgccagagacctcgaagtccatcccaaggacacatttgtgttcagtatagatggcaccgtactctctaatattccatactacaaa

SEQ ID NO: 258160 - DNA, 415 bp, Glycine max
gaaggtggttgtggaagaagagatggaggaagcaaagggagtagtgaagcacgtgctcctagctaagttcaaggacgacgtcactccagagcggattgaagagctcatcaaggactatgccaatctggtcaatctcatcccacccatgaagtcattccattggggcaaggatgtaagtgctgaaaacctgcatcaaggcttcactcatgtctttgaatcaacctttgagagtccagaaggcgttgcagagtatgtagctcatcctgcccatgttgaatatgcaaatttgttccttttctgcttggagaaagtcattgtgattgactataagcctaccgttgttaagctttgattggagaagtaaagcctcgttcactgctagtgttcgtataaaaataaactttgttttctgtct

SEQ ID NO: 258161 - DNA, 372 bp, Glycine max
gggacagagactgtgacacaacacgacacatgacacacagagttagaggagaaatcatcatggcatcagcagcatctgggtttgtgttgtggcttaatgttgcagctgccaccacgaactcacgggtggtcgtgttcaccacatagaacaacgcttctaggcttgttgtaagggcttcagatgagcctgcagcggcggcagccgctatcaccacacctccagcataagcttaagcttagctaggtttccacctactggcccctatacaggtgctaacgtgaagattcatacgatcgattcctactggtacaaaggcactggttcagtggttgctgttgatcttgagcccattactcgctaccctgttgtggt

SEQ ID NO: 258162 - DNA, 360 bp, Glycine max
gactgctactttgctctctgtgaggcttcaatttctaattacggtatcgctcacagtatccaacaaccatgcgagtcggcagctttgtcgttcgcaaatccggcagcgaatggagcgcctagcaatattccggtgacatcgaggcctccgccgaatccagcttcgatctccagcggatgctccatgcatcccgcgcgcgccgtcgcatcctcctgtggagttcagtcgtctttctctcccgatgtccctatcgtggccgtgttccaggtcatactcagtggtgcagtactcattcgacgtggtagtcatgctgtcgcaactgcatctgcacgtggttctcccacacctgatgctgcacca

SEQ ID NO: 258163 - DNA, 421 bp, Glycine max
ggaggagagaggagaagagaagctaaagaaagaaaggagatgggagtggagaagcagttgttgaggtctggcaccggtccgaagccaattcccggtcagaacgtaaccgttcactgcactggtttcgggaagaacggtgacctttctcagaaattctggagcacaaaggatcctggccagaacccattcactttcaaaatcggccaaggttctgttatcaaaggatgggatgaaggtgtgcttggcatgcaaattggtgaagttgctcgtctccggtgctctccggattatgcttatggtgctggtggctttcctgcttggggaatacggcccaactctgtcttggaatttgaaatcgaagtcttaagtgcgcaatgaaaaccttggtagtctgtctctgtcctaaagaataaaattcttc

SEQ ID NO: 258164 - DNA, 414 bp, Glycine max
gaaattgaagtatagattgaacacacacatagaaacccaacaacaagaatgaagaagatgattctaaccctcttcttcaatatcattttatctctcctctccctctcccacgcctccgtggtggatttctgcgtagcagactacacaggccccaatggccccgcagggtactcatgcaagagcccagcaaaggtcacggtggacgacttcgtctactccggccttggcaccgccggcaacacctcaaacatcatcaaagccgcggtgacgccggcgttcgacgcgcaattccccggcgtcaacgggcttggaatctccattgcacgcctagacctagcagccggtggagtcatccctcttcacacgcaccctggtgcctcagagctgctggtggttgtgcagggaacaatctgc

SEQ ID NO: 258165 - DNA, 255 bp, Glycine max
ttcttcaaaataattttaggcctcgtctccctctcacacgcctccgtggtggatttctgcgtatcagactatacaagccccaatggccccgcacggtactcatataagagcccagcaaaggtcacagtggacgacatcgtctataccggcctttgcacccccggcaacacctcaaacatcatcaaaaccgcggtgatccccgcgttctaaacgcaattcaccggcgtcaactggctttgaatctccattgcacgc

SEQ ID NO: 258166 - DNA, 367 bp, Glycine max
gatccgtctgcagatacacaagtaggtgacaactacgaaaaaagaaatggcttcctcaatgatctcctccccagctgttatcaccgtggatcgtgcctgtgccggcatggttgctccattcaccggtctcaaatccatggctggattccccactaggaagaccagcaatgacattacctccattgctatcaaccgtggaaaagtccattgcatgcatgtgttgccaccaattggcaataagatgttcgagactctttcctacttgccatacctcgatgatgcccaattggcaaaggaagtcgaataccttctaatgaaatgatggattccttgcttggaattcgaattggagcaccgtttcgcgtac

SEQ ID NO: 258167 - DNA, 407 bp, Glycine max
ggaacctttgcattctatccattcaagattcagcaagtgcgttttggaagcagagaccgaaatacttcgagatggcccgtacaaagcaaactgctcgtaagtcaactggaggaaaagctcccaggaagcagcttgcaaccaaggctgcacgtaagtctgcaccaacaactggtggcgtgaagaagcctcatcgttatcgccctggaactgttgctcttcgtgagattaggaaataccagaagagcactgagctcctaatcaggaagcttcctttccagaggttggttcgtgaaattgcccaggatttcaagactggtctgcgtttccagagccatgctgtgcttgcattgcaagaggctgctgaggcataccttgttgggctctttgaggacactaacttgtgtgcc

SEQ ID NO: 258168 - DNA, 373 bp, Glycine max
gaagaagaagaaggagcatggccatgagcatggccatgacagcagcagcagcagtgacagtgattaaactgctgcatcacctatatatttaaaaggtttatgggaccatagtagcgagggctgtgccttaatttccctctctctctctctctctctctctctctctctctctttttcctttttccctatcttgtgatctatttatgagtgagaaaaacataagtgagaaattgtgcgtgtatctggttgctaattcgagtgctattagtctgtggtttggttggtttgtaaccccgctacttgggttatgtttgattgtatattatcctagagaaataaaaattttaaattatcagtacgtattggtattaag

SEQ ID NO: 258169 - DNA, 369 bp, Glycine max
gagagttaagttgagaacatatgaatctacaatatacgatgattctcattatctcactcattttttctcttctctctttctcgcatgcttctgtcctatatttctgtgttgcaaattatgcatgtcctaatggacgtgcacgatattcctggtggaagtcttcaaaggtcagagcagatgattttgcttacagtggccctggcattgctggtaatacctcacgcattatcagggctgcagtgatgcctgcatttgatgctcaatttgctggtctcaacggtcttggcatttccgcagcacgtttggacataacatcatgtggagttataccagttcatactcatcatggagcttcataattacttgttg

SEQ ID NO: 258170 - DNA, 409 bp, Glycine max
gatcaccacttggacgcaaaaatggcacctgcaacactgtctctgtctctcctcctcctgttctcactcagcatcgccgtaaccgttagatcgagcgactacgactacgattgtgtgtacactgcatacgttagaaccggttcggtgttgaagggcggaacggactctaagatcgggctgaagctgtacgacaagtacggctactacatctacattaaaaacctcgaagcatggggcggcttgatgggcaagggctacgactacttcgagcgcggcaacctcgacatcttcagcggaaggggaccctgtcttgacggacccgtctgtgccgttaacgttacttctgacggattgggttctcaccacggctggtaccttaactacgttcaggtcaccttcactggggccc

SEQ ID NO: 258171 - DNA, 426 bp, Glycine max
agaggatgacagaaagggatcaccacatggacgcaatcatggcacctgcaacactgtctctgtctctccacctcctgttctcacacagcatcgccgtaaccgttagatcgagcgactacgacgacgattgtgtgtacactgcatacgtcagaaccggttcggtgttgaaaggcggaacggactctaagatcgggctgaagctgtacgacaagtactgctactacatctacattaaaaacctcgaagcatggggcggcttgatgggcaagggctacgactacttcgagcgcggcaacctcgacatcttcatcggaaggggatcctgtcttgacggacccgtctgtgccgttaacgttacttctgacggattcggttctcatcacggctggtaccttaactacgttcaggtcacctccactgggcccc

SEQ ID NO: 258172 - DNA, 357 bp, Glycine max
ttcggttctgctgcgatatacgacataacggggttctagtgtagtgttgtctgttgttgtaactcgttcatcatcgtttgctgtactgtgtttgtgtatgtcttttctctcatttaataatgtcgtgctgactgtcgtcactgtcggtaccgtagctcctgcaagtgccgcaaccggtactgtggctgcaacatgtactcacacatgaactacactgagtcaaccaccaacgtcaccttggtcataggagtgggacctgttaatgctcaatttgacggtgcagaactgggtgtgtgcgctgaaaacgattgctgcaaatgtggaccaaactgctcctgctacccctgcacttgcaag

SEQ ID NO: 258173 - DNA, 431 bp, Glycine max
gatctggcagcagaaaaacaagtagttgagaactaagaagaaggaaatggcttcctcaatgatctcctccccagctgttaccaccgtcaaccgtgccggtgccggcatggttgctccattcaccggcctcaaatccatggctggcttccccacgaggaagaccaacaatgacattacctccattgctagcaacggtggaagagtacaatgcatgcaggtgtggccaccaattggcaagaagaagttcgagactctttcctacttgccagacctcgatgatgcccaattggcaaaggaagtcgaataccttctaaggaaaggatggattccttgcttggaattcgagttggagcacggtttcgtgtaccgtgagcacaacaggtcacctggatactatgatggacgctactggaccatgtggaagctgccta

SEQ ID NO: 258174 - DNA, 357 bp, Glycine max
  unsure (1)..(357): unsure at all n locations
agatatggaaatctcccatgacatcaagatcaaggatgacaagctaggtgatgtaaaggaagagaagattaaggcagaagcggaactgaagcataaatcagttgagaaagagcatacaaaaagtaaggaagagaagattaaggtagaagcggaactgaagaataaatcagttgagaaagagcatacaaaaagtaaggaagagaagaaacataaagatgaagataaatcaaagaaaaagaagaaagagaaggtggaagaggaagatgaagagagagagaaaaaagaaaaagatttgaaagctaaaggggacgatggtgaagagaaaaaggagaaggacaatanaaatcaaattagaac

SEQ ID NO: 258175 - DNA, 327 bp, Glycine max
cggggttctagtgtgtgattgtttgttgttgtaactcgttcatctgggtttgttgttctgtgtttgtgtttgttttttcgctcagctgaaaatgtcttgctgcggtggtaactgtggttgtggcagctcctgcagggtgggcaccggctgcagaggctgcaggatatacccagacttgagctacactgagtcagccaccaccgatatcttggccatcggagtaggacctgtgaatgatgaatttccagatgttgaaatggctgtggtagctgagaacgatgggtgcaagtgtagcccatgctgctcctgcaatccctgcacttgcaa

SEQ ID NO: 258176 - DNA, 312 bp, Glycine max
gactgcaactttgctctctgtgaggcttcaatttccagttacggtttcgcttacagtaaccatttaccaggggagtcttcacctttgtcgttcgcaaatccggcgccgaatggagcgccaagcaacattccggcgacatcgaggcctccgccgactccacctatgatctccaaaagaagctcgtgcaagccgctctcgccgttgattcctccggtggagtccactcctctttctctcgcgtgtctcctacctctgctgtgttccacgtgatagtgtgtggtgctgtattcattggaaggtggcgtgggtctg

SEQ ID NO: 258177 - DNA, 378 bp, Glycine max
ggactgaaaaaaggttttagatcgtaaaaactaatcactacgaaaacaagagatatcgaagatggctctgcccaaagctaaggagatcgtgtcgtccaattccgtcgtcgttttcagcaaaacctattgccctttctgcgtcgatgtgaagaagctcttcggtgacctcggtgccaattacaaggccatcgaactcgacactgaatccgatggaaaagagctccaagcagcattagttgagtggacggaccagcgaaccgtgcctaatgtgtttattggtggaaaccacattggtggctgtgactcaacaactgccctgcacactcaggggaagctggttcctctgctgatatctgctggagctgttgccaaatcaac

SEQ ID NO: 258178 - DNA, 339 bp, Glycine max
gcagcgggtatagtttagtggtaaaagtgcgattcgttccatggacccctaaatagttaagggatcccccgtttgattcatattccgatcaaaaactttatttcttacttaaagggaatcctttataccctcaatgaatgatttgcggtataatatacattatcgtaatttgtatacaagaagaatcaattctaaattgacaacttgagttctaaaattatgaaacataagtttttggaattggatctataatccgaatttttttgagtatgacgaaacgatctatggagagatatatagaaagtttcttttctatcgtaaacaaatcttccatttttt

SEQ ID NO: 258179 - DNA, 295 bp, Glycine max
gaatagaaatagaactgtcttttcatatagatatcccttcaatacaacataggtcatcgaaaggatctcgaagacccaccaacgcacgaaagccgggatctttcagaaaatggattcctattcgaagggtgcataaccgcatggataagctcacacgaacccgtcaatttgggatccaattcggttccttatgaggtaacgggaaggaattttggaatgtaataatatcgattcatacagatacagaagaaacggttctctattgattcaaacgctctacctacgagataaggat

SEQ ID NO: 258180 - DNA, 341 bp, Glycine max
cccgggtcgacccatgcgtccgaagacgacagaagggggcacttcaattgcaatcaaattagttcattctctttgcgcagttccctacctctcctttcaagatgcagatcttcgtcaagaccctcaccggaaagaccatcacccttgaggtggaaagctctgacaccatcgacaacgtcaaggccaagatccaggacaaggaaggaattcccccggatcagcaacgtctcatcttcgccggaaagcagctcgaggacggccgtaacctcgccgactacaacatccagaaggagtcaagccttcaacttgtccttcgtctccgtgggggcatgcagatcttc

SEQ ID NO: 258181 - DNA, 361 bp, Glycine max
gaaggtgcaagagtttgttgcgagctataagctagtttatcgtgaggagaatatgaagttgtttgttttctttgttgctgcagtagttttggtggcatggccatgccatggcgcaggctaccaaaggttccctctccgaatgaaaactggctatggtgagcgttcttcggaggtaaaatgcgcaagttttaggcttgctgtggaagcacacaacatccgagcctttaaaaccattcctgaagagtgcgttgaaccaacaaaggactacattaatggcgaacaatttagatcagactctaaaacagttaaccaacaagctttcttttatgctagtgaacgcgaagttcatcacaacgacata

SEQ ID NO: 258182 - DNA, 366 bp, Glycine max
ttcacaaagcttttcagtcggcttttcgcgaagaaggaaatgcgaattctgatggttggtcttgatgctgctggtaagaccactatcctgtacaagctcaagctcggagagatcgttaccacaattcctaccatcgggttcaatgttgagactgtggaatacaagaacattagcttcactgtttgggatgttggtggccaggacaagattcgtcccttgtggaggcactacttccagaacacccagggtcttatttttgttgtagacagcaatgatagggacagagttgttgaggccagagatgagttgcatacgatgttgaatgaggatgaactgagagatgcagtattgcttgttgttgccaac

SEQ ID NO: 258183 - DNA, 353 bp, Glycine max
ataaccaagaagataattcaaaaaagaagagaccaagagagagagagagagatggggcgcaagaacacaattttcttggcattggttgttactttgattactaaggagacaatggcagaacgacatatagttggtggaagccaaggttgggatgaatcaacagacttcaattcttgggtttcaggccaaacatttaacgttggcgactaacttgttttcaagtactcttctttgcatagtgtggttgaactaggtactgagagtgagtacaagaattgtgatcttggcaatgcagtgaactcaatgagcagtggcaatgatgttgtgaagctgaacaagcctggcacacgtta

SEQ ID NO: 258184 - DNA, 250 bp, Glycine max
gatagcgtttttcattgtgcattattcaatggccaccacagcagctctatccggaaccatggtgagcacctccttcatgaggaagcaacctatgacgaccaagagcctaaagacattccccaacgctctttttggtctgaaaggtggacgaggtggtcgtgtaacttgcatggcctcgtacaaggtgaagctcataaccccagaaggagaagtggagtttgaatgcccagatgatgttttcattgttgac

SEQ ID NO: 258185 - DNA, 334 bp, Glycine max
gaaccaagtttgcttgcgtgtatattcattttagcatcaaggttgaatctcagagaaaaacaaacatcgacaagcatgtctggaagaggaaagggaggcaagggtctcggaaagggaggagccaaacgacaccgtaaggttctgagggataacattcagggaatcaccaagcccgcgattcgccgtctggccagacgtggtggcgtcaagcgtatcagtggtcttatctatgaagaaactcgcggtgttctcaagatctttctagagaacgtcattcgcgacgctgtcacctacactgaacacgctcgccgcaagaacgtcactggcatggacg

SEQ ID NO: 258186 - DNA, 283 bp, Glycine max
ggcagcagaagaacaagtagttgagaactaagaaggagaagcaaatggcttcctcaatgatctcttccccagctgttaccactgtcaaccgtgccggtgccggcatggttgctccattcactggcctcaagtccatggctggcttccccaccaggaagaccaacaatgacattacctccattgctagcaacggtggaagagtgcaatgcatgcaggtgtggccaccagttggcaagaagaagtttgagactctttcctacctgccagaccttgatgatgcaca

SEQ ID NO: 258187 - DNA, 104 bp, Glycine max
cgtagtaagcgatgaaatgcttcggggagttgaaaataagcgtagatccggggattcccgatataggtcaacctttcgaactgctgctgaatccacgggcagac

SEQ ID NO: 258188 - DNA, 239 bp, Glycine max
  unsure (1)..(239): unsure at all n locations
gcaccaagtgaaccaatatagcccaagccctatacaaccaaaccctaacacacacccatttgattcagtttccatggctagcctcaaggttgcatttttggctgtagtgctctgcatggttgtggtgagtgcacccatggcacatgcagctatcacgtgcgggcaggtgacgagtancctggccaattgcatcggttacctccagaagggaggaacgccgttgtcgggatgctgcaacg

SEQ ID NO: 258189 - DNA, 280 bp, Glycine max
gagaaaagaaagagaaagagcgatgccaggatcattgaggcctcggtttgttatctttggttcttccatcgttcaatttggtttttatgatgaaggttgggtggctattctttctcatttgtatgcccgcaaggttgatattgatttgcgaggatatgctggttggaattcaaggcgtgctgtgcaggttctggataaagtttttcccaaggatgcccctatacaaccttcattgggtattgtctactttggtggttatgaattctctgccccctcctca

SEQ ID NO: 258190 - DNA, 332 bp, Glycine max
gaccaacacaaacaatagtgcatagcgtttttcattgtgcattatccaatggccaccacagcagctctatccggaaccatggtgagcacctccttcatgaggaagcaacctatgacgaccaagagcctaaagacattccccaacgctctttttggtctgaaaggtggacgaggtggtcgtgtaacttgcatggcctcgtacaaggtgaagctcataaccccagaaggagaagtggagtttgaatgcccagatgatgttttcattgttgacaaggctgaggaagaaggcattgaacttccctactcgtgcacggctggttcttgcgtttcacg

SEQ ID NO: 258191 - DNA, 131 bp, Glycine max
ggcacaagtgagtttgttgatcgagataactaaaaacagtgtgatgaaaatgaaaggccttgttttcctcgttgccacaattttgggagcatgggaaagccaagcgtacgaaatgtttcctccccgaatga

SEQ ID NO: 258192 - DNA, 265 bp, Glycine max
gacaaaacaaaaaccacctcactcttattgttttcttaaaatttcttccttgccactgccagtgtgtcaccaccatggccaccgtcacaacccaagcctccgccgcgattttccggccatgtgcctcgaaatcgaggtttttgaccggctcttccggtaaactcaaccgggaagtgactatgaggccaatggggtgccctccttctgcctctttcaaggttgaagccaagaagggagagtggttacctgggcttggcctccccaa

SEQ ID NO: 258193 - DNA, 391 bp, Glycine max
tcacacccaagttcgagacccttattgacatttcagtgatagagatattgtcaaggcatgcttctgatgaggtctaccttggccaaagggataatccaaattggactacggattcaaaggcattggaagctttcaaaaagtttggaaacaaactggcagaaattgagggaaaaatcacacagaggaacaatgatccaagtctgaaaagccgacatgggccagttcagcttccatacacattgctccatcgttcaagtgaggaagggatgagtttcaaaggaattcccaacagtatctccatctaaaatgtgtgtgtggtttgcttatctattgtgcttttgaataaaatagacaatacttgtctatggttattattggctgtatgtctgta

SEQ ID NO: 258194 - DNA, 392 bp, Glycine max
gacaaattcacacattttttgttgcattatcgcaaacacctcgtccctcgcaatgcagctagcaatggcggccaacgctgtcgtttcaccgtcgccgttccgacctcagccctttctccggtcatccttctccggcgtctccgtcaagctcactccccaatccataacgctttcacgctccaagcccctcaccgtcttcgccgccaccaagaaggccgtcgccgtcctcaaggggacctccgccgtcgaaggcgtcgccactctcatccaagaagacgatggcccgacgacagtttctgttcgcatcactggccttactccggggcttcatggtttttcactacatgagtatggtgatacgacacatgggtgtatttctacgggagcacatt

SEQ ID NO: 258195 - DNA, 290 bp, Glycine max
ggcacaagtgagtttgttgatcgagataactagaaacagtgtgatgaaaatgaaggtccttgttttcttcgttgctacaattttggtagcatggcaatgccatgcgtacgatatgttccctctccgaatgaacactggctatggtgcccgtactccggaggtgaaatgcgcaagttggaggcttgctgtggaagcacacaacatctttggctttgagaccattcctgaagagtgcgttgaagcaacaaaggaatacatccatggggaacaatatagatcagactccaaaa

SEQ ID NO: 258196 - DNA, 304 bp, Glycine max
accattcattcccacattcccatttttcacaccaccaacacaagatgtttctccacattgtgttcctccttttccttctctcatccacttcccatgccactgtccaagacttctgtgtggcagacctcaaaggtgcagacacccctgcaggctacccctgcaagccacctgctaatgtcacttcagatgactttgtgtacactggcttagctgaagctgcaaatgtcacaaacataatcaatgctgctgtgaccccagcttttgttgctcaattcccaagtctcaatggccttgaactatctgc

SEQ ID NO: 258197 - DNA, 200 bp, Glycine max
ggaatcgtcttttacttctcagcagcttcggctagggttcagaaacgaaaaagggttcggtgttctgttcgcgatgagagccaagtggaagaagaagcgtatgaggaggttgaagaggaagcgccgaaagatgagacagagatccaagtagtgcgttaaacctagtttgtttctgttgcttttacaattgcttatgttgt

SEQ ID NO: 258198 - DNA, 279 bp, Glycine max
gggtgctgtgagtgagacaccgatagatagagagcgcgggataacctaaacctatctttcttctctctctgtgtgtgcgcttcaacggcaaccagaagcagccatggccactgcaaggactgtgaaggatgtttcacctcatgagttcgttaaggcgtactcctctcacctcaagcgatccggcaagatggagctgccagagtggactgatattgtgaaaactgcaagatttaaggagttggctccctatgatcctgactggtactatgtcagagctgc

SEQ ID NO: 258199 - DNA, 340 bp, Glycine max
ggcacaagtgagtttgttgatcgagataactagaaacagtgtgatgaaaatgaaggtccttgttttcttcgttgctacaattttggtagcatggcaatgccatgcgtacgatatgttccctctccgaatgaacactggctatggtgcccgtactccggaggtgaaatgcgcaagttggaggcttgctgtggaagcacacaacatctttggctttgagaccattcctgaagagtgcgttgaagcaacaaaggaatacatccatggcgaacaatatagattagactccaaaacagttaaccaacaagcttacttttatgccagagacctcgaagtccatccc

SEQ ID NO: 258200 - DNA, 409 bp, Glycine max
atataagtggaatccaatggacactgctggctaaagaaatagcagtacagagcaaatcaagggaattaaatagcacaaattattgaacaaagaaagctagaaattaagaggtcccaaaagctgcacacattgcccttcttgtccaggaatttgagatctaacattaacaacaactatctaagcactagcaagctagttagcaaggcaataatgaagttcttgttccagtgcccctgctgctcttgcttttgcttcatgaagccaaagcaagggaaggcaaaggtcaaggaagtcaaagaaaccaaagttgaaaaaaaaaaaggtgaagacaagaatgaagaaaaaaaaattaacatgtaactccatttcaggccccctttgggtatactaatatttttttttgcttttt

SEQ ID NO: 258201 - DNA, 298 bp, Glycine max
cccacgcatccgaaaacgacagaagggggctggcattatggtgctgctatcggcttgggattacagttagcaaatcacagagtcatagtatctgaaattgctaccaaacttgggagtcctgacttagctcgacaataccttgaaaaatgcttgtattatgtgaacataggcagcaatgattacatgggcaattacttccttcccccgttctacccaacaagcaccatttataccattgaggagtttacacaagttctgattgaagagttatctctgaatttacaggcgttacatgaca

SEQ ID NO: 258202 - DNA, 288 bp, Glycine max
gatagcaacagcatatcatgcattgtggtcaacaacttaaattcactccctgtgtggtgcttacgtccacaaaaccaaacatgtcaaacacatgggacaactgcgactgcgctgacaagactagctgcaccaagggaaacagctctcgtgttaatgtaaacaatgagaacagttacatcgacgactgttgtcatcgatgttcgaccagctgatcatgataggaagtgtcagtgtagcactaactgcacgtgcacagactgcacctgtggacattaatgaatatgtatg

SEQ ID NO: 258203 - DNA, 289 bp, Glycine max
gatagaagaagcagaaagagaagcattagcaaaagcaagaagaactagtctaagcagaaatggcctcttcagtgatggcatctgtggccctcaaacctgcacctttcactgttgagaagtcctcagttagaggccttccctccctctcaaggaactcctcttcattcagagttgtggccagtggtggcaagaagatcaagactgacaagccttatggaattaatggtggcatggctttgagggaaggagttgatgcatctggcaggaaaggaaagggaaagggcgttta

SEQ ID NO: 258204 - DNA, 380 bp, Glycine max
  unsure (1)..(380): unsure at all n locations
gagaatagagagctcctccaattagggtttttgtgatctgcagctacgatgggtaagggaacggggagtttcggtaagaggaggaacaagacccacaccctctgtgtgaggtgtggccaccgcagcttccacctccagaagagtcgttgctctgcgtgcgcttaccccgctgcgcgcaccaggaaatataactggagcgtgaaggccattangagaaagaccaccggaactggaaggatgaggtacttgcgtaacgtgcctcgcagattcaagagcggcttcagagagggtaccgaagctgcacccaggaagagaagagctgctgcctctgcctaagctttgaatgaatgacagcaatttttgctgggtcagtgaattat

SEQ ID NO: 258205 - DNA, 402 bp, Glycine max
ggtgaatcggtgttgtcttgttggtaaagaaagaaagagaagagaagaatcgaagacgaagatggaggacgcatcagcatcaaagttcattccacaccaaatcggaggggtccaaaacgacgcgcttcgattcggtctccatggagtcaagagcgacatcgttggttctcaccctcttcaatcttcactccaatctacaaggagaatggatgaagcgatgaagaggcaatgcgaagttaacctgtacggaactgcttttcccatgaaggaggagcttgacaggcaaatcctgtccaagttccagcggcctcctggaccaattccttcttcaatgctgggtttggagactgttacacgaagtgttgatcactttggttttgacgaatgtctaaatgacccccg

SEQ ID NO: 258206 - DNA, 274 bp, Glycine max
gaaagagaagcattagcactaggagcagcaacaactagtctcagctgaaatggcctcttcagtgatggcatctgtggccctcaaacctgcccctttcactgttgagaagtcctcagtgagaggccttccccctctctcaaggaactcttcttcattcagagttgtggccagtggcaagaagatcaagactgacaaaccttatggaattaatggtggcatggctttgagggatggaactgatgcatctggcaggaaaggaaagggaaagggtgtt

SEQ ID NO: 258207 - DNA, 172 bp, Glycine max
aaaaggggcacaagttagtttgttgattgagataactagaaacactgtgatgaaaatgaaagtccttgttttcctccttgccacaattttggtagcacggcaatgccatgcgtacgaaatgttccctcccccaattaacactggctatggtgcccgtactcccgaagtgaaa

SEQ ID NO: 258208 - DNA, 381 bp, Glycine max
gcccctattccacacacaagaagactcctcaatcatccatagacatggccaccgtcacttctgcagcagtttctattccctcattcactggcctcaaggcaagcgcaggcaaagtgagtgccgccgcagttaaagtctcagctccccaagccacaaggttctgcggcatcaaggcttccctcaaagacgttggagtcgctgttgtggccactgctgcgagcgcagttctagctagcaacgccatggccattgaagtgttactgggcactgatgacgggtctctggttttctctcccaactctttctccgtggcccctggggaaaagatcgtgttcaagaacaacgcaggtttcccccacaacgttgtgttcgacgaggacg

SEQ ID NO: 258209 - DNA, 269 bp, Glycine max
  unsure (1)..(269): unsure at all n locations
gacacttgtattgtctcaagcaaccctggcaatggcaacccaagcctctctcttaaccccacccctctccggtctcaaagccagcgaccgcgcctccgcgccatggaagcaaaactccagcctctccttctccagcccgaagcccctcaagttctccagaataatcagagcagcagttgccgacgataccacagaggcaccagcaaaagtagaggctgcaccggtcgggttcaccccaccagaacttgacccanacaccccttccccga

SEQ ID NO: 258210 - DNA, 270 bp, Glycine max
gggcagcagaagaacaagtagttgagaactaagaaggagaagcaaatggcttcctcaatgatctcttccccagctgttaccactgtcgaccgtgccggtgccggcatggttgctccattcactggcctcaagtccatggctggcttccccaccagaaagaccaacaatgacattacctccattgctagcaacggtggaagagtgcaatgcatgcaagtgtggccaccagttggcaagcagaagtttgagactctttcccaactgccagac

SEQ ID NO: 258211 - DNA, 182 bp, Glycine max
gaagccactctaaggaaaatggcggtgcctctactctcgaagaagatcgtgaagaagagggtgaagaagttcaagaggcctcacagtgacaggaagatttctgtcaagataaactggcgcagaccaaagggtagcgattcccgtgttacgagaaagttcaagggatgcactttgatgccaaa

SEQ ID NO: 258212 - DNA, 228 bp, Glycine max
gacactacgggacactggggcagacttaagttggtcggtcaagagaattacaaccattgcgctgaaaaggaaggcccttgtttcctacgttgcaaaaatttgggtaccacggaaaggcaatgcgtcccaaaggttccttctccaaatcaaaacgggtcaaggtccccgtaccccggcggtgaaatgcccaagttggaggcttgcggtggcagcacacacaaccgttgg

SEQ ID NO: 258213 - DNA, 345 bp, Glycine max
gcacaagtgagtttgttgatcgagataactagaaacagtgtgatgaaaatgaaggtccttgttttcttcgttgctacaattttggtagcatggcaatgccatgcgtacgatatgttccctctccgaatgaacactggctatggtgcccgtactccggaggtgaaatgcgcaagttggaggcttgctgtggaagcatacaacatctttggctttgagaccattcctgaagagtgcgttgaagcaacaaaggaatacatccatggcgaacaatatagattagaatccaaaacagttaaccaacaagcttacttttatgccaaagacctcgaaatccatcccaaagac

SEQ ID NO: 258214 - DNA, 285 bp, Glycine max
gataatacaacctcataaagagttctttcaaaatgcaaatatttttaaccttcgctgcccccaacgttgtgccattggcacccacaaagagtgtctcccatattaccatctttcccaccaaattgaaagccccgcgctcctcacctcgttactctccgattagggttgcaaccgtggagcccgacacttcaactgtcgactacaactctgcgttctcagtgtttcctgcagaagcatgcgaaactgtaggaagggaagcctgcatggcggagatgtaccctgaaa

SEQ ID NO: 258215 - DNA, 318 bp, Glycine max
gagcgccaatgtttttttcagaggagtttcatcttgtaatcaaaagagtttatcttatagtaagaaatcgatgtcttactccattttaaggaacaaaacaagagaacaatagcctgacaaagggtttagccataaaatcgaatccatcattgatttgagatattgataaggtgaatactcatttctcgtcaatgctaggcataatgcgggtatagggacctaaaaaagattatcttttcctcccaacctaaggactttaagggggatgaaatggcaattcccaacctaaaatttaaatttaataagttaattaagagt

SEQ ID NO: 258216 - DNA, 198 bp, Glycine max
gacaactcagtttgttgatcgacataaccagaaacagtgtgatgacaatgaacgtccttgttctcctcgttgctacaattttggtggcatggcaatgccacgcgtatccatatgttccctctccgaatgaacactggctatggcacccgtagcccggaggtcaaatcctcaagttcgaggcttcctgtgccagcacac

SEQ ID NO: 258217 - DNA, 309 bp, Glycine max
gaacggaaaagcactggcgcagctaccctgaggcttctcttctcttctcttctctgtcgtgagtcaccatggtgagggttagtgtgctgaacgatgctctgaagagcatgtacaatgctgagaaaaggggaaagcgccaagtcatgattaggccatcctccaaagtcattatcaaattccttttggtgatgcaaacacacggatacatcggagagtttgagttatgttgatgaccatatgggctggtaaaatcctgggctgaattgaccggtagactgaacaactgtggggttattagtccccgttttg

SEQ ID NO: 258218 - DNA, 252 bp, Glycine max
gatatctggcagcagaagaacaagtagttgagaactaagaaggagaagcaaatggcttcctcaatgatctcttccccagctgttaccactgtcaaccgtgccggtgccggcatggttgctccattcactggcctcaagtccatggctggccttcccagcaggaagaccaacaatgacattacctccagtgctagcaacggtggaatagttcaatgcatgcaagtgtgggcaccagttggcaagaagaagttt

SEQ ID NO: 258219 - DNA, 238 bp, Glycine max
gatacaagaagcagaaagagaagcattagcaagagcaagaagaactagtctaagcacaaatggcctcttcagtgatggcatcggtggccctcaaacctgcccctttcactgttgagaagtcctcagttagaggccttccctccctctcaaggaaatcctcttcattcagagttgtggccagtggtgggaagaagatcaagacctgacaaaccttatggaaataactggtggaatggcg

SEQ ID NO: 258220 - DNA, 293 bp, Glycine max
ggttctagtgtatgtgattgttgtgactcgttcttcttcgtcgttatcttcttcttttgttgtttgtgtgtttgttttttctctcacctgaaaatgtcttgctgcggtggtaactgtggttgcggaagcgcctgcaagtgcggcaacggctgcggaggctgcaagatgtacccacacttgagctacaccgagtcaaccaccaccgagaccttggtcatgggagtggcaccagttaaggctcaattcgagagtgctgacatgggtgttcccgctgagaaacactgctgcaaatg

SEQ ID NO: 258221 - DNA, 159 bp, Glycine max
aggaacgccgtcgtcgggatgctgcaacggagtgaagagcctcaatgccgccgccaacaccaccgccgaccgccagacggcgtgcaactgcctcaagtcggccgccagccaagtctcccgcttcaccgccaacaacgccgcctcgctccccggcacctg

SEQ ID NO: 258222 - DNA, 214 bp, Glycine max
ggcacaagtgagtttgttgatcgagataactagaaacagtgtgatgaaaatgaaggtccttgttttcttcgttgctacaagtttggtagcatggcaatgccatgcgtacgatatgttccctctccgaatgatcactggctatggtgcccgtagctccggatgtgaaatcgccacgttggaggcttgctgtggaagcacacaacatctttggctt

SEQ ID NO: 258223 - DNA, 258 bp, Glycine max
cgggggacgatgaatcgatttgataactaagatattgttactcgtgatattgatccaatttgacatcatcgaaatccactttataccattggtgaagtaattatccatgaccgatttatcatctctatgggattcaatcccgcattttttaatggaaatttaacacaaatagaacataatatagattatggaagtcaatagtcctgcatttactgccactgcactgtttattctacttcccactggcttttttactta

SEQ ID NO: 258224 - DNA, 261 bp, Glycine max
gaaggtgcaagagtttgttgtgagctataagctagtttatcgtgaggagaatatgaacttgtttgttttctttgttgctgcagtagttttagtagcatggccatgccatggcgcacgctaccaaaggttccctctcccaatgaaaactggctatggtgagcgttcttcggaagtaaaatgcgcaagttttaagccttctgttggaacaaacaacatccgagcccttaacaaccattcctggaacactgcgttgtgaccaac

SEQ ID NO: 258225 - DNA, 279 bp, Glycine max
gaagagaggatttgggattgggaaggcgagggattgcgctgcgtctcttcctcttctctttcgattcatccctcattcataatcttccaatccaacaacctcagcctcacactcacacatacacacatctgaacgcgtatcgtccctcccatggcttcaaagcgcatcctcaaggagctcaaggacttgcagaaagacccaccaacttcttgcagcgctggtcgagtagctgaggacatgttccattggcaagcaacgattaggggtcctgcggatagt

SEQ ID NO: 258226 - DNA, 366 bp, Glycine max
gacgatgagtcgatttgataactaagatattgttattcgtgatattgatccaatttgatatcatcgaaatccaatttataccattgttgaattaattatcgatgaaagatttatcatctctatgggattaaatcccgaattttttattggaaatttaagagaaataaaacataataaagattatggaagtaaatattcttgcatttattgctactgcactgtttattctagttcctactgcctttttacctaaaaattacgttaaaaccggaagttcaagtgactaaattcaatgaaatccgacttcctcatttttaacaaatgttatcaatgatttaaaaaaattaaaaaaggtttcaaattttg

SEQ ID NO: 258227 - DNA, 313 bp, Glycine max
gaaacaaattccactcaatgtgcaacttcatgaaaaaaatggttcatcttggcttcttccttctggggtgtctctccatgatctcatatgctaatggttatgtcagcaatgggggttggaccaatgcccatgctacattctatggtggaagtgatgcttctgggacaatgggtggggcttgtggttatggaaacttgtatagtcaaggatatgggactaacacagcagcacttaacactgccttgttcaacaatggcttgagttgtggctcatgctaccaaatcaaatgtgcaaatgacccacaatggtgcct

SEQ ID NO: 258228 - DNA, 364 bp, Glycine max
cgggggattatatttgagttcaaacaaatcaaagccatggccacctacaacttctctattgttctctccgtctccctatccttctttttggtgctagttaccaaggcacactccaccgataccgtttctttcaccttcaacaagttcaacccagtccaaccaaacattatgctccaaaaagatgctactatttcatcctctggggtgttacaactcaccaaagttgggagcaaccgagtgcccacctcgggatctctcggtcctgccctttaagcttgccccaatccacattttgggacagcggaaaccgggaacggtaccaagctgggctacatccctttaaattccacaattttcccaccca

SEQ ID NO: 258229 - DNA, 405 bp, Glycine max
gagagcgaaagagatgtcgttggtttcaagcatgttcgggcgtggagtggtgatggcggcgtcgcaagcaatgggaattggaaggagaagcgatggtggattgacgatagtgtgttcgtctaggccgcagaagaaagcgacggcgcatcacatgaagactcggcctcagaagacgcaggcatgggatagaaaccgcaagcccaccgtctacgatccactccctcctcttcctcctgattggaccctcgttattcccgctgacgcttcctctgctcccgttacgcctccggctccaactccctctggctaatcaatctctccgtactctctctcgttttcatgtagtcctaactttaattccagcagcttttctttcatgttttcatctcaaatcaaaccttcatc

SEQ ID NO: 258230 - DNA, 369 bp, Glycine max
gattatatttgagttcaaacaaatcaaagccatggccacctccaacttctctattgttctctccgtctccctagccttctttttggtgctacttaccaaggcacactcgaccgataccgtttctttcaccttcaacaagttcaacccagtccaaccaaacattatgctccaaaaagatgctagtatttcatcctctggggtgttacaactcaccaaagttggcagcaacggcgtgcccacctcgggatctctcggtcgtgccctttacgctgccccaatccagatttgggacagccaaaccggcaaagtaaccaactgggctacatcctttaaattcaacaatttcgcacccaacaaatcaaactcaac

SEQ ID NO: 258231 - DNA, 354 bp, Glycine max
ggctttagattcttttcccctagattcagccacagttggaaaaaaaaaaaaagttgttcgagatggcacgtacgaagcaaactgctcgtaagtccacaggaggaaaggcacctaggaagcagctcgcaaccaaggctgcacgtaagtctgcaccaaccactggtggtgtgaagaagccacatcgttatcgtcctggtaccgttgctcttcgtgagattaggaaataccagaagagtaccgagcttttgatcaggaagctccccttccagaggctggttcgtgaaattgctcaagacttcaagactgatctgcgtttccagagccatgctgtgcctgcattgcaagaagctgctg

SEQ ID NO: 258232 - DNA, 252 bp, Glycine max
gggatttccaaagttttttaatagacggtaagtctcaaaacatcgaagaattacagacgaatatgcaaaacaaactgaattgtgtgaatcgaaaactaaacattgctattgtaaaagttgcaaatgcttataaacaccctaatattattgcagaatttatagctggacaattaaagaatagagtttcgtttcgtaaagcaatgaaaaaagctattggattaactgaacaggcgggcacaaaacgagttcaag

SEQ ID NO: 258233 - DNA, 284 bp, Glycine max
gatagtatcatcatacagagcattgaattcaaaaacttaagttcagtccttgtgttttgcttgcgtcctcaaaaccaaacatgtcgaacacatgcggcaactgcgactgcgctgacacgactagctgtaccaatggaaacagctatggtgttattgtatagactgacaagagttacatcgagactgttgtcatggatgttccagcagcttagcatgatgggaagtgcaagtgtggcactaactgcacttgcaacgactgcacctgtggctattatcgaatatgt

SEQ ID NO: 258234 - DNA, 194 bp, Glycine max
gggatttccaaagttttttaatagagggtaagtctcaaaaaatcgaagaattacagacgaatatgcaaaaaaaactgaattgtgtgaatcgaaaactaaacattgctattgtaaaagttgcaaatgcttataaacaccctaatattattgcagaatttatagctggacaattaaagaatagagtttcgtttcgt

SEQ ID NO: 258235 - DNA, 400 bp, Glycine max
ggcacaagtgagtttgttgatcgagataactagaaacagtgtgatgaaaatgaaggtccttgttttcttcgttgctacaattttggtagcatggcaatgccatgcgtacgatatgttccctctccgaatgaacactggctatggtgcccgtactccggaggtgaaatgcgcaagttggaggcttgctgtggaagcacacaacatctttggctttgagaccattcctgaagagtgcgttgaagcaacaaaggaatacatccatggcgaacaatatagatcagactccaaaacagtttaccaacaagctttactttatgccaaagaactccaagtccaacccaagggcacatttgtgttcaatatagattgcaacgttctctccaataatccatactacaaa

SEQ ID NO: 258236 - DNA, 407 bp, Glycine max
ggcacaagtgagtttgttgatcgagataactagaaacagtgtgatgaaaatgaaggtccttgttttcttcgttgctacaattttggtagcatggcaatgccatgcgtacgatatgttccctctccgaatgaacactggctatggtgcccgtactccggaggtgaaatgcgcaagttggaggcttgctgtggaagcacacaacatctttggctttgagaccattcctgaagagtgcgttgaagcaacaaaggaatacatccatgggggaacaatataggatcagactccaaaaaagttaaccaacaagcttacttttatgccaaaggactcgaagtccatcccaacgacacatttgtgttcagtatagaatggaccgtactctctaatattccatacgacaaaaaaca

SEQ ID NO: 258237 - DNA, 225 bp, Glycine max
gggcggtgcaattttcatcaccagaaattgtaagaacatggtagaacgttgtacgagtccgattgtgttgctctgtctcttctcaatttctgcacttactctagctttttcgccatgccccctcactgggttaccgctggtgagaaatatcagtgagactccccaagataactaccgtagggctgctctctctcacatgactgttgcatggtcattgtcgcaccg

SEQ ID NO: 258238 - DNA, 269 bp, Glycine max
ggcacaagtgagtttgttgatcgagataactagaaacagtgtgatgaaaatgaaggtccttgttttcttcgttgctacaattttggtagcatggcaatgccatgcgtacgatatgttccctctccgaatgaacactggctatggtgcccgtactccggaggtgaaatgcgcaagttggacgcttgctgtggcaatacaaaacatctttggctttgagatcattcctgaagaatgcgttgactcaacacaggaatacatccatggtgaac

SEQ ID NO: 258239 - DNA, 263 bp, Glycine max
gatctggcagcagaagaacaagtagttgagaactaagaaggagaagcaaatggcttcctcaatgatctcttccccagctgttaccactgtcaaccgtgccggtgccggcatggttgctccattcactggcctcaagtccatggctggcttccccaccaggaagaccaacaatgacattacctccattgctagcaacggtggaagagtgcaatgcatgcacgtgtggccaccagttggcaataagaagtttgagactctttccc

SEQ ID NO: 258240 - DNA, 74 bp, Glycine max
ggtgtgagtaagatcataagcaaaagcaacggtgaactgaagatgccggttctcaccctttctactaacgttag

SEQ ID NO: 258241 - DNA, 378 bp, Glycine max
gactctcctctcagttctcacgcagagtactgcactgaacgaaccgtagttgttccgtttcagccatggtggagaacaatctcttcgaggatatatttagggtcgaaaaattaaaccccgatgacaaaagattattcgataaagtcactcgcattgaagcaagaagtgaaaagtttggcatgtttatgcacctggacattaattccgacatatatccgttaaaggttggtcagaagtttgctcctggtgctgttttaacacttaatcctgatggaactcgagacactggatattatacccagattagtccacaatcactgggcaacaattttgaataagtcctgtatgggaagctccacaggataacaaacggtttaa

SEQ ID NO: 258242 - DNA, 203 bp, Glycine max
ggaaagagagtgaagagagaagaagatggtgtcgagcggagcggtgccgttttggagggcaacggggatgacatacatcacatactcaaacatgggcgcgggtctggtcatgaattgcctcaacgaactctacaaggctgaagccatctctcgtgataatgtccactttgctctctccaaatgggtcgacgccaagcctgaaa

SEQ ID NO: 258243 - DNA, 381 bp, Glycine max
ggcctattgcacattcttcatcacctcattcaacatttctctctcccttagctagtttttaccaatggctgctgcggttagtgctgcagtctcttttccatccaccaagtctacctctctcccaagcaggacctccatcattaccccagagagagttgtattcaagaaggcttcattgcaatacagagatgtttgtagcagtggaagggtagtttccatcagagctcaagtcaccactgaggctccagccaaggttgagaaagagtccaagaaacatgatgaacgtgtggttgtgaacaagttcaaacccaagaccccttacgttggtagatgcctgctcaacacaaagatcactggggatgattctccaggagaaacttg

SEQ ID NO: 258244 - DNA, 381 bp, Glycine max
gagtgcctccattcgggactgtaactagccgcagcacgaggagcagcctcacgaggagaaggatgtctcagaggaagttcgagcacccaatgcacggttcactgggatttcttcccacgaagcgtgctgctcgtcacaggggaaaagtgaaggcattccccaacgatgacccatccatggcacccaagctcactgcattcctgggttacaacgccggtatgactcacattgttacacaagtcgagaaaccatgatcaaagcttcacacgaaggaaacttgtgaacctgttacaattattgagacccctccaatggctactgttggtggtgtgggtcatgtcaaaactccacgtggtctcccaccatttgaaaccgtccggg

SEQ ID NO: 258245 - DNA, 221 bp, Glycine max
ggcacaccaacaccaaaacaaacccactaagatggcttcctttgtatccttcctagtgctgcttcttgcagcccttatcctcatgcctcaagggcttgctacttactacaaaccaattaagaagccaccagtgtacaagcctccagtgtacaagccaccagtgtacaaaccaccggtttataagccaaaaccaccggtttacaagccgaaaccaccggttt

SEQ ID NO: 258246 - DNA, 401 bp, Glycine max
gttcttccaaaaggcatgaatctaagagtgctggaattgaaatggtgactgaaagggagcagggagagttgacggcaagagataatcctttgtgttcttcttgtcagatgcttgttctttggatccagaatcaactaaaacaaaaggcaacgaacgacagagtattcaactatgttaaaccacctgtttaaaagcctaccagttcaacctgaaaattcgttaatagcccttaaaatccttccaagaatcccaaactttccattcccaattggaaataaaccttttgtcctcaaaccagagcattaattctcaaaaacgtggaaaagggattacaaaattttgccttaatgggtttattgcctttgatgttcctcctccaaagggtccattgtggattcctg

SEQ ID NO: 258247 - DNA, 218 bp, Glycine max
ggagaccttgtgtggagcatgtggggagaagtatgcatctgatgagttctggatttgttgcgacatatgtgagaagtggtttcatggcaagtgtgtgacgatcagtcatggccgggctgagtacatcaaacactacaggtgcccctcatgcagcaattggacaccaaggacttgatatcatacggatatggggttaattatcacagccctgtatatcg

SEQ ID NO: 258248 - DNA, 286 bp, Glycine max
gatccaactctctaaacaacacattaacctttctcattccccatctcctcaccttattcagccactgctaatttctagggttccgaaatggacgctggcggaaagatcaagaagggcgccggaggaagaaagggcggcggccctaagaagaagccggtttcaaggtccgtcaaggccggtctccaattccccgtcggaagaattggccgttatttgaagaaaggaaggtacgcccagcgtgtccgtaccgggtgcccccgtttacttggccggagttctcgaggta

SEQ ID NO: 258249 - DNA, 244 bp, Glycine max
gacaccaacacgataacagaccgactaagatggcttcctttgcgtccttcctacaggagcttcttgcagcccttagcctcatgcctgaggggcttgctacttacgacacaccagttccgttgccagcagtgtgcaatcctccactcgtcaagccaacaatagtgcatccatcggttttatcgccaaaaccatcggtttacctgccgcaagcatcggtttacactccaccacatgagaggtcacc

SEQ ID NO: 258250 - DNA, 316 bp, Glycine max
gacccccaaaccctgctgcataggaagaaaccctagcctctcaccctccctgcgacacgatgcagatcttcgtgaaaaccctaacgggtaagacgatcacccttgaggtggagtcttctgacaccatcgacaacgtgaaggccaagatccaggacaaggaaggcatccctccggaccagcagcgcctcatcttcgccggaaagcagctggaggacggccgcaccctcgccgactacaacatccagaacgagtgcaccctccacctcgtcctccgtccccgcggtggcgccaagagcgcaagatgaagacctacacc

SEQ ID NO: 258251 - DNA, 272 bp, Glycine max
  unsure (1)..(272): unsure at all n locations
caaatggcttcctcaatgatctcttccccagctgttaccactgtcaaccgtgccggtgccggcatggttgctccattcactggcctcaagtccatggctggcttccccaccaggaagaccaacaatgacattacctccattgctagcaacggtggaagagtgcaatgcatgcangtgtggccaccagttggcaagaagaagtttgagactctttcctacctgccagaccttgatgatgcacaattggcaaaggaagtagaataccttcttag

SEQ ID NO: 258252 - DNA, 408 bp, Glycine max
gatagcgaaacagagagtggtttcagtgagtgatcggtgttcacttgatccttcataagtcgtcatcatcatcatcatcatcaccgttgattgaagaagatgccgatcagaaacatcgccatcggaaggcctgaagaggctactcaccccgacacgttgaaggcggggttggctgagttcatctccaccttgatcttcgtgttcgccggttcaggttccggcatcgcctaaaacaagctcaacgacaacggcgccgccactcccgccggcctcatctccgcttccatcgcccatgctttcggcctcttcgtcgccgtctccgtcggggccaacatccccggggggcacgtcaaccccgccgtcaccttccgggcctttgtgggcgggaacaacaccttactccgcggg

SEQ ID NO: 258253 - DNA, 119 bp, Glycine max
gctcacactgtgagaaggaatctgtgaatgtttcccttggaaacctgctaacttacccatttgttagagatggcttggtgaacaaaacattgtcactgaaaggacgatactatgacttt

SEQ ID NO: 258254 - DNA, 405 bp, Glycine max
gataccaaaaacaaaacacaagccaagtgaaagtgagaaaaaataaaaatcaaagagcataatgtcagggatcattcacaagattggggagacccttcatgtgggagggcacaagaaggaggaggagcataagggtgagcaccatgctggagaatacaaaggggagcaccatggtgaacacagtagtgagtacaaaagagagcatcatggtgaacacaaagctggagagtaccatggtgagcacaagccagagcacaaagaggggttcctagacaaagtcaaggacaagatccatggtgagggcggcgccgccgacggcgagaagaagaagaaggagaagaagaagaacgagcatggccatgagcatgtgcatgacagcagcagcagcagtgacagtgattaaac

SEQ ID NO: 258255 - DNA, 124 bp, Glycine max
ggcacaagtgagtttgttgatcgagataactaaaaacagtgtgatgaaaatgaaggtccttgttttcttcgttgctacaattttgggaacatggcaatgccatgcgttcgatatgttccctctc

SEQ ID NO: 258256 - DNA, 369 bp, Glycine max
gagcgccaatgtttttttcagaggagtttcatcttgtaatcaaaagagtttatcttatagtaagaaatcgatgtcttactccattttaaggaacaaaacaagagaacaatagcctgacaaagggtttagccataaaatcgaatccatcattgatttgagatattgataaggtgaatactcatttctcgtcaatgctaggcataatgcgggtatagggacctaaaaaagattatcttttcttcccatcttatgaactttaaggtgtatgaagtgtcatttcctatcttagattttaattttagtaggtagataaagagtccacttaacttaagttgatctaggccagaagcagacctacgtcaagataat

SEQ ID NO: 258257 - DNA, 158 bp, Glycine max
gctcacactgtgagaacgaatctgtgaatgtttcccttggcaacctgctaacttacccatttgttagacatcgcttggtgaacagaacattgtcactgaaacgaggataccatgactttgttaaaggatcttttgagctctggggccttcagtttggg

SEQ ID NO: 258258 - DNA, 392 bp, Glycine max
gaccgtattccttacgctctctcactcacaaacacacactgaactaaaaaacatcaaaagagacatggctgagcaaaccttcatcatgatcaagcctgatggcgtccaaagaggccttattggcgagatcattagcagatttgagaagaaaggtttctacttgaaaggtttgaaacttgttactgtggaccgtccttttgctgagaagcactatgctgatttgtctgccaagcctttctttagtggtttggtggattacattatctctggccctgttgttgccatgatctgggagggcaagaatgttgttacaactggccgaaagattatcggagccacaaacccagctcaatctgagcctggaactatccgtggtgactttgccattgaca

SEQ ID NO: 258259 - DNA, 202 bp, Glycine max
gaccgtattccttacgctctctcagtcacaaacacacactgacttaacacacatcaggaggagacatgggtgagcagaccttcatggcgatgaggcctgatcgcgtccagagaggcctgagtggcgagatcattgccacccttgccgaagaaaggtttctacgtgagaggtttggaacttgttactgtcgaccgtccttttg

SEQ ID NO: 258260 - DNA, 309 bp, Glycine max
ggaagaatatcatcaccatcatagtatttcgttagaaggggaatttggcagattcattagaagaaaatggcgggtggtggaaaggtttcgttcaaagtcacactcacctccgatccaaagttacccttcaaagtgtttagcgttccagaggcggcaccttttactgccgttctcaaattcgccgccgaagaattcaaagtcccgccccagaccagcgctatcatcaccaacgatggtgttggcataaatccccagcatagcgcaggcaacgtcgtccttaagcatggttcaaaactgcgcctgattccg

SEQ ID NO: 258261 - DNA, 386 bp, Glycine max
gacattcaatcactcacacatgcccctatcttccttagctacctagattattcacttcaattcctcacaagcaacaccgtttcttgctccaatggcagctttgtatctcccaataagcatgttggcactcattgttgttgtttctcttggattgtggagtggtgttcaaggtgcaccacaagtgccatgctacttcatttttggtgattctttggttgataatgggaacaacaaccagctccagtctttggctacggctgattacttgccttatgggattgacttccctggtggaccttctggaaagttttccaatgggaaaaccactgttgatgcaattgctgaacttttgggaatcgatgattacatacctccatcagctgatg

SEQ ID NO: 258262 - DNA, 404 bp, Glycine max
  unsure (1)..(404): unsure at all n locations
gatattgaaaaggcgcccaagcaagttcgttctttcgccgccgtcgctcacaactcgcaaaccacaatgcctaagcagatccacgagattaaggatttccttctgacggcacggaggaaggatgcgaggtcggtgaaaatcaagaggagcagggatgtcgttaagtttaaggttcgatgctccaagtatttgtacacgctttgtgtctttgatcctgagaaagccgataaattgaagcaatctcttcctcccggtttgagtgttcaagacctgtanaggtgctgagtgcggcagcgtgcgtttgtttatctttttgttgcctcatgctctagattttgtggcttgcctttatattttggtaattgttatgaggatatgcttgttttttatttgctatgaaaatg

SEQ ID NO: 258263 - DNA, 307 bp, Glycine max
ggttctagtgtgtgattgtttgttgttgtaactcgttcttcttcttttgttgttctgtgtttgtgtttgttttttctctcacctgaaaatgtcttgctgcggtggtaactgtggttgcggaagctcctgcaagtgcggcaacggctgctgatgctgcaagatgtacccagacttgagctacactgagtcaaccaccatcgagaccttggtcatgggagtggcacctgttaatgctcaatttgatggtgctgaaatgggtgtgcccgctgagaaacatggctgcaaatgttggccaaactgctcctgc

SEQ ID NO: 258264 - DNA, 414 bp, Glycine max
gacttcaaaacactcataacacaaagcacaaagcaaaactcatccttgagttaaaaaatggcagcagcttcttccatggctctctcatccccatccttggctggcaaggccgtgaagctgggcccatcagccccagaagtgggaagggtgagcatgaggaagaccgtcaccaagcaggtctcctcaggaagcccatggtacggcccagaccgagtcaagtacttgggcccattctctggcgagcccccgtcctacctaaccggtgagttcccaggcgactacggctgggacactgctgggctttccgcagacccagaaaccttcgccaagaaccgtgaactcgaagtgatccactccaagtgggccatgctcggagccttgggctgcgtcttcccggagtgctgtcccgcaacg

SEQ ID NO: 258265 - DNA, 298 bp, Glycine max
gacttcaggtcacgcagagcaaaccgcagaatttaagcatcatccttgagctaaagaatggcagcagcttcttccatggctctctcagcccgatccttgggtggcaaggctgtgaagctgggccgatcagctccagaatctgggaacggtgagcatgaggaagatcgtcagcaggcaggtctcctcaggaagcccatggtacaagccagaccgagtcaagtatgtgcgcccattctctggcgagccctcgtcctaccgaagcggtaagttcccaggcgactacggttgggatactgct

SEQ ID NO: 258266 - DNA, 294 bp, Glycine max
gaattcaaatcactcagcgcagacagcacagcacaaccctcatccttgagttaatggatggcaccagcgtcctccatggctcgctcatgaccatcgttggctggcaaggccgtcaatcagggcacatcatccccaggactgggaacggtgagcatcacgaaaacagtcaccacgcaagtctcgtcatgaagcccacggtaccgcccagaccgactcaagtacttgggaccattctctggcgagcccccgtcctacctaagccgtgagttctcatgggactacgggtgggacacg

SEQ ID NO: 258267 - DNA, 376 bp, Glycine max
tggggtgtgagagagcgagcgagcgagcagtttcaaacataggatttgggattggtaacgcgagggattgcgctgcgtctcttccgcttctctttcgattcatccgtcattcatctgcgtccattcgagcaagcccatgcgtcagactcacacttagacacatctcaacgcgtatggtccctcacatggcttcacgtcgcatccacaacgagctcaatgacttggataattatctagcaacttcttgtaccgctggtccagtgactgacgagatgttcgattgtcgcgcaccgattatgggtcccgctgatcatccttattctggaaggtgtattcctagtcacttgttacagtcctccggagtattcctttcaaa

SEQ ID NO: 258268 - DNA, 427 bp, Glycine max
  unsure (1)..(427): unsure at all n locations
ggtctgagagaaaccctagctagccacaatgcagatattcgtgaaaaccctaacggggaagacgataaccctagaggtagagtcatcggacacaatcgacaatgtgaaggcgaagatccaggacaaggagggcatcccgccggaccagcagcgcctgatcttcgccggtaagcagctggaggacggccgcaccctcgccgactacaacatccagaaggagtccacgcttcacctcgtcctccgcctccgcggcggcgccaagaagcgcaagaagaagacctacaccaagcccaagaagatcaagcacaagcacaagaaagtcaagctcgccctcctccagttctacaaggtcgacgactccggcaaggtcnagaggctccgcanagaatgccccaacgccgagtgcggcgccgggactttcatggcc

SEQ ID NO: 258269 - DNA, 356 bp, Glycine max
ggcacaagtgagtttgttgatcgagataactagaaacagtgtgatgaaaatgaaggtccttgttttcttcgttgctacaattttggtagcatggcaatgccatgcgtacgatatgttccctctccgaatgaacactggctatggtgcccgtactccggaggtgaaatgcgcaagttggaggcttgctgtggaagcacacaacatctttggctttgacaccattcctgaagagtgcgttgaagcaacaaaggaatacatccatggcgaacaatatagatcagactccaaaacagttaagcaacaagcttacttttaatgccagagagctcgaagtccatcccaaggacacatttgtg

SEQ ID NO: 258270 - DNA, 303 bp, Glycine max
gtggaaggaagcaaatgctaaaggaagtctatttcaaagatttccttcagatttgttgacacagctgaagacagattgtctcgtcctgcacaatcatcgttatgccatatccccacgcaagcttcaatataataccaagttatctgacttttttgaggttctggcaacatctgaggatagagatggaaagactttcgtttccacagcacgtggtaggaaatatcccgtgactgtcaacctatggcaaccagagaaaaatgcttttgaatgggctacatctttgaaagcccctcacacagaaga

SEQ ID NO: 258271 - DNA, 342 bp, Glycine max
ggaggaggaaggaagggagggaagaatagaatgggatctggaagtggaaaacacactggagagttcttcaggagaagggatgcatggaggaagcatccgatgctcaccaatcagctccgccacgccaccccgggccttggcatcgccgtcgtcgccttcggtatctacctcgtcggcgaacaagtctacaataggctctatgctcccgatcctcattcgatttctcacgtgaaagccggggatcaccactaaacgtttggacggacgcactccattccatcatcacttaataagcttgctagcatgttctcgcagcctttaatgtttaaatttcagaccgtg

SEQ ID NO: 258272 - DNA, 407 bp, Glycine max
ccgggtcgacccacgacgtccgaagacgacagaaggggaagtaaagtaaattaagaagatcattaatggcttctcttgcaaccttagctgctgttcaaccagctgcgctcaatggccttgctggaagttccctctctggaactaagctctctttcaagccctctcgccacactgtcaaatccaagaacttcaggagtggtgccgtggtagcaaagtatggtgacaagagtgtgtactttgatttggaggatctgggcaacactacggggcagtgggacttgtatggctcagatgcaccttcaccctacaaccctcttcagagcaagttcttcgagacatttgctgctccattcacaaagaggggattgttactcaagtttctgatattgggaggtggttccaccttg

SEQ ID NO: 258273 - DNA, 309 bp, Glycine max
gcacaagtgagtttgttgatcgagataactagaaacagtgtgatgaaaatgaaggtccttgttttcttcgttgctacaattttggtagcatggcaatgccatgcgtacgatatgttccctctccgaatgaacactggctatggtgcccgtactccggaggtgaaatgcgcaagttggacgcttgctgtggaagcacacaacatctttggctttgagaccactcctgacgagtgcgttgaagcaacagaggaatacatccatggcgaacaatatacatcagactccacaacagttaaccaacaagcttac

SEQ ID NO: 258274 - DNA, 328 bp, Glycine max
gggaagagaagagacactgaggtcgttggcgagaatgggaagaaagaaggggtatgttgagttcgaggagtcgccgccggacgattttgatccggcgaatccgtacaaggacccggtggcgatgctggagatgagggagcacatcgtgagagagaagtggatccaaatcgagaaggccaagatcattagggagaagctccgctggtgctaccgcatcgaaggcgtcaaccacctccagaagtgccgccacctcgtcaaccagtatctcgagtccacccgcggcatcggttggggcaaggacggtcgccacccatctctccacgctccc

SEQ ID NO: 258275 - DNA, 383 bp, Glycine max
atacagcgtcaggcgagaagacgacggggtgggacttcagagttaagttgcgagtataggatgtcaatgcgaaaagatgattctcattgaactcgctgatgtattcacttctatcattctcgcacgattctgacgtagattgctgtgtagtagaatatgcaggtctgactggtcgagcatgatatccctgtgttatgaccttcaaacgtcacatcaaatgaatttgcatacactggtcttgaaatagtcggtgatactccgcgtagtatcatcactgtaatgatacctgtatttgagtcacagtttgatggtctctactggcgtggaatttcggaagcacgtatgtacttaacagtaggttcagttatacaatgtcacactca

SEQ ID NO: 258276 - DNA, 251 bp, Glycine max
agacgacataagtgggcacaagtgagtttgttgatcgagataactagaggcagtgtgatgaaaatgaacgtccttgttttcttcgttgctacaattttggtagcatggcaatgccatgcgtacgatatgttccctctccgaatgaacactggctatggtgcccgtactccggaggtgaaatgcgcaagttggaggcttgctgtggaagcacacaacatctttggctttgatagcattcctgaagactgcgt

SEQ ID NO: 258277 - DNA, 339 bp, Glycine max
gaccaacacaaacaatagtgcatagcgtttttcattgtgcattattcaatggccaccacagcagctctatccggaaccatggtgagcacctccttcatgaggaagcaacctatgacgaccaagagcctaaagacattccccaacgctctttttggtctgaaaggtggacgaggtggtcgtgtaacttgcatggcctcgtacaaggtgaagctcataaccccagaaggagaagtggagtttgcatgcccagatgatgttttcagtgttgacaacgctgaggaagaacgcattgagcttccctactcgtgcatggctggttcctgcgtttcatgtgttggg

SEQ ID NO: 258278 - DNA, 188 bp, Glycine max
cagggagacaacaatcctgcgtcgtcaaagcctaagtttgggacatactggattacctatgggaaagttgttggggtcgttccggaacgtgtaagccctcgaacacaaccatgctattgctaaagttgccaacgtccagcctccgtttgcatatgtacatcaacttgcttcacgaacgcctttccttt

SEQ ID NO: 258279 - DNA, 378 bp, Glycine max
gatctggcagcagaagaacaagtagttgagaactaagaaggagaagcaaatggcttcctcaatgatctcttccccagctgttaccactgtcaaccgtgccggtgccggcatggttgctccattcactggcctcaagtccatggctggcttccccaccagaaagaccaacaatgacattacctccattgctagcaacggtggaagagtgcaatgcatgcaggtgtggccaccagttggcaagaagaagtttgagactctttcctagctgccagaccttgatgatgcacaattggcaaaggaagtagaataccgttcttacgaagggatcgactccttgcttggaattcgagttggagcacggtttcgttaccgcgagca

SEQ ID NO: 258280 - DNA, 380 bp, Glycine max
gatgccacaatggttgtccctcttaggcactttcttgttttctctctcaccctcatatccatcatcttccacacccatggagcgttctctgagcaatcaataatcaagttacccacagaccaaccaagggtagagaaactgacccacttgcattttttctaggacgacatcttatagggcacgaacatcacggtggtgaaaatcatcgagccatcagcgatcgaggttcgtgaagcaactgggtttgtgaccactttcatgatggacaatgttttgaccgagggtccagagctgagctcgatacacgttgggagggctcaggggctgtttggcttggcctctttggaggaccgtggaatggtgatgctcattaaagtggc

SEQ ID NO: 258281 - DNA, 396 bp, Glycine max
gcacaagtgagtttgttgatcgagataactagaaacagtgtgatgaaaatgaaggtccttgttttcttcgttgctacaattttggtagcatggcaatgccatgcgtacgatatgttccctctccgaatgaacactggctatggtgcccgtactccggaggtgaaatgcgcaagttggaggcttgctgtggaagcacacaacatctttggctttgagaccattcctgaagagtgcgttgaagcaacaaaggaatacatccatggcgaacaatatagatcagactccaaaacagttaaccaacaagcttacttttatgccagagacctcgaagtccatcgcaaggacacatttgtgttcagtatagatggcaccgtactctctaatattccatactac

SEQ ID NO: 258282 - DNA, 320 bp, Glycine max
gaggttgaagaagaagaagagagagagagagagagggagagagagagagagggagagagagagagagagaagggtaaggtaaccctagagtggtgaatcgacttcgaaacgatggaaagtgtttctcgaataagaggtggacgcattttcgaaagcctctacaaggtcgttatgcgtcgcaactctgtctatgttacctttgtcatcgctggcgccttccttggagaacgggctgttgattatggagtccacaagctctgggacgcaaatcctgttgggaaacgatatgaagacattcctgtgctatggcaaaggccgtc

SEQ ID NO: 258283 - DNA, 414 bp, Glycine max
gggaaagaacattcaagtactttcaagttcctttgtcaataagcaagagcaatacactgtggaaggagtgcagaatcttggagacaaagcagtgatgtgtcatgggctaaatttcagaactgcagtattttactgccataaagtccgtgaaacaacagctttcatggttccattggtggctggtgatggaaccaaaactcaggcacttgctgtttgccactcagatacttctggaatgaattatcacatgcttcatgaactcatgggagttgatcctggaactaaccctgtttgccatttccttggaagcaaggccattttatgggtacccaatatatctatggacactgcctatcagactaacgttgttgtttaattagtccatgcatctgcatcttgggcaccataagattg

SEQ ID NO: 258284 - DNA, 259 bp, Glycine max
ggttctagtgtgtgattgtttgttgttgtaactcgttcttcttcttttgttgttctgtgtttgtgtttgttttttctctcacctgaacatgtcttgctgccgtggtaactgtggttgcggaagctcctgcaagtgccgtaacggctgccgacgctgcaagatgtacccacacttgagctacaatgagtcaaccatttacctagaccctggtcatgggagtggcacctgttaatgctcaatttcatggtgacgaaatggg

SEQ ID NO: 258285 - DNA, 414 bp, Glycine max
aagaaagaagatcaaaagaaaaaagagaaacaaatggcagcactgggtggctttaccgacatcaccggagcacagaacagcatcgatatcgaaaatctcgctcgctttgctgtcgatgaacacaacaaaaaagagaatgcagttctggagtttgtgagggtgattagtgcaaagaaacaagtggtttctggcaccttgtactatatcactttggaggcaaatgatggtgtgacgaaaaaggtttatgaaactaaggtgttggagaaaccacggttgaacatcaaggaggttcaggaattcaagcccatcactgttgctgttaatcctctttcggtgacggtctagcacatagctaggttatggaagtgactagcttggccgcaagagtaataatatgtatgaactgaataaatg

SEQ ID NO: 258286 - DNA, 343 bp, Glycine max
gaacacttgtattgtctcaagcaaccatggcaatggcaacccaagcctctctcttaaccccacccctctccggtctcaaagccagcgaccgcgcctccgtgccatggaagcaaaactccagcctctccttctccagcccgaagcccctcaagttctccagaacaatcagagcagcagccgccgacgagaccacagaggcaccagcaaaagtataggctgcaccggtcgggttcaccccaccagaacttgacccaaacaccccttccccgatcttcgggggcagcaacggcgggctcctgcgcaaggcacacgttgaggagtcttatgtcattaagtgggactc

SEQ ID NO: 258287 - DNA, 414 bp, Glycine max
  unsure (1)..(414): unsure at all n locations
ggaaacgaagaagccctaactacgcacgcattcgtgagaaaactcaatattcgtcgctcatggcactctcttctcgtctcttttccaaatccaaattgatctatgacagtcaaatacttctacaaaaggagcatgctattccagttcgtcactttgctaaagagtctgcccctcctgcccttaagggagacgagatgctgaagaacatttttgtggaggtgaagaacaaatttgagaccgccataggaatattaaagaaggagaaaatcaccattgacccagaagatccagctgctgtttctcattatgcaaaggtcatgaaaacaattagagagaaggcaagcttattgtcggagtcncaagacatactatccaccattgaaattgagacacaggatattccagatgctcgga

SEQ ID NO: 258288 - DNA, 302 bp, Glycine max
ggaaacgaagaatccctaactacgcacgcagtcgtgagaaaagtcaatattcgtcgctcatggcactctcttcgcgtcgcgtttccaaatcgaagattgatgtatgacagtcaaatacttctacaaaaggagcatgctattccagttcgtgactttgctaaagagtctgcccctcctgcccttaagggatacgagatgctgaagaacatttttgtggaggtgaagaacaaatttgagacgcggatatgaatattacagaaggaaatgatcaggagtgacccagaagatggagctgctgtttc

SEQ ID NO: 258289 - DNA, 376 bp, Glycine max
gaccacattccagaacacatacacatacattgtagtatcacttttgtctcggaatttgttcctttgagttatggcaagcttaaaggttgcatgtgtggttttgatgtgcatggctgtgatgagtgcaccaatgatggtgcaagccgtgtcatgcaatgatgtttctgtggacctagcaacgtgccgatcttacctgatgcaaggtggagatgttccaaaatcgtgctgtagcggagcaaggaacattctgggttctgccagcaccacctttgacaatcaatccgtgtgcaaatgtcatcagcagactgctactaactatggcatcaacgacgagtacgctcaggcaatccccgcccgctgcaatgtcaacgtccct

SEQ ID NO: 258290 - DNA, 381 bp, Glycine max
  unsure (1)..(381): unsure at all n locations
gactcatccttcattaccaagcatatctcatttgaatacattccttgtagtttatactgaaagatgggtttgaagatggcgttactgatcctaggcctttccctcatgctccttttggtctcctctgaggtggcatccacgaatacaaaagaggaggcaaatggagtggatgatgccaaatatcccggtggaagctatggagggggttacccaggtcatggcggtggcggttatcctggccatggtggtggcggttatcctggccatggcggtggtggtggctatcctggtcatggtggtggccaccctggtcatggtggcggctaccctggccgtggtggtggatactgtangcatggctgttgcggtggccggacatac

SEQ ID NO: 258291 - DNA, 316 bp, Glycine max
ttattgcattaccacagatgtggtaacataacgggttttgaagaagaagcagttcatttgatcaactcatatttcatggacctaagtctagctgctaatagactcgcccatcatgccatcaaacttggtggcattggatttggagcctcttctttcggactgtctgctgccattgctgctatttatctgttgagttaggatcgtaaaacctgcaatacatatactctcacagcactacgcagtccatacattttcttcagcatgccttcattaagtttcgatctcctcaagggacatcttggtaaatggattgctg

SEQ ID NO: 258292 - DNA, 187 bp, Glycine max
gatcacatcacatcgcagagagagagagatccatcgatcaattaacttccaatggccgatcagctcaccgacgaacagatctctgagttcaaggaagcctttagcctcttcgacaaggacggcgatggttgtattaccatcaaggaacttgcgactgtgatgcggtcgcttgggcacaacccaactg

SEQ ID NO: 258293 - DNA, 343 bp, Glycine max
gatattccagttagtgcagtcaatggtaaacccgaggttggcgtcaaacctgatgcaaatgaagctaaacagaagaagatagcagatccaagaaagagggatgcaaatggtgaagatgacgattcatccgaatctgattctgatgatgattcaagtgaagataagcccacagcgaatggcgacatacaaagtagtgaacgtgatgatgatagcgatgatgatgaggaggaggagggggatgatgaatctgatgaggagacagccaagaagattgaagcaagcaataagaggggtattgagtcttctaagaaaacacctgttcctgttaagaagacaaagtttg

SEQ ID NO: 258294 - DNA, 360 bp, Glycine max
gattcagattacattgcaaaaatggcatcattcaccatgacagcttccatccttggcggcccagccgtcaccaaccggttggcagtagcaacgcagaggagatcactcgtagtgaatgctgccaaagctgttgaagcggaaaaggtcagttatgacaatgacatggatggtagcaatggaaggaggaacttgatgttcgccgcggcggcggcggctgctgtttgctctgttgctgggatggcagtggcagatgagccaaaaccaggaaccccagcagccaagaaaaagtatgctccgatttgtgtcatcatgccaactgctaggatttgtcgcaattgagggactcggtttttactttac

SEQ ID NO: 258295 - DNA, 278 bp, Glycine max
gatcaggcatcaatttaacaactaattgagaactaatcatgataatcatatggcttcctcaactgatgacgtccccatctgttaccactgtcaaccgttcccgtgccggcattgttgctccattcagtagcctcaactccattgctggcttccccattaaaaagaccaacaatgacattaccatccattgctatcaacggtcgtacaatacaatgcattcaagtgttgacaccaattcgcaatacctagtttgagactctttccttactgccagaccg

SEQ ID NO: 258296 - DNA, 363 bp, Glycine max
ggcagccaaagaaaagaaaatcctcaattttctgagcagccaaacactctctctctgtctctcgaaaattctcagtttgcagagaaaatctgaatcatgtcgtggcaagcgtatgtcgacgatcaccttctgtgtgacatcgaaggtaaccacctcactcacgctgctatcatcggccaagacggcagcgtttgggctcagagtaccgacttccctcagttcaaacctgaggagatagctgccatcatgaatgactttaatgagcctggatcacttgctccaactggattgtatctcggtggcaccaaatatatggtcatccagggtgataccggtgctgtcattcgagggaagaagggtcct

SEQ ID NO: 258297 - DNA, 203 bp, Glycine max
ggttctagtgtgtgattgtttgttgttgtaactcgttcttcttcttttgttgttctgtgtttgtgtttgttttttctctcacctgaaaatgtcttgctgcggtggtaactgtggttgcggaagctcctgcaagtgcggcaaccgctgcggaggctgcaacatgtacccagacttgagctacactgagtcaaccaccaccgaga

SEQ ID NO: 258298 - DNA, 272 bp, Glycine max
gagtgcacaagtgagtttgttgatcgagataactagaaacagtgtgatgaaaatgaaggtccttgttttcttcgttgctacaattttggtagcatggcaatgccatgcgtacgatatgttccctctccgaatgaacactggctatggtgcccgtactccggaggtgaaatgcgcaagttggaggcttgctgtggaagcacacaacatctttggctttgagaccattcctgaagactgcgttgaagcaacaaaggaatacatccatgggcaac

SEQ ID NO: 258299 - DNA, 380 bp, Glycine max
ggtctcaagcaaccatggcaatggcaacccaagcctctctcttaaccccacccctctccggtctcaaagccagcgaccgcgcctccgtgccatggaagcaaaactccagcctctccttctccagcccgaagcccctcaagttctccagaacaatcagagcagcagccgccgacgagaccacagaggcaccagcaaaagtagaggctgcaccggtcgggttcaccccaccagaacttgacccaaacaccccttccccgatcttcgggggcagcaccggcgggctcctgcgcaaggcacaggtggaggagttttatgtcattacgtgggactcacccaaagaacagatctttgaaatgcccactggcggcgccgctatcatg

SEQ ID NO: 258300 - DNA, 389 bp, Glycine max
ggttcttcttcttatttgtaacgaagcaaacgctgccgaattcgttatcgctttgcactagcagctttgaaacccggttcatccgaagcccttcaccgaaccatgtcgaggagaaaggttagagagccaaaggaggaaaatgtgactctgggtccagctgttagagatggtgaacacgtttttggcgttgctcgcatctttgcctccttcaacgacaccttcatccatgtcactgatttgtctggcagggaaacccttgtccgaatcactggtggtatgaaagttaaagctgacagagatgaatcatctccttatgctgctatgcttgcagctcaggatgttgctgccagatgcaagaactgggcataactgctcttcatatcaagctc

SEQ ID NO: 258301 - DNA, 434 bp, Glycine max
ggtccacgacgcgtccgacggcgacagaaggggaccaacaccaaaacaaacccactaagatggcttcctttgtatccttcctagtgctgcttcttgcagcccttatcctcatgcctcaagggcttgctacttactacaaaccaattaagaagccaccagtgtacaagcctccagtgtacaagccaccagtgtacaaaccaccggtttataagccaagaccaccggtttacaagccgaaaccaccggtttacaagccaccatataagaagccaccatacaagagaccaccttatggaaagtaccctccagtagaggacaacacccatgcctaaagcaagcaatgaggtctattatctacttaataaataagaggaactgctttgtgttgtctagcattgtgatttaaaacctcgtagcaatgcatattcttgact

SEQ ID NO: 258302 - DNA, 329 bp, Glycine max
gacaactccataacacaaggcagaaagcaagctcatcctagagttttaaaaatggcagcagcctcctccatggctctctcttccccatccttggctggcaaggccgtgaagctgggcccatcagcccccgaagtcgggagggtcagcatgaggaagaccgtcaccaagcaggcctcctccggaagcccatggtacggcccagaccgcgtcaagtacttgggcccattctctggcgagcccccgtcctacctcactggcgagttcccaggtgactacggctgggacactgctgggctttcgggctgaccagaaaccttcgccagaaaccg

SEQ ID NO: 258303 - DNA, 241 bp, Glycine max
gatagcaaaatcgtttctccaatctaatcaccattgtacaacccaattcccttcgtcgttttcgattaagagagcaatggcacgtagcaagcaaaccgctcgcaagtccaccggaggaaaggctccgaggaagcaattggcatccaaagccgctcgcaagtcagccccggcgaccggcggagtgaagaaaccccaccgcttcaggccacgaactgtggctctgacggagattcgaaaggta

SEQ ID NO: 258304 - DNA, 423 bp, Glycine max
ggataccaacagcagcagtgaaagcaataagtccctccttcctctgccttataactcttgtggcccttttggctggtagcattgaaagtggaccagcaagcgtgaagccaagccattatgctgcaccattcaataggagtgtttttccttctggttttctatttggaataggctctgcagcttaccagatagaaggagcagcagcaatagacggcagaggaccaagtatatgagacacctacactaaacaacaaccagggaagatttgggatcatagtgatggaagtctagcaattgatttttatcagcggtacaagagcgacatagagatggtgaaagaagttgggttgggttcatacagattttccatctcatgggccagaatattccccaggggcaagggaccagttaataccttggggg

SEQ ID NO: 258305 - DNA, 361 bp, Glycine max
  unsure (1)..(361): unsure at all n locations
ggccgaaaaccctaacaacacagacgcagagcgtgatccattgacgaagatggtgcagcgtctcacctaccgcaagaggcacagctgtgccaccaaatccaaccaacacagggtcgtcaaaacccctggtgggaagctcgtttatcagaccaccaagaagagggccagcgggcccaagtgccccgacactggcaagaggattcaggggattccacacttgaggcctgcagagtacaagagatcaaggttacccagaaaccgtaggactgtcaaccgtgcatatggcggagttttgtctggaagtgctgtcanggagaggattatccgagctttcttagttgaagagcaaaagattgtgaag

SEQ ID NO: 258306 - DNA, 266 bp, Glycine max
  unsure (1)..(266): unsure at all n locations
cgggagccaaagaaaagaaaatcctcaattttctgagcagccaaacactctctctctgtctctcgaaaattctcagtttgcagagaaaatctgaatcatgtcgtggcaagcgtatgtcgacgatcaccttctgtgtgacatccgaaggtaacacctcactcacgctgctatcatcnngcaagacggcagcgtttgggctcagagtaccgacttccctcagttcaaacctgaggagataactgccatcatgaatgactttaatgacc

SEQ ID NO: 258307 - DNA, 304 bp, Glycine max
agatccaatccaattgaattctccagagagaagaagaaacttaatcgatcatcacttcacttcactaatacatcatggcagacgagacccagaacaagtatgagagctctgaggttgaggtccaggatcgtggtgtttttgactttctcggtaagaaaaaggatgaagaagacaagcctcatcctcaggaggaggtcatcgccaccgagtttcaaaaagtcactgtctcagaccaaggagagaacaagcacagcctcttagaaaagcttcaccgatctgacagcagctctagctcttcaagtga

SEQ ID NO: 258308 - DNA, 250 bp, Glycine max
  unsure (1)..(250): unsure at all n locations
gaatagaaatagaactgtcttttcatatagatatcccttcaacacaacataggtcatcgaagggatctcgaagacccacaacgcacgaaagccgggatctttcagaaaatggattcctattcgaagggtgcataaccgcatggataagctcacactaacccgtcaatttggggtccaattcggttccttangaggtatcgggaagggaatttggaatggtataatatcgattcatacagatacagaagaa

SEQ ID NO: 258309 - DNA, 356 bp, Glycine max
ggcccgaactccttcgacgactgtcttccccaatcgcctgcgtctctctctgaattgacaagcttaaagacaaagtcttaaatggctggtccaaggattgcccatgctaccttgaaaggtccgagtgtggttaaggagataataattggaataacacttggcttagctgctggtagcgtgtggaagatgcaccactggaatgaacagaggaaaaccaggaccttctacgatttactggaaaagggtgagatcagtgttgttgcagaggaacagtgaaaatgttcttgttttgttgcctatgctctccatttataggcttttttttcccatgctatattcaattggctcttcaactg

SEQ ID NO: 258310 - DNA, 416 bp, Glycine max
gaaggtgcaagagtttgttgtgagctataagctagtttatcgtgaggagaatatgaagttgtttgttttctttgttgctgcagtagtgtttgggagcatggccatgccatggcgcaggctaccaaaggttccctctccgaatgaaaactggctatggtgagcgttcttcggaggtaaaatgcgcaagttttaggcttgctgtggaagcaacaacatccgagcctttaaaaccattcctgaagagtgcgtcgaaccaacaaaggactacattaatggcgaacaatttagatcagactctaaaacagttaaccaacaagctttcttttatgctagtgaacgcgaagttcatcacaacgacatatttatattcggcatagattacaccgtactctctaatatcccatactatgaaaaac

SEQ ID NO: 258311 - DNA, 343 bp, Glycine max
gatctggcagcagaagaacaagtagttgagaactaagaaggagaagcaaatggcttcctcaatgatctcttccccagctgttaccactgtcaaccgtgccggtgccggcatggttgctccattcactggcctcaagtccatggctggcttccccaccaggaagaccaacaatgacattacctccattgctagcaacggtggaagagtgcaatgcatgcaggtgtggccaccagttggcaagaagaagtttgagactctttcctacctgccagaccttgatgatgcacaattggcaaaggaagtagaataccttcttaggaagggatggattccttgcttggaa

SEQ ID NO: 258312 - DNA, 313 bp, Glycine max
  unsure (1)..(313): unsure at all n locations
gaagacgacagaaggggacaccaacaccaaaacaaacccactaagatggcttcctttgtatccttcctagtgctgcttcttgcagcccttaacctcatgcctcaagggcttgctacttactacaaaccaattaagaagccaccagtgtacaagcctccagtgtacaagccaacagtgtacanancaccggtttatangcannaacancggtttacaagccgaaaccaacggtttacaggccaccatataagaagcaacatacaaganacaccttatggaaagtacctccagtagaggacaacacccatgccta

SEQ ID NO: 258313 - DNA, 119 bp, Glycine max
gttatgagtcctaactatatagctattttccattatatttttgggtagcgataaatgtgtaaaagaaagagtatattgataaagatattttttccaaaatcaaaagagcgattaggtcg

SEQ ID NO: 258314 - DNA, 344 bp, Glycine max
  unsure (1)..(344): unsure at all n locations
ggtgtgagtgaagaagcagagggagtagcggcattaaaaatgcagatcttcgtgaaaactctgacagggaagactataaccctcgaggtcgagagcagcgacaccatcgacaatgtcaaggccaagattcaagacaaggaaggcattcctccggatcagcagcgtttgattttcgccggaaagcagcttgaagatggaaggaccctggccgattacaacatccagaaggaatcaacccttcatctcgtcctcaggcttcgtggtggcatcattgagccttcactcatggctttggctcgcanatacaatcatgacaagatgatttgccgcaagtgctacgcccg

SEQ ID NO: 258315 - DNA, 317 bp, Glycine max
gactgcactgaacgaaccgtagttgttccgtttcagccatggtggataacaatctcttcgaggatatatttaaggtcgaaaaattaaaccccgatgacaaaaaattattcgataaagtcactcgcattgaagcaagaagtgaaaagtttgacatgtttatgcacctggacattaattccgagatatatccgttaaaggttggtcagaagtttgctcttgtgcatgtttcaacacttaatcctgatggaactccagacactggatattatacccagattagtcgacaatcactggccaacaattttgaatatgtcatg

SEQ ID NO: 258316 - DNA, 378 bp, Glycine max
gacaactgaacaagataagctatccatagcagccaaagagatgaagagtaccttgttcgccctctttctactttgtgccctcacctcttacctaccttcagccaccgctggtgatgtggtcgacactgatggtaatcctgttgaaaatggaggcacatactttgtgttgccaactataatattaaacggcggtggaatagaatatgccacatttggaaatgaaacttgccctgtcactgttgcgcaatctcgcgatcagttctgcaagggctttccgataaccatttcatccccagcccgaatccgtcacatcagcgaaggccttagtttgaacattgggttcactttcgcatccccgtgttccccgcttctgagtgg

SEQ ID NO: 258317 - DNA, 221 bp, Glycine max
agggggacaagtgagtttgttgatctaaaaaaccaaaaacagtgtgatgaaaataaaaggccctgttttcctccctgccacaaattttggaacaaagggaaaccacacctaacaaaaatttcccccccccaaaaaaaaaagggatagtggcccctctcccgagggggaaaactccaaatttgggggttttgtggaaaaacacaacaaaatttgggttttga

SEQ ID NO: 258318 - DNA, 290 bp, Glycine max
ggcagagcgtttttcattgtgcagtattcaatggccaccacagcagctctatccggaaccatggtgagcacctccttcatgaggaagcaacctatgacgaccaagagcctaaagacattccccaacgctctttttggtctgaaaggtggacgaagtggtcgtgtaacttgcatggcctcgtacaaggtgaagctcataaccccagaaggagaagtggagtttgaatgcccagatgatgttttcattgttgacaaggctgaggaagaatgcattaacttccctactcgtgc

SEQ ID NO: 258319 - DNA, 310 bp, Glycine max
gctgtggaagtaggtcaacatttctattggcaaatagggagtttccaagtacatgcccaagtacttattacttcttgggttgtaattgctctcttattggtttcagccattctaattattcgaaatctgcaaaccattcccgctttcggtcagaatttctttgaatatgttcttgaattcattcgagacgtgagcaaaactcaaattggagaagaatatggtccgtgggttccttttattggaactttgtttctatttatttttgtttctaattggtcggggactcttttaccttgggaaatcatacaat

SEQ ID NO: 258320 - DNA, 135 bp, Glycine max
aggggcacaagtgagtttgttgatcgagataactagaaacagtgtgatgaaaatgaaggtccttgttttcttcgttgctacaattttggtagcatggcaatgccatgcgtacgatatgttccctctccgaatgaa

SEQ ID NO: 258321 - DNA, 347 bp, Glycine max
agacgacagaagggggagggttattggacacattcttcagcgactgcgtttttggatcggaacctcttctgcggcgtagcaatgggacactccaacgtttggaactctcacccaaaaaactacggtcctggttctcgcacttgccgtgtgtgtgggaatccacatggactgatcaggaagtatggccttatgtgctgcaggcagtgcttccgtagcaatgccaaggaaattggcttcatcaagtatcgctaaaagagcagttgtcaactacggagcaatattgtgttctggcactaagatgttttgaggatgttatgtttgaagaaacttgagactttccttttttc

SEQ ID NO: 258322 - DNA, 195 bp, Glycine max
ggggggaacgtgcaagagtttgttgtgagctataagctagtttatcgtgaggagaataagaagttgtttgttttctttgttgctgcagtcattttggtaacatggccatgccatggcgcaggccaccaaaagttccctcccccaatgaaaactggctatggtgagcgttcctccgaagttaaatgccccagtttt

SEQ ID NO: 258323 - DNA, 287 bp, Glycine max
gatctggcagcagaagaacaagtagttgagaactaagaaggagaagcaaatggcttcctcaatgatctcttccccagctgttaccactgtcaaccgtgccggtgccggcatggttgctccattcactggcctcaagtccatggctggcttccccaccaggaagaccaacaatgacattacctccattgctagcaacggtggaagagtgcaatgcatgcaggtgtggccaccagttggcaagaagaagtttgagactctttccttactgccagaccttgatgatgcac

SEQ ID NO: 258324 - DNA, 146 bp, Glycine max
gaaggtgcaagagtttgttgtgagctataagctagtttatcgtgaggagaatatgaagttgtttgttttctttggtgctgcagtagttttggtagcatggccatgccatggcgcaagctaacaaaagttccctctccgaatgaaaa

SEQ ID NO: 258325 - DNA, 341 bp, Glycine max
gattgccagttacattcccttcacaagattctcacaaacaactcttgagaaagaaagaatggctgccaacacattgatgagttctgccatctcagccttcccatctctcctttcctcctcaaaatccagatttgccgcagcagttcctctttccagctttgttgtcaccaatgcctcttcttctcgcttttccatgagtgctgattggatgcctggccagcctagacccccctaccttgatggttcagcacctggtgactttggattcgaccctcttcgtcttggtgaagtatcagagaatcttgagaggttcacagagtcagaactcattcactgcagat

SEQ ID NO: 258326 - DNA, 228 bp, Glycine max
  unsure (1)..(228): unsure at all n locations
cgtattaagcaacaaaatccttcggggagttgaaaataaccgtaaatccggggattcccgatataggtcaacctttcaaactgctgctgaatccacgggcaggcaaaaaacaacctgttgaactgaaccaccttattacccaaaggaaaggaagccaccncaaaaaaacaaaaacaaaaaagaaggccggccgccctaaaggatcaaaccttacttacccttgcatgc

SEQ ID NO: 258327 - DNA, 290 bp, Glycine max
atcataaaaaatacttagttaaaaaaaacgaaaatactgtattgcaattgtattgcaattcgaaacgaaatatagttcgagatcattgtattatttttgtactatattaatcttaatcttaattggaacgaaatctttcaaaattggatttctaattcttaatttatattttcgttttttcgttcttttctttttcttagattataatccgaaaacaaaagagttaagtgaattaaaaacccaagggaggttcatggccaaaggtaaagatatccgagtaattgttattt

SEQ ID NO: 258328 - DNA, 240 bp, Glycine max
ggcagtgatagagataagaaaatgtggcttgtgcagctctcaaccccatttctgaacggacatggtcattccaccacccttctctccaagcacagttcggcggtgactcagacccactgggccccaccgagtttcctgcctcaaatcaatgcgatgaagacaatgcaggggagagtggtgtgctccaccagcgacaaaacggtggcagtggaggtggtgcggctggcccctcacccaaag

SEQ ID NO: 258329 - DNA, 369 bp, Glycine max
gacagcatatcaataatctattttatactatacccacattttgataattatttttctagttgataagccatggctactcgaggaaagcttgaggttgacgttgatctcaagtctaacgcagacaagtactggcaaacccttaggaactccactgaaatattccccaaggccttccccaatgattacaaaagcattgaagttcttgagggtgatggcaaatcacctggttctatccgccacataagttatggtgaaggttcaccacttgtgaagtcatcctttgagaagattgaggctgttgatgaagaaaagaaggtagtgtcgtacactatcattgatggagagctcctccagcactacaaaacattc

SEQ ID NO: 258330 - DNA, 168 bp, Glycine max; identical to SEQ ID NO: 237829

SEQ ID NO: 258331 - DNA, 150 bp, Glycine max
ggcacaagtgagtttgttgatcgagataactagaaacagtgtgatgaaaatgaaggtccttgttttcttcgttgctacaattttggtagcatggcaatgccatgcgtacgatatgttccctctccgaatgaacactggctatggtgcccg

SEQ ID NO: 258332 - DNA, 385 bp, Glycine max
gagataaaagaagacgaagttgcatcttatctgcaacactccgtatccacttcgctggtaataagagaagagaagagagagagagagagagagggcgtggagaatgttaagtctctcagttgcttctccttcttcttcaaccatttcctttctcccaaagccattcaatggcattcagctccgtcgctctgccacatgctccattccacccacgaaatgcagcgcttcggtgccagtggtgatgatgtctaaaaggacggaggaattgaaggaaattagacaaatgaccaccgaacaaattaacgaaaaggttgtcgaccttaagggcgagcttgtcatgcttcgccttcagaaatcggctcgcaaccagttcaagtccagcgaa

SEQ ID NO: 258333 - DNA, 225 bp, Glycine max
ggttctagtgtgtgattgtttgttgttgcaactcgttcttcttcttttgttgttctgtgtttgtgtttgttttttctctcacctaaaaatgtcgtgctgcggtggtaactgtggttgcggaagctcctgcaagtgcggcaactgctgcggacgctgcataatgtatccagacatgagctacactgagtcaaccaccaccgagacctttgtcatgtgagtggcacc

SEQ ID NO: 258334 - DNA, 352 bp, Glycine max
ggactgaaaaaaggttttagatcgtaaaaactaatcactacaaaaacaagaaatatcgaagatggctctgcccaaagctaaggaaatcgtgtcgtcaaattccgtcgtcgttttcaccaaaacctattgccctttctgcgtcaatgtgaaaaacctcttcggtgacctcggtgccaattacaaggccatcgaactcgacactgaatccgatggaaaagagctccaagcagcattagttgagtggacggaccagcgaaccgtgcctaatgtgtttattggtggaaaccacattggtggctgtgactcaacaactgccctgcacactcaggggaagctggttcctctgctgata

SEQ ID NO: 258335 - DNA, 308 bp, Glycine max
gattgagtacaacttcacattttagaagaataccccctcttttgctgcatcagaggagttgtaaattaagagcatggctgcacaagctcttgtatcatcatcttctcttaccttctcagcggaggctgcaagacaaagtcttggaccaagatcactccaatctccatttggcttctccagaaaagcctcctttcttgttaaggcagctgctaccccccctgtcaagacaagcctttgtggtttgcatcaaagcaaagtctttcttacttggatggcagccttccgggtgactatggatttgaccctct

SEQ ID NO: 258336 - DNA, 88 bp, Glycine max
gggcagcagaagaacaagtagttgagaactaagaaggagaagcaaatggcttcctcaatgatctcttccccagctgttaacactgtca

SEQ ID NO: 258337 - DNA, 84 bp, Glycine max
  unsure (1)..(84): unsure at all n locations
gtcccttcggggacatccgataaaattggaacgatacagagaagattagcatggcccctgcgcaaggatgacacgcacaantcg

SEQ ID NO: 258338 - DNA, 343 bp, Glycine max
gatccttcgtccagctagcaccacattcacctgaggcttccaaagcaatggcttcccttgcggcatccactgctgctgcttcccttggcatgtcagaaatgcttggaaaccccatcaacttcagtggtgccacaaggccagctccatctgcttctagtcctgcctccttcaagactgtggctcttttctccaaaaagaaggctacaccaacacctccaaaaaaagctgctgctgctgctcctgccaatgatgagcttgccaagtggtatggtcctgacagaaggatcttcttgcctgagggtctcttggaccgatccgaaatcccagagtacttgaccggaga

SEQ ID NO: 258339 - DNA, 333 bp, Glycine max
gatctggcagcagaaaaacaagtagttgagaactaagaagaaggaagtggcttcctcaatgatctcctccccagctgttaccaccgtcaaccgtgccggtgccggcatggttgctccattcaccggcctcaaatccatggctggcttccccacgaggaagaccaacaatgacattacctccattgctagcaacggtggaagagtacaatgcatgcaggtgtggccaccaattggcaagaagaagttcgagactctttcctacttgccagacctcgatgatgcccaattggcaaaggaagtcgaataccttctaaggaaaggatggattccttg

SEQ ID NO: 258340 - DNA, 332 bp, Glycine max
gggcagcagaagaacaagtagttgagaactaagaaggagaagcaaatggcttcctcaatgatctcttccccagctgttaccactgtcaaccgtgccggtgccggcatggttgctccattcactggcctcaagtccatggctggcttccccaccaggaagaccaacaatgacattacctccattgctagcaacggtggaagagtgcaatgcatgcaggtgtggccaccagttggcaagaagaagtttgagactctttcctacctgccagaccttgatgatgcacaattggcaaaggaagtagaataccttcttaggaagggatggattccttg

SEQ ID NO: 258341 - DNA, 299 bp, Glycine max
gagatttctgagagaaaggaaagggtgtgagaagagaatggagagtaaagaggaagatgttaacgttggagcaaacaagttctcagaaaggcaaccaattggtacagcagctcagggtggtggtgacaaggactacaaggaggcacccccagctcctttgtttgaacctggtgagctcaaatcatggtccttctacagagctggaattgctgagtttgtggcaactttcttgttcctctacattaccatcttaactgtcatgggtgtcaacaggtcaccctccaagtgtgcctctgttg

SEQ ID NO: 258342 - DNA, 371 bp, Glycine max
gaaaaacagcagagagaagagaaggtgtagacaaacacaatctctaatggcactcaggatgtgggcttcttccactgccaatgcacttaaagtctcttctacctccagacctcatctctcgcatcctttttctttctccagatgcttgtcttccgtcttggatggacttaagtatgcagattcacacgaatgggtcaagcacgaaggctcagtcgccaccattggtatcactgaccatgcccaggaccatcttggagaggttgtgtatgtggagctgccacaatcaggtggcacagttacccagaagtctggcttcggagccgttgaaagtgttaaagcaacaagtgacataaactctccaatctccgggg

SEQ ID NO: 258343 - DNA, 369 bp, Glycine max
ggttctagtgtgtgattgtttgttgttgtaactcgttcttcttcttttgttgttctgtgtttgtgtttgttttttctctcacctgaaaatgtcttgctgcggtggtaactgtggttgcggaagctcctgcaagtgcggcaacggctgcggaggctgcaagatgtacccagacttgagctacactgagtcaaccaccaccgagaccttggtcatgggagtggcacctgttaaggctcaatttgagggtgctgaaatgggtgtgcccgctgagaacgatggctgcaaatgtggactaaactgctcctgcaacccctgcacttgcaagtgaggtgttgggagagcaagcttcaagcagagatagcccttaat

SEQ ID NO: 258344 - DNA, 336 bp, Glycine max
gatctggcagcagaagaacaagtagttgagaactaagaaggagaagcaaatggcttcctcaatgatctcttccccagctgttaccactgtcaaccgtgccggtgccggcatggttgctccattcactggcctcaagtccatggctggcttccccaccagaaagaccaacaatgacattacctccattgctagtaacggtggaagagtgcaatgcatgcaggtgtggccaccagttggcaagaagaagtttgagactctttcctacctgccagaccttgatgatgcacaattggcaaaggaagtagaataccttcttaggaagggatggattccttg

SEQ ID NO: 258345 - DNA, 326 bp, Glycine max
cagattggcaagaaaaggctggggaggaggttttccaagtgttcgggaatgaaaagccagattatgaaaggattggtcaactgaaaattgtgtcgatgattctacaggagagtctcagattatacccaccagtggttatgttcgctcggtatcttcgtaaagatacaaaacttggagagcttacaattcccgcaggagtggagcttgttgtacctgtgtcaatgctacaccaggataaggagttttggggagatgatgccggggaattcaacccagaaagattctcggaaggagtatcaaaggcaacaaaaggcaagctttcctac

SEQ ID NO: 258346 - DNA, 345 bp, Glycine max
agaagggggtcgctactaagagttgctgcttcttcagccactccgcacctcgcagcctctgtgccctcaacaaccatggctgaaatcgaaactaccgttccagatcccacccaaatcgacgtcaaactcttcaatcgctggagcttcgaggatgttgaggttaatgatatgtctctggctgattacattggagtgtccccatcaaagcatgctacatatgttcctcacactgctggtaggtactcagtgaagaggttcaagaaagcgcagtgccccattgttgagaggctcaccaactctctgatgatgcacgggaggaacaatggaaagaagctcatggctgtc

SEQ ID NO: 258347 - DNA, 339 bp, Glycine max
  unsure (1)..(339): unsure at all n locations
gattacctataatttcagagctagctagttcacagcttcagttcgtttttgttgatcctgtgaacttatggctgacggggtggttctgttggatacatgggccagcatgtttgggatgagggttaggattgcattanctgaaaagggtgttgagtatgaatacaaggaagaaaatctcaggaacaagagtcctttgcttttgcaaatgaacccaattcacaagaaaattccagttctgatccataatggcaaaccaatttgtgaatctgcaattatagtgcagtacattgatgaggtctggaatgataaagctccaatcttgccctcctgaccttatga

SEQ ID NO: 258348 - DNA, 358 bp, Glycine max
gacaagtgagtttgttgatcgagataactagaaacagtgtgatgaaaatgaaggtccttgttttcttcgttgctacaattttggtagcatggcaatgccatgcgtacgatatgttccctctccgaatgaacactggctatggtgcccgtactccggaggtgaaatgcgcaagttggaggcttgctgtggaagcacacaacatctttggctttgagaccattcctgaagagtgcgttgaagcaacaaaggaatacatccatggcgaacaatatagatcagactccaaaacagttaaccaacaagcttaactttatgccagagacctcgaagtccaacccaaggacacatttgtgttcag

SEQ ID NO: 258349 - DNA, 401 bp, Glycine max
gaccctagctagggtttctgagtttatgtggttgcgcctctgcctgtaagagtgaaaaaaccttcgcgtttccttctctcaagtctcaagagatttcatcatggctccaaagaaggacaaggctccaccaccttcctccaagcccgccaaatctggcggtggcaagcagaagaagaagaagtggagcaagggaaagcaaaaggagaaggtgaataacatggtgctgtttgatcagggcacctatgataagctcctttctgaagctcccaaattcaagctcatcactccttccattctttctgatcgtctgaggattaatggatcacttgcaaggaagggctataaacaattgattggcaggggttcaatcagggaggtgtccggccaatgcagccagcaaa

SEQ ID NO: 258350 - DNA, 369 bp, Glycine max
gagagcgaaacggcagcacgcgcaaaaatggtgaagtttctgaaaccaaacaaagccgtcatcgtccttcagggacgctacgccggcaaaaaagccgtgatagtgcgaaccttcgatgaaggcacgcgcgagcgcccctacgggcactacttggtggcagggataaagaagtaccctgcgaaggtgatcaagaaggattcggccaagaagacggccaagaagtcgcgtgtgaaggcgttcgtgaagctcgtgaactaccagcacctcatgcccacgcgctacacactcgatgtcgatttgaaggacgcggttacccccgacgtgctccaagcaaggataaaaacgttactgctctcaaggagaccaaga

SEQ ID NO: 258351 - DNA, 318 bp, Glycine max
gagcgccaatgtttttttcagaggagtttcatcttgtaatcaaaagagtttatcttatagtaagaaatcgatgtcttactccattttaaggaacaaaacaagagaacaatagcctgacaaagggtttagccataaaatcgaatccatcattgatttgagatattgataaggtgaatactcatttctcgtcaatgctaggcataatgcgggtatagggacctaaaaaagattatcttttcttcctatcttatgaactttaaggtgtatgaagtgtcatttcctatcctagattttaattttagtaggtagataaagagt

SEQ ID NO: 258352 - DNA, 356 bp, Glycine max
ggaaagtaaagtcgttggtaggatcatcatctctttgagttgccattgaagaagaagctcagatcggaaaaattcacctctccaatcccaatcccatcgttgcaaatgatccgattcattctgttgcagaacaggcagggcaagacccgtcttgccaaatactacgttcctctcgaggactccgagaagcacaaggtcgaatacgaggttcatcggctcgtcgtaaacagagaccctaaatacacaaatttcgtcgagtttcgtacgcacaagataatatacaggcgatatgctgggttatttttctcactctgtgttgatatcactgataatgagttggcgtatttagagtgcat

SEQ ID NO: 258353 - DNA, 258 bp, Glycine max
ggcacaagtgagtttgttgatcgaaataactaaaaaaagtgtgatgaaaatgaaggtccttgttttcttcgttgcaacaattttggtagcatggcaatgccatgcgtacaaaatgttccctccccgaatgaaaactggctatggggcccgtaccccggaggtgaaatgcccaatttggaggcttgctgtggaaaaaaaaaaaatctttggctttgagaacattcctgaaaaatgcgttgaagcaacaaaggaataaat

SEQ ID NO: 258354 - DNA, 303 bp, Glycine max
aggtacggctgcgagaaaacaaaaaaaggggcacaagtgagtttgttgatcgagataactagaaacagtgtgatgaaaatgaaggtccttgttttcttcgttgctacaattttggtagcatggcaatgccatgcgtacgatatgttccctctccgaatgaacactggctatggtgcccgtactccggaggtgaaatgcgcaagttggaggcttgctgtggaagcacaccacatctttggctttgagaccattcctgaagagtgcgttgaagcaacaaaggaatacatccatggcgaacaatat

SEQ ID NO: 258355 - DNA, 146 bp, Glycine max
caacatacgtcatcgaaaggatctcgatttaccaccaatgcacgaaagccgggatctttcacaaaatggattcctaggcggggggtgcataaccgcatggatcatctcacacgagcccgtcactttgggatccaattcggttcctt

SEQ ID NO: 258356 - DNA, 429 bp, Glycine max
gagatgcattggggcatgcttttaatttcctagatctcccaaacaaattgtagcataagtcccatggccaaagagactagtgttgtttatctatatcccagcaaatcacaagtttggggtgagaattttgatcataaaaaacttgtaataacaacactagctgctaatggaaagaaggaggagagtaatggagcacctaatgacacatatcctgcgtttcccgggtggtatgctgatgtttcctggccaggagaagcacacacatataaaatagaaaagattctattccacgggaaatcagaattccaagagcttcttgtatttgagtcttctagacaaggcaaggttgcaattcttgatgggcatatccagctgacagaaaacgatgaatttgcttaccaagagatgctcactcagcttgcactctgt

SEQ ID NO: 258357 - DNA, 379 bp, Glycine max
gatctggcagcagaagaacaagtagttgagaactaagaaggagaagcaaatggcttcctcaatgatctcttccccagctgttaccactgtcaaccgtgccggtgccggcatggttgctccattcactggcctcaagtccatggccggcttccccaccaggaagaccaacaatgacattacctccattgctagcaacggtggaagagtgcaatgcatgcaggtgtggccaccagttggcaagaagaagtttgagactctttcctacctgccagaccttgatgatgcacaattggcaaaggaagtagaataccttcttaggaagggatggattccttgcttggaattcgagttggagcacggtttcgtgtaccgtgagcac

SEQ ID NO: 258358 - DNA, 450 bp, Glycine max
gggtccagccacgcgtccgaagacgacagaagggggcacaagtgagtttgttgatcgagataactagaaacagtgtgatgaaaatgaaggtccttgttttcttcgttgctacaattttggcagcatggcaatgccatgcgtacgatatgttccctctccgaatgaacactggctatggtgcccgtactccggaggtgaaatgcgcaagttggaggcttgctgtggaagcacacaacatctttggctttgagaccattcctgaagagtgcgttgaagcaacaaaggaatacatccatggcgaacaatatagatcagactccaaaacagttaaccaacaagcttacttttatgccagagacctcgaagtccatcccaaggacacatttgtgttcagtatagatggcaccgtactctctaatattccatactacaaaaaacatggatatgggg

SEQ ID NO: 258359 - DNA, 282 bp, Glycine max
gaggcgcaccgacgaggaggtgatgtcaatgttcgaggagtggctggtgaaacacgacaaggtgtacaacgcgctcggtgagaaggagaagaggtttcaaatcttcaagcacaatctgcgcattatcgatgaacgaaactctctgaaccgaacctacaagttgggactcaacgtgttcgctgatctcaccaatgcggagtacagagccatgtacctgcgaaccttggacgagggtccgaggttgggcttggatacgccgccaagaaaccactacgtgccacg

SEQ ID NO: 258360 - DNA, 236 bp, Glycine max
gactcatctcttacaacgaaaccctctccatcttgttctatctgtgacgagcaccatggcctcaagagcagtgttattgttggctatgtgtgtgcttccggcgatggttgtggccattcgcccagcaaagaaccctttttgcgtgaagggtcgtgcctactgtgacccttgccgtgctggttttgagacctcagctaccacctacattgctggtgctgagattatgttgcaatgca

SEQ ID NO: 258361 - DNA, 411 bp, Glycine max
gagcgccaatgtttttttcagaggagtttcatcttgtaatcaaaagagtttatcttatagtaagaaatcgatgtcttactccattttaaggaacaaaacaagagaacaatagcctgacaaagggtttagccataaaatcgaatccatcattgatttgagatattgataaggtgaatactcatttctcgtcaatgctaggcataatgcgggtatagggacctaaaaaagattatcttttcttcctatcttatgaactttaaggtgtatgaagtgtcatttcctatcttagattttaattttagtaggtagataaagagtccatttaacttaagttgatctaggccaaaagcagacctacgtcaagataatccttctttgaaacactttggtaatgctcttagattgttatct

SEQ ID NO: 258362 - DNA, 339 bp, Glycine max
ggcacaagtgagtttgttgatcgagataactagaaacagtgtgatgaaaatgaaggtccttgttttcttcgttgctacaattttggtagcatggcaatgccatgcgtacgatatgttccctctccgaatgaacactggctatggtgcccgtactccggaggtgaaatgcgcaagttggaggcttgctgtggaagcacacaacatctttggctttgagaccattcctgaagagtgcgttgaagcaacaaaggaatacatccatggcgaacaatatagatcagactccaaaacagttaaccaacaagcttacttttatgccagagacctcgaagtccatcc

SEQ ID NO: 258363 - DNA, 301 bp, Glycine max
gagcgccaatgtttttttcagaggagtttcatcttgtaatcaaaagagtttatcttatagtaagaaatcgatgtcttactccattttaaggaacaaaacaagagaacaatagcctgacaaagggtttagccataaaatcgaatccatcattgatttgagatattgataaggtgaatactcatttctcgtcaatgctaggcataatgcgggtatagggacctaaaaaagattatcttttcttcctatcttatgaactttaaggtgtatgaagtgtcatttcctatcttagattttaatttta

SEQ ID NO: 258364 - DNA, 328 bp, Glycine max
gagagcgaaagagatgtcgttggtttcaagcatgttcgggtgtggagtggtgatggcggcgtcgcaagcaatgggaattggaaggagaggcgatggtggattgacgatagtgtgttcgtctaggccgcagaagaaagcgacggcgcatcacatgaagactcggcctcggaagacgcaggcatgggatagaaaccgcaagcccaccatctacgatccactccctcctcttcctcctgattggaccctcgttattcccgctgacgcttcctctgctcccgttacgcctccgcctccaactcgctctgcctagtcactctctcggtactct

SEQ ID NO: 258365 - DNA, 252 bp, Glycine max
agaagcaaacttaaagaaggctggctaccacacatgggaaaaattaattctcaaggatccacaagatccttccactccaaatgcagtttcagggagaacagcagcgagagagaaactgataaggcagggatacaacattgctgggatcattccagaccaatggagcgatctccgcggaggccacataggcgaaagcaagacctttaatcttcctaatcgcctgcacgacactcagtacttccttcacctccc

SEQ ID NO: 258366 - DNA, 329 bp, Glycine max
gggatttccaaagtttttaatagagggtaagtctcaaaaaatcgaagaattacagacgaatatgcaaaaaaaactgaattgtgtgaatcgaaaactaaacattgctattgtaaaagttgcaaatgcttataaacaccctaatattattgcagaatttatagctggacaattaaagaatagagtttcgtttcgtaaagcaatgaaaaaagctattgaattaactgaacaggcgggtacaaaaggagttcaagtacaaattgcaggacgtatcgacggaaaagaaattgcacgtgttgaatggatcagagaaagtagagttcctctacaaa

SEQ ID NO: 258367 - DNA, 372 bp, Glycine max
gacaccaacaccaaaacaaacccactaagatggtttcctttgtatccttcctagtgctgcttcttgcagcccttatcctcatgcctcaagggcttgctacttactacaaaccaattaagaagccaccagtgtacaagcctccagtgtacaagccaccagtgtacaaaccaccggtttataagccaaaaccaccggtttacaagccgaaaccaccggtttacaagccaccatataagaagccaccatacaagaaaccaccttatggaaagtaccctccagtagaggacaacacccatgcctaaagcaagcaatgaggtctattatctacttaataaataagaagaactgctttgtgttttccagcaatgtgat

SEQ ID NO: 258368 - DNA, 373 bp, Glycine max
ggatagagataagaaaatgtggcttgtgcagctctcaaccccatttctgaacggacatggtcattccaccacccttctctccaagcacagttcggcggtgactcagacccactgggccccaccgagtttcctgcctcaaatcaatgcgatgaagacaatgcaggggagagtggtgtgctccaccagcgacaagacggtggcagtggaggtggtgcggctggcccctcacccaaagtacaggaggcgcgtgaggaagaagaagaagtaccaggcccacgaccccgataaccaattcaaagtcggcgacatcgtccagctccagaagaccaggcccatcagcaagaccaaggcctttctcgcactccccgttccc

SEQ ID NO: 258369 - DNA, 229 bp, Glycine max
gaaggtgcaagagtttgttgtgagctataagctagtttatcgtgaggagaatatgaagttgtttgttttctttgttgctgcagtagttttggtagcatggccatgccatggcgcaggctaccaaaggttccctctccgaatgaaaactggctatggtgagcgttcttcggaggtaaaatgcgcaagttttaggcttgctgtggaagcacacaacatccgagcctttaaa

SEQ ID NO: 258370 - DNA, 248 bp, Glycine max
ggcaagtgtgagtgatatttgagcttaaaccctagccgctcttctcttcattcttcactttggaaacaatcataatggcgttctgtaataaggttggaaatgtcttgaggcagggtgctgctcgcagcacacatgcccctgttgcgtccatgcttaattacatccgctgcatgtcttcaagcaagcttttcattggaggcctttcatatggagttgatgaccagtctcttaaggatgcattttctggc

SEQ ID NO: 258371 - DNA, 314 bp, Glycine max
gacacttcgctagatccagccccatcatggcttcagagaagcaagcggctcttgccgtcactccctctgatgctgatgctcctaccatatttgacaagatcatcaataaggagattccttctactgtggtttatgaggatgacaaggtgcttgccttcagggacataactcctcaagctcctacacatattcttatcattcctaaattcaaagacgggttaagtggtctatccaaggctgaggagaggcactttgagattcttggccgccttctgtacactgccaagctggttgcgaagcaagaaggactccac

SEQ ID NO: 258372 - DNA, 317 bp, Glycine max
gaacacagaacaaaaacaaagaaaaaaaaaacccttagccaacacaaccatcatggccacctctgctattcagcaatcagcattcactggtcaaactgctctgaagcagctcaatgagttcgtccgcaagaccggtggcgccggcaaaggtcgcactaacatgcgccgcaccgtcaagagtgctcctcagagcatttggtatggccctgaccgtcccaagtacttgggtccattctcggagcagattccatcatacctgaccggagaattccctggtgactacggatgggacactgctggattatcagctgacccgg

SEQ ID NO: 258373 - DNA, 286 bp, Glycine max
gggcgtgcagttcaaagcgaaaagagattcgaatccaaggaagggaaaggaaagtaagagaagagaagaatggccgaagagggacaagtgattggtgtccacagcgtggaggagtgggaggaacatctcaagaagggacaagagtccaagaaattgattgtggtggattttactgcttcttggtgcggcccatgccgtttcattgccccaattcttgcggatatggctaaaaagttgccgaatgtcaccttcctcaaggtggatgtggatgaattggcgactgttt

SEQ ID NO: 258374 - DNA, 410 bp, Glycine max
gctttttggaaattccttttcctcgtgaacgatcggctcactctcgctctccctagatcgcgcactttcgctctccctcgtcgcgtgctcgttctcgctatcgtgctctcgcgctctctcggatctaactctgtgtagtctgtaatcatgtcaggcaagtatatcgtttctgctattcttggatcatttggagttgcatgggtttgtgattattatgtttcagaaaaaaagctatttggaggtactacccctggcactattacaaacaatgagtgggcagaagagaccgacaaaaaattacaggcatggcctcgtactgccggtccaccagtggtcatgaatcccataagtcgccaaaatttcattgtgaagtctcgccctgagtaatattttttgttgattgaatttga

SEQ ID NO: 258375 - DNA, 394 bp, Glycine max
ggagaggcatgaagggttatgagccctgttcaagctcttcatgtgcagcttgcaagttattgaagagaagatgcataccaaattgtatttttgcaccttactttaggtctgatgagtgcaagaagtttgcaaaggtgcacaaggtgtttggagcaagcaatgtgagcaagattctgattgaagtgccggaagagcagagagaggacacagtgaattctcttgcttatgaggctgaggcaaggctgagagacccggtttatggatgcattggtgccatagctctgttgcaaaggaagatggtggagcttcaacatgatctggtcatcgcaaaagatcgtctcgcgcgttgtcacgctgctgctactgctgctgccacaacaccaacactactagt

SEQ ID NO: 258376 - DNA, 373 bp, Glycine max
gattgtagaactgaacaagggtttctctttctctttctctgtctgcttcttcactttctctcgtttcaatcgaaaaaaatcatgggcagaaaattcttcgtcggtggcaactggaaatgcaatgggaccactgaggaggtgaagaagattgttactactttaaatgaagctaaagtccctggagaagatgttgtagaagttgttgtgagccctccttttgtgttccttccttttgtaaaaagtttgctgcgccctgatttccatgtctcggcccaaaattgttgggttcgcaaaggtggtgcttatactggagaggttagtgctgaaatgcttgttaatttgggaattccttgggttattattggtcactctg

SEQ ID NO: 258377 - DNA, 296 bp, Glycine max
gaacacagaacaaaaacaaagaaaaaaaaacccttagccaacacaaccatcatggccacctctgctattcagcaatcagcattcactggtcaaactgctctgaagcagctcaatgagttcgcccgcaagaccggtggcgccggcaaaggtcgcactaacatgcgccgcaccgtcaagagtgctcctcagagcatttggtatggccctgaccgtcccaagtacttgggtccattctcggagcagattccatcatacctgaccggagaattccctggtgactacggatgggacactgc

SEQ ID NO: 258378 - DNA, 217 bp, Glycine max
gattattatttgatacgaaatacaaagctcttcaaaacccaaacaacaaccgtactgcacaactccaccactgtgcaatggccgacgaggaacctgttgatcagaagagatatcttgaagagtcttgcaaaccaaaatgtgtataaccattactagaataacaggcgtgcattaaaaggatacatggtgatgaacctgggcaaaaacactgcactgg

SEQ ID NO: 258379 - DNA, 351 bp, Glycine max
gatgcatagcaattcccaattcctaattgtttaaacctaattctcatttcttcatcgttcgattcttctcctcctaaagatgcagatcttcgtgaaaactttgaccggtaagaccatcacccttgaggtggagtcctccgacaccatcgataacgtgaaagctaagattcaaggcaaggaagggatcccacctgaccagcagagacttatctttgcgggtaaacagcttgaggatggtcgaacccttgccgactacaacatccaaaaggaatccactctccacctcgtgcttcgcctcaggggtggcatgcaaatctttgtcaagactttgactggcaagaccatcaacct

SEQ ID NO: 258380 - DNA, 331 bp, Glycine max
gaggccttgcaaagtaagttcatttgaccctcacaaaccttgcatccatccacacatggctggcatgaactctagcgtattggcctgtagctatgccatatctggtgcagcatgctccgagctcaatgggaaggtcacttccgtggcctctgttgcatcctctggctacaagttgccattgatcaaatgtgaggccagagttcccaaagccaaagaatctgaaggaaggagaggtgcccttgttctcttggcagctacccttttcatctctgcagcctccaattcttctgccaatgctgggatcattgatgattaccttgagaggagcaag

SEQ ID NO: 258381 - DNA, 361 bp, Glycine max
  unsure (1)..(361): unsure at all n locations
gaccagttagttgctttgtttcactcacactgtgtttggagcagaatcagatcgtgtgttccgtacgttcgttcgttcatttccagtgtcaaacatggcgtctcagatgagcaagaagagaaagtttgttgcggacggagtgttcttcgccgaactgaacgaggttctgacacgtgaattggcggaggacggttactccggcgtggaagttagggttacgccgatgcgcaccgagatcatcatcagagccaccagaacccaggctgttctaggtgagaagggaaggagaattanggaacttacctcagtggtgcagaagaggttcaaattccccgaaaacagtgtcgagctttatgctgag

SEQ ID NO: 258382 - DNA, 308 bp, Glycine max
gactcaccacttcaaaacactcataacacaaagcacaaagcaaagctcatccttgagttaaaaaatggcagcagcttcttccatggctctctcatccccatccttggctggcaaggccgtgaaactgggcccaacaaccccaaaaattggaaaggttaacaataaggaaaacgttaacaagcaaggctcctcaaggaacccaagggaacggccaaaacgagtcaagttccttggcccattctctggcgagcccccgttctagctaaccggtgagttcccaagcgaatacgggtgggacactgctgggc

SEQ ID NO: 258383 - DNA, 358 bp, Glycine max
ggacaagtgagtttgttgatcgagataactagaaacagtgtgatgaaaatgaaggtccttgttttcttcgttgctacaattttggtagcatggcaatgccatgcgtacgatatgttccctctccgaatgaacactggctatggtgcccgtactccggaggtgaaatgcgcaagttggaggcttgctgtggaagcacacaacatctttggctttgagaccattcctgaagagtgcgttgaagcaacagacgaatacatccatggcgaacaatatggatcagactccaaaacagttaaccaacaagcgtactttgtatccagaaagctcgaagtccatcccaaggagacagttgtgttca

SEQ ID NO: 258384 - DNA, 314 bp, Glycine max
ggttttgattagggtttgtcattagcacttcttcttttcacactgccgctgcaacaatggtttcagagaagaaactttcgaccccaatgagggagataaaagtgcagaagctcgttctcaatatctctgttggcgagagtggagatcgtctcaccagagccgccaaggtgttggaacaacttagtggccaaaccccagtgttttccaaagcaaggtacactgttcgttccgttgggattagaagaaatgagaagattgcatgctatgtcactgtcagaggtgacaatgcaatgcaacttttggagagtggtttg

SEQ ID NO: 258385 - DNA, 237 bp, Glycine max
gacgtttgtgattgtcgttgcctcactttgctgccgtacctaatcggagagctcccgctgactgcgatcggatttcatggctcctaacaaagacaaggctctcccaccttcatccaggcccgccaagtctggtggtgggaagcacaataagaacgaatggacaagggaaagcaagaggagaaggggaataaccagctgctgttcgatcaggctacctaggacaagctcctctccgag

SEQ ID NO: 258386 - DNA, 369 bp, Glycine max
ggagtgcagtgatacagataagatcatgtggcttgtgcagctctcaaccccatttctgaacggacatggtcattccaccacccttctctccaagcacagttcggcggtgactcagacccactgggccccaccgagtttcctgcctcaaatcaatgcgatgaagacaatgcatgggagagtggtgtgctccaccagcgacaagacggtggcagtggaggtggtgcggctggcccctcacccatagtacacgatgcgcgtgatgaagaagtagaagtacaggcccactaccccgatgaacgattcaacgtcggcgacatcgtccacctccagaagaccattcccatcagcatgaccaaaggctttctcgca

SEQ ID NO: 258387 - DNA, 239 bp, Glycine max
tacggctgaacaagataagccacccatagcagccagagaaatgaagagtaccttgttcgccctctttctactttgtgccctcacctcttacctaccttcagccaccgctggtgatgtggtcgacactgatggtaatcctgttgaaaatggaggcacatactttgtgttgccaactacaatattaaacggcggtggtatacaatatgccacattttggaatgagacgtgccctgtcactg

SEQ ID NO: 258388 - DNA, 285 bp, Glycine max
  unsure (1)..(285): unsure at all n locations
ggtctcgtggaagtgtaagcaagcaaaaccctagcggcgcctgctttctttgttcgtgttttgcatcaggatggagtctcaggtgaagcacgcacttgttgtcaaagttatgggtcgtactggatccagaggacaagtgacccaggttagagtgaagtttttggatgatcagaaccgtcacatcatgaggaatgtgaaaggacctgtgagagaaggagacattctcaacctactcgagtctgaaagggaagcangaagattgcgctagatggtctcttttttttt

SEQ ID NO: 258389 - DNA, 393 bp, Glycine max
gggatttccaaagtttttaatagagggtaagtctcaaaaaatcgaagaattacagacgaatatgcaaaaaaaactgaattgtgtgaatcgaaaactaaacattgctattgtaaaaagttgcaaatgcttataaacaccctaatattattgcagaatttatagctggacaattaaagaatagagtttcgtttcgtaaagcaatgaaaaaagctattgaattaactgaacaggcgggtacaaaaggagttcaagtacaaattgcgggacgtatcgacggaaaagaaattgcacgtgttgaatggatcagagaaggtagagttcctctacaaaccattcgagcgaaaatcgattattgttgctatacagttcgaactagttatggggttttgggga

SEQ ID NO: 258390 - DNA, 103 bp, Glycine max
tggagtccgtggctctcctagggttccctcatttgggatcctggggaaggggatcagcctggcccttgcgaacagcttgatgcactacctcccttcaaccctt

SEQ ID NO: 258391 - DNA, 335 bp, Glycine max
ggcccgaactccttcgacgaccgtcttccccaatcgcctgcgtctctctctgaattgacaagcttaaagacaaagtcttaaatggctggtccaaggattgcccatgctaccttgaaaggtccgagtgtggttaaggagataataattggaataacacttggcttagctgctggtagcgtgtggaagatgcaccactggaatgaacagaggaaaaccaggaccttctacgatttactggaaaagggtgagatcagtgttgttgcagaggaacagtgaaaatgttcttgttttgttgcctatgctctccatttagaggctttttttcccatgttata

SEQ ID NO: 258392 - DNA, 324 bp, Glycine max
gaagtatataacttcttctacgtgtccggaaatcgttcctatcatcacttctcaaatctcgaaccctctcgttcgtgccgatcactaggtcacacttcatcaatggcgggtagaggcaaaaccctaggatccagcgccgctaagaaggccacctcaaggagcagcaaagccggcctccaaattccccgtcggtcgtatcgccaggttcctcaaggccggaaagtacgccgagcgcgtcggcgccggagcccccgtctacctcgccgccgttctcgaatatctcgctgctgagggtttgggattggctgggaacgctgcgagaga

SEQ ID NO: 258393 - DNA, 370 bp, Glycine max
gtccacggatccatacagatgtcaaaagctacaggaagggaaggtgcacgaggttgttgtgagctaggaagctagtttatcgtgaggagaatatgaacttgtttgttttctttgttgctgcagtagttttggtagcatggccatgccatggcgcaggctaccagaggttccctctccgaatgaaaactggctatggtgagcgttcttcagaagtaaaatgcgcaagttttacgcttgctgtggaagcacacaacatccgagcctttaaaaccattcctgaagaatgcgtttaaccaacaaatgactacattagtggggaacagtttagatcagactctaaaacagttaatcaacgggctttcttttatgc

SEQ ID NO: 258394 - DNA, 268 bp, Glycine max
gacactattttataacgcacatagtttcttctgataataatttttctgtcactacccactcctttctctgtctccatcgtttcgcattgcacaagcactctctctttcccttaccctttttcaggtttcaacgctccaactatccatggcaaaccgctggctcagacccgaggtgtatccactgttcgctgcggttggtgctgctgttgggatctgtggattccaactggttcgtaatatctgcatcaaccctgaagtcagggtgaac

SEQ ID NO: 258395 - DNA, 241 bp, Glycine max
gatagaagaagcagaaagagaagcattagcaaaagcaagaagaactagtctaagcagaaatggcctcttcagtgatggcatctgtggccctcaaacctgcccctttcactgttgagaagtcctcagttagaggccttccctccctctcaaggaattctccttcattcaaatttgtggccagtggtggcaagaagatcaagactgacaagccttatggaattaatggtggcatggctttgag

SEQ ID NO: 258396 - DNA, 405 bp, Glycine max
gaaggtgcaagagtttgttgtgagctataagctagtttatcgtgaggagaatatgaagttgtttgttttctttgttgctgcagtagttttggtagcatggccatgccatggcgcaggctaccaaaggttccctctccgaatgaaaactggctatggtgagcgttcttcggaggtaaaatgcgcaagttttaggcttgctgtggaagcacacaacatccgagcctttaaaaccattcctgaagagtgcgttgaaccaacaaaggactacattaatggcgaacaatttagatcagactctaaaacagttaaccaacaagctttcttttatgctagtgaacgccaagtccatcacaacgacatatttagagtcggcatagattacaccgtactctctaatatcccata

SEQ ID NO: 258397 - DNA, 365 bp, Glycine max
ggaacaagttgcagggatggcctccactctctctatatcctcttcatccacccttgttgatgccaagcctccaactccaagacaatgcgtcacccttcccactcttccccctccaccttttcactctcagactcgtccttggaagaccactgcttcctgtcctaaggtttcccccaattttaagggaatgggcaacaacagaaaaggaacccccacaaaagttgccgccaaaactgaactccccaatgccgaaacgccaaagaatgttaaaacgaatcaagaagcttgggaaaaaattgaagatgaatatgcagtgagttcactgggccttgccgggggtggtgcaatggtgggctcaactggga

SEQ ID NO: 258398 - DNA, 406 bp, Glycine max
ggcagagagaagagggtcagagtgagaaagagagagagagagagagaaactgagagaaattcgcaaaccctaatttcggaaagatcggcgatggctgcctccaaggatcgcgagaacttcgtctacatcgccaagctcgccgaacaggccgagcgatacgaagagatggtggaatcaatgaagaacgttgcgaatctcgacgttgagctgactgtggaggagcggaatttactttctgttgggtacaagaatgtgattggtgctcggagagcatcgtggaggatcctgtcttccattgagcaaaaggaagaaacaaaagggaacgagttgaatgcgaagcgggttaaggagtacaggcagaaggttgaattggagctttcaaacatctggtatgatgttatgacag

SEQ ID NO: 258399 - DNA, 205 bp, Glycine max
ggcacaagtgagtttgttgatcgagataactagaaacagtgtgatgaaaatgaaggtccttgtttccttcgttgctacaaatttggtagcatggcaatgccgtgcgtacgatatgttccctctccgaatgaacactggctatggtgcccgtactccggaggtgaaatgcgcaagttggaggcttgctgtggaagcacacaacatc

SEQ ID NO: 258400 - DNA, 292 bp, Glycine max
gattgcatcgttgttgttcccttcttttttctttctccgccccttttttgttgttccttcttctcgttcgtcgctttgtgatctctctctgcaaccatgtccgtcgagaaagagagagagacccaggtttacttggccaagcttgccgagcaggccgagagatgcgaagaaatggttgagtgtatgacgaaagtggcaaaacttgatcttgatctgactggagacaggaggaaccttctcgcagtgggatacgggcatgtgattggtgcacgaagggcctcttggggcagaa

SEQ ID NO: 258401 - DNA, 316 bp, Glycine max
  unsure (1)..(316): unsure at all n locations
agaatatgaaaaagaaaaaaaagattctaaagaaatataactaatattctttagaataatcaaaaagaatattaaattcaaataaattttagatagaaaaaagacttaaaaaggaggatttgaaatacgagatctaaagacatatctttccgtggcaccagtagtaagtactctatggttcggggctttggcgggtctcttgatagagatcaatcgtttttttccagatgcattgatattcccttgtttttcattcgagttattgacacggaaaggggtgganaagattatagatgcaagtaagtagtaaatatat

SEQ ID NO: 258402 - DNA, 323 bp, Glycine max
gactcaccacttcaaaacactcataacacaaagcacaaagcaaagctcatccttgagttaaaaaatggcagcagcttcttccatggctctctcatccccatccttggctggcaaggccgtgaagctgggcccatcagccccagaagtgggaagggtgagcatgaggaagaccgtcaccaagcaggtctcctcaggaagcccatggtacggcccagaccgagtcaagtacttgggcccattctctggcgagcccccgtcctacctaaccggtgagttcccaggcgactacggctgggacactgctgggccttccgcagacccag

SEQ ID NO: 258403 - DNA, 226 bp, Glycine max
gatctggcaacataaaaacaagtagttgagaactaagaagaaggaaatggcctcctcaatgatctcctccccaactgttatcaacgtcaatcgtgccggtgccggcatggttgctccattcaacggtctcaaatccatggctggcttccccacgaggaagaccaacaatgacattacctccattgctagcaacagtggaagagtacaatgcatgcaagtgtggcca

SEQ ID NO: 258404 - DNA, 390 bp, Glycine max
gcgcatgcatatgaaataaactgcaaccgtgacaaaagttgcgtagcaatagcatactcttactctgattcgttagtgaagaaaaatggcaacaatcatcgccggcaccccaactacatcaatcactcgcacaggtcatgtgctcaaacgacctgttggggcctcatcctctaccgttcttggattgccagcaatggccaaggcggggagagtgaggtgctccatggaggaaaagccttcaagcagctcaaacctagggatgggggcatccttgttagcagctgcagctgccgcaaccatgtcaagcccagcagccatggctttggttgatgagagactcagcactgaaagaactgggcttccctttgggcttagcaacaaccttcctgg

SEQ ID NO: 258405 - DNA, 396 bp, Glycine max
atcagaagtcgattgacatttatgaagagatagctcgccaatccctcaacaataatttgctgaagtatggagttaaaggacaccttcttaatgctggcatctgcaaactctgtaaagaggacgttgttgctataaccaatgcattagaacgatatcaggaactggatccaacattttcaggaacacgtgaatatagattgttggcggacattgctgctgcaattgaagaagaagatgttgcaaagtttactgatgttgtcaaggaatttgatagtatgaaccctccggaatcctggaagaccaaacgtctcctaaaggtgaaggaaaagcttaaagccaaagaactttagcaacatgaggcgagtacttgaattgtacctttaataatcctggtgg

SEQ ID NO: 258406 - DNA, 190 bp, Glycine max
ggcacaagtgagtttgttgatcgagataactagaaacagtgtgatgaaaatgaaggtccttgttttcttcgttgctacaattttggtagcatggcaatgccatgcgtacgatatgttcctccccgaattaacaatggccaagggtgcccttatcccgaaggtaaatgttcaaatttgaaggcttcctttg

SEQ ID NO: 258407 - DNA, 383 bp, Glycine max
gactgctattcctcttaagcttgctactgagtttccacactgcataccttaggtcttccgaattcgaagttaatttgcaagatggctaaggaaaaggctcagatcaacattgtggtggttggtcatgtggaccctgaggaggcaaccaccattaacgagctgaagaagcctgttgtggagaaagaagctccagggcatgccatatgagggcatgcacgtacggcctcggaggggaaccagaaaattatgttaacagaataatctggaaccctaatgtatcagtgtcatcatcagtgtgtactttaagctagctttgctatggttacgttctttgagatgagagtcttgatgaacagtaccagtctgatgtattgctttccttg

SEQ ID NO: 258408 - DNA, 350 bp, Glycine max
ggagtgtgagagaaaccagtgactgacttttcgagaaagaaaaacaaaaatgagtttccgtcattccatcatgaacgctcttcccattctcctcttcttcctcttcgtttctgcattagtttctgcgaagaaaactggtgatgtgacggagctgcaaattggcgtgaagcataaaccagtatcatgtgaagttcaggcacacaaaggtgacagagtcaaagtacactatcggggaaaactcactgatggaactgtttttgattctaagtttggaagaaataatccaattgaagttgagcttggtactggtcaagtgatcaaaggttgggaccagcgattattgggaatgt

SEQ ID NO: 258409 - DNA, 360 bp, Glycine max
gcacaagtgagtttgttgatcgagataactagaaacagtgtgatgaaaatgaaggtccttgttttcttcgttgctacaattttggtagcatggcaatgccatgcgtacgatatgttccctctccgaatgaacactggctatggtgcccgtactccggaggtgaaatgcgcaagttggaggcttgctgtggaagcacacaacatctttggctttgagaccattcctgaagagtgcgttgaagcagcaaacgaatacatccatggcgaagagtatagatcagactccaaaacagttaaccagcaagcttacttttatgccagagacctcgaagtcgatcccaaggacacatttggtgttcag

SEQ ID NO: 258410 - DNA, 136 bp, Glycine max
attgcacgacaaccggaggcagaaggaaaaatacgaggtactttattgcttagtttggcttttatggaagctttaacaatttatggactggttgtagcattagcacttttatttgctaatccttttgtttaatcct

SEQ ID NO: 258411 - DNA, 247 bp, Glycine max
agagcgaaagagatgtcgttggtttcaagcatgttcgggtgtggagtggtgatggcggcgtcgcaagcaatgggaattggaaggagaagcgatggtggattgacgatagtgtgttcgtctaggccgcagaagaaagcgacggcgcatcacatgaagactcggcctcggaagacgcaggcatgggatagaaaccgcaagcccaccgtctacgatccactccctcctcttcctcctgattggaccctcg

SEQ ID NO: 258412 - DNA, 329 bp, Glycine max
gagagtggtggggtgtgcagaagagcgtcgcagttgtaaccctaatcagatgaagcgcagcttcaagcgagtgacagccaccagccatgggtcgtatacacagccgcggtaagggtatatcctcttctgctttgccctacaaaaggacacctcctagctggctcaagatctcttcgcaagatgtcgaagaaaatatatgtaagtttgcgaagaaaggtttgaccccgtctcagatcggtgtcattctcagagattctcacggtattgctcaggtcaatagcgtcactggcagcaaaatccttcgcatcctcaaagctcacggacttgcg

SEQ ID NO: 258413 - DNA, 289 bp, Glycine max
ggatgtcagcggttcgagtccgcttatctccaactcgtgaacttagtcgatacaaagctatatgatagcacttccatttttccgattcggcagtttgatctatgctatgatttatcattcatggacgttgataagatccttccatctagcagcaccttaggatggcatagccttaaagttaagggcgaggttcagacgaagaaaggcttatggtggatacctagggcaccagagacgaggaagggcgtagtaagcgacgaaatgcttcggggagttgaaaataagcgta

SEQ ID NO: 258414 - DNA, 312 bp, Glycine max
gaaggtgcaagagtttgttgtgagctataagctagtttatcgtgaggagaatatgaagttgtttgttttctttgttgctgcagtagttttggtagcatggccatgccatggcgcaggctaccaaaggttccctctccgaatgaaaactggctatggtgagcgttcttcggaggtagaatgcgcaagttttaggcttgctgtggaagcacacaacatccgagcctttaaaaccattcctgaagagtgcgttgaaccaacaaaggactacgttaatggcgaacaatttagatcagactctaagacagtttacca

SEQ ID NO: 258415 - DNA, 395 bp, Glycine max
acgacagaaggggatcataacacgtgacacgcgtgcttcttgcgatatcttcactattaaatatctgttcttccaaccataaccacaccacaccgagtcgcagaaaaagaaaaaagcgatcatagtttcacttcggccttatccagtttagggtttcggttctctaccctatctttcacgtatcgaaaccttaaatttacgatcaggtctgagcaatctggttggtagaacctttggtcttagtgagtcaagttttatgtctgaattagacgatcaaattcctactgccttcgatccttttgctgatgcaaatgctgatgactcgggtgctgggtcaaaggagtatgtgcatattcgtgttcagcagcgaaatggtatgaaaagcctgacaaccg

SEQ ID NO: 258416 - DNA, 414 bp, Glycine max
gacacaccccattgctacatagggctatatagcataaacatttgagtcttcattgcacaatgtcaacctcttccataaacgggtggtgcctctcttccatctccccagccaaaacctctctcaggaaggccacattacgcccttccgtcttcgcaacccttaacactccttcttctccttcctcttcatcttccttcccctctctcattcaagacaggcctgtttttgctgcccctgcccccatcatcaccccaactgtgagagaggatatgggaaaggaatacgagaaagctattgaagaacttcagaaattgttgagggaaaagagtgaactcaaagcgacaactgctgaaaaagtggagcaaataacagcttctctaaggacatcatcatctgatggcatcccaacatcag

SEQ ID NO: 258417 - DNA, 340 bp, Glycine max
gacctcacccagttgcagaaagaaaagaccatcaaagtttcacttcagccttatccggtttagggtttcggtttttgacccaacctttgacgtatcgaaaccttaagtttcggatcaggtctgagcaatctggttggtagaacctttggtcttagagagtcaagttttatgtctgaattagacgatcaaattcctactgccttcgatccttttgctgatgcaaatgctgatgactcgggtgctgggtcaacggagtatgtgcatattcccgtacaacagcgaaatggaaagaaaagcctgacaaccgttcaaggaattaaaaaagaattcagctattaca

SEQ ID NO: 258418 - DNA, 276 bp, Glycine max
  unsure (1)..(276): unsure at all n locations
taatttgggaattattgctcccatcgccattggtttcattgtcggcgctaacattttgttgggtggggccttctctggagcggccatgaaccccgctgtgacatttgggcctgctgtcgtgagctggacctggaccaaccactggatctactgggccgggcctctcatcggtggtggaatcgctggccttgtttacgaggttgtctttatcagccacacccacgagcagcttcccaccactgactactagagggggggaaacaangnaaagaaaaa

SEQ ID NO: 258419 - DNA, 368 bp, Glycine max
gacaactgaacaagataagctatccatagcagccaaagaaatgaagagtaccttgttcgccctctttctactttgtgccctcacctcttacctaccttcagccaccgctggtgatgtggtcgacactgatggtaatcctgttgaaaatggaggcacatactttgtgttgccaactataatattaaacggcggtggaatagaatatgccacatttggaaatgaaacttgccctgtcactgtttcgcaatctcgcgattagttctgcaacggctttccgagtaccatttcatccccagcccgaatccgtcacatcagcgaaaggcttagtttgaagattgggttcactttcgcatccccgtgttcccccg

SEQ ID NO: 258420 - DNA, 334 bp, Glycine max
acgacagaagaaaaaggaaaaggagaaggagaagaacgcagctgcggcggcagcagcagcagcagcagcagtagcaggaactgtaccagaaaatgaaacagcagaagataaagctgaggtaattgaaccaaagaagaatgattcaaaggctaaaaaagcagctgataagaaagtgccaaagcatgttagggagatgcaagaggcactagctcgaagacaagaggctgaagaaaggaagaaaagagaagaggaagaaaggttaaggaaagaagaagacgagcgacgtaggcaagaggaacttgagaaacaagcaaaaagaggctaaacgtaagat

SEQ ID NO: 258421 - DNA, 435 bp, Glycine max
  unsure (1)..(435): unsure at all n locations
ctggtacgcctgcagngtaccgtccaaaattcnagggtccacccacgcgtccgcaagaagacgacagaaggggaataaaagtagaactgtcttttcatatagaaatccctcaacaaaacaaaaggccaccaaaaggttcccaaaaaccaacaatcgcaacaaaacccggaattctttcaaaaaatggatcccaatccaaagggtgcataaccgcatggataagcccaaactaacccttcaatttgggatccaattcggttccttaggaggtaccggaaaggaattttggaatgtaataataccaatccagacagattcagacaaaagggttcccaattgattcaaacgctctacctacgaaataggaataaagacagaggaaaaaacccaggattcaaaataggactttttggccaaaaaaccgattcgattttt

SEQ ID NO: 258422 - DNA, 218 bp, Glycine max
ggcacaagtgagtttgttgatcgagataactagaaacagtgtgatgaaaatgaaggtccttgttttcttcgttgctacaattttggtagcatggcaatgccatgcgtacgatatgttccctctccgaatgaacactggctatggtgcccgtactccggaggtgaaatgcgcaagttggaggcttgctgtggaagcacacaacatctttggctttgtga

SEQ ID NO: 258423 - DNA, 329 bp, Glycine max
caacataggtcatcgaaaggatctcgaagacccaccaacgcacgaaagccgggatctttcagaaaatggattcctattcgaagggtgcataaccgcatggataagctcacactaacccgtcaatttgggatccaattcggttccttaggaggtatcgggaaggaattttggaatgtaataatatcgattcatacagatacagaagaaagggttctctattgattcaaacgctctacctacgacatagggatagagaacgaggaaaaacccgaggatttcacatattacttttggtccaaaaatcgatctgaattttttcgtacttttcg

SEQ ID NO: 258424 - DNA, 359 bp, Glycine max
gacaccaacaccaaaacaaacccactaagatggcttcctttgtatccttcctagtgctgcttcttgcagcccttatcctcatgcctcaagggcttgctacttactacaaaccaattaagaagccaccagtgtacaagcctccagtgtacaagccaccagtgtacaaaccaccggtttataagccaaaaccaccggtttacaagccgaaaccaccggtttacaagccaccatataagaagccaccatacaagaaaccaccttaaggaaagttacctccagtaggggacaacacccatgcctaaagcaagcaattaagtctattatccaccttaataataagaagaactgccttgtgtttt

SEQ ID NO: 258425 - DNA, 406 bp, Glycine max
gaaggtgcaagagtttgttgtgagctataagctagtttatcgtgaggagaatatgaagttgtttgttttctttgttgctgcagtagttttggtagcatggccatgccatggcgcatgctaccaaaggttccctctccgaatgaaaactggctatggtgagcgttcttcggaggtaaaatgcgcaagttttaggcttgctgtggaagcacacaacatccgagcctttaaaaccattcctgaagagtgcgttgaaccaacaaaggactacattaatggcgaacaatttagatcagactctagaacagttaaccaacaagctttcttttatgctagtgaacgcgaagtccatcacaacgacatatttatattcggcatagataacaccgtactcgctaatatcgcatac

SEQ ID NO: 258426 - DNA, 270 bp, Glycine max
gaaggtgcaagagtttgttgtgagctataagctagtttatcgtgaggagaatatgaagttgtttgttttctttgttgctgcagtagttttggtagcatggccatgccatggcgcaggctaccaaaggttccctctccgaatgaaaactggctatggtgagcgttcttcggaggtaaaatgcgcaagttttaggcttgctgtggaagcacacaacatccgagcctttaaaaccattcctgaagagtgcgttgaaccatcaaaggactacat

SEQ ID NO: 258427 - DNA, 250 bp, Glycine max
gaccctaaagagagagagagggagtcagagaaaccctaggttagaagaaaagatgccggctggtcaagggttgagattccgcaccaaagaatccttctctcgtcctttcaaggaaaaaggaaacatcgccctcaacacatagctgagaaactaccacatcggcgactatgtttacgtccacggtaacggtgccgttcaaaacggaatgccccacaaattctaccatgggcgcgacggacgcgtctgggat

SEQ ID NO: 258428 - DNA, 357 bp, Glycine max
caacataggtcatcgaaaggatctcgaagacccaccaacgcacgaaggccgggatctttcagaaaatggattcctattcgaagggtgcataaccgcatggataagctcacactaacccgtcaatttgggatccaattcggttccttaggaggtatcgggaaggaattttggaatgtaataatatcgattcatacagatacagaagaaagggttctctattgattcaaacgctctacttacgagatagggatagagaaagaggaaaaaaccgaggatttcacatagtacttttggtcgaaaaatcgatctgatttttttcgtacttttcgctcaatgatgaaatgggtcagattctac

SEQ ID NO: 258429 - DNA, 329 bp, Glycine max
gggggtttggttattaaggttttcgctgaccggtgcgcagtcgagcctccagaagacgaatcgaaaatgccgttgcacaagacattcagaatcaagaagaagttggcgaagaagatgaggcagaacaggcccattccctactggatccgcatgaggaccgataacaccatcaggtacaacgcgaagcgccgtcactggcgtcgcaccaagcttggattctgaagtgtatgctctgcctaagttcaatttatccaattaattagtgttttaatttcttgagggaaaaacaatggtttgagtttttaatattttccatttgttcgaagact

SEQ ID NO: 258430 - DNA, 383 bp, Glycine max
  unsure (1)..(383): unsure at all n locations
gagtattcagattattatacattgcaaaaatggcatcattcaccatgacagcttccatccttggctgcccagccgtcaccaaccggtcggcagcgacgcagaggagatcagtggtagtgaatgcagccagcanatctgttgaaggggaaaaggtcagttatgacaacaatgggancaatgcaaggaggaacttgatgttcgccacggcggcggctgctgtttgctcttttgctgcanggatggcattgggagatgagcctaaaccaggaacctcagaagccaagaaaaagtatgccccggtttgtgtcaccaatcctaaagctaggatttgtcgcaattgaaggacttttttggttcacttttgggatttgggaatgttcaat

SEQ ID NO: 258431 - DNA, 244 bp, Glycine max
gacttcaattgcaatcaaattagttcattctctttgcgcagttccctacctctcctttcaagatgcagatcttcgtcaagaccctcaccggaaagaccatcacccttgaggtggaaagctctgacaccatcgacaacgtcaaggccaagatccaggacaaggaaggaattcccccggatcagcaacgtctcatcttcgccggaaagcagctcgaggacggccgtaccctcgccgactacaacat

SEQ ID NO: 258432 - DNA, 404 bp, Glycine max
gacacattgctcctcacagcacgacttgttcaccgatcagagctgattttcgcggctgttaccggtcaccggagattctatccgaaatcgttttccgatgacgataaaaactgttaaagtcagtaacgtttccttgggagcaactgagcaagacattaaggagttcttttcattttctggtgatattgaatatgttgaactacggagccatgatgaacgatctcaaattgcttatattaccttcaaggattcacagggagctgagactgcactactgctttcaggggcaacaataggcgatatgccagttacaataactcaagatccagattaccagcttccacctgctgcgttagcgtcatctgtaagagaaactcagctcctggtggtgctgactctgcttt

SEQ ID NO: 258433 - DNA, 294 bp, Glycine max
  unsure (1)..(294): unsure at all n locations
gactcaccacttcaaaacactcataacacaaagcacaaagcaaagctcatccttgagttaaaaaatggcagcagcttcttccatggctctctcatccccatccttggctggcaaggccgtgaagctgggcccatcagccccagaagtgggaagggtgagcatgaggaagaccgtcaccaagcaggtctcctcanggaagccatggtacggccaanacgagtcaatacttgggccaattcccgggcaagcccccgtctaactaaaccggtaatttccaagccaacaacggttgga

SEQ ID NO: 258434 - DNA, 256 bp, Glycine max
agtgaacatgctgcacagagttgagccgtatgtgacttatggatacccaaatctcaagagtgtgagagaacttatttacaagagagggtatggagagctaatgaaggagaggactgctctaactgatagctctagcgttgagcatgctctggggaagtatggaatcatatccactgagagagctgatccatggagataggactcttgggcctcgactttaaggaggctaacagcttcctttggccatttacgctca

SEQ ID NO: 258435 - DNA, 393 bp, Glycine max
gaaggtgcaggagtttgttgtgagctataagctagtttatcgtgaggagaatatgaagttggttgttttctttgttgctgcagtagtttgggtagcatggcgatgccgtggggcaggctaccagaggttgggtctccgaagtgggactggctatggtgagcgttcttcggaggtagaatgcgcagggtttaggcggtgctgtggaagcacacaacatccgagccttgaaaaccattcctgaagagtgcgttgaggcaacaagggactacaggaatggcgaacagtttagatcagactctaaaagagttaaccaacaggctttcgtttatgctagtgagcgcgaagtccatcagagggacatatttatattcggcatagataacagcgtactcg

SEQ ID NO: 258436 - DNA, 417 bp, Glycine max
gacggcactcgttttcgttctcgttctggtttatagatctttgcgaaggaggtttacagcgctcaaccaaagatgcagaacgaggaaggacagatcactgagctttacattcctaggaagtgctccgccacaaacagattgattaccgctaaggaccatgcttcggttcagatcaacattgggcatgtggatgagaatggcgtctacaatggccatttctccacttttgccctctgcggattcatccgtgctcagggtgatgctgacagtgctctagaccgcttgtggcagaagaagaaagttgaagttaagcaacagtagacacccatgatagtttgttacttcgttatgtattaatttctactcttgctagagatatttgagtactatgattgtcgttttgagcacaaatactca

SEQ ID NO: 258437 - DNA, 401 bp, Glycine max
ggggggaataggagggggcaaattgagttgggtgttggaaaggcagagcaagaggagtaacataatcaaacatggcggttaggcaaagagccgtgtctgcacttccaactcttctacgcactctccgcaaagaacctttgaagcctcgcaaccacgcacacgtcaatgccttgccctctcttcgacgcgctttctctttgtacgatcagatcaacctcatcgatcaagtccccgaagaccagctccgatttcaagggtataatgatacggggtttactgtaaatggggttgaatacgaaggaagcttgctttgtgttggaaatttgctcatgtcttggaaacctaagaagttttcagagatcactgccgatagcttgtcaatcttccaaatagttcgccct

SEQ ID NO: 258438 - DNA, 424 bp, Glycine max
  unsure (1)..(424): unsure at all n locations
gacacaactgaacaagataagctatccatagcagccaaagaaatgaagagtaccttgttcgccctctttctactttgtgccctcacctcttacctaccttcagccaccgctggtgatgtggtcgacactgatggtaatcctgttgaaaatggaggcacatactttgtgttgccaactataatattaaacggcggtggaatagaatatgccacatttggaaatgaaacttgccctgtcactgttgcgcaatctcgcgatcagttctgcaagggctttccgataaccatttcatccccagcccgaatccgtcacatcagcgaaggccttagtttgaacattgggttcactttcgcatcnccgtgttcccccgcttctgagtggaccattgtgaaggattcaacagaaggactcgctgttaaactca

SEQ ID NO: 258439 - DNA, 286 bp, Glycine max
gggcagcagaagaacaagtagttgagaactaaggaggagaagcaaatggcttcctcaatgatctcttccccagctgttaccactgtcaaccgtgccggtgccggcatggttgctccattcactggcctcaagtccatggctggcttccccaccaggaagaccaacaatgacattacctccattgctagcaacggtggaagagtgcaatgcatgcaggtgtggccaccagttggcaagaagaagtttgagactctttcctacctgccagaccttgatgatgcacaat

SEQ ID NO: 258440 - DNA, 264 bp, Glycine max
aggggcagcgaaagaacagaagatcctcaattttctgagcagccaaacactctctctctgtctctcgaagattctcagtttgcagagaaaatccgaatcatgtcatggcaggcgtatgtcgacgatgaccttctcggtgagatcgaatgtaaacaggtcacgcacgcggctatcatcgggcaacagaggaacgtttggggtcagaggagcgacttcgctcagttcaaacctgaagagatgactgccaagcatattgactgtaat

SEQ ID NO: 258441 - DNA, 385 bp, Glycine max
  unsure (1)..(385): unsure at all n locations
gataactgangaggaaaaaagaccagcggttgacgatgaaacagaagtgtcttgttgttctggtcgttgttgtgctcttggcttgtgcggttggttgggatgagggtatacccggcgggtggaaccccatcaggagcattaacgatgctcaggtgacagaaatctcaaatttcgccgttgcggaatacgaggggcaatcggttgagaagctgaatttggtgaaggttatgaaaggcgaccttcaggtagtaacaggcctcaactagggcctcaggctcagcgccagagactccaacagttaccaagcaattgtctatgagaaggcatgggcccgggagcagtacagaaaccttacctcctttacccctcttcatgcttaacctct

SEQ ID NO: 258442 - DNA, 253 bp, Glycine max
gaccggattccttacgcgcgcgcactcagaaacacacactgaactaagggacatcaggagagagatgggtgagcggagcttcatcatgagtaagcctcgtggcgtccagagaggccttagtggcgagattaggagcagaggtgagaagaggggtggcgacttgagaggtttgaaacttgtgagtgtggaccgtcggtgtgcggaggatcagggtgcggatttgtctgccaagcctgtctttacgggtttggtg

SEQ ID NO: 258443 - DNA, 301 bp, Glycine max
ataaatgaggaggtgaaagagagagagaaagcggatcaatgatatagaggtctgatgtgtaaaggtctatgggttatctcatacgaggtagtctaggggagcaggcaatctagatcagttcatatctatttatatgtgaattagatttataacgtagacaaagtaggagctctgagtcagggagaactgagaatagtgattcacgacgaaacagatcggtattcgaggaggacggggattattaggttgaagatatgagaaaggcgccattgtcgaattcagacctaaccattaatcgaga

SEQ ID NO: 258444 - DNA, 379 bp, Glycine max
ggagaaaaacgagccaattcatcattttctctcttctctgcttcgtcttgtgcaaatcgtaggagctgaggagaatcaagcgagagaaatatgtctggtatcgctcgtggacgccttgctgaggaacgaaggtcatggcgcaaaaaccatccacacggtttcgttgccaagcccgagactctacctgatggcaccgtgaatttgatggtctggcagtgcactattcctggcaagaccgggactgattgggagggtggatagttcgcactgacaatgcacttcagtgaagattaccctagcaagcctcccaagtggaaattccctcagggtttctttcaccctaatgtgtatccatctggaactgtttgcttgtctatac

SEQ ID NO: 258445 - DNA, 390 bp, Glycine max
gatagcagcatcatacaaagcattgaattcaaaaactaagttcatttcttgtgctttgctttattcctcaaaaccaaacatgtcgaacacatgcggcaactgtgactgcgctgacaagactaactgcaccaagggaaacagctatggtgttatagtagagactgagaagagctacatcgagactgttgacatggatgttccagcagctgagcatgatgggaagtgcaagtgtggcactaactgcacttgcacggactgcacttgtggccattaaggaatatgtatgaaaatgtaattgccatgtgtttggcaatacaaatctccaaataatgtaatcttcgtatgaataaatgtgtgctgttatcctaaaacaaaaggaaaaagaaaaag

SEQ ID NO: 258446 - DNA, 213 bp, Glycine max
ggcacaagtgagtttgttgatcgagataactagaaacagtgtgatgaaaatgaaggtccttgttttcttcgttgctacaattttggtagcatggcaatgccatgcgtacgatatgttccctctccgaatgaacactggctatggtgcccgtactccggaggtgaaatgcgcaagttggaggcttgctgtggaagcacacaacatctttggctt

SEQ ID NO: 258447 - DNA, 372 bp, Glycine max
gacacttactagtagtaagcatggagtcctcaaagatctatgcttacctcttcctctgcatgatctttctctcttccgccactcccattctcggttgtggctactgtggcaaaccccccaaaaagcacaagcctggtaaaacaccaaagacacccaaaacacccgttgttaagccaccagtcaccatccctcccattaatgttcctcccgttgttcttccaccaatagtgaagcccccaggtattctccctccaattccaattattaacccaccaaccacaccagggaagggagggaacactccatgcccaccaccaaagtctcctgcgcaggctacgtgccccattgacacgctcaaacttggtgcctgtg

SEQ ID NO: 258448 - DNA, 258 bp, Glycine max
  unsure (1)..(258): unsure at all n locations
cgggagagaanagtttcatgtgacttcaatggctactgctggaagtcgttggggtgttgttatgtcacgaaatgcgggattcaatgatcaggttgttgaacttgattttctcgaggctagtgagggaatccacagacgatgggataatggttataggagtacggcaacggctgctacatgggatcagtcggctcttatacgtaagagtcgtangcgcaggggaggagatgaaacccagggaactctgggtacatctca

SEQ ID NO: 258449 - DNA, 413 bp, Glycine max
  unsure (1)..(413): unsure at all n locations
gccgctgagctccctttctcctcggtccacagagacaaaatgtaagacaggtgccaacagttcatcacgaaagaggggactagctgagccgagatcactaactgaaacgaattgaatactaatcgaggatactaatagagtagaggtagaactgtcgtttcagatagatatcccttcaacacaacacatgtcatcnaaaggatctcgaggacccaccaacggacgaaagccgggatcttgcagaaaagtggattcctatgcgaagggtgcagaaccgcatggatganctcacactaacccgtcaatttgggatccaattccggtccttaggaggtatcgggaaggaattttgggaatgtaataatatcgagtcatacagatacagaagaaagggttctctattgattcaaacg

SEQ ID NO: 258450 - DNA, 228 bp, Glycine max
ggaaggagagtgaagagagaagaagatggcgtcgagcggagcggtgccgtgttggaggacagcggggaggacatacaggagaggcgcaaacatatgcgcgaatctggtcaggagttgcctcagggaacccgacgaggctgaagccgtctctcgtgagaaggtcgattttgcgctctccaaatgggtcgacgccaagcctgagggacctggtattcgttcagagacccc

SEQ ID NO: 258451 - DNA, 342 bp, Glycine max
ggcactttcattctctaaaaaaatctaagtccctttggtcttcatcttctgttctgatccaggtatggcttctaaacgcatcttgaaggagcttaaggatttgcagaaggatcctcctacctcatggagtgcaggccctatggctgaggacatgtttcactggcaagccacaatcatgggacctgctgatagcccatatgcaggtggtgttttcctagtttcaggtcattttcctcctgactatcccttcaagccaccaaaggttgcttttcggactaaggtgttccacccaaacatcaacagcaatggcagtatatgtcttgacattctcaaggagcaatg

SEQ ID NO: 258452 - DNA, 409 bp, Glycine max
gacaagtgagtgtgatgatcaagaaaacgagaatcagtgtgatgatgatgaacgtccttgcattcgtcgttgctacaattttggtagcatggtaatgccatgcctacgataggtaccctcaccaacttaacactggctatggtgcccgtaccccggaagtgaaatgcgcaagttggaggcttgctgtggaagcacacaacatctttggctttgagaccagtcctgaacagtgcgttgaagcaacacaggaagatatctatggagatcaatagacatgagactctagatgagtgaaccactatccctacctttaggccagagacctctaaatcggtcgcatggacacatttgtgtacagtacatatggcagcgtactctcgaatattccattcgactcaacatatggata

SEQ ID NO: 258453 - DNA, 396 bp, Glycine max
ggccgctctctgagaaaaacagatagtgtgggagagagaagagcggaagagaaaatgacgaccaggttcaagaagaacaggaagaagagaggtcacgtcagcgccggacacggccgtatcggaaagcaccgcaagcatcccggaggtcgcggtaacgccggtggcatgcatcaccaccgtatcctcttcgacaagtaccatcctggtttcttcgggaaggtacgcatgcgctacttccacaaacttcgcaacaaattctacaatccgatcatcaacatcgacaagctgtggtccctcctcgcccaggaggccaaagacaaggccaccgccgacaaggcacccttgctcgatgtcacccagttcggttactctaaggttttgggtaaaggggttttg

SEQ ID NO: 258454 - DNA, 414 bp, Glycine max
gggaaaaggatgttcaggtgatgaatgaaggacctggacacatcccaatgcacaagattcctgaaaacatgcagaaacagttagaatggtgtagtgaagcgcctttttacactcttggtcctttaacaactgatattgcccccggctatgatcacatcacctctgcaattggtgctgccaatattggggcacttggtactgctcttctctgttatgtgactccaaaggaacatcttgggttgccaaaccgggatgacgtgaaggctggagttatagcctacaagatagcggctcatgctgctgatttagccaaaggtcatccatatgctcaagcctgggatgatgcattaagcaaggcaagatttgagttccgatggatggaccagtttgctttgtcattggatccgatgacag

SEQ ID NO: 258455 - DNA, 412 bp, Glycine max
gaagcacaaaccttattcaacactcatatccttatcctgtttctttcaatggaagtcatttctgcttctagcttgaatcccaacgctccgatgttcgtgccactcgcctatcggacggtggaggatttctccgaccagtggtgggacctcgttcactcctccccctggttccgcgactactggctccgcgagtgcttccaagatccccagttccaaaacgacgacgctttcgacttcgactttgacctagatctccaagatgaagatgaaagggaacgaaaggaagggaaggacgtggtgtcgttggggctgctgaaatggcgaagctgtggacgaggatgggcccaggcgccgaggtatgtggaaaaggcccccaagtttgtgaagcccaaggtgagcccacgggctattc

SEQ ID NO: 258456 - DNA, 393 bp, Glycine max
  unsure (1)..(393): unsure at all n locations
ggcagaagtgagtttgttgatcgagataactagaaacagtgtgatgaaaatgaaggtccgtgttttcgtcggtgctacaattttgggancatggcaatgccatgcgtgcgatatgttccctctccgaatgaacactggctatggttcgcgtagtgcggaagtgaaatgcgcaagttgggntgttgctgtggaagcacacaggatctttggcttggagaccattcctgaagagtgcgttagagcaacaaancgatacatcgatggcnagcaatagaagatcaaactccaaaacagttaaccaacaagcttacttttatgccagagacctctaggtccatcgcaggggcacatttgtgttcagtagagatggcaccgtactctctaatattccat

SEQ ID NO: 258457 - DNA, 241 bp, Glycine max
ggtgcacaggtgagtttgttgatcgagataactagaaacagtgtgatgaagatgagggtcggtggtgggttcgttgctacgattttggtggcatggcaggggcatgcgtaggaggtgttcccgcggggaggggagactggggagggtggccgtaggccggaggtgaaatgcggaagttggaggcgtgggggtggggcacagaagatcgttggctttgagaccattcctgaagagtgcgttg

SEQ ID NO: 258458 - DNA, 388 bp, Glycine max
  unsure (1)..(388): unsure at all n locations
gataccatagaagaagcacaaagagaagcattagcactaggagcagcagcagctagtcgcagctgaaatggcctcttcagtgatggcatctgtggccctcagaggtgcccctttcagtgttgagaagtcctcagtgagangccttccctctctctcaaggaacgctgcttcattcagagttgtggcgagtggcgagaaggataagactgacaaaccgtatggaagtaatggtggcatggctttgagggatggaactgatgcgtctggcaggaaaggaaagggaaagggtgtttaccagtttgtagacgaatacggtgctaatgtcgatggttacagtcctatctacgacaccaaggactggtctccaaccggtgatgtctacgcgggc

SEQ ID NO: 258459 - DNA, 418 bp, Glycine max
gacactcattccatttttacctttctctctcgctcgcaaacgcaaataataaaaaacaaggttttagccatggcatcgaagcggatcttgaaggaactcaaggatctccaaaaggatcctcctacctcatgcagcgccggtcctgttgctgaagacatgtttcactggcaagcaacaattatgggtcctccagacagtccttatgctggaggtgttttcctagtcactattcatttccctccagattatccctttaagccacccaaggttgcattcacgacgaaggtatttcacccaaatataaatagcaatggaagcatttgccttgacatattgaaggagcagtggagccctgcgctaactatttcaaaggtgttgctctcaatttgttccctgttgacggaccctaatcctgaca

SEQ ID NO: 258460 - DNA, 414 bp, Glycine max
ggtcgcaccttttcctcttctctctctctttctctctttctagttcgtgttcttcgtcgcaaatccgaagtaggatctctcttgttttttctctaggtttttcgcgatggcgtcgaagcgaattttgaaggagcttaaggatttgcagaaggatcctccaacatcttgcagtgccggtcctgttcatgaagatatgtttcattggcaagctacaattatgggtcctccagacagtccctatgctggaggtgttttcctagtgactattcatttccctccagattatccctttaagccacccaaggttgcattcaggacgaaggtgttccacccaaatataaatagcaatggaagcatttgccttgatatattgaaggagcagtggagccctgctctaaccatttccaaggtgtt

SEQ ID NO: 258461 - DNA, 360 bp, Glycine max
gacacacagctattcctcttaagcttgctactgagtttccacactgcataccttaggtcttccgaattcgaagttaatttgcaagatggctaaggaaaaggctcagatcaacattgtggtggttggtcatgtggaccctgaggaggcaaccaccattaacgagctgaagaagcctgttgtggagaaagaagctccagggcatgccatatgagggcatgcacgtacggccccggaggggaaccagaaaattatgttaacaaaataatctggaaccctaatgtatcagtgtcatcatcagtgtgtagtttaagctagctttgctatggttacgttctttgagatgagagtcttgatgaacag

SEQ ID NO: 258462 - DNA, 395 bp, Glycine max
gcacaagtgagtttgttgatcgagataactagaaacagtgtgatgaaaatgaaggtccttggtttcgtcggtgctacaattttggtagcatggcaagtgccatgcgtaggatatgttcgctctccgaatgaacactggcgatggtgcccgtactccggaggtgaaatgcgcaagttggaggcgtgctgtggaagcacacaggatctttggctttgagaccattcctgaagagtgcgttgaggcaacaaaggagtacatccatggcgaagagtatagagtagactccaaaacagttaaccaacaagcttacgtttatgccagagacctcgaggtccatcccaaggagacatttgtgttcagtatacatggcaccgtactctctaatattccatact

SEQ ID NO: 258463 - DNA, 379 bp, Glycine max
ggcgattgttcgagaaactctaacgaaagagcgagaaagcgaagacgagccatggcgtcgtttcttcaatcgtttctggatccgaagaagaactgggtcgccgctcaagagatgagggccctctccagacgcgtgcgcaaatatgggctccgatacgaggagttgtacgatgcgtacgacgatctggatgtgaaggaggcgctgaatcggcttccgaaagaggtggtggacgctcgcgaggcgcgtcgtaaacgcgggatcgatctttccatgaagcacgagtacctcgctgacaatctgcagtcaatggagagaccattcaggggctaccttcaggatatgctgactcttgtgaagagagagagagcaggacgtgaag

SEQ ID NO: 258464 - DNA, 302 bp, Glycine max
  unsure (1)..(302): unsure at all n locations
ggaacctttgcattcgattcattcaggattgagcaggtgcgttgtggaagcagagaccgaaatagttcgagatggggcgtagagaagcgaggctgctcgtgagtcaactggtangaaagggtcggaggaagcagcttgcaaccaaggctgcggccgaagtctgcgggaggaggtggtggtgtgaagagggcctcatcgttatcgcccggaaactgttgctcttcgtgaaattggggagcaccgggggagccggcatctcctagtcaggaagcttcctttccagaggttggttcgggaaattg

SEQ ID NO: 258465 - DNA, 401 bp, Glycine max
gaggggtttgcgctgttgttgctgctcaacctccgtaacctccgagctctgcaccgaagaacggagccatggggaagacacatggaatgggatctgcgcgcaagctcaagtcccaccgcaggaggcaaaggtgggctgacaagtcatacaggaggtcacatcttggaaatgaatggaagaaaccttttgctggttcagcccatgcgaagggaattgtccttgaaaagatgggtattgaggctaagcagctcaactctgccagtcgtaagtgtggcagggtggaacttatcaagaatgggaagaagattgccgcttttggccctaatgacggttgcgtgaactacattggagagaatgacgaagtcgtgattgctggatttggacgaaaaggtcatgctgtg

SEQ ID NO: 258466 - DNA, 400 bp, Glycine max
gatatcagaagcgcagacctaggatttcggccgtttgctccccaaggaaagaagcagagtgtttcttttgaaatcagctagaaaagatgtcaggtgaagaggtagctgttgcagctgaggcacctgctgcttcaattccaggtgagccaatggacatcatgactgctctacagcttgtgctgagaaaatctctggcctatggtggtcttgcacgaggtcttcatgaaggtgctaaggtgatcgagaagcatgctgcacagctctgcgttctagcagaagattgtgaccaacctgattatgtgaaactggtgaaggctctttgtgcagagcacaatgttagccttttgacagttccaagtgcaaagacccttggagaatgggctggtttgtgtaagattga

SEQ ID NO: 258467 - DNA, 361 bp, Glycine max
ggtaccgatcaattaacaaccatatctatctattgagaaacatgaagaaggtttcacccttggcattttccattctctttttggccttcaccatagaaccctttattggcattgctgcagcagcaccagaagcagtgcttgacacctcaggccagaagctgagaacaggtgtcaagtactacattctgccagtgttcagaggcaaaggtggaggcctaacagtttcaagcagtggcaacaacacatgccccctctttgtggtgcaagagaagcttgaagtctcaaagggcaccccagttaccttcacaccctacaatgccaaaagtggtgtcatactaacctcaaccgatctcaacatcaa

SEQ ID NO: 258468 - DNA, 387 bp, Glycine max
ggcagttcaattccaatatattccattctctctgtgtatttccctacctctcccttcaagatgcagatcttcgtcaagaccctcaccggcaagaccatcacccttgaggtggaaagctctgacatcatcgacaacgtcaaggccaagatccaggacaaggaaggaatccccccggaccagcaacgtctcattttcgccggaaagcaacttgaggacggccgtacccttgctgactacaacattcagaaggagagtactcttcacctcgtcctccgtctccgtggtggcatgcagatcttcgttaagacactcaccggcaagaccataaccctagaggttgaaagctccgacaccatcgataacgtcaaggccaagatccaggacaag

SEQ ID NO: 258469 - DNA, 292 bp, Glycine max
  unsure (1)..(292): unsure at all n locations
gattatatttgagttcaaacaaatcaaagccatggccacctccaacttctcgattgttctctccgtctccctagccttctttttggtgctacttaccaaggcacactcgagcgataccgtttctttcagcttcaacaagttcaacgcagtccaaccaaacattatgctcgaaaaagatgctagtatttcatcctctggggtgttagaactcaccaaagttggcaacaacggcgtgcccacctcgggatctctcggtcntgcgctttaaggtgccccaatccagatttgggac

SEQ ID NO: 258470 - DNA, 186 bp, Glycine max
cccgaactgttaccactgtcaaccatgccggtgacggcatggttgcgccattcactggccacaaatacatggctgagatcaccagcaagaagaccaacaatgacattaactacattgctagcaacagtggaagagtgcaatgcaggcaggtgtggccaccagatggcaagaagaagtttgagactc

SEQ ID NO: 258471 - DNA, 406 bp, Glycine max; identical to SEQ ID NO: 257773

SEQ ID NO: 258472 - DNA, 359 bp, Glycine max
  unsure (1)..(359): unsure at all n locations
ggttctagtgtgtgattgtttgttgttgtaactcgttcttcttcttttgttgttctgtgtttgtgtttgttttttctctcacctgaaaatgtcttgctgcggtggtaactgtggttgcggaagctcctgcaagtgcggcaacggctgcggaggctgcaagatgtacccagacttgagctacactgagtcaaccaccaccgagaccttggtcatgggagtggcacctgttaaggctcaatttgagggtgctgaaatgggtgtgcccgctgagaacgatggctgcaaatgtgggccaaactgctcctgcaacccctgcacttgcaagtgangtgttgggagagcaagcttcaagcagagat

SEQ ID NO: 258473 - DNA, 408 bp, Glycine max
ggagacgagggtaaggtcgcgttgtgttgcgtcgtgtcgtgcgctgttcctctgtctgtcgtttttgttttcagaccaaaccctagctccgcatcgcaaccatgtcgaccaagcaaggtggaaaagctaagcctttgaagaaacccaagtctgataagaaggattacgacgaggttgacatggctaacattcagaagaaaaaggaagaggagaaggcgctaaaggagttgaaagccaaggcgcaacagaagggaagctttggaggttctgggctcaagaaaagtggaaagaaataagggctctttatcatgattgtatacatccaatattgagccctgtagtttattaccatgataacttctgtcttattgtggccttctttattgctctaatgttagtactgaactg

SEQ ID NO: 258474 - DNA, 358 bp, Glycine max
ggcacaagtgagtttgttgatcgagataactagaaacagtgtgatgaaaatgaaggtccttgttttcttcgttgctacaattttggtagcatggcaatgccatgcgtacgatatgttccctctccgaatgaacactggctatggtgcccgtactccggaggtgaaatgcgcaagttggaagcttgctgtggaagcacacaacatctttggctttgagaccattcctgaagagtgcgttgaagcaacaaaggaatacatccatggcgaacaatatagatcagactccaaaacagttaagcaacaagcttacttttatgccagagacctcgaagtccatcccaaggacacaattgtgttc

SEQ ID NO: 258475 - DNA, 379 bp, Glycine max
  unsure (1)..(379): unsure at all n locations
gagagaggtgcatacgggtagagaggttgctgtacgagataagatattgaagtagtgcggggtgcggaggaggtgcantgaacaagggcctctggatcancatcgcgtctcaagtcggtcacttgttcgtgggaggtgtgagtgggtggggggagaaacaggtcgccaaccttctgcggcagcagttgtgaggagggaggggaccagggcatggggcctcacaatcagagcgggttccgatgctgatgaggtcgttaggagggcgaggggagtggggtcgagagggaggggtattttgggcagtggatggtcgaatgcgagctgtgtgaagcgtttgggggcgattgggctagagaacagtgaagctaaccgccaggcg

SEQ ID NO: 258476 - DNA, 345 bp, Glycine max
gttttttacttgaaatagtaaaaaatgggaattaagatagataagatatatggctaattaaagataaatatatgttcataaaaatgtctttcacatcgaattctataagaatcaagagctatacgaattagagggcagttccaaaaaagcgcacttctagatcaaaaaaaaggattcggaacactttatggaaaaagaagggatattttgcaacattgaaagctttttgattagggcaatctatgtttacgggggaattcaaaaagctttttttgtaacaaatacaaacgttagactaatttcaatgaactaggttcaacggatatttttaaatacgagaagagg

SEQ ID NO: 258477 - DNA, 383 bp, Glycine max
ggaggcgttcgattaacgtttggcgatcacagaagagaagggaatggagttttctcaagatgattttgatcggttactgttattcgagcacacgcgagagactgctgaagcagactacgcagagaatcctcaagacgctgataatctgaccacgtgggggggagctttgatcgagttgtcgtcattccaagctcctaaggatgccaaggcgatgattgatgatgcgctttcgaggctggaggagtctttgctgatcaatccaactaagcagggcactctttggtgcctgggaaatgcaaacacgtcttatgcttttctaatccctgagataactgaggcaaaaggttattttgacaagggacttgagtatttccagaaagctg

SEQ ID NO: 258478 - DNA, 280 bp, Glycine max
  unsure (1)..(280): unsure at all n locations
ggttttgccgtggaagagagaagccctagggtttgggagaagctgatcggagaagatggtgcagcgtctcacctaccgcaggcgccagagctatgccaccgaaatccaaccagcacagagtcgtcaggactcccggtggcaagcgtggttatcagagcacgacggagagggccagcggacccaagtgccctgtcgctggaaagaggattcaanggattccacatttaagggcaacagaatataagagatcaaggttacccaaaaaccgaaggactgtgaa

SEQ ID NO: 258479 - DNA, 414 bp, Glycine max
gaaggtgcaagagtttgttgtgagctataagctagtttatcgtgaggagaatatgaagttgtttgttttctttgttgctgcagtagttctggtagcatggccatgccatggcgcaggctaccaaaggttccctctccgaatgaaaactggctatggtgagcgttcttcggaggtaaaatgcgcaagttttaggcttgctgtggaagcacacaacatccgagcctttaaaaccattcctgaagagtgcgttgaaccaacaaaggactacattaatggcgaacaatttagatcagactctaaaacagttaaccaacaagctttcttttatgctagtgaacgcgaagtccatcacaacgacatatttatattcggcatagataacaccgtactctctaatatcccatactatgaaaa

SEQ ID NO: 258480 - DNA, 386 bp, Glycine max
gccgccgagctcactttctcctcggtccacagagacaaaatgtaagacaggtgccaacagttcatcacgaaagaaaggacgagctgagccgagatcactagctgaaacgaatttaatactaatcgaaaatactaatagaatagaaatagaactgtcttttcatatagatatcccttcagcacaacataggtcatcgaaaggatctcgaggacccaccaacgcacgaaagccgggatcgttcagaagatggattcctattcgaagggtggataagcgcatggataagctcagactaacccgtcgatttgggattcaattcggttccttaggaggtatcgggaaggaattttggaatgtaataatatcgattcatacagatacagaag

SEQ ID NO: 258481 - DNA, 421 bp, Glycine max
  unsure (1)..(421): unsure at all n locations
ggttctagtgtgtgattgtttgttgttgtaactcgttcttcttcttttgttgttctgtgtttgtgtttgttttttctctcacctgaaaatgtcttgctgcggtggtaactgtggttgcggaagctcctgcaagtgcggcaacggctgcggaggctgcaagatgtacccagacttgagctacactgagtcaaccaccaccgagaccttggtcatgggagtggcacctgttaaggctcaatttgagggtgctgaaatgggtgtgcccgctgagaacgatggctgcaaatgtggaccaaactgctcctgcanaccctgcacttgcaagtgaggtgttgggagagcaagcttcaagcagagatagcccttaattangaataatgatanactattaatgtgtagctaaaaacgtatgtattatgtc

SEQ ID NO: 258482 - DNA, 381 bp, Glycine max
gatatctggcagcagaagaacaagtagttgagaactaagaaggagaagcaaatggcttcctcaatgatctcttccccagctgttaccactgtcaaccgtgccggtgccggcatggttgctccattcactgggctcaagtccatggctggcttccccaccaggaagacgaacaatgacattacctccattgctagcaacggtggaagagtgcaatgcatgcaggtgtggccaccagttgggaagaagaagtttgagactctttccgacctgccagaccttgatgatgcacaattggcaaaggaagtagaataccttcttaggaagggatggattccttgcttggaattcgagttggagcacggtttcgtgtaccgtgagcac

SEQ ID NO: 258483 - DNA, 421 bp, Glycine max
agacgacagaaggggaaggtgcaagagtttgttgtgagctataagctagtttatcgtgaggagaatatgaagttgtttgttttcgttgttgctgcagtagttttggtagcatggccatggcatggcgcagggtaccaaaggttcgctctccgagtgaaaactggctatggtgagcgttcttcggaggtaaaatgcgcaagttttaggcttgctgtggaagcacacaagatccgagccttgaaaaccattcctgaagagtgcgttgagacaacaaaggactacattaatggcgaacaatttagatgagactctaaaacagttaaccaacaagctttcttttatgctagtgaacgcgaagtccatcacaacgagagatttatattcggcatacataacaccgtactctctaatatcccatact

SEQ ID NO: 258484 - DNA, 386 bp, Glycine max
ggcacaagtgagtttgttgatcgagataactagaaacagtgtgatgaaaatgaaggtccttgttttcgtcgttgctacaattttggtagcatggcaatgcgatgcgtacgatatgttccctcgccgagtggacactggctatggtgcccgtactccggaggtgaaatgcgcaaagtggaggcttgctgtgggagcacacaagatcgttggctttgagaccattcctgaagagtgcgttgaagcgacaaagggatacatcgatggcgaagggtatagatcagactccaaaacagttaaccaacaagcttacttttatgccagagacctcgaagtcgatcccaaggacacatttgtgttcagtatagatgggaccgtactctctaata

SEQ ID NO: 258485 - DNA, 294 bp, Glycine max
gatatctggcagcagaagaacaagtagttgagaactaagaaggagaagcaaatggcttcctcaatgatctcttccccagctgttaccactgtcaaccgtgccggtgccggcatgggtgctccattcactgggctcaagtccatggctggcttccccaccaggaagacgaacaatgacattacctccattgctagcaacgggggaagagtgcaatgcatgcaggtgtggccaccagttgggaagaagaagtttgagacgctttccgacctgccagaccttgatgatgcacaattg

SEQ ID NO: 258486 - DNA, 402 bp, Glycine max
  unsure (1)..(402): unsure at all n locations
gacaccaacaccataacaaacccactaagatggcttcctttgtatccttcctagtgctgcttcttgcagcccttatcctcatgcctcaagggcctgctacttactacaaaccaattaagaagccaccagtgtacaagcctccagtgtacaagccaccagtgtacaaaccaccggtttataagctaaaaccaccggtttacaagccgaaaccaccggtttacaagccaccatataagaagccaccatacatgaaaccaccttatggaaagtaccctccagtacaggacaatactcatgcctaaagcaagcaatgaagtctattattcacttaataaataagatgaactgctttgtgtnttctatcaatgtgatttacaacttcgtagcaatgcatattcttga

SEQ ID NO: 258487 - DNA, 348 bp, Glycine max
ggagtttgttgatcgagataactagaaacagtgtgatgaaaatgaaggtccttgttttcttcgttgctacaattttggtagcatggcaatgccatgcgtacgatatgttccctctccgaatgaacactggctatggtgcccgtactccggaggtgaaatgcgcaagttgggggcttgctgtggaagcacacaacatctttggctttgagaccattcctgaagagtgcgttgaagcaacaaaggaatacatccatggcgaacaatatagatcagactccaaaacagtttaccaacaagcttacttttatgccagagacctcgaagtccatcccaaggacacatttgtgt

SEQ ID NO: 258488 - DNA, 265 bp, Glycine max
gacaccaaacgagccatttgggagttaggttctgcacgctctgcttccagcgagtgttctttcttcgtttcaacaccttaatttgcacacgctgcttcttcagcttgagaaatggcacaagaaacctttctattcacatctgaatctgtaaacgagggtcaccccgacaagctgtgcgaccagatctctgatgcagtgctcgatgcgtgccttgaacaggaccctgacagcaaggttgcctgtgagacatgcaccaagaccaaca

SEQ ID NO: 258489 - DNA, 307 bp, Glycine max
cgggggtctagtgtgtgattgtctgatgtcgtcactcaatcgtcttctctggatgatctgcgttggtctttgttttttatatcacctgacaatgtctagctgcggtggtaactgtggttgccgaagctactgcaagttcggcatcgggcgcgtacgctgcaagatgtacccagacttgagctaccactgagtcaaccaccaccgagaccttggctatgggagcggcacctgataatgctcaatttgaggatgctcaaacgggtgtgcccgcgtaaaacgatggctggacaagtggactaacctgcta

SEQ ID NO: 258490 - DNA, 424 bp, Glycine max
  unsure (1)..(424): unsure at all n locations
ggagggaagaatagaatgggatctggaagtggaaaacacactggagagttcttcaggagaagggatgcatggaggaagcatccgatgctcaccaatcagctccgccacgccacccctggccttggcatcgcccgtcgtcgccttcggtatctacctcgtcggcgaacaagtctacaataggctctatgctcccgatcctcattcgatttctcacgtgaaagccggggatcaccactaaacgtttggacggacgcactccattccatcatcacttaataagcttgctagcatgttctcgcagcctttaatgtttaaatttcagaccgtgttcgcttctttggcactcactatgttgtcttgtatgcctacattntatgnccttcaattgcattcacaatgaaactcaatntactttacttttttc

SEQ ID NO: 258491 - DNA, 420 bp, Glycine max
gaccacattccaaaacacaaacacatacattgtagtatcacttttgtctcggaatttgttcttttgagttatggcaagcttaaaggttgcatgtgtggttttgatgtgcatggctgtgatgagtgcaccaatgatggtgcaagccgtgtcatgcaatgatgtttctgtgaacctagcaccgtgcctatcttacctgatgcagggtggagatgctccagaatcgtgctgtagcggagtgaggaacattctgggttctgccagcaccacctttgacaaacaaaccgtatgcaaatgtcttcagcaagctgctaataactatggcatcaacgacgaatacgctcaggcactccccgcccgctgcaatgtcagcgtcccttacgagatcagccgatccaccaactgcgactccatcaagttcta

SEQ ID NO: 258492 - DNA, 424 bp, Glycine max
ggcatcatcacagacatggggtctctgcctctgcaattcagcgggctcaagtgctccccactctgatcttcttctgtcttctccaaaccttctctatggacccaacaatcccaaaagcgcgtttcaattaccattgcgaactcaatagcaatagccaatgcgcagaacatagagagagcgaggcttaagaaactcttctaagaagcctaccagagatgccgcaatgctccaatggaaggtgtttccttcaccatcgaagacttcactgctgctcttgacaagtacgacttcgattctgaagttggcggcaagattaaaggcactgtgttctacacagataacaatggagcagttgttgatatcactgcaaagtcttcggcatatttgccactgcaagaggcgtgcatccacaggcttaagcatg

SEQ ID NO: 258493 - DNA, 413 bp, Glycine max
gaaggtgcaagagtttgttgtgagctataaactagggtatcgtggggagaatatgaagttgtttgttttctttgttgctgcagtaattttggtagcatggccatgccatggcgcaggctaccaaaggttccctctccgaatgaaaactggctatggtgagcgttcttcggaggtaaaatgcgcaagttttaggcttgctgtggaagcacacaacatccgagcctttaaaaccattcctgaagagtgcgttgaaccaacaaaggactacattaatggcgaacaatttatatcagactctaaaacagttaaccaacaagctttcttttatgctagtgaacgcgaagtccatcacaacgacatatttatattcggcataaataacaccgtactctctaatatcccatactatgaaa

SEQ ID NO: 258494 - DNA, 407 bp, Glycine max
ggcactagtgagtttgttgatcgagataactagaaacagtgtgatgaaaatgaaggtccttgttttcttcgttgctacaattttggtagcatggcaatgccatgcgtacgatatgttccctctccgaatgaacactggctatggtgcccgtactccggaggtgaaatgcgcaagttggaggcttgctgtggaagcacacaacatctttggctttgagaccattcctgaagagtgcgttgaagcaacaaaggaatacatccatggcgaacaatatagatcagactccaaaacagttaaccaacaagcttacttttatgccagagacctcgaagtccatcccaaggacacatttgtgttcaatattaaatggcaccggactctctaatattccatactacaaaaaacat

SEQ ID NO: 258495 - DNA, 432 bp, Glycine max
ggcacaagtgagtttgttgatcgagataactagaaacagtgtgatgaaaatgaaggtccttgttttcttcgttgctacaattttggtagcatggcaatgccatgcgtacgatatgttccctctccgaatgaacactggctatggtgcccgtactccggaggtgaaatgcgcaagttggaggcttgctgtggaagcacgcaacatctttggctttgagaccattcctgaagagtgcgttgaagcaacaaaggaatacatccatggcgaacaatatagatcagactccaaaacaattaaccaacaagcttacttttatgccagagacctcgaagtccatcccaaggacacatttgtgttcagtatagatggcaccgtactctctaatattccatactacaaaaaacatggatatggggtggagaacattaactc

SEQ ID NO: 258496 - DNA, 453 bp, Glycine max
  unsure (1)..(453): unsure at all n locations
acgacagaaggggaaagaaaagagaaatggcaacagaaacaaaagtggcagtattaggtggcatcaccgaagtgcagggagctgccaacagcgtcgagatcaacaatctcgctcgctttgctgtagaggaacaaaacaaaagagagaattcagttctggagtttgtgagggtgattagtgcacagcagcaagtggtttctggagtgaattactacatagcattggaagcaaaagatggtgagattaaaaatgagtataaagcgaaggtttgggagagggaatcccaagagttgctagaattcatgccaacattaggtgcaggaggcgagatcgaccatctcgctcgctttgctgtagaggaacaaaacanaagagagaatgcaaatctggagtttgtgggggtgattagggcaaatcagcaggtggtggaagggttcatatactacatcactt

SEQ ID NO: 258497 - DNA, 338 bp, Glycine max
gagcgccaatgtttttttcagaggagtgtcatcttgtgatcaaaagactttatcttatagtgagaaatccatgtcttactccattttaaggaacaaaacaagagaacaatatcctgacaaacggtttagccataaaatcgaatccatcattgatttgagatattgataaggcgaatactcatttctcgtcaatgctaggcataatgcgcgtatagggacctaaaaaagaatatcttttcttcctatcttatgaactttaaggtgtatgaagcgtcatttcctatcttacattagaattttagtagggtgataaagagtccatttaacttaagttgatc

SEQ ID NO: 258498 - DNA, 361 bp, Glycine max
gactcaggaaacaagcataatggccttctgtaataaggttggaaatgtcttgaggcagggtgctgctcgcagcacacaagcacctgtttcatccatgcttaattacattcgctgcatgtcttcaagcaagctttttattggaggcctttcatatggagttgacgatcagtctcttaaggatgcattttctggctttggagatgtggttgatgcaaaagttataactgacagagactctggaagatcaaggggatttggatttgtcaacttctccaatgatgagtctgcacgttcggcactctctgcaatggatgggaaggatctagatgggcgaagcattaggggatcctatgcaaatgat

SEQ ID NO: 258499 - DNA, 430 bp, Glycine max
ggaacctcaaaatcagtctctaatatttttctcactgtcttgtctctccagagaactgtatagagagagatggcagctgcaacatctggtgctgtgttaaatgggttgggatcttccttcttgagtggaggaaacaggagccaaacccttctggccactgctattggaggcaaagttggtgctgctgctgttactgttagtcctagaagactcattgtggtagctgctgctgcaccaaagaagtcatggctccctggtgtcagaggtggtggcaacctcgtcgacccagaatggcttgatggatcgctaccaggtgactatggctttgacccactaggccttgggaaggacccagcattcctcaaatggtacagagaagctgagctgattcatgggagatgggcaatggctgcagttctaggaatctttg

SEQ ID NO: 258500 - DNA, 424 bp, Glycine max
gaagcaactaagcaagatatcatcacattgcaaagaaaatacacattacattactaagtctttgttcatttgagtagtagtgatggctagcctcaaggttgcatgtgtggttgctgtgatgtgcatggttgtggtggccatgagtgctgcacccatggcacaggccgcaatcacgtgcgggcaggtcgccggcgacatgtctccgtgcttcagttatcttcgaagcggcggaaaaccgtcgcaggcctgctgcaacggagtgaagtccctcagcagcgcggcgaagaccaccgcggaccgccagggggcgtgcagttgcctgaaaaaccttgccaataatatgggacagagtttgaatgccggcaacgcagcctctcttcctggcaaatgtggcgtcaacattccttacaagatcagcaccttc

SEQ ID NO: 258501 - DNA, 435 bp, Glycine max
gattcagattacattgcaaaaatggcatcattcaccatgacagcttccatccttggcagcccagccgtcaccaaccggtcggcagtagcaacgcagaggagatcactcgtagtgaatgctgccaaagctgttgaagcagaaaaggtcagttatgacaatgacatggatggtagcaatggaaggaggaacttgatgttcgccgcggcggcggctgctgtttgctctgttgctgggatggcagtggcagatgagcctaaaccaggaaccccagaagccaagaaaaagtatgctccgatttgtgtcaccatgccaactgctaggatttgtcgcaattgagggactttggtttttattttacttctgatgattggaaatgtacaatggggttgttgtaatgctttgatgatttcatttgatcctcactgtacaagatgt

SEQ ID NO: 258502 - DNA, 409 bp, Glycine max
gagtgagagagagagaaggcaagatgtcgaggagaggacgtggtggttcggcggggaacaagttccggatgtcgctgggtctgccggtggcggcgacggtgaactgcgccgacaatacgggggcgaagaacctctacatcatatcggtgaaagggatcaaaggggcgtttgaaccgtctcccctcggcttgcgttggcgacatggtgatggccaccgtgaagaaggggaaacccgatctgaggaagaaggttttgccagctgtcattgttcgccagcgcaagccatggcgccgaaaggacggcgtctacatgtatttcgaagataatgctggtgttattgtcaatcccaaaggagaaatgaaaggttctgctatcactggtccccatggaaaagagtgtgctgatctgt

SEQ ID NO: 258503 - DNA, 362 bp, Glycine max
gaaccaaatgcttatattgcatttgctggtaaaagagtaattgaacaaacattgaataaggcagtacctgaaggttcacaagcagctgaatatttattccataagggcttatttgattcaatcgtaccgcgtaatcttttaaagggcgttctgagtgagttatttcaattccataatttcttttctttgactaaaaatgataaggcatagccataaattctttgaataagaaaagggtatattatattatgatatatattggcttagctataatcactagaattattatatactaagtataaatatatagaaattctagtgattatagactatctttatataataatgtaaataagaacaca

SEQ ID NO: 258504 - DNA, 441 bp, Glycine max
  unsure (1)..(441): unsure at all n locations
gatatctggctgcagaagaacaagtagttgagaactaagaaggagaagcaaatggcttcctcaatgatctcttccccagctgttaccactgtcaaccgtgccggtgccggcatggttgctccattcactggcctcaagtccatggctggcttccccaccagaaagaccaacaatgacattacctccattgctagcaacggtggaagagtgcaatgcatgcaggtgtggccaccagttggcaagaagaagtttgagactctttcctacctgccagaccttgatgatgcacaattggcaaaagaagtagaataccttcttaggaaggaatggattccttgcttggaattcgagttggagcacggtttcgtgtaccgtgagcacaacangtcaccaggatactacgatggacgctactggaccatgtggaagctgcctatgttt

SEQ ID NO: 258505 - DNA, 321 bp, Glycine max
ggaattccgtatctgtccggaggtaagcaagcggagatctgatggcgctagagtgggttgtgctagggtacgtcgcggccgcagaggccataatggttattctcctcaccatcccgggcctggaagctctccgaaagggtctgatcgcggtgacccggaaccttctgaagccgttcctctcggtggtgcctttctgcctgttccttttcatggacatatattggaagtacgaaaccaggcctagctgtgagggagattcctgcaccccttccgagcaccctcgccaccagaaatctatcatgaagagccaacgcaacgccc

SEQ ID NO: 258506 - DNA, 425 bp, Glycine max
gaagcgcagttcgttccacgttgttgttcgctctgtgtcgctcactctctctatatttgcatcattcatcggaaatggctctcgaggttgctgttaaggctgctgttggggctccaaatgttctcggagattgtccattttcccaaagggtcctcttaactttggaggagaagaaaattccttacaaactccacctcatcgatctcagtaacaaacccgaatggtttttgggtgtgaatcctgaagggaaggtgccagtggttctttttgatggcaaatgggtggctgattctgatgtaattgtggggatactagaggaaaagtacccagaaccctctctaatcactcctcctgaatttgcctccgtgggatcaaagatatttgggtcttttgtgagttttctgaagagcaaggatacaaacgat

SEQ ID NO: 258507 - DNA, 427 bp, Glycine max
gatgtatcgtcaacgttagtgctttatttaggtgacaaaactactcacagagaaagacactcggagaccttgcaagacttcatcaatggctgtcaaagtttatattgtgtactactccatgtatgggcatgttgagaaactagcagaagaaataaagaaaggggcttcctctgtggaaggtgttgaggccaaattatggcaggtacctgacacgctgcaggatgaggtgctcggtaagatgagtgcaccacccaagagcgatgtaccagtcattaccccgaatgaattatccgaggctgatggctttgtattcggcttaccaacacggtttggaatgatggctgctcagtttaaagcttttctagatgctactggaggcttatggagagcacaacagcttgcaggctagcctgctggcatactctac

SEQ ID NO: 258508 - DNA, 368 bp, Glycine max
agttgagacgaagccgcctaagggggggctttctccaatccacgcactagaatgggggcagtggtttgctcaacacgaatgtgacaagttcaccggttaggactggctccattgctgtgaacgtacaagcagcggatacatatatgatgaggcattggacaacactccaaatgaatatcctaacatcgcaagacacgactaatctgtacgccctaaacgttcaaccgctcactgacacactatgtgcagcctttcccgaatagctgaatatgcaaactagcagtgttacttactgaaaaaccaaaacactttgatgctcatgtgttgactaagaggccagcgaaacagcatggataaccttatcgggt

SEQ ID NO: 258509 - DNA, 282 bp, Glycine max
  unsure (1)..(282): unsure at all n locations
ggatattctatatgaactagttatatatgaactaaccatatccggatatattatataaaataactaatattttatatctaaaattgccccgctactactgtaaatttcgatagggattaaaaaacaaagcctttccgtttcatctcgaattgtgaattgaatattcaatgactaaaaaaatggaataaaaagacgaagaattcaaagaatgattccaaattgaaggtaggataagaacaaaagttctacatattcacaaacnaaaaatatataaatatataa

SEQ ID NO: 258510 - DNA, 405 bp, Glycine max
gcacaagtgagtttgttgatcgagataactggaaacagtgtgatgaaaatgaaggtccttgttttcttcgttgctacaattttgatagcatggcaatgccatgcgtacgatatgttccctctccgaatgaacactggctatggtgcccgtactccagaggtgaaatgctcaagttggaggcttgctgtggaagcacacaacatctttggctttgagaccattcctgaaaagtgcgttgaagcaacaaaggaatacatccatggcgaacaatatagatcagacttcaaaacagttaaccaacaagcttacttgtatgccagagaccttgaagtccattcgaaggacacatttgtgttcagtatagatggcaccgtactctctaatattgcatactacgaaaaacat

SEQ ID NO: 258511 - DNA, 407 bp, Glycine max
ggaaacaagggcgcataatttactaaagccacgaaagagaaaacaacatagtgaagtctcttacatgacttgttgatcgagataactagaaacagtgtgatgaaaatgaaggtccttgttttcttcgttgctacaattttggtagcatggcaatgccatgcgtacgatatgttccctctccgaatgaacactgactatggtgcccgtactccggaggtgaaatgcgcaagttggaggcttgctgtggaagcacacaacatctttggctttgagaccattcctgaagagtgcgttgaagcaacaaaggaatacatccatggcgaacaatatagatcagactccaaaacagttaaccaacaagcttacttttatgccagaaacctcgaagtccatcccaaggacacatt

SEQ ID NO: 258512 - DNA, 442 bp, Glycine max
gaaaaaaaagaaacaaattgagcaatgaatttgtaaatagggcaaaagtaatggataaggaattaatttctctggatatattagaaaaccgaattcgattgtctaatgatgaaactaaaacaaaatatttaactaaaatatatgatcctttcctgaacggacgctttcgtggacaaatcgaaaatgttttttcaacctcaatccaatatgaaaaaaatgaaaaaaaaataccattttgataaataaaattcatggtatccttatttctaataatacttataaaaaaaataatagtaattatccagaattagagaaaaaaataaatatatttgatagaaaatctttagtaactacatttttttttttcaatctaatcagtaaattttcaaaaaaattaatatcaagcttgagttttgaagcactttctttatttccagaacat

SEQ ID NO: 258513 - DNA, 428 bp, Glycine max
ggcgtaacaatagcatactcttactctgattcgttagtgaagaaaaatggcaacaatcatcgccggcaccccaactacatcaatcactcgcacaggtcatgtgctcaaacgacctgttggggcctcatcctctaccgttcttgattgcaaacataaattgtacaggattgccagcaatggccaatgcggtgagagtgaggtgctccatggaggaaaagccttcaagcagctcaaacctagggatgggggcattcttgttagcagctgcagctgccgcaaccatgtcaagcccagcagccatggctttggttgatgagagactcagcactgaaggaactgggctttcctttgggcttagcaacaaccttcttggttggatcctgtttggtgtctttggtctcatatgggctctcttctttgtctacact

SEQ ID NO: 258514 - DNA, 435 bp, Glycine max
gaaagtgcacaagtgagtttgttgatcgagataactagaaacagtgtgatgaaaatgaaggtccttgttttcttccttgctacaattttggtagcatggcaatgccatgcgtacgatatgttccctctccgaatgaacactggctatggtgcccgtactccggaggtgaaatgcgcaagttggaggcttgctgtggaagcacacaacatctttggctttgagaccattcctgaagagtgcgttgaagcaacaaaggaatacatccatggcgaacaatatacatcagactccaaaacagttaaccaacaagcttacttttatgccagagacctcgaagtccatcccaaggacacatttgtgttcagtatagatggcaccgtactctctaacattccatactacaaaaaacatggatatggggtggagaaatttaac

SEQ ID NO: 258515 - DNA, 431 bp, Glycine max
gggattgccccatttcgctcatttttatggaaaatgttctttgagaaacacgaagattacaagttcaatggtttggcatggctctttttgggtgtccctacaagcagctcattgctatataaggaggaatttgagaagatgcaagagaaatatcctgacaacttcaggcttgacttcgctgtgagccgagagcaaacaaacgagaacggagagaagatgtacatccaaacccgaatggctcaatatgcagaagagctgtgggaattactgaagaaggataacactcttgtgtacatgtgtggactaaaaggaatggaaaagggtattgatgacattatggtgtcattggctgccaaagatggcattgattggactgagtacaagaggcaattgaagaaatcagagcaatggaatgtcgaagtctattaatt

SEQ ID NO: 258516 - DNA, 434 bp, Glycine max
ggttctagtgtgtgattgtttgttgttgtaactcgttcttcttcttttgttgttctgtgtttgtgtttgttttttctctcacctgaaaatgtcttgctgcggtggtaactgtggttgcggaagctcctgcaagtgcggcaacggctgcggaggctgcaagatgtacccagacttgagctacactgagtcaaccaccaccgagaccttggtcatgggagtggcacctgttaaggctcaatttgagggtgctgaaatgggtgtgcccgctgagaacgatggctgcaaatgtggaccaaactgctcctgcaacccctgcacttgcaagtgaggtgttgggagagcaagcttcaagcagagatagcccttaattaggaataatgataaaccattaatgtgtagctaaaaacttatgtattatgtctgtgatgggtttc

SEQ ID NO: 258517 - DNA, 419 bp, Glycine max
gacacacagctattcctcttaagcttgctactgagtttccacactgcgtaccttaggtcttccgaattcgaagttaatttgcaagatggctaaggaaaaggctcacatcaacattgtggtggttggtcatgtggaccctgaggaggcaaccaccattaacgagctgaagaagcctgttgtggagaaagaagctccagggcatgccatatgagggcatgcacgtacggcctcggaggggaaccagaaaattatgttaacaaaataatctggaaccctaatgtatcagtgtcatcatcagtgtgtagtttaagctagctttgctatggttacgttctttgagatgagagtcttgatgaacagtaccattctgatgtattgctttccttgaaagttaatgcatgcttcttatcttctgtctg

SEQ ID NO: 258518 - DNA, 298 bp, Glycine max
gaattgaaattgaagaaacggtgtttctagggttcgctttcgcagttgagatttgagaattgactttgagaattggaaaaatggccggtttaccagcgaggatccgtctccaacccaccgacgtcaaagccgccgccttgtggggcgtcactgccgtcaccggcgctctctacctcgttcagccatggggatggttgaagaagacattcttggagaagccagatcctgagcaaaaatgagttggcatctgagagagtgatttgaattttttgatcatgcaaaggatgggtcaaagaat

SEQ ID NO: 258519 - DNA, 382 bp, Glycine max
gagcgccaatgttttttttcagaggagtttcatctgggaatcaggagagtttatcttatagtaagaaatcgatgtcttactccattttaaggaacaaaacaagagaacaatagcctgacaaagggtgtagccataaaatcgaatccatcattgatttgagatattgataaggtgaatactcatttctcgtcaatgctaggcataatgcgggtatagggacctaaaaaagattatcttttcttcctatcttatgaactttaaggtgtatgaagtgtcatttcctatcttagattttaattttagtaggtagataaagagtccatttaacttaagttgatctaggccagaagcagacctacgtcaagataatcccttctttgaa

SEQ ID NO: 258520 - DNA, 352 bp, Glycine max
accacgcgtacgaccacgcatacgggcgactttaaggttttttttcaaaaagactacatatgggtaccgggggaagatgacttctgaagggggcacaagttagtattttgatttaaataactaaaaacagtgtcatgaaaatgaaagaccttgtattcttcaaatctacaatattcgtagcatgggaatttgatacgtacgatatgttttttttgtgaatgaatactgtatatggtgcctatactcctaaagaaaaatatgctagttggatatttgatgaacaatcacacaacatatttggctttgagaaccttacttaataatgcgttgaagcaactaaagaatacattta

SEQ ID NO: 258521 - DNA, 441 bp, Glycine max
ggcattatatttgagttcaaacaaatcaaagccatggccacctccaacttctctattgttctctccgtctccctagccttctttttggtgctacttaccaaggcacactcgaccgataccgtttctttcaccttcaacaagttcaacccagtccaaccaaacattatgctccaaaaagatgctagtatttcatcctctggggtgttacaactcaccaaagttggcagcaacggcgtgcccacctcgggatctctcggtcgtgccctttacgctgccccaatccagatttgggacagcgaaaccggcaaggtagccagctgggctacatcctttaaattcaacattttcgcacccaacaaatcaaactcagctgacgggcttgccttcttcttggcacccgtccggtctcagccccaatccgacgatggatttcttggtctt

SEQ ID NO: 258522 - DNA, 389 bp, Glycine max
gaaggaagggagggaagaatagaatgggatctggaagcggaaaacacactggagaggtcttcaggagaagggatgcatggaggaagcatccgatgctcaccaatcagctccgccacgccacccctggccttggcatcaccgtcgtcgccttcggtatctacctcgtcggcgaacaagactacaataggctctatgctcccgatcctcattcgatttctcacgtgaaagccggggatcaccactaaacgtttggacggacgcactccattgcatcatcacttaataagcttgctagcatgttctcgcagcctttaatgtttaaatttcagaccgcgttcgcttctttggcactcactatattgtcttgtatgcctacatttgatgccttc

SEQ ID NO: 258523 - DNA, 336 bp, Glycine max
ggcttctctggatgcgatacggaagaagattgtcaaaggagagatacaaactaaagttgccgaagtaaaggagccttctgtttctgaaacaaagaccatccctgatgaacttgtacagattcaagcttttatacgatgggaaaaagctgggaagcctaactactctcgggaacaacaacttatggaatttgaggaagcaagaaaagaattgttagaagagcttgagaagggggcttctctggatgcgatacggaagaagattgtcaaaggagagatacaaactaaagttgccaagcaattgaaaaccaaaaaatactttcgtgctgaaagaattca

SEQ ID NO: 258524 - DNA, 411 bp, Glycine max
gatctggcagcagaaaaacaagtagttgagaactaagaagaaggaaatggcttcctcaatgatctcctccccagctgttaccaccgtcaaccgtgccggtgccggcatggttgctccattcaccggcctcaaatccatggctggcttccccacgaggaagaccaacaatgacattacctccattgctagcaacggtggaagagtacaatgcatgcaggtgtggccaccaattggcaagaagaagttcgagactctttcctacttgccagacctcgatgatgcccaattggcaaaggaagtcgaataccttctaacgaagggatggattccttgcttggaattcgagttggagcacggtttcgtgtaccgtgagcacaacaggtcacctggatactatgatggacgctactg

SEQ ID NO: 258525 - DNA, 352 bp, Glycine max
tatgggggtcaccaacacagacaatagtgcatagcgactttgattgggcattattcaatggccaccacagcagctctatcctgaaccatggcgagcacctgcttcatgaggaagcaacctatgacgaccaagagcctaaagacattccccaacgctctttttggtctgaaaggtggacgaggtgggcgggtaacttgcatggcctcatacaaggtgacgctcataaccccagaatgagaagtggtgtttgaatgcccagatgatgttttcatcgttgacaacgctgatgaagaatgcattgaacttgcctactcgtgcatggctggttcttgcgttaaatgtgttgggaaaa

SEQ ID NO: 258526 - DNA, 435 bp, Glycine max
gaaaaacaggcgcgacgccacacgcgtctaccgacgcgaaaaaacgacttaaaggaatttattcaagaagactaccaaaggggacaccggtgggcataaacaaagaaaaaaaaaacccttatccaacacaaccatcattgccacctctgctattaatcaaacaacattcactggtcaaactgctctgaagcaaatcaatgagttcgtccacaagacccgtggcgcccgcaaaagtcgcactaacatgcgccgcaccgtcaagaatgctcctcaaagcattttgtatggccctgaccgtcccaagtacttgggtccattcttggagcacattccatcatacctgaccggagaattccctggtgactacggatgggacactgcttgaatataaaatgacccggaaacctttgtcaagaaccgggaactggaagtgat

SEQ ID NO: 258527 - DNA, 416 bp, Glycine max
gagagttaagttgagttcataccaatctacaataaacgatgattctcattatctccctcattttttctcttctctctttctcccatgcttctgtcctagatttctgtgttgcagattatgcaggtcctattggacctgcaggatattcctgcaagaagccttcaaaggtcacagcagatgattttgcttacagtggccttggcattgctggtaacacctcaaacattatcaaagctgcagtgacccctgcatttgatgctcagtttgctggtctcaacggtcttggcatttccgcagcacgtttggacttagcagcaggtggagttataccacttcacactcatcctggagcttcagaattacttgttgtaattgaagggagcatcctagctggattcatttcttctgccaacatt

SEQ ID NO: 258528 - DNA, 389 bp, Glycine max
  unsure (1)..(389): unsure at all n locations
aggcgtccgaacacgtccgagagggcctcagtagggtactctgcggcagcaccttgaaacgcgggaggttcatactatcttcgccggccttcaccggcctgcagccatgtcaacgaaaaccgttcgtgagccactggaggaaatcctggctctgataccatctgataaagatggtaaacctatcttctgtgtcgatcaactacttatctacttcaatgacacctgaattcatgtcactgaacagcttgagaaggaaactcttgtgcatatgattcgcaagatgattgttaaaggtgacatacatacttcagctgcctatcctactataactagctgacactgatgttgctgcatggatgcaaggaactgggcataactgctcttnatat

SEQ ID NO: 258529 - DNA, 373 bp, Glycine max
ggcacttgtggattcgatgctctagatcactagaaacagagagatgcaaacgaaagtcctcgggttataggttccttcaatttttgaaacatagacgatccatgcggaacatgtcagacttctgcttatgatacactgtgtatagagctcgaactcatgatgcgatatgcaccaactactagcttgctttgaagacacacaacatctttagcttgaagaccattacagaggagctcgttgtggctacaaacgagaacaataatggccaacactatatcttactctccatagcaggtaatcgacaaccttactattctgtcggactccctgaatacgatgccatggacacatttgttgtaattatagttggcgc

SEQ ID NO: 258530 - DNA, 433 bp, Glycine max
gaaaacagcgcgcgacagaggcacagagagaaaatggggtcggggtcagggatctgtgccaagagggtaattgtggacgcacgacaccacatgctggggaggctggcatcgatcgtggcgaaagaacttctgaatgggcagaaggtggtggtagtacgctgcgaggagatttgcatctccggtgggctcgtcaggcagaagatgaagtacttgcgtttcctccgcaagcgcatgaacaccaagccctctcacggccccatccatttccgtgcacccggcaagatcttctggcgcaccgttcgtgggatgataccacacaagacaaagcgaggggaagctgctcttgcgcgattgaaggtgtatgagggcattcctcctccttatgacaagaccaagaggatggttgttcctgatgctctcaaggtgttgaggc

SEQ ID NO: 258531 - DNA, 345 bp, Glycine max
ggtctttaacacaaacaatagtgcatagcgtttgggattgtgcattattcaatggccaccacagcagctctatccggaaccatggtgagcacctccttcatgaggaagcaacctatgacgaccaagagcctaaagacattccccaacgctctttttggtctgaaaggtggacgaggtggtcgtgtaacttgcatggcctcatacaaggtgaagctcataaccccagaaggagaagtggagtttgaatgcccagatgatgttttcattgttgacaaggctgaggaagaaggcattgaacttccctactcatgcatggctggttcttgcgtttcatgtgttgggaaa

SEQ ID NO: 258532 - DNA, 203 bp, Glycine max
gacagaaagagaaagcaatggcttctgtggcaagctgagctgatgctcaaccatctactgtcaagggcctcgctggaactaagctctatttcaagccctttcgacagaactttatacccaagactatcaagagtggtgccgatgaaacaaagtacggggacgagagagtgtacttcgatttggaggatctatgcaacactact

SEQ ID NO: 258533 - DNA, 367 bp, Glycine max
  unsure (1)..(367): unsure at all n locations
ggaaagtaaagtcgctggtaggatcatcatctctttgagttgccattgaagaagaagctcagatcggaaaaattcacctctccaatcccaatcccatcgttgcaaatgatccgattcattctgttgcagaacaggcagggcaagacccgtcttgccaaatactacgttcctctcgaggactccgagaagcacaaggtcgaatacgaggttcatcggctcgtcgtaaacagagaccctaaatacacaaatttcgtcgagtttcgtacgcacaagataatatacaggcgatatgctgggttattnttctcactctgtgttgatatcactgataatgagtaggcgcatttagagtgcattcatttcggtt

SEQ ID NO: 258534 - DNA, 310 bp, Glycine max
gactcaccacttcaaaacactcataacacaaagcacaaagcaaagctcatccttgagttaaaaaatggcagcagcttcttccatggatctctcatccccatccttggctggcaaggccgtgaagctggacccatcagccccagaagtgggaagggtgagcatgaggaagaccgtcaccaagcaggtctcctcatgaagcccatggtacggtccagacccagtcaagtacttgcgcccattctatgacgagcctccgtcctacctaacccgtgagtttccatgcgactacggctgggacactgctgggctt

SEQ ID NO: 258535 - DNA, 436 bp, Glycine max
ggtacattgtctgaacaaccctaacgcgtgcagagcagagagagacccatccatggggcgaagacccgcgcggtgttataggcatattaagaacaaaccatactccaagacacggctttgacgtggagttactgatcttaagatcggaatttactatgttggtatgaacaaaaagggtcttgatcaatttactttctgtatccatctgcttacttgggagaaggaaaacgtttatagttaggccctgcaagctgatcatatcgcttgcaacaagtacatggccaacaatgctggaaaggatgctatttacttgagagtcagggtgcacccattccatgtccttagaatcaacaagatgctttcgtactgccggagctgataggctccaaacaggaatgagacgtgctcatggaaagccacatggtacatgtgctag

SEQ ID NO: 258536 - DNA, 417 bp, Glycine max
gaaggtgcaagagtttgttgtgagctataagctagtttatcgggaggagaatatgaagttgtttgttttctttgttgctgcagtagctttggtagcatggccatgccatggcgcaggctaccaaaggttccctctccgaatgaaaactggctatggtgagcgttcttcggaggtaaaatgcgcaagtttaggcttgctgtggaagcacacaacatccgagcctttaaaaccattcctgaagagtgcgttgaaccaacaaaggactacattaatggcgaacaatttagatcagactctaaaacagttaaccaacaagctttcttttatgctagtgaacgcgaagtccatcacaacgacatatttatattcggcatagataacaccgtactctttaatatgccatactatgaaaaacat

SEQ ID NO: 258537 - DNA, 401 bp, Glycine max
ggatatattatccctacaacgtattaataaccaaaacagcagagagaagagagggtgtagacaaacacaatctctaatggcactcaggatgtgggcttcttccactgccaatgcactcaaagtctcttctacctccagacctcatctcttgcatcctttttctttctccagatgcttgtcttccgtcttggatggacttaagtatgcagattcacacgaatgggtcaagcacgaaggctcagtcgccaccattggtatcactgaccatgcccaggaccatcttggagaggttgtgtatgtggagctgccagaatcacgtggcacagttacccaaaagtctggcttcggagcccttgaaagtgtaaagcaacaagtgacataaactctccaatcttcgggga

SEQ ID NO: 258538 - DNA, 349 bp, Glycine max
ggttctatctaattcagtttttttctcccatcatagagggccgaccctctcctttccctcttcaccaaccaatggctcccccaaaggccgagaagaagcccgcggagaaaaagcccgcagagaaggctccggcggagaagaagcccaaggccgagaagaagatatcgaaggaaggaggaagcgagaagaacaagaacagaacaaagaagagcgtggagacctacaagatttacatcttcaaagtgctgaagcaggttcgccccgacatcggaatctcaagcaaggccatggggatcatgaacagtttcataaacgacatcttcgagaagctcgcccacgagtcgtcgcg

SEQ ID NO: 258539 - DNA, 219 bp, Glycine max
ggaaagagagtgaagagagaagaagatggcgtcgagcggagcggtgccgttttggagggcagcggggatgacatacatcacatactcaaacatatgcgcgaatctggtcaggaattgcctcaaggaaccctacaaggctgaagccatctctcgtgagaaggtccattttgctctctccaaatgggtcgacgccaagcctgaaaaacctactattcgttc

SEQ ID NO: 258540 - DNA, 323 bp, Glycine max
  unsure (1)..(323): unsure at all n locations
atgcttctcaggtgttgaaggagcttcaagaggctaagactgcataccccaatggcttcatccgtatcattggatttgacaacgttcgccaagtgcagtgcatcagcttcatcgcctacaagcccccaggcttctaagtcattgaaaaatttgcaaagcatctgtagccaccccactttgtttgttgtacttaaactacattcccatttgtttttgctttatgagatttcatcatcctgtatttttggcttctgttttcggacttcaatggacattaatggatgagaactaacnggnaaaaaaaaaaaataaaataattaaaa

SEQ ID NO: 258541 - DNA, 438 bp, Glycine max
acgacagaagggggggaaaatagggtacaatacaaacacaaagtcagaaacacaaatgtgggtatagtggagtagtagggtttttgcgtttgagagagaagaagcatgagcaggagtttgggaattccggtgaagctgctccacgaggcttcggggcacgtggtgacggtggagctcaagagcggagaactctacagaggaagcatgatcgagtgcgaggacaactggaactgtcaactcgagagcatcacctacactgccaaggatggcaaaacatcgcaacttgagcatgtgtttattcgaggcagcaaagtcaggtttatggtcatccctgacatgctgaagaatgctcctatgtttaagcgtttggatgcaagaatcaagggtaagggtgcatcacttggtgttggtaggggcagagcaattgcaatgcgagca

SEQ ID NO: 258542 - DNA, 206 bp, Glycine max
gacactgctattcctcggaagcgggctactgagcttccacactgcataccttaaggcttccgaattcgaaggtaacttgcaagatggctaaggaaaaggctcagaccaacattgcggcgggtggtcacgtggaccctgaggaggcaaccaccattaacgagctgaagaagcctcgcgggagaaagaagctccagggcatgccatat

SEQ ID NO: 258543 - DNA, 236 bp, Glycine max
gagggtctttgtcggggctactaagagatgctgggtcttcaggcactccgcacctggcaacctctgtgccctcaacaaccatggctgaaatcgaaactaccggttcagatcccacccaaatcgacgtcaaactcttcaatacctggagcttcgacgatgttgaggttaatgatatgactatggctgactacattggagagatcccatcaaagcatgctacatatgttactcacact

SEQ ID NO: 258544 - DNA, 350 bp, Glycine max
ggcacaagtgagtttgttgatccaaaataaactggggcagtgtgatgaaaatgaagggccttgttttcttcgttgctacaattttggtagcatggcaatgccatgcgtacgatatgttccctctccgaatgaacactgactatggtgcccgtactccggaggtgaaatgcgcaagttggaggcttgctgtggaagcacacaacatctttggctttgagaccattcctgaagagtgcgttgaagcaacaaaggaatacatccatggcgaacaatatagatcagactccaaaacacgtaaccaacaagcttacttttatgccagagacctcgaagtccattccaaagacaca

SEQ ID NO: 258545 - DNA, 222 bp, Glycine max
  unsure (1)..(222): unsure at all n locations
gagagcgaaagagatgtcgttggtttcaagcatgttcgggtgtggagtggtgatggcggcgtcgcaagcaatgggaattggaaggagaagcgatggtggattgacgatagtgtgttcgtctaggccgcagaagaaagcgacggcgcatcacatgaagactcggcctcggaagacgcangcatgggatagaaaccgcaagcccaccgtctacgatccactccc

SEQ ID NO: 258546 - DNA, 419 bp, Glycine max
ggcgcaagtgactttgttgatcgagatgactcgaagcagtgtgatgaaaatgaaggtccgtgttttcttcgttgctacagctttggtagcatggcaatgccgtgcgtacgatatgttccctgtacgaatgaacactggctatggtgcccgtactccggaggtgaaatgcgcaccttggaagcttgctgtggaagcacacaacatctttggctttgagaccattcctgaagagtgcgttgaagcaaagaatgaatacattcatggcgaacaatttagatcagactccaaaacagttgaccaacagacttacttttatgccaaaaaccttaaagtccatctcagggacacatttgagtaaactatacatggtgccgccttttctaatgttccttactccctggcagatccaatgaggaaag

SEQ ID NO: 258547 - DNA, 235 bp, Glycine max
gaaggtgcaagaatgtctagtgagctataaactaggatagcgtgaggagaatatgaagctgactgttttccctgttgcggcactaacattagtagcatggtcatgccatggctcttgctaccaaaggagccctctccgaatgaaaacaggctatggtgagcggtcttcggaggaaaaatgctcacgttttatagctagctgcggaagcacacaacatacgagcctttaaaaccat

SEQ ID NO: 258548 - DNA, 394 bp, Glycine max
  unsure (1)..(394): unsure at all n locations
ggcacaagtgagtttgttgatcgagatagctagaaacagtgtgatgaaaatgaaggtccttgttttcttcgctgctacaattttggtagcatggcaatgccatgcgtacgatatgttccctctgcgaatgaacactggctatggtgcccgtactccggaggtgaaatgcgcaagttggaggcttgctgtggaagcacacaatatctttggctttgagaccattcctgaagagtgcgttgaagcaacaaacgaatacatccatggcgaacaatatagatcagactccaaaacagtaacccacaagcttacttttatgccagaaaactcgaaagtcatccaaagacacaatttgtgtcagtatagatggcaccgtactctctatattncatactac

SEQ ID NO: 258549 - DNA, 305 bp, Glycine max
ggggcaccatcgctgcataataacctattgggagatgctgacatgaataaaaaaggaatggttcaaataccatttactaacataacagaaaacattgtaaaaatacttttacgcgagggttttgttgaaaacgtcagaaaacatagagaaaacgacaaatattttttagttttaactctacggtatagaagaaatagaaaaggatcatataaaagttttttaaatttaaaacggatcagtacacccggtctacgaatatattctaattatcaacgaattcctcgaattttaaggggcatggggga

SEQ ID NO: 258550 - DNA, 372 bp, Glycine max
agaagacgacagaaggggataccaaaaacaaaacacaagccaagtgaaagtgagaaaggataaaaatcaaagagcataatgtcagggatcattcacaagattggggagacccttcatgtgggagggcacaagaaggaggaggagcataagggtgagcaccatgctggagaatacaaaggggagcaccatggtgaacacagtagtgagtacaaaggagagcatcatggtgaacacaaagctggagagtaccatggtgagcacaagccagagcacaaagaggggttcctagacaaagtcaaagacaagatccatggtgagggcggcgccgcccgaggcgagaagaagaagaaggagaagaagaagaaagagcat

SEQ ID NO: 258551 - DNA, 406 bp, Glycine max
gacagcacagcactctttgcaacacaacaaaaaaagacaacacagagagaagcgtcttaataaacgctcttctctgaaaaacctgatttcttctcttcttctcttctctttcgtttccatcttccatctctgaaaatgagagagtgcatttcaatccacatcggtcaggccggtattcaggtcggaaacgcctgctgggagctctactgcctcgaacacggcattcagcctgatgggcagatgccaagtgataagactgttggtggaggtgatgatgctttcaacaccttcttcagtgaaactggggctggaaagcacgtgcctcgtgcgatttttgtacatctcgagcctactgtgattgatgaagttaggactgggacataccgccaactatttcattctgagc

SEQ ID NO: 258552 - DNA, 246 bp, Glycine max
  unsure (1)..(246): unsure at all n locations
gccttttgtctccctttctcctcggnccacaaagacaaaatgtaagacaggtgccaacagttcatcacgaaagaaaggactagctgagccgagatcactaactaaaacgaatttaatactaatcgaaaatactaatagaatagaaatagaactgtcttttcatatagatatcccttcaacacaacataagtcatcgaaaggatctcgaagacccacccaaccccgaaagccgggatctttcaaaaa

SEQ ID NO: 258553 - DNA, 434 bp, Glycine max
gacgacagaaggggatgatggttggttgatgtaatgtgatgttttgtgtgtgagtgggtgtgaattttattggtggattcgcattcgcctctggaattcccaaatcatcagtttcagcgaccatggcttccaactccgtccgagttgccgccgctcagatgacatccatcagcgacctcgctgccaatttggccacttgctctcgtctcatcaaagaagcagcatcagctggagccaaattgctttgctttccggaggccttttcttacgtgggtactaaggatggcgacagtgttcgtgttgctgaaccattggatggaccaattatgagccactactgctctttggccagagaatccagcatttggttgtcacttggaggcttccaagaaaaaggatcccatcctcaacgcttgtctaatactcatgttatc

SEQ ID NO: 258554 - DNA, 414 bp, Glycine max
  unsure (1)..(414): unsure at all n locations
ttttgtcgccaatgtttttttcaaaagagcgggatcttgtaatcaaaagagtgtatcttatantaagaaattgatgtcttactccattttaagaaacaaaacaagagaacaatagcctgacaaagggtttagccataaaatcgaatccatcattgatttgagatattgatagggtgaatactcatttctcgtcaatgctaggcataatgcgggtatagggacctaaaaaagattatcttttcttcctatcttatgaactntaaggtgtatgaagtgtcatttcctatcttaaattttaattttagtagatagataaagagtccatttaacttaagttgatctagggcagaagcagacctacgtcaagataatccctctttgaaacactttggtagtgctcttagaatgtaatcc

SEQ ID NO: 258555 - DNA, 347 bp, Glycine max
gagcgaaacagagagtgatttcagtgagtgatcggtgttcacttgatctcatcataatcgtcagcgtcaattgaagaagataccgatcagaaacatcgccgtcggaaggcctgaagaggcgactcaccccgacacgttgaaggcggctttggctgagttcatctcaaccttcatcttcgtgttcgccgactcaggctccggcatcgcctacaacaagctcaccgacaacggcgctgccacccctgccggcctcatctccgcctccatcgcccatgcattcgccctcttcgtcgccgtctccgtcggcgccaacatctccggcggccacgtcaaccccgccgtcacct

SEQ ID NO: 258556 - DNA, 449 bp, Glycine max
cccacgcgtccggagaagcgacagaagggaagagttttaatattattgtattgtagtagtagccatggggactttcaatcactatgtgattgttaagttcaaagatggtgtggcagttgatgatctcattcaagggttggagaagatggtctttgggattgaccatgtcaagtcctttgaatggggaaaggacattgaaagtcatgatatgctaagacaaggtttcactcatgctttcttgatgacattcaatgggaaaagaggagttcaacgcatttcagactcacccaaatcatcttgagttctcgggagtgttttcacctgctattgagaagattgtggggctggatttcccatctaacctcgtcaaagcaccagcatgatcctcaacttattcaagcaaataaacttttccatctttaaaagcgtatgcatgtgtgtgcatctgc

SEQ ID NO: 258557 - DNA, 303 bp, Glycine max
gaaggtgcaagagtttgttgtgagctataagctagtttatcgtgaggagaatatgaagttgtttgttttctttgttgctgcagtagttttggtagcatggccatgccatggcgcaggctaccaaaggttccttctccgaatgaaaactggctatggtaagcgttcttcggaggtaaaaggcgcaagtttaaggctgctgtggaagcacacaacatccgagcctttaaaaccattcctgaagaagtgcgttgaaccaacaaaggactacattattggcgaacaattaagatcagaactctaaac

SEQ ID NO: 258558 - DNA, 257 bp, Glycine max
gatagaagaagcagaaagagaagcattagcaaaagcaagaagaactagtctaagcagaaatggcctcttcagtgatggcatctgtggccctcaaacctgcccctttcactgttgagaagtcctcagttagaggccttcccttcctctcaaagaactcctcttcattcacagttgtggccagtggtggcaagaagatcaagactgacaagccttatggaattaatggtggcatggctttgagggaaggagttgatgca

SEQ ID NO: 258559 - DNA, 445 bp, Glycine max
aagacgacagaagggggggtgtgttgggaagatggagggtgcagaggaggagctagaaagaagaagcaagtttctcaaaagcttgatacagaagaagaaaaccatagagcaacaagagcagcatgatcacctacaacacaacaacgttcgtgtcagagcttgtgacatgcctctccctcttcagagccgtgcctttcgttgtgcacgtgatctcctggattctatgccaccaaagaagtttgatagtaaacgcctggccctcacacttaagaaggaatttgattcttcttatggtccagcttggcactgcattgtgggtactagttttggcttctatgttactcattcccttggtgggttcgtgtatttttccattgacaaggttttatgttcttctcttcaaagacagctgttggaccattagaccattcatagctctcacaat

SEQ ID NO: 258560 - DNA, 427 bp, Glycine max
gaaaactgcaaccgtgacaaaagttgcgtagcaatagcatactcttactctgattcgttagtgaagaaaaatggcaacaatcatcgccggcaccccaactacatcaatcactcgcacaggtcatgtgctcaaacgacctgttggggcctcatcctctaccgttcttggattgccagcaatggccaaggcggggagagtgaggtgctccatggaggaaaagccttcaagcagctcaaacctagggatgggggcatccttgttagcagctgcagctgccgcaaccatgtcaagcccagcagccatggctttggttgatgagagactcagcactgaaggaactgggcttccctttgggcttagcaacaaccttcttggttggatcctgtttggtgtctttggtctcatatgggctctcttctttgtctac

SEQ ID NO: 258561 - DNA, 306 bp, Glycine max
ggtcaccaacacaaacaatagtgcatagcgtttttcattgtgcattattcaatggccaccacagcagctctatccggaaccatggtgagcacctccttcatgaggaagcaacctatgacgaccaagagcctaaagacattccccaacgctctttttggtctgaaaggtggacgaagtggtcgtgtaacttgcatggcctcgtacaaggtgaagctcataaccccagaaggagaagtggagtttgaatgcccagatgatgttttcattgttgacaaggctgaggaagaaggcattgaacttccctac

SEQ ID NO: 258562 - DNA, 247 bp, Glycine max
gaacctttgcattctattcattcaagattcagcaagtgcgttttggaagcagagaccgaaatacttcgagatggcccttacaaagcaaactgctcgtaagtcaactggaggaaaagctcccaggaagcagcttgcaaccaaggctgcacgtaagtctgcaccaacaactggtggtgtgaagaagcctcatcgttatcgccctggaactgttgctcttcgtgagattaggaaataccagaagaacact

SEQ ID NO: 258563 - DNA, 386 bp, Glycine max
aaagagagtgaagagagaagaagatggcgtctagcggagcggtgccgttttggtgggcagcggggatgacatacatcacatactcaaacatatgcgcgaatctggtcaggaattgcctcaaggaaccctacaaggctgaagccatctctcgtgagaaggtccattttgctctctccaaatgggtcgacgccaagcctgaaaaacctactattcgttcagacaccccagagcagtgatccggaatagttggaagctataaatgcataaatctttgagatctggaagttcattgtcattttgaacctttctgggatgtttaattcctttgcttctttctttttcattccatgaaatggaacatacactggattttgatttgcatgatt

SEQ ID NO: 258564 - DNA, 298 bp, Glycine max
  unsure (1)..(298): unsure at all n locations
ggttctagtgtgtgattgtttgttgttggactcgttcttcttcttttgttgttctgtgtttgtgtttgttttttctctcacctgaaaatgtcttgctgcggtggtaactgtggttgcggaagctcctgcaagtgcggcaacggctgcggaggctgcaagatgtacccagacttgagctacactgagtcaaccaccaccgagaccttggtcatgggagtggcacctgttaaggttcaatttgagggtgcttgaaatgggtgtgcccgctgagaacgatggctgcanatgtggaccaaac

SEQ ID NO: 258565 - DNA, 410 bp, Glycine max
ctggcagcagaagaacacgtacttgagaactgagaaggagaagcaaatggcttcctcaatgatctcttccccagctgttaccactgtcaaccgtgccggtgccggcatggttgctccattcactggcctcaagtccatggctggcttccccaccagaaagaccaacaatgacattacctccattgctagcaacggtggaagagtgcaatgcatgcaggtgtggccaccacttggcaagaagaagtttgagactctttcctacctgccagaccttgatgatgcacaattggcaaaggaagtagaataccttcttaggaagggatggattccttgcttggaattcgagttggagcaccgtttcgtgtaccgtgagcacaacaggtcaccaggatactacgatggacgctact

SEQ ID NO: 258566 - DNA, 414 bp, Glycine max
ggttttggggatagatagagtgatacgcgtcacatgttcataataataaaaaaatggcagcggcggcggcagggaccgtgctactcccacctaggattccgaccaccaccaacgtgacccgctgatctgctttgccttctttgcctgctggcgtatccaacaccaaaaccactgtgttatcacctttcctcaacaacttttcagagtcccgaaaatcttctctgcttcagaccagagcttgttcagaggaatcatcctcaggagatgccaatgacgtggtcacagacttgaaggaaaagtgggatgctcttgaaaacaagtccacaggacttctttatggcggaggggctataactgctatttggctatccgtaatgcttgtgagcgccatcaactcaggtaccttgcttacaa

SEQ ID NO: 258567 - DNA, 167 bp, Glycine max
tcaaacgaagaaaggcttatggtggatacctaggcacccaaagacgaggaagggcgtagtaagcgacgaaatgcttcggggagttgaaaataagcgtacatccggggattcccgatataagtcaacctttagaactggtgctgaatccacgggcagacaattttaat

SEQ ID NO: 258568 - DNA, 415 bp, Glycine max
  unsure (1)..(415): unsure at all n locations
ggcacaacaactcactcactaagctaaacaatttcatcaagcctgccatggcttcctcgtgtgcttcctctgccattgcagctgttgccatctccacaccaagttcccagaagaatggatcactcttgggaagcacaaaagcttcttttcttagtgggaggaaactgaaggtgaacagttttacagcaccagttggagcacgatccagcactacagtgtgtgcagttgctgagcctgataggcctctgtggttcccaggcagcacccctcctccgtggctagatggcagtttgccaggagattttggctttcatcccctaggtcttggatctgatcctgagagcctgagatggaatgtccaancagagcttgtgcactgcagatgggccatgttgggagctgctggcattttcat

SEQ ID NO: 258569 - DNA, 312 bp, Glycine max
aaacagcagagagaagagaaggtgtagacaaacacaatctctaatggcactcaggatgtgggcttcttccactgccaatgcactcaaagtctcttctacctccagacctcatctcttgcatcctttttctttctccagatgctcgtcttccgtcttggatggacttaagtatgcaaattcacacaaatgggtcaagcccgaaggctcagtccccaccattggtatcactgaccatgcccaggaccatcttggagaggttgtgtatgtggagctgccagaatcaggtggcacagttacccacaagtctggctt

SEQ ID NO: 258570 - DNA, 408 bp, Glycine max
gatctccaacaagcggggctgtgaccatggcatccaccactctatcccctacaaccccttctcagctatgctcaggaaagagagggactttcagtccctcacaggcacttcttgtgaagccagtgaagaggcagatgatggggaagagcaagggaatgagaaatgcatgccaagccaccaacattcctgctgataaagtccctgacatgggcaaaagacagctcatgaatcggcttcttcttggggccatttcactcccctctgctggaaagcgtataccctacacctacttttgtgtccctccaggatcaggttcttcagctggtggtactgttgccaaggatgctggtggaaatgatgtaattgcagagaatcggctcaaggcacatggacctcgggaccgaaccc

SEQ ID NO: 258571 - DNA, 420 bp, Glycine max
agaagtggagtttgaatgcccacatgatgttttcattgttgacaaggctgaggaagaaggcattgaacttccctactcgtgcagggctggttcttgcgtttcatgtgttgggaaaattgtgaaaggtgacgtggaccagtcagatggtagcttccttgatgatgaacaaatagaaagtggatgggttctcacctgtgttgctctacctaggtcagacgttgtcattgagacacacaaggatggagagatcgaatgatcgatatatatcataatgtaatcttgtccattgctcttctaatgccatctatctatgtcgtgttttgattttgttagagtgatttggcattggctaagttactagctgatatcattgcgagtttattaattactcttgtcatcgttgtggaaacaagtgaaatt

SEQ ID NO: 258572 - DNA, 213 bp, Glycine max
gacaccaacaccaaaacaaacccactaagatggcttcctttgtatccttcctagtgctgcttcttgcagcccttatcctcatgcctcaagggcctgctacttactacaaaccaattaagaagccaccagtgtacaagcctccagtgtacaagccaccagtgtacaaaccacccggttataagccaaaaccaccggtttacaaagccgaaccac

SEQ ID NO: 258573 - DNA, 306 bp, Glycine max
ggcggcgcacagcagaactctgcttcttcggagtccgatcgcacgcgccgtcaccatggtgaacgttccgaaaacaaagaagacatactgcaagagtaaggagtgcaggaagcacacgctgcacaaggttacccaatacaagaagggtaaggatagcattgctgcccaaggaaaacgccgttatgatcgcaaacaatccggttatggtggacaaactaagcccgtcttccacaagaaggctaaaaccaccaagaagattgttctgaggttgcaatgccagggttgcaagcatgtctcccaacacgc

SEQ ID NO: 258574 - DNA, 361 bp, Glycine max
gagcgccaatgtttttttcagaggagtttcatcttgtaatcaaaagagtttatcttatagtaagaaatcgatgtcttactccattttaaggaacaaaacaagagaacaatagcctgacaaagggtttagccataaaatcgaatccatcattgatttgagatattgataaggtgaatactcatttctcgtcaatgctaggcataatgcgggtatagggacctaaaaaagattatcttttcttcctatcttatgaactttaaggtgtatgaagtgtcatttcctatcttacattttacatttagtacgtagataaagagtccatttaacttaagttgatctaggccagaaacagacctacgtc

SEQ ID NO: 258575 - DNA, 316 bp, Glycine max
agtggacgacatgggcaatgcgaaaagcgaaggtcggcactcactatggtttcatccctttggtcatcatcatcggtatgaactctgaccccaagcccccactttcccagcttctcagccccgtctgatctacctcttcatttcttccaccatcaacgcgacctcgtttttttcttttcttttgccccctttatacatttgggaggctccttatggagcaatcatcacttgcacatctcatgtggcatggtgtgatcaaagtcgattagcttgtctgcgtgtctggatagttttgaaagacaccgccagaaataat

SEQ ID NO: 258576 - DNA, 240 bp, Glycine max
gatcatgtacaagggcaatctctctctctctgtctctctctctctagacttaaaatttgtgaatggctgaagtggaagagggacaggtcattggcgtccacaccgttgatgagtggaagctgcaacttcagaatgcaaaagactccaaaaaactgattgtggtggattttactgcttcctggtgtggtccatgccgctttatggccccagttcttgcagagatcgcaaagaaaactcctg

SEQ ID NO: 258577 - DNA, 319 bp, Glycine max
acgcgtactatcacgcgtccgacggctgttatattttacagatggggtaaagagaggggagagagaataacatggcgacgagcggaactatgcccctttgtacggcagcgggcatgacatacatcacatactcaaacatatgcgcgaatctggtcaggaattgccttaaggaaccctacaaggctgaagccatctctcatgagaaggtccattttgctctctccaaatgggtcgacgccaaacctgacaaacccactattcttcagacaccccaaagcagtgatcctgaatagtcggaagctataaatgcataaatttt

SEQ ID NO: 258578 - DNA, 398 bp, Glycine max
ggggggcagcagaagaacaggtagttgagaactaagaaggagaagcaaatggcttcctcaatgatctcttccccagctgttaccactgtcaaccgtgccggtgccggcatggttgctccattcactggcctcaagtccatggctggcttccccaccaggaagaccaacaatgacattacctccattgctagcaacggtggaagagtgcaatgcatgcaggtgtggccaccagttggcaagaagaagtttgagactctttcctacctgccagaccttgatgatgcacaattggcaaaggaagtagaataccttcttaggaagggatggattccttgcttggaattcgagttggagcacggtttcgtgtaccgtgagcacaacacgtcaccaggatacta

SEQ ID NO: 258579 - DNA, 411 bp, Glycine max
gacacttactagtagtaagcatggagtcctcaaggatctatgcttacctcttcctctgcatgatctttctctctttcgccactcccattctcggttgtggctactgtggcaaaccccccaaaaagcacaagcctggtaaaacaccaaagacacccaaaacacccgttgttaagccaccagtcaccatccctcccattaacgttcctcccgttgttctttcaccaatagtgaagcccccaggtactttccctccaattccaattattaacccaccaaccacacctaggaagggagggaacacttcttgcccaccaccaaagtcttcttcgcaagctacgtgccccattgacacgcttaaacttggtgcctgtgtggatctttttggaggggtgggtcacattggtttggggg

SEQ ID NO: 258580 - DNA, 409 bp, Glycine max
ggcacaagtgagtttgttgatcgagataactagaaacagtgtgatgaaaatgaaggtccttgttttcttcgttgctacaattttggtagcatggcaatgccatgcgtacgatatgttccctctccgaatgaacactggctatggtgtccgtactccggaggtgaaatgcgcaagttggaggcttgctgtggaagcacacaacatctttggctttgagaccattcctgaagagtgcgttgaagcaacaaaggagtacatccatggcgaacaatatagatcagactccaaaacagctaaccaacaagcttacttttatgccagagacctcgaagtccatcccaaagacacatttgtggtcagtatagatggcaccgtactctctaatattccatactacaaaaaacatgga

SEQ ID NO: 258581 - DNA, 217 bp, Glycine max
gatgggacagatgatcattaggaccaagagaaacaaatggcagcacgtgggtgcgcgtttaccgacatcaccgcgtgcacagaacagcatcgatatcgaaaatctacctcgctttgatgctgatgaacacaacatactagagagtgctgactttgcgtttgggagggtgattatagccaacaaacaaatggtgttctggcacctcgtgctatatcac

SEQ ID NO: 258582 - DNA, 340 bp, Glycine max
gcatattacaaggactttgacattgaagggtgcccagtgccaggacctgccaactgtgcctctaaccaaagtaattggtgggaaggggctgcataccaagctcttaatgccattgaagcccgaaggtacaggtgggttcggctcaaccatatcatctatgattactgccaagataagtcaaggtttccagtgatcccaccagagtgccttgccggcatttaaaccctaaatttcatgtcactttaattattcaaagtcaagaatacccctatatataatttacattggccactggtcaaaacataacatactatattttatcggaaaaaaaacaatatac

SEQ ID NO: 258583 - DNA, 367 bp, Glycine max
atattcttgtcaggaagaacactggacaaacaggccgtaacagaagcaaacttaaagaaggctggctaccacacatgggaaaaattaattctcaaggatccacaagatccttccactccaaatgcagcttcatacaaaacagcagcgagagagaaactgataaggcagggatacaacattgttgggatcattggagaccaatggagcgatctcctcggaggccacagaggcgaaagcaggacctttaagcttcctaatcccctgtactacattcagtagttccttcacctctcaacaatctagcttgctcctatctatctatatgtaataagatgcgttcaaattagggcactaacttcactttatg

SEQ ID NO: 258584 - DNA, 293 bp, Glycine max
gaacatcatcatcaacaacaagcagatcaatctctctctctctctcaaccataatagtcataggcttgaaggaggattttgagcagtatgctgagaaagcaaagactttgccaccgactcaatcaaaccaagacttgcttatcctttatgggttggaccaaccgggcacccgtggacctggcaacaccaacccgcctggaatggtcaacattggggaccaaacttaattggatgcattggaaggttgtgaaaggaaaatccaaggccaaaccatgggtgaataccttatttaa

SEQ ID NO: 258585 - DNA, 390 bp, Glycine max
gaacacgagtgaaagtacaagttgcagggatggcctcaacctcctcctccacactctctatatcctcttcatccacccttgttgatgccaaggctccaagtccaagacaatccccacaatgtgtctcccctccacctgttcactctccttggaagaccactgctttctgtcgcaggattgcaagcaatgttatggcaatggctaccaccagagaggcacccgcagcagaagttgccacgaccgagctctctgttgccgagacgccagacattgtgaagactattcaagaagcttgggacaaaggtgaagacaaatatgccgtgagttcacttgccggaacccgtgtggttgcattgggtggctcaacttgcatgatctcagcaattgata

SEQ ID NO: 258586 - DNA, 283 bp, Glycine max
ggcacaagtgagtttgttgatcgagataactagaaacagtgtgatgaaaatgaaggtccttgttttcttcgttgctacaattttggtagcatggcaatgccatgcgtacgatatgttccctctccgaatgaacactggctatggtgcccgtactccggaggtggaatgcgcaagttggaggcttgctgtggaagcacacaacatctttggctttgagaccattcctgaagagtgcgttgaagcaacaaaggaatacatccatggcgaacaatatagatcagac

SEQ ID NO: 258587 - DNA, 355 bp, Glycine max
ctaactccaacacacaccacactttctcccccttctgtcgtcagaagacgacagaagggagaaaaaggaatcggagatggaacagttagctatggaatggatgatggtgacgacatttacatgcgctcttggactggaaccattattggcccccataatactgtacatgaaggaagaatttatcaattgaagttgttttgtgataaagactacccagaaaagcccccaagtgttcggtttcattcacgaatcaatatgacttgtgttaatcatgaaactggagtggttgaatcaaagaaatttggtcttcttgcaaattggcaacgggggtttaccatggaagatatactgaccc

SEQ ID NO: 258588 - DNA, 216 bp, Glycine max
gggccggaaaaaaaccaggtggtgggaacttagaagaagggaatggctttctcaatggtcttcttcccaggtggtaccaacggcaaacgtgcccgtgcccggatgggtggttcattcaccggccttaaaatcatgggtgggtttcccaccagggagaccaaccatggccttaccttcattggtagcaaccggggaagaatacaatgccttccagtg

SEQ ID NO: 258589 - DNA, 387 bp, Glycine max
gacacaactgaacaagataagctatccatagcagccaaagaaatgaagagtaccttgttcgccctctttctactttgtgccctcacctcttgcctaccttcagccaccgctggtgatgtggtcgacactgatggtaatcctgttgaaaatggaggcacatactttgtgttgccaactataatattaaacggcggtggaatagaatatgccacatttggaaatgaaacttgccctgtcactgttgcgcaatctcgcgatcagttctgcaagggctttccgataaccatttcatccccagcccgaattcgtcacatcagcgaaggccttagtttgaacattgggttcacttttccatcctcgtgttcccccgcttctgagtggaccatt

SEQ ID NO: 258590 - DNA, 184 bp, Glycine max
gacaccaacgccaaaacaaacccactaagatggctgccttgtgatgcttcctagacgctgattgttgcgacccttattctgatgcgtcacagggctggctgctgtagctacaaagcgcgagcaccaatgctggagaatacaagcgctgagcacgatcgagtgacacacagtgtgcaaaccaccg

SEQ ID NO: 258591 - DNA, 302 bp, Glycine max
agaaggggccgctgagctccctttctcctcggaccacatagacaaaatgtaagacaggtgccaacagttcattactaatgaaaggactagctgagccgagatcactaactaaaacgaatttaatactaatcgaaaatacttattgaattgaaattgaactgtcttttcatatagatatcccttcaacacaacataggtcatttaaaggatcttgaagacccaccaacgcacaaaagtcgggatcattcagaaaaggtattttttttgaagggggcataaccatattgataaactttacacta

SEQ ID NO: 258592 - DNA, 182 bp, Glycine max
ggtttcactccctaatagctgctacaggtacagggtaacttctattctatatttctttctacccgcaagcaaatcagaagaagagaatggcagcagcagaggggctaaacagagagcagtacgtgtacttggcgaagctgtctgagcaagcggagccgtaccaggagatggtggagttcatg

SEQ ID NO: 258593 - DNA, 272 bp, Glycine max
gaactagttatatatgaactaaccatatccatatatattatataaaataactaatattttatatctaaaattgccccgctactactgtaaatttcgatagggattaaaaaacaaagcctttccgtttcatctcgaattgtgaattgaatattcaatgactaaaaaaatggaataaaaaaacgaagaattcaaagaatgattccaaattgaaggtaggataagaacaaaggttctacatattcacaaaaaaaactatgtatgtaggtagagac

SEQ ID NO: 258594 - DNA, 357 bp, Glycine max
gatctggcagcagaagaacaagtagttgagaactaagaaggagaagcaaatggcttcctcaatgatctcttccccagctgttaccactgtcaaccgtgccggtgccggcatggttgctccattcactggcctcaagtccatggctggcttccccaccaggaagaccaacaatgacattacctccattgctagcaacggtggaagagtgcaatgcatgcaggtgtggccaccacttggcaagaagaagtttgagactctttcctacctgccagaccttgatgatgcacaattggcaaaagaagtagaataccttcttaagaagggatggattccttgcttggaattcgagttggagca

SEQ ID NO: 258595 - DNA, 173 bp, Glycine max
gacatggctatcaatcaatcttctgagagtgtttggttgaaagtaacaaagatgtttcctttcgtgcaaaacggtcaaaagataaaggggactatggtggttatccaaaaaaatgtgttggttttaaacagcatccccagtgttggaggtatccttaaccaaggcttaggctt

SEQ ID NO: 258596 - DNA, 140 bp, Glycine max
ggggatatggcgaaattggtagacgccacggacttaattggattgagtcttggtatggaaacttaccaagtgagaactttcaaattcagagaaaccctggaattcacaaagggcaatcctgagccaaatcctgttttccg

SEQ ID NO: 258597 - DNA, 327 bp, Glycine max
gaagcaactaagcaagatatcatcacattgcagagaaaatacacattacattactaagtctttgttcattagagtagtagtgatggctagcctcaaggttgcatgtgtggttgctgtgatgtgcatggttgtggtggccatgagtgctgcacccatggcacaggccgcaatcacgtgcgggcaggtcgccggcgacatgtctccgtgcttcagttatcttcgaagcggcggaaaaccgtcgcaggcctgctgcaacggagtgaagtccctcagcagcgcggcgaagaccaccgcggaccggcagggggcgtgcagtttgcctaaaaa

SEQ ID NO: 258598 - DNA, 306 bp, Glycine max
ggcatagcatattccagtgtttttcatttcatcgggcattcaatggccaccacagcagctctatccggaaccatggtgagcacctccttcatgaggaggcaacctatgaccaccacaagcctaaagacattccccaacgttggtgaagctctttttggtctgaaaagtggacgaggtggtcgtgtcacttgcatggcctcgtacaaggtgaagctcataaccccagaaagagaagtggagtttgaatgcccagatgatgttttcattgttgacaaggcagaggacgaatgcattgaactttcctac

SEQ ID NO: 258599 - DNA, 290 bp, Glycine max
ggagaggtatcacagtgaaacgaagaagccctaactacgcacgcactcattcttgagaaagctcaatattcattcgtccatggcactctcttctcgtctcttttccaaatccaaattgatctatggctgtcaaatacttctgcaaaaggagcattgcttttccagttcgtcactttgttaaagagtctgcccctcctgcccttaagggagatcagatgctgaagaacatttttgtggaggtgaagaacacatttgagactgccttaggaatattaaagaaggagaagatc

SEQ ID NO: 258600 - DNA, 399 bp, Glycine max
  unsure (1)..(399): unsure at all n locations
gttctagtgtgtgattgtttggtgttgtaactcgttcttcttcttttgttgttctgtgtttgtgtttgttttttctctcacctgaaaatgtcttgctgcggtggtaactgtggttacggaagctcctgcaagtgcggcaacggctgcggaggctgcaagatgtacccagacttgagctacactgagtcaaccaccaccgagaccttggtcatgggagtggcacctgttaaggctcaatttgagggtgctgaaatgggtgtgcccgctgagaacgatggctgcaaatgtggaccaaactgctcctgcaacccctgcacttgcaagtgaggtgttgggagagcaagctncaagcagagatagcccttaattaggaataatgataaactattaatgtgtagc

SEQ ID NO: 258601 - DNA, 365 bp, Glycine max
ggaagaagaagaagaagaagatggcattgggtgttcctgctcttcccctgacatacgtggctcacgttctggcacttgttgccagcatcttggtcgtgctctgggtcctcaattttaggggtggcttggcttgggattctgataacaaggccctcatcttcaatcttcatccagttcttattgtcattggcttactagtccttgggggtgaagctattataagctacaaagcattacccctgaagaaggaagtgaagaaattgatacaccttgttttccatgccatcgcattaatacttggaatagttggaatttatactgccttcaagtatcacaatgaaagtgggattgccaatctctacagc

SEQ ID NO: 258602 - DNA, 218 bp, Glycine max
ccgtgatgggacggatgatcattaggaccaactggaacgaatggcagcgctgcgtggctttaccgacatcaccgctagcacatatcagattcgatatatataatctaccctgctctgacgctggtgaacacaacatacttgagagtgcaaactttgcgtttgggagggcgattattgccaacaaacatatggtgttctggaaccgcgtactatatcac

SEQ ID NO: 258603 - DNA, 424 bp, Glycine max
gaacatcatcatcaacaacaagcagatcaatctctctctctctctcaaccataatagtcataggtttgaaggaggattttgagcagtatgctgagaaagcaaagactttgccaccgactcaatcaaacgaagacttgcttatcctttatggattgtacaaacaggccaccgttggacctgtcaacaccagccgtcctggaatgttcaacatgggggacagagctaaatgggatgcatggaaggctgttgaagggaaatccaaggacgaagcaatgggtgattacatcattaaggtgaaacagctgctggaagcagctggcttgcctgcttgataacattgtcatgccttgctttctgattctgtgctagaagttcacaacagtttggaaataaacaattgcagtgtttgaagcttttattatca

SEQ ID NO: 258604 - DNA, 407 bp, Glycine max
gaacacgagtgaaagtacaagttgcagggatggcctcaacctcctcctccacactctctatatcctcttcatccacccttgttgatgccaaggctccaagtccaagacaatccccacaatgtgtctcccctccacctgttcactctccttggaagaccactgctttctgtcgcaggattgcaagcaatgttatggcaatggctaccaccagagaggcacccgcagcagaagttgccacgaccgagctctctgttgccgagacgccagagattgtgaagactattcaagaagcttgggacaaagttgaagacaaatatgcagtgagttcacttgccgtagccggcgtggttgcattggttggctcagctggcatgatctcagcaattgataggcttcctttaattcct

SEQ ID NO: 258605 - DNA, 398 bp, Glycine max
  unsure (1)..(398): unsure at all n locations
attttcttgtcaggaagaacactggacaaacaggccgtaacagaagcaaacttaaagaaggctggctaccacacatgggataaattaattctcaaggatccacaagatccttgcactccaaatgcagcttcatacaaaacagcagcgagagagaaactgataatgcagggatacaacattgttgggatcattggagaccaatggagcgatctcctcggaggccacagatgcgaaagcaggacctttaagcttcctaattccctgtactacattcagtagcttcttaacctcttaacaatctagctcgctcctatctatctatatgtaataagatgcgctcaaataggggcactagcttcactntatgttgtttcagctgtgcgttaacaagtcatgta

SEQ ID NO: 258606 - DNA, 428 bp, Glycine max
  unsure (1)..(428): unsure at all n locations
ggcacaagtgagtttgttgatcgagataactagaaacagtgtgatgaaaatgaaggtccttgttttcttcgttgctacaattttggtagcatggcaatgccatgcgtacgatatgttccctctccgaatgaacactggctatggtgcccgtactccggaggtggaatgcgcaagttggaggcttgctgtggaagcacacaacatctttggctttgagaccattcctgaagagtgcgttgaagcaacaaaggaatacatccatggcgaacaatatagatcagactccaaaacagttaaccaacaagcttacttttatgccagagacctcgaagtccatcccaaggacacattngtgttcagtatagatggcaccgtactctctaatattccatactacaaaaaacatggatatggggtggagaaattta

SEQ ID NO: 258607 - DNA, 400 bp, Glycine max
aattcgagcgggcgctcttctttttggggctcatgtgtgtttgttgtaactccaacacacaccacactttatgccccttctggcgccagaagacgacagaggggagaaaaaggaatcggagatggaacagctagctatggaatggatgatggggacgacatttacatgcgctcttggactggaaccattattgggccccataatactgctcatgaaggaagaactcatcaattgaggctgtgttgcgataaagactacccacaaaagcccccaagtggtcggcttcattcacgaatcaatatgacttgtgttaatcatgaaactggagcgggcgaaccaaagaaactgggacctcttgcaaattggcaacggaggtttaccatggaagatatactgaccc

SEQ ID NO: 258608 - DNA, 289 bp, Glycine max
gattttattgtctcaaaaaaaaaaaaggcattcagagatggttctcacatccactgccactcacccatatgaaaaagaccagatcctaaactctacttttgcttccagatattttcgtgatcctatttcaaaattcaagatcccacagaaatcaataccaaaggatgcagctttttagataataaaccacaaatcattgttggatgttgcaccatggctcaacatggcttcgtttgtgaccacttgtatggagcctgagtgtgacaagctcataatggcttcacttaac

SEQ ID NO: 258609 - DNA, 396 bp, Glycine max
ttcttatggggatttttttggcccagaacaaaaagaggcactcggggccggttctcacgggcactgtccctcacccagatgaaaaagaccagagcctaaactctacttttgcttccagatatgtgcgtgaacctctttcacatttcatcatgccatagaactcaattccaaccgattcatcctttcacataataaacgatgacttgatgttggatggtgcaccaaagctcaactccgcttcgatcgtgaccacttggattgatcctgcgtatcacaagctcataatgtcttcacttaacaaaaactatggaaatatagataagtatcctgtcaccactgttctccagaacctttaccttaatatatttatctaacctattccatgctcctattagt

SEQ ID NO: 258610 - DNA, 394 bp, Glycine max
aattggagcgggcgcactacttatgggggctcatgtgagtttgttgaaacggcaacacacaggacacttggtgccccttttggggccagaagacgacagaagggagaaaaaggaatcggagatggaacagcttgctatggaatggatgatggggacgacatttacatgcggtcttggactggaaccattattgtgccccatattgctggtcgtgaaggaagaactcatcaactgtggctgttttgcgataaagactacccacaaaagccccccagtggtcggcttccttcacgaaccaatatgacttgagttcatcatgaaactggagcgggcgaaccaaaaaaactgggacctcttggaaaatggcaacggcacgttaccatggaagatatac

SEQ ID NO: 258611 - DNA, 416 bp, Glycine max
gattgagtacaacttcacattttaggggaataccgcctcttttgctgcatcagatgagttttaaattaaaagcatggctgcacaagctcttgtatcatcatcttatcttaccttctcaacggaagctgcaagacatagtcttggaccaagatcactccaatctccatttggcttctccagaaaagcctcctttcttgttaaggcagcttctaccccccctgtcaagcaaggatcagacaggcctttgtggtttgcatcaaagcaaagtctttcttacttggatggcacccttcctggtgactatggatttgaccctctgtgactgttagaccctgaatgaacatgagggttcattgagccgaaatggctagcatatggtgagataatcaatgtgcgttatgcaatgttaggtgcag

SEQ ID NO: 258612 - DNA, 352 bp, Glycine max
gacacaactgaacaagataagctatccatagcaggggaagaaatgaagagtaccttgttcgccctctttctactttgtgccctcacctcttgcctaccttcatgcaccgttggtgatgtggtcgacactgatggtaatcctgttgaaaatggaggcacatactttgtgttgccaactataatattaaacggcggtggaatagaatatgccacatttggaaatgaaacttgccctgtcactgttgcgcaatctcgcgatcagttctgcaagggctttccgataaccatttcatgcccagcccgaatccgtaacatcatcgaatgccttagtttgaacattgggttcactttcg

SEQ ID NO: 258613 - DNA, 347 bp, Glycine max
gccaagcgtacgtagggatgccagaagacaaccgcaggggacgccaacgccaaaacaaacccactaagatgggcgtctttgtatgcttcctagagctgattgttgcgacccttaatgtcatacgtcacaggacttgctgacttactacaaagccgatgcaccaagcctccagaatacaaaggctaccacgttcagtgaacacagtgttcaaaccaccggattataatccaggagcaccggttttcagagacgacaccagcgggttacaagccaacatataagaaggcgccctacacgaaaccaccgtatggaaagatccctgcagcggaggacaacacccctgccta

SEQ ID NO: 258614 - DNA, 394 bp, Glycine max
ggtttcactccctaatagctgctacaggtacagcgggacttctattctatatttcggtctactcgcaagcaaatcagaagaagagaatggcagcagcagaggggctaaacagagagcagtacgtgtacttggcgaagctgtcggagcaggcggagcggtacgaggagatggtggagttcatgcagaacgtggtggtggggtcgacgccggcgtcggagctcacggtggaggagcgcaacctcctctcggtggcctacaagaacgtcatcggctcgctgcgtgccgcgtggcacatcgtctcctccatcgagcaaaaggaggagggccgcaagaacgacgaccacgtctccctcgtcaagcactacagatccaaggtcgagaacgagctcactca

SEQ ID NO: 258615 - DNA, 426 bp, Glycine max; identical to SEQ ID NO: 256793

SEQ ID NO: 258616 - DNA, 280 bp, Glycine max
  unsure (1)..(280): unsure at all n locations
gaactagttatatatgaactaaccatatccatatagattatataggataactaatatgttatatctaaaattgccccgctactactgtaaatttcgatagggattaaaaaacaaagcctttccgtttcatctcgaattgtgaattgaatattcaatgactaaaaaaatggaataaaaaaacgaagaattcaaagaatgattccaaattgaaggtaggataagaacaaaggttctacatattcacaaaaaaaactatgtatgtaggtagagacccggtant

SEQ ID NO: 258617 - DNA, 308 bp, Glycine max
gacctggcaaccaatcaaccttttgttagggtctgggagagagaagcaaatatgtttctttttgatctattgggcaaatggatacagtggactacgtggcgtttccagaataattggttgattatctgcactataacccatggttgggttatccatgaccaagacttacgcttactttaccttcattgctatgaacttactttgagtgccacgcatgcatgcatgcacacgatttgtgctaaaaaagctggagactgtatactacctgtcggaccttgttcatgcacaattggcaaaggaagtagaat

SEQ ID NO: 258618 - DNA, 140 bp, Glycine max; identical to SEQ ID NO: 258596

SEQ ID NO: 258619 - DNA, 369 bp, Glycine max
gaagcaactaagcaagatatcatcacattgcaaagaaaatacacattacattactaagtctttgttcatttgagtagtagtgatggctagcctcaaggatgcatgtgtggttgctgtgatgtgcatggttgtggtggccatgagtgctgcacccatggcacaggccgcaatcacgtgcgggcaggtcgccggcgacatgtgtccgtgcttcagttatcttcgaagcggaggaaaaccgtcgcaggcctgctgcaacggagtgaagcccctcagcagcgcggcgaagaccaccgaagaccgccagggggcgtgcagttgcctgaaaaaccttgccaataatatgggacagagtttgaatgccggcaacgc

SEQ ID NO: 258620 - DNA, 140 bp, Glycine max
ggggatatggcgaaattggtagaggccacggacggaattggattgagtcttggtatggaaacttaccaagggtgaacttcctaattgagagaaaccctggaattcacaaagggcaatcctgagccaaatcctgttttccg

SEQ ID NO: 258621 - DNA, 380 bp, Glycine max
gacgacagaagacgacacaacggggcttgagagcagcacagagcaaaggggatacacgtgacattactaagggctttgggcatcagactagtagggatggctagcctcaaagttgcatgtgcggtcagtatgaaccgcatggttgagggggccatgaatgctccacccatggcacaagccataatcacgtgcagacaagtctgcccagacatgtttcactgcttcagttatcctcgaagcggcagaaaaccatcgcaagcctgctgcaacggagtgaaacacctcagcagcgcggcgaataccaccgtggaccgacaaggggcatgcaactgcctgaaaaacccgtgcaataatatgggacaaaacttgaatgccagcaa

SEQ ID NO: 258622 - DNA, 389 bp, Glycine max
ggagaggcatcacagggaaacgaagaatccctaagtacgcacgcgctcattcttgagaaagctgaatattcattcgtccatggcactctcttttcgtgtcttttgcaaatccaaattgatctatgggtgtgaaatacttatgcaaaaggagcatgctattccagttcgtcactttgctaaagagtctgcccctcctgcccttaacggagatcagatgctgaagaacatttttgaggaggtgaagaacaaatttgagactgccataggaatattaaagaaggagaagatcaccattgacccacaagatccagctgctgtttctcattatgctaaggtcatgaaaacacttagagagaatgcaagcttgttgtccgagtcccatgacatac

SEQ ID NO: 258623 - DNA, 399 bp, Glycine max
  unsure (1)..(399): unsure at all n locations
gttctagtgtgtgattgtttgttgttgtaacgcgttcttcttcttttgttgttctgtgtttgtgtttgttttttctctcacctgaaaatgtcttgctgcggtggtaactgtggttacggaagctcctgcaagtgcggcaacggctgcggaggctgcaagatgtacccagacttgagctacactgagtcaaccaccaccgagaccttggtcatgggagtggcacctgttaaggctcaatttgagggtgctgaaatgggtgtgcccgctgagaacgatggctgcaaatgtggaccaaactgctcctgcaacccctgcacttgcaagtgaggtgttgggagagcaagcttcaagcagagataacccttaattngaataatgataaactattaatgtgtagct

SEQ ID NO: 258624 - DNA, 386 bp, Glycine max
ggtaaaggaggcggggtgctgggaaagccctttattgaaaaagtcacccctggccgtgagtctgaatttgatttgaagaaatcacggaaatcagcaccaccgtatcgtgtaatattgcacaacgacaactttaataaacgggaataccttgtccaagtactgatgaaggtcattcctggaatgacccttgtcaatgcagttaatatcatgcaagaagcacactacaatggattgtcagttgtgatcatctgtgaccaagctgatgctgaagatcattgcacgcagctaataagcaatgggttgctcaatttaattgaaccttgaagtggaggatgttgatggaaagtttcactttaaatcttacttgcttttaatgctatttgaaa

SEQ ID NO: 258625 - DNA, 389 bp, Glycine max
gacggctacagaagaataatcgagacacagatcatagtgatcattttttaatttctcagatttatccgacgtcgctgcagatccaccaaccgttatggctgccttcagcggtgatgaaacggcaccgtttttcggcttccttggcgccgcagctgccctcgtcttctcctgtatgggagctgcctatggcacagcgaagagtggcgtgggcgtggcttccatgggtgtaatgagacctgagctggtgatgaagtcgattgttcctgttgtcatggctggagttttgggcatttatggccttattattgctgttattatcagtaccggtattaatccaaaggccaaatcctattacctctttgatggttatgcacatctctcttctggtc

SEQ ID NO: 258626 - DNA, 112 bp, Glycine max
gatctggcatcataaaaacaagtcgttgtgaactgggaagagggatatggctttctcaatgatcaccttcctagttgttaccaccgtcaactgtgccggtgccgtcatggtt

SEQ ID NO: 258627 - DNA, 278 bp, Glycine max
gatagaagaagcagaaagagaagcattagcaaaagcaagaagaactagtctaagcagaaatggcctcttcagtgatggcatctgtggccctcaaacctgcccctttcactgttgaaaagtcctcaattagaggcccttccttccttctaaggaactcctcttcattcaaaagtgggggccggggggggaagaaaaataaaaatggcaaaccttattgaattaatgggggcatggcttttaaggaaagaagttatgcatttggcaagaaaaggaaggga

SEQ ID NO: 258628 - DNA, 249 bp, Glycine max
gatcgcatttcatagcacgcaccctcattaccaacacgaaagcgtagccaaaaccttttttcgaagtctctgattttcctaatggctccggcaaaggcagagaagaagccggcggagaagaagccagcggcggagaaggcaccggcggagaagaagccgaaggcggagaagaagatctcgaaagaaggagggagcgagaagaagaagaagcgcacgaagaagagcgtggagacctacaacatctacatc

SEQ ID NO: 258629 - DNA, 138 bp, Glycine max
cgatctggcatctaaaaagcaagtcgttgagaactaacaaaagggatatggcttgctcaatgatctcctgcccagctggtagcagcgtctaccgtgcctgtacctgcatctttgaattattaaaaatcctcaaataca

SEQ ID NO: 258630 - DNA, 272 bp, Glycine max
ggccttgtgtatttcgcgccctcaatacctacacgcagggtgatgcaaatgcttgtgcttgttttcttcgttgctacaattttggtagcatggcaatgccatgcgtacgatatgttccctctccgaatgaacactggctatggtgcccgtactccggaggtgaaatgcgcaagttggaagcttgctgtggtagcacacaacatctttggctttgagaccattcctgaagagtgcggtggagcaactaaggaattcattcatggcgaacaata

SEQ ID NO: 258631 - DNA, 406 bp, Glycine max
gaccacaccgagtcgcagaaaaagaaaaaagcgatcatagtttcacttcggccttatccagtttagggtttcggttctctaccctatctttcacgtatcgaaaccttaaatttacgatcaggtctgagcaatctggttggtagaacctttggtcttagtgagtcaagttttatgtctgaattagacgatcaaattcctactgccttcgatccttttgctgatgcaaatgctgatgactcgggtgctgggtcaaaggagtatgtgcatattcgtgtacagcagcgaaatggtaggaaaagcctgacaaccgttcagggattgaaaaaggaattcagctataacaagatacttaaagacgtcaagaaagagttctgttgcaatggaacagttgttcaagacccataac

SEQ ID NO: 258632 - DNA, 179 bp, Glycine max
gatatctgtcatcagaaaaacaagttgttgagaactaagaagaaggaaatggctttctcaatgatctccttcccagctgttaccaccgttaaccgtgccggtgccggcatggttgttttattcaccggtctcaaattcatggctgtctttcccacgagaataccaacaatgacattacc

SEQ ID NO: 258633 - DNA, 408 bp, Glycine max
gacacaactgaacaagatagataagccttccacagcctcacaaaaatgaagaacactacctcgttcgctctctttctactttgtgccttcttcacctcatacctaccttcagccaccggtgcttttgtgcttgacagtgatggaaaccctcttgaaaatggtggcacatactatgtgccagcaccaaataactgcggtggaatagaatacactacatcaggaaacgaaacttgccctatcactgttgtgcaacatcacgacccaacctgtaaggggtttccgataacgatttcgtccccggcccgaatccgttacatctccgaaggccttaatgtgaacatagggttcactttcagaccccctccgtgtgccccctcttctttgtggactgttctaaagatcaatctg

SEQ ID NO: 258634 - DNA, 398 bp, Glycine max
ggaagtgtattggtcactgacctatcttggaagagttttgaagtttaaaccttcaaacccttttgcctttagattctgattctgagtctctgctgctatatatggcgccacgcgtatttcttgtgttggggatgttgctgatggtgtgccttgttaaggtttcgtctgatccaaagagagaagaagaactactggaagaagaactacattttcccgataacgagccacttattgtgagagacgggaacagaaggctaatgcaagacatagattgtggtgggttgtgcaagacgaggtgcagtgcacattcgagacccaacttgtgcactatggcgtgtggcacgtgctgtgtgaagtggtagtgtgtcccacctggcacatctggaaataaggaacta

SEQ ID NO: 258635 - DNA, 402 bp, Glycine max
atggcaggaaagtacaagaacataccaatattgcggcatctacgtacaactaccaccaagaggatggaagcaattgaaagagagatacgagattcaattgagggtatcataaaaaaacgagagaaagccatggagaatggtgaaacctctaatgaagatttattaagcatacttttggaatcaaatcacaaggaaatccagggacatggtaacagtagggctgttggaatgaccaagcaagaagtaattgatgaatgcaagctattttacctggcagggcaagagaccacttcatctctgctggtttggacaatggtcttattggctaggtatccagaatggcaagcacgagcaagggacgaagtttttcaagtttttggaaaccaaaatccaaacactgat

SEQ ID NO: 258636 - DNA, 325 bp, Glycine max
  unsure (1)..(325): unsure at all n locations
gatttgtgaaactaacaacaacacaaggccatcatcatggcagctgcttccccaatggcaagccaactcaagtccaccttcactaggactcttgtagctcccaagggcctctctgcctcttcaccacttcacctcgtgccttctagaaggcaatttagcttcactgttaaggccatccaatcagagaagccaacctatcaagtgattcagccaatcaacggtgacccattcattggaagcctggaaaccccaattacatccagccctntgatcgcatggtacttgtccaacctgcccgcatacagaaccgcagtgagcccactac

SEQ ID NO: 258637 - DNA, 400 bp, Glycine max
gaacatcatcatcaacaacaagcagatcaatctctctctctctctcaaccataatagtcataggtttgaaggaggattttgagcagtatgctgagaaagcaaagactttgccaccgactcaatcaaacgaagacttgcttatcctttatggattgtacaaacaggccaccgttggacctgtcaacaccagccgtcctggaatgttcaacatgggggacagagctaaatgggatgcatggaaggctgttgaagggaaatccaaagacgaagcaatgggtgattacatcattaaggtgaaacaactgctggaagcagctggcttgcctgcttgataacattgtcatgccttgctttctgattctgtgctagaagttcacaacagtttggaaataaacaattg

SEQ ID NO: 258638 - DNA, 197 bp, Glycine max
gacagctattcctcttaagcttgctactgagtttccacactgcataccttaggtcttccgaattcgaagttaatttgcaagatggctaatgaaaaggctcagatcaacattgtggtggttggtcatgtggaccctgaggaggcaaccaccattaacgagctgataagcctgtgtggagaagagctcagggatgcata

SEQ ID NO: 258639 - DNA, 355 bp, Glycine max
gattatatttgagttcaaacaaatcaaagccatggccacctccaacttctctattgttctctccgtctccctagccttctttttggtgctacttaccaaggcacactcgaccgataccgtttctttcaccttcaacaagttcaacccagtccaaccaaacattatgctccaaaaagatgctagtatttcatcctctggggtgttacaactcaccaaagttggcagcaacggcgtgcccacctcgggatctgtcggtcgtgccctttacgctgccccaattcagatttgggacagcgaaaccggcaaggtatccaactgggctacatcctttaaattcaaaattttcgcacccaac

SEQ ID NO: 258640 - DNA, 353 bp, Glycine max
gacgacagaatgggactccaacaccaaaacaaacccactaggatggcttcctttgtatccttcctagtgctgcttcttgcagcccttatcctcatgcctcaagggcttgctacttactacaaaccaattaagaagccaccagtgttcaagccttcagtgtacaagccaccagtgtacaaaccaccggtttattagccaaaaccaccggtttacaagccgaaaccaccggttttcaagccaccatataagaagccaccatacaagaaaccaccttatgggaagtaccctccagttgaagacaacacccatgcctaaagcaagcaaagaggtctattatctacttaataaataaa

SEQ ID NO: 258641 - DNA, 296 bp, Glycine max
attcttgcgcccacgcgtccgtcctgtgagaagttttcagaagggcgagtactgcaagaagcacgttgaggcgaacagtgctgatgagaagcccagtgaggatgtgctcaaggcttgggacgtggatttcgtcaacgttgatcaggccactctcttccgatctcattctggctgcaaactacttgaacatcaagagccttttggaccttacttgccagacagtttcatacatgatcaagggaaagactcctgaagaaattcggaagacattcaacaatcaagaatgacttcacccc

SEQ ID NO: 258642 - DNA, 313 bp, Glycine max
cactctgggtgggcggttgatcaagcaatcctggcagaagaggagcgtctggtcgtgatccgtttcgggcacgactgggacgaaacctgcatgcagatggacgaggtgttggcgtcggtggcggagacgataaagaactttgcggtgatatacctggttgacataacggaggtgccagatttcaacaccatgtacgagctctacgacccttccacggtggtgttcttcttcaggaacaagcacatcatgattgatctgggaaccggtaacaacaacaagatcaactgggctcttaaggacaagcaggagttca

SEQ ID NO: 258643 - DNA, 294 bp, Glycine max
gatctggcagcagaagaacaagtagttgagaactaagaaggagaagcaaatggcttcctcaatgatctcttccccagctgttaccactgtcaaccgtgccggtgccggcatggttgctccattcactggcctcaagcccatggctggcttccccaccaggaagaccaacaatgacattacctccattgctagcaacggtggaagagtgcaatgcatgcaggtgtggccaccagttggcaagaagaagtttgagactctttcctacctgccagaccttgatgatgcacaattggc

SEQ ID NO: 258644 - DNA, 269 bp, Glycine max
gaaggtgcaagagtttgttgtgagctataagctagtttatcgtgaggagaatatgaagttgtttgttttctttgttgctgcagtagttttggtagcatggccatgtcatggcgcatgctaccaaaggttccctctccgaatgaaaactggctatggtgagtgttcttcggaggtaaaatgcgcaagttttaagcttgctttggaagcacacaacatccgagcctttaaaaccattcctgaagagtgcgttgaaccaacaaaagactaca

SEQ ID NO: 258645 - DNA, 415 bp, Glycine max
ggcacaagtgagtttgttgatcgagataactagaaacagtgtgatgaaaatgaaggtccttgttttcttcgttgctacaattttggtagcatggcaatgccatgcgtacgatatgttccctctccgaatgaacactggctatggtgcccgtactccggaggtgaaatgcgcaagttggaggcttgctgtggaagcacacaacatctttggctttgagaccattcctgaagagtgcgttgaagcaacaaaggaatacatccatggcgaacaatatagatcagactccaaaacagttaaccaacaagcttacttttatgccagaaaccttgtagtccatcccaaggacacatttgggttcagtatatattgcaccgtactttttaatatttcatactacaaaaaaacatggtatggg

SEQ ID NO: 258646 - DNA, 338 bp, Glycine max
agggtagcattagcttaagcaagaagaactagtctaagcggaaatggcctcttcagtgatggcatctgtggccctcaaacctgcccctttcactgttgagaagtcctcagtttgaggccttccctccctctcaaggaactcctcttcattcatagttagggccagtggtggcaagaagatcaagactgacaagccttatggaattaatggtggcatggctttgacggaaggagttgatgcatctggcaagaaaggaaagggaaagggcgtttaccactttgtagacaaatacagtgctaatgtcgatggttacagtcctatctacgacaccaaagact

SEQ ID NO: 258647 - DNA, 400 bp, Glycine max
gattctgcgcaggtagagagagcgagagaacaagaacataagggaaccacagcggcggtcacagaagaacaagcagagaatgggtcgagtgagaacgaagacggtgaagaaatcctctcggcaggtgatagagcgtcactactcgcgcatgaccctggacttccacacgaacaagaagcttctggaggaagtggcgataatcccgtcgaagaggctaaggaacaagatcgcggggttctcgacgcacctgatgaggcgcattcagaaaggccctgtgcgcggcatcttcctcaagctccatgaggatgagcgcgagcgccgcatggacttcgttcccgacgtcttcgccattaacaccgaccacatcgaggtcgacaaaggaaacccctgacatgcttta

SEQ ID NO: 258648 - DNA, 326 bp, Glycine max
gggcgtgttacatgctgcacccgttcctccttctatcagggggaagaacaaacattcaattcatggcggctgcaaagcttcaagctttatggaatcacccagctggtcctaataccattcacttttgggcacctacctttaagtggggcatcaacattgccaacattggtgatttcttaaaaccacctgagaaacttttctatcctcagctaatagcggtcacagccactgtaattatctgttcttcttacatcaccgtaatcaccccaaaaaatttggaacctggttattgtaaacactgttatggtctgggacaggctttttcc

SEQ ID NO: 258649 - DNA, 398 bp, Glycine max
gacaccaacaccaaaacaaacccactaagatggctggctttgtatccttcctagtgctgcttcttgcagcccttatcctcatgcctcaagggcttgctacttactacaaaccaattaagaagccaccagtgtacaagcctccagtgtacaagccaccagtgtacaaaccaccggtttataagccaaaaccaccggtttacaagccgaaaccaccggtttacaagccaccatataagaagccaccatacaagaaaccaccttatggaaagtaccctccagtagaggacaacacccatgcctaaagcaagcaatgaggtctattatctacttaataaataagaagaactgctttgtgttttctagcattgtgatttacaacttcgtagcaatgcatattc

SEQ ID NO: 258650 - DNA, 368 bp, Glycine max
gacacaccaaaccaaagtaagagtgagcaacttccaacaccatagtgaaatgacttccaaggctgcacttctcttgtgtttcaatgttctcttcttcaccgtggttagctccacatatgtgccatgcaacccaccccccaaaactccaaaacacccacctgtcccaaagccaccttccccaaagcaagcaagttgccccaaagacactattaagtttggtgtgtgtgctgatgtgttaggtttgatcaacgtgcaacttgggaagccaccaaagaccccatgcttgaacctcattgagggtcttgctgatcttgaagctgcagtgtgcctctgcactgctctcaaagctaatgggttgggcatcaacc

SEQ ID NO: 258651 - DNA, 273 bp, Glycine max
ggcacaagtgagtttgttgatcgagataactagaaacggtgtgatgaaaatgaaggtccttgttttcttcgttgctacaattttggtagcatggcaatgccatgcgtacgatatgttccctctccgaatgaacactggctatggtgcccgtactccggaggtgaaatgcgcacgttggaggcttgctgtggaagcacacaacatctttggctttgagaccattcctgaagagtgcgttgaagcaacaaaggaatacatccatggcgaacaata

SEQ ID NO: 258652 - DNA, 412 bp, Glycine max
gagcagaagaacaagtagttgagaactaagaaggagaagcaaatggcttcctcaatgatctcttccccagctgttaccactgtcaaccgtgccggtgccggcatggttgctccattcactggcctcaagtccatggctggcttccccaccaggaagaccaacaatgacattacctccattgctagcaacggtggaagagtgcaatgcatgcaggtgtggccaccacttggcaagaagaagtttgagactctttcctacctgccagaccttgatgatgcacaattggcaaaagaagtagaataccttcttaggaagggatggattccttgcttggaattcgagttggaacaccgtttcgtgtaccgtgagcacaacaggtcaccatgatactactattgacgctccttgacca

SEQ ID NO: 258653 - DNA, 290 bp, Glycine max
agaggagaagagaagctaaagaaagaaaggagatgggagtggagaagcagttgttgaggtctggcaccggtccgaagccaattcccggtcagaacgtaaccgttcactgcactggtttcgggaagaacggtgacctttctcagaaattctggagcacaaaggatcctggccagaacccattcacttttaaaatcggccaaggttcttgttatcaaaggatgggatgaaggtgtgcttggcatgcaaattggtgaagttgctcgtctcccgtgctctccggattatgctta

SEQ ID NO: 258654 - DNA, 293 bp, Glycine max
gagagttatcgatccctttggggagataagaaaatgtggcttgtgcagctctcaaccccatttctgaacggccatggccatggctccagccttctctggaaacccagttcggcggtgactcatacccactgggccccgccgagtttgctgcctcaaatcaatgcgatgaagacgatgcagggaaaagtggtgtgctccacgaacgacaagacggtggcagtggaggtggtgcggctggcccctcgcccaaagtacaagaggcgcgtgagggagaagaaaaaataccatgccca

SEQ ID NO: 258655 - DNA, 327 bp, Glycine max
ggtctattgggtgccctgagatcacattgaacaatggtgaaggctgtggccgttcttggcatcaatgagggtgtcactggaactattcacttccttcaggagggaagtggtccaaccaccgtaactggatctcttgctggtcttaagcctggtctccatggtttccatgttcatgccttgggggacactaccaatggttggctctcaactggatcacatttcaattcctaataacatggagcattggtgcccctgaagattagaatcgatatgctgggtatcttgggaaatggatatgttcgggatgaatggactgtaatctttact

SEQ ID NO: 258656 - DNA, 391 bp, Glycine max
ggttctagtgtgtgattgtttgttgttgtaactcgttcttcttcttttgttgttctgtgtttgtgtttgttttttctctcacctgaaaatgtcttgctgcggtggtaactgtggttgcggaagctcctgcaagtgcggcaactgctgcggaggctgcaagatgtacccagacttgagctacactgattcaaccaccaccgagaccttggtcatgggagtggcacctgttaaggctcaatttgagggtgctgaaatgggtgtgcccgctgagaacgatggctgctaatgtggaccaaactgctcctgcaacccctgcacttgcaagtgaggtgttgggagagcaagcttcaagcagagattgcccttaattaggaataatgataaactatta

SEQ ID NO: 258657 - DNA, 389 bp, Glycine max
gacagcttatcaataatctattttatactatacccacattttgataattatttttctagttgataagccatggctactcgaggaaagcttgaggttgacgttgatctcaagtctaacgcagacaagtactggcaaacccttatgaactccactgaaatattccccaaggccttccccaatgattacaaaagcattgaggttcttgagggtgatggcaaatcacctggttctatccgccacataagttatggtgaaggttcaccacttgtgaagtcatcctttgagaagaatgaggctgttgatgaagaaaagaaagtagtgtcgtacactatcattgatggagaactcctccagcacttacaaacattcaatggagacatttctgtgac

SEQ ID NO: 258658 - DNA, 366 bp, Glycine max
tgggatgtatgagtgatacgcgtcacattttcataataataaaaaaatggcagcggcggcggcagtgacggtgctactcccacctaggattccgaccaccaccaacgttacccgctgctctgctttgccttctctccctcctcgcgtctccaacaccaaaaccactttgttctcacctttcctcaacaacttttcagtgtcccgaaaatcttctctgcttcagaccagagcttctttagaggaatcgtcctcagtagatgccaatgaggtgttcacagatttaaatgataagtgtgatgctctttgaaaacaagtccacaatacttctttatgggggaggggctatagttgctatttgctatcgtc

SEQ ID NO: 258659 - DNA, 326 bp, Glycine max
gagccatactctgattcattagtgaagaaaaatggcaaccatcatcgccggcatcccaactacatcgatcactcgcgcaggtcttgtgctcaaacgacctgttggagcctcgtcctctaccgttcttggattgtcagcaatggctaaggcagggaaagtgaggtgctccatggaggaaaagccttcaagcagctcaaatatagggatgggggcattcttgtttgcagctgcatgtgccgcaaccatgtcaagcccagccatggctttggtggatgagagactcatcactgtatgaaccgggcgttccttttggcttagcaacaacc

SEQ ID NO: 258660 - DNA, 360 bp, Glycine max
  unsure (1)..(360): unsure at all n locations
tccgccacgcgtncgtagagaaaacgacagaagggggtgggagggaagaaacaaaaggaggagcggcattaaaaatgcagatcttcgggaaaactctgacagggaagactataaccctcgaggtcgagagcaacgacaccatcgacaatgtcaaggccaagattcaagacaaggaaggcattcctccggatcaagagccgttgattttcgccggaaagcagcttgaaaatggaaagaccctggccgattacaacatccagaaggaatcaacccttcatctcgtcctcaagcttcgtggtggcatcattgaaccttccctcatggctttggctcgcaaatacaatcaggacaagatgattt

SEQ ID NO: 258661 - DNA, 253 bp, Glycine max
ggcacatgtgagtttgttgatcgagataactagaaacagtgtgatgaaaatgaaggtccttgttttcttcgttgctacaattttggtagcatggcaatgccatgcgtacgatatgttccctctccgaatgaacactggctatggtgcccgtactccggaggtgaaatgcgcaagttggaggcttgctgtggaagcacacaacatcttttgctctgagaccattcctgaagagtgcgttgaatcaacaaatgaa

SEQ ID NO: 258662 - DNA, 417 bp, Glycine max
ggaagtatagattgaacacacacatagaaacccaacaacaagaatgaagaagatgattctaaccctcttcttcaatatcattttatctctcctctccctctcccacgcctccgtggtggatttctgcgtagcagactacacaggccccaatggccccgcagggtactcatgcaagagcccagcaaaggtcacggtggacgacttcgtctactccggccttggcaccgccggcaacacctcaaacatcatcaaagccgcggtgacgccggcgttcgacgcgcaattccccggcgtcaacgggcttggaatctccattgcacgcctagacccagcagccggtggagtcatccctcttcacacgcaccctggtgccctaaaactgctggtggttgtgcaaggaacaatctgcaccggctt

SEQ ID NO: 258663 - DNA, 339 bp, Glycine max
ttggagatacatatgccattcacataccatcaggacacgggatatgctggagaaactaaagagtatataccccaactacaaataccctgcgaagtatactgaggtggatgattacataagtttcagctcagagaaactgcaaaggttgggttggaaatacaggtcactggaggaaacactcgttgattctgttgagagctatcgggaagctggccatctgccatcagaaaaaatgtgacttagtagaatagaataaaactaagtgctatatgatagtagatcctcacctttttaaaatctttattaagattccattcgattcttatgggagtatgaaaa

SEQ ID NO: 258664 - DNA, 232 bp, Glycine max
gatctggcagccgaaaaacaagtcgttgagaactaagaagaaggaaatggcttcctcaatgatctcctccccagctgttaccaccgtcaaccgtgcctgtgccggcatgggtgctccattcaccggcctcaaatccatggctggcttccccacgaggaagaccaacaatgacattaccttcattgctagcaacggtggaagattacaatgcatgcaggtgtggccaccaatt

SEQ ID NO: 258665 - DNA, 318 bp, Glycine max
cgcgggtgcgatagacgacaacaagggcacaagtgagtttgtcgatcgagataactagaaacagtgcgatgaaaatgaaggtccttgttttcttcgttgctacaattttggtagcatggcaatgccatgcgtacgatatgttccctctccgaatgaacactggctatggtgcccgtactccggaggtgaaatgcgcaagttggaggcttgctgtggaagcacacaacatctttggctttgagaccattcctgaagagtgcgttgaagcaacaaaggaatacatccatggcgaacaatatagatcagactccaaaacag

SEQ ID NO: 258666 - DNA, 249 bp, Glycine max
gatcgcatttcatagcacgcaccctcattaccaacacgaaagcatagccaaaaccttttttcgaagtctctgattttcctaatggctccggcaaaggcagagaagaagccggcggagaagaagccagcggcggagaaggcaccggcgggaaaaaagccgaaggcggagaagaacgactcgaaggaaggagggagcgagaagaataagaagcgcacgaagaagagcgtggagacctacaacatctacatc

SEQ ID NO: 258667 - DNA, 375 bp, Glycine max
gaccacaccgagtcgcagaaaaagaaaaaagcgatcatagtttcacttcggccttatccagtttagggtttcggttctctaccctatctttcacgtatcgaaaccttaaatttacgatcaggtctgagcaatctggttggtagaacctttggtcttagtgagtcaagttttatgtctgaattagacgatcaaattcctactgccttcgatccttttgctgatgcaaatgctgatgactcgggtgctgggtcaaaggagtatgtgcatattcgtgtacagcagcgaaatggtaggaaaagcctgacaaccgttcagggattgaaaaaggaattcagctataacaagatccttaaagacgtcaagaaagagttctgt

SEQ ID NO: 258668 - DNA, 326 bp, Glycine max
gactcatctcttacaacgaaaccctcttcatcttgttctacctgtgacgagcatcatggcctcaagagcagtgttattgttggctatgtgtgtgcttccggcgatggttgtggccattcgcccagcaaagaaccctttttgcgtgaagggtcgtgtctactgtgacccttgccgtgctggttttgagacctcagctaccacctacattgctggtgctgagattatgttgcaatgcaagagcagggttagcaacgaggttgtgtacacgaagaaggggtacaccgacttaaccggagcatacacaatgtacgtggatgaggatcacg

SEQ ID NO: 258669 - DNA, 367 bp, Glycine max
gatatctggcagcagggaagacaagtagttgagaactaagaagaaggaaatggcttcctcaatgatctcctccccagctgttaccaccgtcaaccgtgccggtgccggcatggttgctccattcaccggcctcaaatccatggctggcttccccacgaggaagaccaacaatgacattacctccattgctagcaacggtggaagagttcaatgcatgcaggtgtggccaccacttgatatgaaaaagttccagactctttcctactttgccaaacctggatgatgcccatttggcaaaggaagtcgcatacccttctatggaaaggatggttttccttgcttggaaattcgagtcggagcacgcttt

SEQ ID NO: 258670 - DNA, 299 bp, Glycine max
gacacaactgaacaagatagataagccttgcacagcctcacaaaaatgaagaacactacctcgttcgctctctttctactttgtgccttcttcacctcatacctaccttcagccaccggtgcttttgtgcttgacagtgatggaaaccctcttgaaaatggtggcacatactatgtgccagcaccaaataactgcggtggaatagaatacactacatcaggaaacgaaacttgccctatcactgttgtgcaacatcacgacccaacctgtaaggggtttccgataacgatttcgtcccc

SEQ ID NO: 258671 - DNA, 361 bp, Glycine max
gacaagtgagtttgttgatcgagataactagaaacagtgtgatgaaaatgaaggtccttgttttcttcgttgctacaattttggtagcatggtaatgccatgcgtacgatatgttccctctccgaatgaacactggctatggtgcccgtactccggaggtgaaatgcgcaagttggaggcttgctgtggaagcacacaacatctttggctttgagaccattcctgaagagtgcgttgaagcaacaaaggaatacatccatggcgaacaatatagatcagactccaaaacagttaaccaacaagcttacttttatgccagagacctcgaagtccatcccaaggacacatttgtgttcagtat

SEQ ID NO: 258672 - DNA, 365 bp, Glycine max
ggaagtgtattggtcactgacctatcttggagagagttttgaagtttaaaccttcaaacccttttgcctttagattctgattctgagtctctgctgctatatatggcgccacgcgtatttcttgtgttggggatgttgctgatggtgtgccttgttaaggtttcgtctgatccaaagagagaagaagaactactggaagaagaactacattttcccgataacgagccacttattgtgagagacgggaacagaaggctaatgcaagacatagattgtggtgggttgtgcaagacgaggtgcagtgcacattcgagacccaacttgtgcactatggcgtgtggcacgtgctgtgtgaggtgtaagtg

SEQ ID NO: 258673 - DNA, 359 bp, Glycine max
atggcaggaaagtacaagaacataccaatattgcggcatctacgtacaactaccaccaagaggatggaagcaattgaaagagagatacgagattcaattgagggtatcataaaaaaacgagagaaagccatggagaatggtgaaacctctaatgaagatttattaagcatacttttggaatcaaatcacaaggaaatccagggacatggaaacagtagggctgttggaatgaccaagcaagaagtaattgaggaatgcaagctattttacctggcagggcaagagaccacttcatctctgctggtttggacaatggtcttattggctatgtatccagaatggcaagcacgagcaaggga

SEQ ID NO: 258674 - DNA, 288 bp, Glycine max
gaacatcatcatcaacaacaagcagatcaatctctctctctctctcaaccataatagtcataggtttgaaggaggattttgagcagtatgctgagaaagcaaagactttgccaccgactcaatcaaacgaagacttgcttatcctttatggattgtacaaacaggccaccgttggacctgtcaacaccagccgtcctggaatgttcaacatgggggacagagctaaatgggatgcatggaaggctgttgaagggaaatccaaagacgaagcaatgggggattacatca

SEQ ID NO: 258675 - DNA, 192 bp, Glycine max
gacagctattcctcttaagcttgctactgagtttccacactgcataccttaggtcttccgaattcgaagttaatttgcaagatggctaaggaaaaggctcacatcaacattgtggtggttggtcatgtggaccctgaggaggcaaccaccattaacgagctgaagaagcctgttgtggagaaagaaagctca

SEQ ID NO: 258676 - DNA, 266 bp, Glycine max
gattatatttgaggtcaaacaaatcggaggcatggccacctccaacttctctattgttctctccgtctccctagccttctttttggtgctacttaccaaggcacactcgaccgataccgtttctttcaccttcaacaagttcaacccagtccaaccaaacattatgctccaaaaagatgctagtatttcatcctctggggtgttacaactcaccaaagttggcagctacggcgtgcccaccttgggatctcttggtcgtgcccttt

SEQ ID NO: 258677 - DNA, 338 bp, Glycine max
ttatggggacaccaacaccaaaacaaacccacgtgggatggcttcctttgtatccttcctagtgctgcttcttgcagcccttatcctcatgcctcaagggcttgctacttactacaaaccaattaagaagccaccagtgtacaagcctccagtgtacaagccaccagtgtacaaaccaccggtttataagccaaaaccaccggtttacaagccgaaaccaccggtttacaagccaccatataagatgccaccatacaagaaaccaccttatggaaagtacccttcagttgaggacaacacccatgcctaaagcaagcaatgaggtctattatctactt

SEQ ID NO: 258678 - DNA, 136 bp, Glycine max
tcagacgacacaagggaaagaatatctttgagactctttcctacctgccaggggttggtgatacacaattggggaaggaagtcaaataccttcttactaaggcaaaacctccttgcttggaattcgagttggagca

SEQ ID NO: 258679 - DNA, 330 bp, Glycine max
caaggcactctgggtgggcggttgatcaagcaatcctggcagaagaggagcgtctggtcgtgatccgtttcgggcacgactgggacgaaacctgcatgcatatggacgacgtgttggcgtcggtggcggagacgataaagaactttgcggtgatatacctggttgacataacggaggtgccagatttcaacaccatgtacgagctctacgacccttccacggtggtgttcttcttcaagaacaagcacatcatgattgatctgggaaccggttacaacaacaagatcaactgggctctcaaggacaagcaggagttcatcgacattgttg

SEQ ID NO: 258680 - DNA, 176 bp, Glycine max
gatctggcagcagaagaacaagtagttgagaactaagaaggagaagcaaatggcttcctcaatgatctcttccccagctgttaccactgtcaaccgtgccggtgccggcatggttgctccattcactggcctcaagcccatggctggcttccccaccaggaagaccaacaatgaca

SEQ ID NO: 258681 - DNA, 114 bp, Glycine max
gaaggtgcaagagtttgttgtgagctataagctagtttatcgtgaggagaatatgaagttgtttgttttctttgttgctgcagtagttttggtagcatggccatgtcatggcgc

SEQ ID NO: 258682 - DNA, 363 bp, Glycine max
ggcacaagtgagtttgttgatcgagataactagaaacagtgtgatgaaaatgaaggtccttgttttcttcgttgctacaattttggtagcatggcaatgccatgcgtacgatatgttccctctccgaatgaacactggctatggtgcccgtactccggaggtgaaatgcgcaagttggaggcttgctgtggaagcacacaacatctttggctttgagaccattcctgaagagtgcgttgaagcaacatatgaatacatccatggcgaacaatatagatcagactccaaaacagttaaccaacaagcttacttttatgccagagacctcgaagtccatcccatggacacatttgtgttcagtat

SEQ ID NO: 258683 - DNA, 337 bp, Glycine max
agggtagcattagcaaaagcaagaagaactagtctaagcagaaatggcctcttcagtgatggcatctgtggccctcaaacctgcccctttcactgttgagaagtcctcagttagaggccttccctccctctcaaggaactcctcttcattcatagttgtggccagtggtggcaagaagatcaagactgacaagccttatggaattaatggtggcatggctttgagggaaggagttgatgcatctggcaggaaaggaaagggaaagggcgtttaccagtttgtagacaaatacggtgctaatgtcgatggttacagtcctatctacgacaccaatgac

SEQ ID NO: 258684 - DNA, 318 bp, Glycine max
gattctgcgcaggtagagagagcgagagaacaagaacataagggaaccacagcggcggtaacagaagaacaagcagagaatgggtcgagtgagaacgaagacggtgaagaaatcctctcggcaggtgatagagcgtcactactcgcgcatgaccctggactttcacacgaacaagaagcttctggaggaagtggcgataatcccgtcgaagaggctaaggaacaagatcgcggggttctcgacgcacctgatgaggcgcattcagaagggccctgtgcgcggcatctccctcaagctccaggaggatgagcgcgagcg

SEQ ID NO: 258685 - DNA, 399 bp, Glycine max
aagacgacagaaggggagtgttagaagctgaacccgtttcgccttccatcagagggaagaacaaacattcaattcatggcggctgcaaagcttcaagctttatggaatcacccagctgggcctaaaaccattcacttttgggcacctacctttaagtggggcatcaacattgccaacattgctgatttctcaaaaccacctgagaaactttcctatcctcagcaaatagcggtcacagctactggaattatctggtctcgttacagcactgtaatcaccccaaaaaattgaaacctgtttagtgtaaacattgcaatggcagggacaggcctataccaacttatacgcataatggctgcatgattattcctcagatgcggaggggaaggccgtcacaaa

SEQ ID NO: 258686 - DNA, 271 bp, Glycine max
gacaccaacaccaaaacaaacccactaagatggctggctttgtatccttcctagtgctgcttcttgcagcccttatcctcatgcctcaagggcttgctacttactacaaaccaattaagaagccaccagtgtacaagcctccagtgtacaagccaccagtgtacaaaccaccggtttataagccaaaaccaccggtttacaagccgaaaccaccggtttacaagccaccatattaagatgccaccatacaagaaaccaccttatggaaagt

SEQ ID NO: 258687 - DNA, 362 bp, Glycine max
gacacaccaaaccaaagtgagagtgagcaacttccaacaccatagtgaaatgacttccaaggctgcacttctcttgtgtttcaatgttctcttcttcaccgtggttagctccacatatgtgccatgcaacccaccccccaaaactccaaaacacccacctgtcccaaagccaccttccccaaagcaagcaagttgccccaaagacactattaagtttggtgtgtgtgctgatgtgttaggtttgatcaacgtgcaacttgggaagccaccaaagaccccatgctgcaacctcattgagggtctcgctgatcttgaagctgcagtgtgcctctgcactgctttcaaaactaatgtgttgggca

SEQ ID NO: 258688 - DNA, 349 bp, Glycine max
tgccgtccgtttcctttcgaccagcgtccgttcgtggacaagacgaagagggggcacaagtgagtttgtgatcgaatactagagacgggtgatgaaaatgaagtcttgtttttcgtgctacaattttggtagcatggcaatgccatgcgtcgatatgttcctctcgaatgaacactggtatggtgcccgtctccggagtgaaatgcgcaagttggagcttgctgtggaagcacacaacatctttgctttgagaccattctgaagagtgcgttgaacaacaaaggaatcatcctggcatcaatattatcagactcaaaacagttatcaacatcttacttttatgccagag

SEQ ID NO: 258689 - DNA, 376 bp, Glycine max
gagcagaagaacaagtagttgagaactaagaaggagaagcaaatggcttcctcaatgatctcttccccagctgttaccactgtcaaccgtgccggtgccggcatggttgctccattcactggcctcaagtccatggctggctttcccaccaggaagaccaacaatgacattacctccattgctagcaacggtggaagagtgcaatgcatgcaggtgtggccaccacttggcaagaagaagtttgagactctttcctacctgccagaccttgatgatgcacaattggcaaaggaagtagaataccttcttaggaagggatggattccttgcttggaattcgagttggagcacgggttcgtgtaccgtgagcacaaca

SEQ ID NO: 258690 - DNA, 390 bp, Glycine max
acagaagggttatgatagagtgataccgcgtcacacttttcatggtgaataaataaaatggcagcgggcggcggcagtgacggtgctactcccacctaggattccgaccaccaccaacgttacccgctgctctgctttgccttctctccctcctcgcgtctccaacaccaaaaccactttgttctcaccttccctcaacaacttttcagtgtcccgaaaatcttctctgcttcagaccagagcttcttcagaggaatcgtcctcagtagatgccaatgaggtgttcacagatttgaaggaaaagtgggatgctcttgaaaacaagtccacagtacttctttatggtggaggggctatagttgctatttggctatcgtcaattcttgtgag

SEQ ID NO: 258691 - DNA, 308 bp, Glycine max
gagagttatcgatccctttggggagataagaaaatgtggcttgtgcagctctcaaccccatttctgaacggccatggccatggctccagccttctctggaaacccagttcggcggtgactcatacccactgggccccgccgagtttgctgcctcaaatcaatgcgatgaagacgatgcagggaaaagtggtgtgctccacgaacgacaagacggtggcagtggaggtggtgcggctggcccctcgcccaaagtacaagaggcgcgtgagggagaagaagaaataccaggcccacgatcccgataacca

SEQ ID NO: 258692 - DNA, 325 bp, Glycine max
ggttctagtgtgtgattgggtgttgttgtaactcgttcttcttcttttgttgttctgtgtttgtgtttgttttttctctcacctgaaaatgtcttgctgcggtggtaactgtggttgcggaagctcctgcaagtgcggcaacggctgcggaggctgcaagatgtacccagacttgagctacactgagtcaaccaccaccgaaaccttggtcatgggagtggcacctgttaaggctcaatttgagggtgctgaaattgggtgtcccgcttaagacgattgcttgaaatgtggaccaatctgttcctgcaacccctgcacttgcaag

SEQ ID NO: 258693 - DNA, 108 bp, Glycine max
gaaggtgcaggagtttgttgagagctataatctactttatcgtgaggagaatatgaagctgtttgttttctttgttgctgcagtagttttggttgcatggtcatgcca

SEQ ID NO: 258694 - DNA, 379 bp, Glycine max
gagccatactctgattcattagtgaagaaaaatggcgaccatcatcgccggcatcccaactacatcgatcactcgcgcaggtcttgtgctcaaacgacctgttggagcctcgtcctctaccgttcttggattgtcagcaatggctaaggcagggaaagtgaggtgctccatggaggaaaagccttcaagcagctcaaatatagggatgggggcatccttgttagcagctgcagttgccgcaaccatgtcaagcccaaccatggctttggtggatgagagactcagcactgaaggaaccgggctttcctttgggcttagcaacaaccttcttggttggatcctgtttggtgtcttcggtcttatatgggctcttctactt

SEQ ID NO: 258695 - DNA, 367 bp, Glycine max
ggtgtgagtgaagaagcagagggagtggcggcattaaaaatgcagatcttcgtgaaaactctgacagggaagactataaccctcgaggtcgagagcagcgacaccatcgacaatgtcaaggccaagattcaagacaaggaaggcattcctccggatcagcagcgtttgattttcgccggaaagcagcttgaagatggaaggaccctggccgattacaacatccagaaggaatcaacccttcatctcgtcctcaggcttcgtggtggcatcattgagccttccctcatggctttggctcgcaaatacaatcaggacaagatgatttgccgcaagtgctacgcccgtctgcatcctatggctgtgaact

SEQ ID NO: 258696 - DNA, 313 bp, Glycine max
ggcacaagtgagtttgttgatcgagataactagaggcagggtgatgaaaatgaaggtccttgttttcttcgttgctacaattttggtagcatggcaatgccatgcgtacgatatgttccctctccgaatgaacactggctatggtgcccgtactccggaggtgaaatgcgcaagttggaggcttgctgtggaagcacacaacatctttggctttgagaccattcctgaagagtgcgttgtagcaacaaaggaatacatccatggcgaacaatttagatcggactccaaaacaattaaccaacaagcttacttt

SEQ ID NO: 258697 - DNA, 371 bp, Glycine max
ggaagtatagattgaacacacacatagaaacccaacaacaagaatgaagaagatgattctaaccctcttcttcaatatcattttatctctcctctccctctcccacgcctccgtggtggatttctgcgtagcagactacacaggccccaatggccccgcagggtactcatgcaagagcccagcaaaggtcacggtggacgacttcgtctactccggccttggcaccgccggcaacacctcaaacatcatcaaagccgcggtgacgccggcgttcgacgcgcaattccccggcgtcaacgggctttgaatcttcattgcacgcctaaacccagcagccggtggagtcatcccttttcacacgcaccctggtg

SEQ ID NO: 258698 - DNA, 366 bp, Glycine max
agatacatatgccattcacataccatgaagagacgggatatgctggagaaactaaagagtatataccccaactacaaataccctgcgaagtatactgaggtggatgattacataagtttcagctcagagaaactgcaaaggttgggttggaaatacaggtcactggaggaaacactcgttgattctgttgagagctatcgggaagctggccatctgcaatcagaataaatgtgacttagtagaatagaataaaactaagtgctatatgatagtagatacttcagttttttaaaaatcttattaggattcgattcgattctagtgtgagtatgaaaaagactatataatgagggatgttgtaggtag

SEQ ID NO: 258699 - DNA, 205 bp, Glycine max
ggttcaccctatttacaaacttttgtttcctcactatcgtgacaccatgaacattaattcacttgcccgcaaatccttggtcaatgcagacggtattatagagaaaacattcttgtggggtaggtactctttggaaatgtctgctgttatttacaaggactgggttttcactgatcaagcattgcctaatgatcttgtcaagaga

SEQ ID NO: 258700 - DNA, 253 bp, Glycine max
gatagaagaagcagaaagagaagcattagcaaaagcaggaagaactagtctaagcagaaatggcctcttcagtgatggcatctgtggccctcaaacctgcccctttcactgttgagaagtcctcagttagaggccttccctccctctcaaggaactcctcttcattcagagttgtggccagtggtggcaagaagatcaagactgacaagccttatggaattaatggtggcatggcttttgaggaaggagttga

SEQ ID NO: 258701 - DNA, 401 bp, Glycine max
  unsure (1)..(401): unsure at all n locations
gcacaagtgagtgtggtgatcgagataactagaaacagtgtgatgaaaatgaaggtccttgttttcttcgttgctacaattttggtagcatggcaatgccatgcgtacgatatgttccctctccgaatgaacactggctatggtgcccgtactccggaggtgaaatgcgcaagttggaggcttgctgtggaagcacacaacatctttggctttgagaccattcctgaagagtgcgttgaagcaacaaaggaatacatccatggcgaacaatatagatcagactccaaaacagttaaccaacaagcttacttttatgccagagacctcggagtccattccaaggacacatttgtgttcagtatagatggcaccgnactctctaatatttcatactacaaaaa

SEQ ID NO: 258702 - DNA, 291 bp, Glycine max
ggtacaagtgagtttgttgatcgagataactagaaacagtgtgatgaaaatgaaggtccttgttttcttcgttgctacaattttggtagcatggcaatgccatgcgtacgatatgttccctctccgaatgaacactggctatggtgcccgtactccggaggtgaaatgcgcaagttggaggcttgctgtggaagcacacaacatctttggctttgagaccattcctgaagagtgcgttgaagcaacaaaggaatacatccatggcgaacaatatagatcagactccaaaca

SEQ ID NO: 258703 - DNA, 282 bp, Glycine max
agaagggggattacgattatttttagtcccaaagagcgtgcgtgatattcaagaccggcttggctcatgaacaggaacaaaaaaaccacctcttcggcatcaaagatctcggtcacaagactctcctttagagtgatgcactctatcagaatatacttgaaaccagtgtctatccaagagagcacgagtgcttgaaagagatacgcaagatgactgcaaaacacccactgaacatcatggccacaccagcagacgaaggacaacttctgagcatgctttgta

SEQ ID NO: 258704 - DNA, 258 bp, Glycine max
gcaccaagtgaaccaatagagtcgaagccctattcgacccaaccctaacacacacccatttgattcagtgtgcatggcttgcctgaacgatgcattcttggctgcacatctctccatggatgtcgtgagtgcacccatggcacatgcagctatgacctgcgggcaagagacgagtaacctggacaattgcatcggttacctacagaatggacgaacgccatcttcggcatgctgcaactgagtgaatagcctcaatgc

SEQ ID NO: 258705 - DNA, 266 bp, Glycine max
gagagaaagagagagaaagatggggaagcgtggtcgtggtggttcggcggggaacaagttccgcatgtcgctgggtcttccagtggcggtgacggtgaactgcgccgacaacacgggggcgaagaacctctacatcatttcggtgaaagggatcaaaggccgtttgaaccgtctttcctcggcctgcgttggcgacatggtgatggccaccgtgaagaagggaaaacccgatctgaggaagaaggtcttgccagctgtcatcgttc

SEQ ID NO: 258706 - DNA, 371 bp, Glycine max
gattcagattattatacattgcaaaaatggcgtagtcaccatgacagcttccatccttggctgcccagccgtcaccaaccggtcggcagcgacgcagaggagatcagtggtagtgaatgcagccagcaaatctgttgaaggggaaaaggtcagttatgacaacaatggtagcaatgcaaggaggaacttgatgttcgccacggcggcggctgctgtttgctcttttgctgcagggatggcattggcagatgagcctaaaccaggaaccttggaagccaagaaaaagtatgccccggtttgtgtcaccaatcctacagctatgatttgtcgcaattgaagaacttttttgtttcacttttggaattggaaat

SEQ ID NO: 258707 - DNA, 214 bp, Glycine max
gataccaaaaacaaaacaagccaagtgaaagagagaagaaaagtcaaagacaatgtcagggatcattcacaagattgaggagacccttcatgtgggaggccacaagaaggaggaggagcacaagggtgagcagcgccatggtggagaatacaaaggggagcatcatggtgaacacagtactgaatacaaaagagagcattatgttggtgagcac

SEQ ID NO: 258708 - DNA, 249 bp, Glycine max
gatagcgaaacagagagtggtttcagtgagtgatcggtgttcacttgatccttcataagtcgtcatcatcatcatcatcatcaccgttgattgaagaagatgccgatcagaaacatcgccatcggaaggcctgaagaggctactcaccccgacacgttgaaggcggggttggctgagttcatctccaccttgatcttcgtgttcgccggttcaggttccggcatcgcctacaacaagctcaccgacaac

SEQ ID NO: 258709 - DNA, 316 bp, Glycine max
gaatgcttactgtgaccgacagtcggtggatttcaactccattgcttttctgtttgatggacgccgcctccgagctgagcagactccagatgagttggaaatggaggacggggacgagattgatgccatgcttcaccagacaggaggttctgttgtctgaaggatgtgattactttgctcctcattataagtaggaattagttaacttagagctatgtatggcataagatacatattttattatctgctattatatacagcttttgccggtggattttggaggcattgtgcttcctcttcaatatgatgattatga

SEQ ID NO: 258710 - DNA, 285 bp, Glycine max
gaagttttgtggtgtggtttagtgtcaaatggcggcgagtagaagcacttttcctctgatgaaatacttgagagtgcgcgtcgacgctcttccccgcaacactcccttaaccctcgctcccaactttttgattcgccgcttctgtgaagaggttaggggttgttttctcgacaagtctgaggtcacagatcgcgtcatttcctgcgtcaaaaacttccagaaagttgatccttcaaaggttaaccctaatgctcacttccagaatgaccttggattggacagttt

SEQ ID NO: 258711 - DNA, 350 bp, Glycine max
ggttctagtgtgtgattgtttgttggtgtaactcgttcttcttcttttgttgttctgtgtttgtgtttgttttttctctcacctgaaaatgtcttgctgcggtggtaactgtggttgcggaagctcctgcaagtgcggcaacggctgcggaggctgcaagatgtacccagacttgagctacactgagtcaaccaccaccgagaccttggtcatgggagtggcacctgttaaggctcaatttgagggtgctgaaatgggtgtgcccgctgagaacgatggctgcaaatgtggaccaaactgctcctgcaacccctgcacttgcaagtgaggtgttgggagagcaagcttca

SEQ ID NO: 258712 - DNA, 320 bp, Glycine max
aggggcacaagtgagtttgttgatcgagataactagaaacagtgtgatgaaaatgaaggtccttgttttcttcgttgctacaattttggtagcatggcaatgccatgcgtacgatatgttccctctccgaatgaacactggctatggtgcccgtactccggaggtgaaatgcgcaagttggaggcttgctgtggaagcacacaacatctttggctttgagaccattcctgaagagtgcgttgaagcaacaaaggaatacatctatggcgaacaatatagatcagactccaaaacagttaaccaacaagcttacttttatg

SEQ ID NO: 258713 - DNA, 351 bp, Glycine max
  unsure (1)..(351): unsure at all n locations
ggcagcagaaaaacaagtagttgagaactaagaagaaggaaatggcttcctcaatgatctcctccccagctgttaccaccgtcaaccgtgccggtgccggcatggttgctccattcaccggcctcaaatccatggctggcttccccacgaggaagaccaacaatgacattacctccattgctagcaacggtggaagagtacaatgcatgcaggtgtggccaccagttggcaagaagaagtttgagactctttcctacctgccaaaccttgatgatgcacaattggcaaagggaagtagaataccttcttaggaagggatggattccttgctgggaantcgagttggagcac

SEQ ID NO: 258714 - DNA, 312 bp, Glycine max
agcacgaaaaattgagcgtttcttatcacaaccttttttcgtagcagaagtttttaccggttcgccggggaaatatgttagtctagcagaaacaattagagggtttaaattgattctttctggagaattagatggtcttcctgaacaagccttttatttggtaggtaatatcgatgaagctactgcgaaagctacgaacttagaaatggagagcaatttgaagaaatgactttaaatctttgtgtactgacccccaatcgaattgtttgggattcggaagtgaaggaaatcattttatctactaatagcgga

SEQ ID NO: 258715 - DNA, 299 bp, Glycine max
gactggaattgaaggaaaaatcaatgcggggaacagtgatccaagtctgagaaaccggactgggccagttcagctgccatacactttgctccatcgttcaagtgaggaagggttgactttcaaaggaattcccaacagtatctctatctaattaaaaagagtttgtggtttccttatctatgttgtacttctgaataacatagactttatgcatgtctatgcgtaattattgcctgaacttctgcactattgtatttggatgctctcggttttcatataataaagtgtgttctcactta

SEQ ID NO: 258716 - DNA, 361 bp, Glycine max
  unsure (1)..(361): unsure at all n locations
actcagcagtagcaaacaaaattcttcgtatttggttcttgcttttttctttttgaaccacaaaatggccgacgacagcacagctacctgcatcgacatcctccttgccatcatcctccctcctctcggtgtcttcctcaagtatggatgcaaggtagagttctggatctgtttggtgcttactctttttggttacattcctggaattatctatgctgtctatgctatcaccaagtgatcatattcatcacctcttgtagacaatgaataatttgtcaaagtacaacggttatgcatgtttctcaactccagcattgatataatcgtttgatctcagaacaatgngattcttttttgtttc

SEQ ID NO: 258717 - DNA, 381 bp, Glycine max
  unsure (1)..(381): unsure at all n locations
ggctgacaagccaatcctttgtgtaggtgctcaaccctagtaagccgcaatggtgaagtactcaagggagcctgacaatccaactaagtcttgcaaggctagaggcgccgaccttagggttcattttaagaacacaagggaaactgcctttgcaatcaggaagttgcccttggtcaaggctaaaaggtacttggaagatgttcttgcccacaagcaggcaattccattcagacgtttttgtcgaggtgttggaaggacagcccangctaagaatagacactctaatggccaaggacggtggcctgtcaagtcagcaaaaatcattcttgatttgctcaaaaatgctgagagcaatgctgaagtgaaaggttggatgttgat

SEQ ID NO: 258718 - DNA, 318 bp, Glycine max
acagtcaattaagatacaattgtttgccatgtttcctgttcaaattgatggagagccttggtttcagcaaccctgcacaattaacataacccatcatggccaggctttcatgttgaagagggtggctgaggaaccccttggccctgcatctgcaataattgctgaagtgcttgagaatgctgaaacacataatgtaattaatgcttcacaaaagcgagctcttcttcatgaaatggcactgaggctgtcctagaattctctccaccctgcgaatgtgattaaagattttgtatttcttttgaaatatattttgcacac

SEQ ID NO: 258719 - DNA, 387 bp, Glycine max
caacataggtcatcgaaaggatctcgaagacccaccaacgcacgaaagccgggatctttcagaaaatggattcctattcgaagggtgcataaccgcatggataagctcacactaacccgtcaatttgggatccaattcggttccttaggaggtatcgggaaggaattttggaatgtaataatatcgattcatacagatacagaagaaagggttctctattgattcaaacgctctacctacgagatagggatagagaaagaggaaaaaaccgaggatttcacatagtacttttggtcgaaaaaatcgatctgatttttttcgtacttttcgctcaatgatgaaatgggtcagattctacaggaccaaaccttgtgggagttaaggaat

SEQ ID NO: 258720 - DNA, 402 bp, Glycine max
ggcacaagtgagtttgttgatcgagataactagaaacagtgtgatgaaaatgaaggtccttgttttcttcgttgctacaattttggtagcatggcaatgccatgcgtacgatatgtcccctctccgaatgaacactggctatggtgcccgtactccggaggtgaaatgcgcaagttggaggcttgctgtggaagcacacaacatctttggctttgagaccattcctgaagagtgcgttgaagcaacaaaggaatacatccatggcgaacaatatagatcagactccaaaacagttaaccaacaagcttacttttatgccagagacctcgaagtccatcctaaggacacatttgtgttcagtatagatggcaccgtactctctaatattccatactacaaaaa

SEQ ID NO: 258721 - DNA, 223 bp, Glycine max
gcaccaagtgaaccaatatggccggggccctatacaaccaaaccctaacacacacccatttgattcagtttccatggctagcctcaaggttgcatttttggctgcagtgctctgcatggttgtggtgagtgcacccatggcacatgcagctatcacgtgcgggcaggtgactagtagctctgccaattgcattggttaccttcagaagggaggaacgccgtct

SEQ ID NO: 258722 - DNA, 335 bp, Glycine max
agaagacgacagaagggcatgtaccctgagcttatcttaccaacaatcttcctttacctcttcttgatcggagtttggtactacagatggaggccaaggcacccacctcacatggacactcgcctcttccatgcagattctgcgcatcctgatgaactggatgaagagtttgacacattcccaaccaccaggccttcagacatcgtgaggatgcgatacgaccgacttagaagcattgctgggaggatacagactgtggttggtgatttggccactcaaggggagaggctgcagtctttgcttcactggagagatccaagagccactgccctctt

SEQ ID NO: 258723 - DNA, 339 bp, Glycine max
gtggacgaacgcatggcatgggccctcagcttatcttaccaacaatcttccattaccggggggtggtccgagtttggtactacagatggaggccaaggcacccacctcacatggacactcgcgtgtgccatgcagattctgcgcatactgatgaactggatgaagagtttgacacatttccaaccaccaggccttcagacatcgtgaggatgcgatacgacctacttagaagcattgctgagaggatacagactgtggttggtgatttgggcactcaaggcgagaggctgcagtctttgctcaactggagagatccaagagccactgccctctttgtga

SEQ ID NO: 258724 - DNA, 352 bp, Glycine max
gacaccactaaaatatctctctattattctcgttttcagatatgcagatcttcgtcaaaaccctaaccggtaaaacgattacgctagaggtcgagtcctccgacacaatcgataacgtgaaagctaaaatccaagacaaggaaggcattccaccggatcagcagcgtttgatcttcgccggtaaacaactcgaagacggcagaactctcgccgattacaatatccagaaagaatcgacgctccacctcgtcctccgccttcgcggtggcatgcaaatcttcgtcaaaaccctaacccgtaaaacgattacgctagaggtcgagtcctctgacaccatcgataacgtgaaagc

SEQ ID NO: 258725 - DNA, 423 bp, Glycine max
gacagcagtaaagtgagttaaaagaaccgataatagttggtccttcactctccgctctctctgccactgagccaagaagatggcctcacaggtttgcaaatctgcttccagagccgcgaggtcccttctatcctctcgttttcactctcaaggacgtgcgcttggggctgctgcggctgtttcattgagcagcaaagtgcctcttttttacggaaagaacggttctggaaatggatccgcttcttcatcatcatcatcatcatggatttcaggagctcttgctcttcctgccgcagcttacatgttccaagatcaggaggtgcaggcagctgagcttgagcgcactttcattgccattaaagcctgatggagtgcagagaagcctgatttctgagattatatctcgctttgagcggaaagggt

SEQ ID NO: 258726 - DNA, 202 bp, Glycine max
  unsure (1)..(202): unsure at all n locations
agactacaacctgcgggagagtactttcaaaatgcagacagacttaacacttcgctgcccccaacggtgtgccagntgcacccacaaagagtgtctaccatatgaccatctttgccaccaacatcgaagcgctgcgtgcctcacctcgttactctgcgattaaggatgcaacgcgggagaccgacactttaactgttgacta

SEQ ID NO: 258727 - DNA, 333 bp, Glycine max
gacaccaacaccaaaacaaacccactaagatggctggctttgtatgcttcctagtgctgcttcttgcaggccttatcctcatgcctcaagggctggctacttactacaaaccaattaagaagccaccagcgtacaagcctccagtgtacaagccaccagtgtacaaaccaccggtttataagccaaaaccaccggcttacaagccgaaaccaccggtttacaagccaccatataagaagccaccatacatgaaaccaccttatggaaagtaccctccagtagaggacaacacccatgcctaaagcaagcaatgaggtctattatctacttaat

SEQ ID NO: 258728 - DNA, 339 bp, Glycine max
gagcgaaccatataatttaatttaatttgtgtccacatgagaacgtcgtgacctgcattttctatctcgcaacaccgcgataatggtataaaatagtttcagatacgttgcgttgattgattggtatgaagtgattgactttttttcttcttctattctcacacatacccatctactccttccctcatggctgaacaatcttccaactccatttacgatttcactgtcaaggacatcagtggaaatgatgtgagtctgaatgattacagcgggaaggttctactgattgtgaatgtcgcctctcaatgtggtttgacacagacaaattaccaagaattg

SEQ ID NO: 258729 - DNA, 401 bp, Glycine max
  unsure (1)..(401): unsure at all n locations
gacaccaacaccaaaacaaacccactaagatggctgcctttgtatccttcctagtgctgcttcttgcagcccttatcctcatgtctcaagggcttgctacttactacaaaccaattaagaagccaccagtgtacaagcctccagtgtacaagccaccagtgtacaaaccaccggtttataagccaaaaccaccggtttacaagccgaaaccaccggtttacaagccaccatataagaagccaccatacaagaaaccaccttatggaaagtaccctccagtagaggacaacacccatgcctaaagcaagcaatgaggtctattatctacttaataaataagaggaacttgcttgtgttntctagcattgtggtttacaacttcgtagcaatgcatattcttg

SEQ ID NO: 258730 - DNA, 325 bp, Glycine max
ggttcagcgccaaaacgaacaccacctaaccagctcgtgagtcttcccgccgtagatctgttccttttcgccgttcctccatggccgacgacttcgaattctccgacaaagtccctccttccttcgatcgcgtgggttcaaaagggttcaacccagcattaattgttctccttcttgttggtgggttgctgttgatattcctcgttggaaattatgtactatacacatatgcacagaagaccctccctcctagaaaaaaaaagccaatctcaaagaagaagatgaaaaaggagagactgaagcagggcgtctctgcacctggaga

SEQ ID NO: 258731 - DNA, 338 bp, Glycine max
gggcccattctctggcgagcccccgtcctacctcactggcgagttcccaggtgactacggctgggacactgctgggctttcggccgacccagaaaccttcgccagaaaccgtgagctcgaagtgatccactccaggtgggccatgctcggggccttgggctgcgtcttccccgaactattgtcccgcaacggggtcaagtttggagaagctgtgtggttcaaggccgggtcccacatcttcagcgagggtgggctggactacttgggcaacccaagccttgtccacgcccagagcatcctcgccatcttggccacccaagttatcctaatgggtgctg

SEQ ID NO: 258732 - DNA, 390 bp, Glycine max
  unsure (1)..(390): unsure at all n locations
gacgatgagtcgatttgataactaagatattgttggtcgtgatattgatccaatttgatatcatcgaaatccaatttataccattgttgaattaattatcgatgaaagatttatcatctctatgggattaaatcccgaattttttattggaaatttaagagaaataaaacataataaagattatggaagtaaatattcttgcatttattgctactgcactgtttattctagttcctactgcttttttacttataatttacgtaaaaacggtaagtcaaagtgactaatttcactgaaatctgacttcttcatttttatcaatgtaatcaatgattaaaaaaaatgaaaaaggttttcactttttgtcttagtctaaaanaaaaaatattt

SEQ ID NO: 258733 - DNA, 341 bp, Glycine max
gatggaagaagcagaaagagaagcattagcaaaagcaagaagaactagtctaagcagaaatggcctcttcagtgatggcatctgtggccctcaaacctgcccctttcactgttgagaagtcctcagttagaggccttccctccctctcaaggaactcctcttcattcagagttgtggccagtggtggcaagaagatcaagactgacaagccttatggaattaatggtggcatggctttgagggaaggagttgatgcatctggcaggaaaggaaagggaaagggcgtttaccagtttgtagacaaatacggtgctaatgtcgatggttacagtcctatctac

SEQ ID NO: 258734 - DNA, 400 bp, Glycine max
gagtgcacaagtgagtttgttgatcgagatggctggaaacagtgtgatgaaaatgaaggtccttgttttcttcgttgctacaattttggtagcatggcaatgccatgcgtacgatatgttccctctccgaatgaacactggctatggtgcccgtactccggaggtgaaatgcgcaagttggaggcttgctgtggaagcacacaacatctttggctttgagaccattcctgaagagtgcgttgaagcaacaaaggaatacatccatggcgaacaatatagatcagactccaaaacagttaaccaacaagcttacttttatgccagagacctcgaagtccatcccaaggacacatttgtgttcagtatagatggcaccgtactctctaatattccatactac

SEQ ID NO: 258735 - DNA, 346 bp, Glycine max
ggatgcgaacgtaaccaggctctggttttgcggttagggtagctctttctactcaaaacaaaacaaaacatcaatttctgtttcagttcgcggagatcaatatttgtcgctgaggccgatcgtcgataaaaggcaatgtttttgtgggattggttttatgggattctagcgtcgcttggcctgtggcagaaggaggccaagatcttattcttgggcctcgataacgctggcaaaaccaccttgcttcacatgctcaaagatgagagattagtccagcatcagcctacccaatatcctacatcagaggagttgagtattgggaagatcaagtttaaagcttttgatc

SEQ ID NO: 258736 - DNA, 378 bp, Glycine max
tacggctgaacaagataagctatccatagcagccaaagaaatgaagagtaccttgttcgccctctttctactttgtgccctcacctcttacctaccttcagccaccgctggtgatgtggtcgacactgatggtaatcctgttgaaaatggaggcacatactttgtgttgccaactataatattaaacggcggtggaatagaatatgccacatttggaaatgaaacttgccctgtcactgttgcgcaatctcgcgatcagttctgcaagggctttccgataaccatttcatccccagcccgaatccgtcacatcagcgaaggccttagtttgaacattgggttcactttcgcattcccgtgttcccccgcttctgagtg

SEQ ID NO: 258737 - DNA, 337 bp, Glycine max
ggttctagtgtgtgattgtttgttgttgtagcgtcggcttcttcttttgttgttctgtgtttgtgtttgttttctctctcacctgaaaatgtcttgctgcggtggtaactgtggttgcggaagctcctgcaagtgcggcaacggctgcggaggctgcaagatgtacccagatttgagctacactgagtcaaccaccaccgagaccttggtcatgggagtggcacctgttaaagctcaatttgagggtgctgaaatgggtgtgcccgctgagaacgatggcttcaaatgtggaccaaactgctcctgcaacccctgcacttgcaagtgaggtgtttgg

SEQ ID NO: 258738 - DNA, 236 bp, Glycine max
gaccacacaccacacacatagtagctattatactgtgtagagtaattgcggaatctgctagaattttctaataatggcgaaagacgttgagcaggtcacagagcaaggtgaatactccgcgaaggactaccatgaccctcctccggcaccgttgatcgacccagatgagctcacaaagtggtccttgtacagagccgccatagctgagtttatagcaacacttctttttctttaca

SEQ ID NO: 258739 - DNA, 406 bp, Glycine max
  unsure (1)..(406): unsure at all n locations
ggcacaagtgagtttgttgatcgagataactagaaacagtgtgatgaaaatgaaggtccttgttttcttcgttgctacaattttggtagcatggcaatgccatgcgtacgatatgttccctctccgaatgaacactggctatggtgcccgtactccggaggtgaaatgcgcaagttggaggcttgctgtggaagcacacaacatctttggctttgagaccattcctgaagagtgcgttgaagcaacaaaggaatacatccatggcgaacaatatagatcagactccaaaacagttaaccaacaagcttacttttatgccagagacctcgaagtccatcccaaggacacatttgtgttcagtatagatggcaccgtactctctaatattncatactacaaaaaacat

SEQ ID NO: 258740 - DNA, 183 bp, Glycine max
aattcaagcaaataatggtatcgagtatagatgaaagagggggatatggcgaaattggtagacgctacggacttaattggattgagtcttggtatggaaacttaccaagtgagaactttcaaattcagagaaaccctggaattcacaaagggcaatcctgagccaaatcctgtttttcgaaaa

SEQ ID NO: 258741 - DNA, 321 bp, Glycine max
ggagacgagggtaaggtcgcgttgtgttgcgtcgtgtcgtgcgctgttcctctgtctgtcgtttttgttttcagaccaaaccctagctccgcatcgcaaccatgtcgaccaagcaaggtggaaaagctaagcctttgaagaaacccaagtctgataagaaggattacgacgaggttgacatggctaacattcagaagaaaaaggaagaggagaaggcgctaaaggagttgaaagccaaggcgcaacagaaaggaagctttggaggttctgggctcaagaaaagtggaaagaaataagggctctttatcatgattgtataca

SEQ ID NO: 258742 - DNA, 315 bp, Glycine max
gagcgagctcatatcaaatcttgttctcatgtgcctggttttgttgaaaacaaagacaatgatcccggtactattataaaaaggcagctgcacaataatttttctgggttgttctatgggttaccattcactaagccaaatcctgaatttgtacaatctgttaagagccagcttccccctgaaagtaaactcttgggtgtatgtcaggaaggactgaggtctgctgcagcagcaagtaagttagaagcagctggtttcgaaaatatagcatgcataacatttggcctttaaacttgtaaaccaggaacttttgat

SEQ ID NO: 258743 - DNA, 331 bp, Glycine max
gattgtggttcatttgcacatttggaaagtgttgttcttctttttttcatttgcattgcaaagcaaaaaccttgcaaattgcaatggcttccaacaaggttattgccaccatcttggttctttctctccttgcctactcaacatcattcaccaatgcatgtggcacatgccacccaaaacctactccttctccccctcctccatcagggaagtgccccaaggacacattgaagctaggggtgtgtgctgatgttctaggacttgttaatgttgttgttggttcccctgtctctagcaagtgttgtgcattgcttgaaggtttggctgattc

SEQ ID NO: 258744 - DNA, 414 bp, Glycine max
gagccaagaaaagaaaatcctcacccattttgttcgtagccaaacactctgaaattctcagttatgtcgtggcaagcgtatgtggatgatcacctactgtgtgaaatcgaaggtaaccacctcactcacgccgctatcatcggccaagacggaagcgtttgggctcagagcaccaacttccctcagttcaaacctgaggaaataactgccatcaataatgactttaatgagcctggatcacttgctccaactggattgtatatcggtggcaccaaatacatggtcatccagggtgagcctggtgctgtcattcgagggaagaagggtcctggtggtgtaactgtgaagaagaccggtgcggccttgaacattggcatttatgatgaaccaatgactccaggtcaatgcaacatg

SEQ ID NO: 258745 - DNA, 124 bp, Glycine max
cgtagtaagcgacgaaatgcttcggggagtggaagggttgcgtatatccggggattcccgatatacgtcaacctttcgaactgctgctgaatccacgggccggcctaataaaaaaaatatatac

SEQ ID NO: 258746 - DNA, 368 bp, Glycine max
gttgcatattaaataaactgcaaccgtgacaaaagtggcgtagcaatagcatactcttactctgattcgttagtgaagaaaaatggcaacaatcatcgtcggcaccccaactacatcaatcactcgcacaggtcatgtgctcaaacgacctgttggggcctcatcctctaccgttcttggattgccagcaatggccaaggcggggagagtgaggtgctccatggaggaaaagccttcaagcagctcaaacctagggatgggggcatccttgttagcagctgcagctgccgcaaccatgtcaagcccagcaaccatggctttggttgatgagagactcaacactgaaggaactgggctttcctttgggc

SEQ ID NO: 258747 - DNA, 333 bp, Glycine max
cgcgtccgcctgcttgcagaagactacaaaaggggaatgtgcttgactttgttgtgagctataagctgcggtatcgtgaggagaatatgaacctccttcttttctttgttgctgcagtatttctggtagcatggccatgccatggcgcaagctaccaaaggttccctctcccaatgaaaactggctattgtgagcgttcttcggaggtaaaatgctcaagttttaagctctctgttgaatcacgcaacatccgtacctttaaaacctttcctgaatagtgctttaaaccaacaaaggtctacattaatggcgagcaatttacatcatactcta

SEQ ID NO: 258748 - DNA, 368 bp, Glycine max
cttggagcacttggctttcaagggtagctttcctttccaaattgagagcttgggtggaagcttcgatgcttacactactcgcgaacattccgccttccttgtccagactttcaacaacaatgttgcccagactgttgatatcttgtccgaagctgttcagaaccccaaccttagcgccattgatgaagctcgtgaggctatcttgaagcagcaacagaaggctgccaacaatggtgagcagattgtctttgatcacttgcacgccactgctttttcaaggtgaaagtcttggtcgttccattgctggtacccccgagtcttgtcaagccatcttttgcgatgacctcttcaactttatttagaacaac

SEQ ID NO: 258749 - DNA, 231 bp, Glycine max
  unsure (1)..(231): unsure at all n locations
ggcgagcgacgcgtccgttngctgtactaccgtactctcttctgtttttgctaagcgtaccttccccacctctgcggccaaccttttcaaagtttctgtcctctgtgcttcccgaggtattggccaacctctcttcctttttcttaagaacaacaccctagttactgacctttccttgtaccataatgtcaactccccccgcgtttcccctgattttatccacattaacac

SEQ ID NO: 258750 - DNA, 212 bp, Glycine max
gggcagcagaagaacaagtagttgagaactaagaaggagaagcaaatggcttcctcaatgatctcttccccagctgttaccactgtcaaccgtgccggtgccggcatggttgctccattcactggcctcaagtccatggctggcttccccaccaggaagaccaacaatgacattacctccattgctagcaacggtggaagagtgcaatgcat

SEQ ID NO: 258751 - DNA, 232 bp, Glycine max
  unsure (1)..(232): unsure at all n locations
gttccactttcattccaaagcgttattccttcttcttcttcctctccattctcttcgctcttcgatcctcgtccgggggctgctccgaataccaccaccaccacgcgccgatggccacgataggaggcttacgcgactcccaaggctctcagaacagcgtccaaaccgaggccctcgctcggttcgccgtcgatgaacacaacangaagcagaatcactttctggagttttc

SEQ ID NO: 258752 - DNA, 296 bp, Glycine max
ggttctagggttacacgccgtcgtcgctgtttttgtgtggggcttcttcgtaggtgcagctgcaatggtgaagggacgccaaggagaacgtgtcagactctacgtgaggggtacaatccttggatacaaaaggtccaagtcaaaccagtatccaaatacatccctgatccaaattgagggtgtgaatgccaaagaagaagtagcatggtatgctggcaagaaaatggcctatatctacaaggctaaagtgaagaagaatggaagccattaccgctgcatatggggcaaggttacaa

SEQ ID NO: 258753 - DNA, 242 bp, Glycine max
gacacaccaaaccaaagtaagagtgagcaacttgcagcaccatattgaaatttcttccaaggctaaacttaacttgtgtttcaattttctctccttcaccgtgtttatctccacatatttcccatgcaacccaccccccaaaactcctaaacacccacctgttccaaagccaccttccccaaatctagcataaatccccaaaaacacttttaactttggtgtgtcttctcattttttacttt

SEQ ID NO: 258754 - DNA, 185 bp, Glycine max
tgtttttttacaccataataacaatttcttgagagcggagaatgataatcaaatggcttcctcaatgatctcttccccagctgataccaacttcaacctttcctaatccgtcttggttgctccattcactggcctcaataccaagtctgtctttcccaccttgtagaccaacaattacattacct

SEQ ID NO: 258755 - DNA, 289 bp, Glycine max
gaaggtgcaagagtttgttgtgagctataagctagtttatcgtgaggagaatatgaagttgtttgttttctttgttgctgcagtagttttggtagcatggccatgccatggcgcaggctaccaaaggttccctctccgaatgaaaactggctatggtgagcgttcttcggaggtaaaatgcgcaagttttaggcttgctgtggaagcacacaacatccgagcctttaaaaccattcctgaagagtgcgttgaaccaacaaaggactacattattggcgaacaatttaca

SEQ ID NO: 258756 - DNA, 309 bp, Glycine max
gaagttgtacacgtttaaacggagttctaaatagggcggggagttttcctctctcgaatctgcgacaccgacgaatctcactaagcggaacttcgcattcagaaaatggctttaggtggaacagctcccccgagaggaagtgcagcggctactgccagcatgaggaggaggagaacaaccggtggtgcggcctctggaggagcagctggaactatgctccaactttacactgatgatgcccctggactcaagatctcccccaaatgtggttctttgtaatgagcattggctttatagcattggttgcca

SEQ ID NO: 258757 - DNA, 347 bp, Glycine max
gagcgccaatgtttttttcagaggagtttcatcttgtggtcgaaagagtttatcttatagtaagaaatcgatgtcttactccattttaaggaacaaaacaagagaacaatagcctgacaaagggtttagccataaaatcgaatccatcattgatttgagatattgataaggtgaatactcatttctcgtcaatgctaggcataatgcgggtattgggacctaaaaaagattatcttttcttcctatcttatgaactttaaggtgtatgaagtgtcatttcctatcttagattttaattttagtaggtagataaagagtccatttaacttaaggttgatctaggccag

SEQ ID NO: 258758 - DNA, 213 bp, Glycine max
ggctcaagtgagtttgttgatcgagataactagagcagtgtgatgaaaatgaaggtccttgttttcttcgttgctacaattttggtagcatggctatgccatgcgtacgatatgttccctcttcgaatgaacactggctatggtgcccttactcctgaggtgaaatgcgcaagttgtaggcttgctgtggaagcacacaacatctttggcttt

SEQ ID NO: 258759 - DNA, 151 bp, Glycine max
tgctaatagcaaggtcgtgccagcatctgccaggcgtgattgctgtatgggattggatattcgtccatattctgttaaatcattcagtgaagcattgtatactacccataccatcatatggaatggaccaatgttagtgtttgagtttgac

SEQ ID NO: 258760 - DNA, 336 bp, Glycine max
gacttacagaagcacaccacaggaactagaaaatccatacaatcttcaccaccaaaaagaaaataatggcaatggccagtgcaacaactctagccacaatcactgttgtggcggctagccccagtgttggcagcagaaggagtgggaagaggaatgtgaacttcatcagaggattgaattcttttggagggttgaaggctcagaacaatgtgacattactaggccttcctgtgtgcactgagcagtgctttgcaaaggtggtgagctcattgaaatatccatcatcatcatcacgtaaggggagaggtggaggtgctgccttttcaacatgcaatg

SEQ ID NO: 258761 - DNA, 380 bp, Glycine max
gcctcattacacatcttccaagcttcagagggcgctcaaataacttcttctcagacatggcatctcaaggtttgtgtccttctataaaaaatattcttcttttggactctgaagggaagcgtgtggcattcaattattactcacatgactggccaacaaacaatgcaaagttagcttttgagaagtttgtatttactaagactgttaatacaaatgctcgtactgaagcttaggtaacactacttgagaacaatatcattatttacaaatttgttcaagacctgcatttctttgtcactggtggtgaagatgaaaatgatctcattctatcattaattcttcaaggtttcttttatgcaaacacctttctctttaagatt

SEQ ID NO: 258762 - DNA, 405 bp, Glycine max
ggtgcacaagggagtttgttgatctacataactaggaacagggtgatgaaaatgaaggtccttgttatcttcgttgctgcaattttggtagcatggcaatgccatgcgtacgatatgttccctctccgaatgaacactggctatggtgcccgtactccggaggtgaaatgcgcaagttggaggcttgctgtggaagcacacaacatctttggctttgagaccattcctgaagagtgcgttgaagcaacaaaggaatacatccatggcgaacaatatagatcagactccaaaacagttaaccaacaaggcttacttttatgccagagaccttgaagtccattccaaggacacatttgtgttcagtatagatggcaccgtactctctaatattccatactacaaaaa

SEQ ID NO: 258763 - DNA, 433 bp, Glycine max
gggaggttcatggccaaaggtaaagatatccgagtgattgttattttggaatgtaccggttgtgataaaaagagtgttaataaggaatcaacgggtatttctagatatataactaaaaagaatcgacagaatacgcctagtcgattggaattgagaaaattttgtccccgttgttgcaaacatacaattcacgcagaaataaagaaatagatcaaattgatcgcttgtgtgttacccttcgaaccaaagaacttaacatgtaaaatgatctatttttcttatctatatagatagatctatctgtattctatcatttacagttgaatatatacaaatatcagtatataacaacatatattaataaaataacatcatatattaaaaaaagtcataataaaaaaaacatatcctttatagtatttcttggaataaa

SEQ ID NO: 258764 - DNA, 294 bp, Glycine max
aggaacgcagccaagaaaagaaaatcctcacccattggcggcgtagccaaacactctgaaattctcagttatgtcgtggcaagcgtatgtggatgatcacctactgtgtgaaatcgaaggtaaccacctcactcacgccgctatcatcggccaagacggaagcgtttgggctcagagcaccaacttccctcagttcaaacctgaggaaataactgccatcaataatgactttaatgagcctggatcacttgcttcaactggattgtatattggtggcaccaaatacatggtcat

SEQ ID NO: 258765 - DNA, 144 bp, Glycine max
ggcacatatcagtttgctgatcaacataactacaaacggggtgatttaaaaaaaggatcaatgtttcttctttgctacaattctggtagcaaaccaattccactcataccacttgttccaatttcccaatgaacactctatatt

SEQ ID NO: 258766 - DNA, 276 bp, Glycine max
gatccctacaacgtaataataaccaaaacagcagagagaagagaaggtgtagacaaacacaatctctaatggcactcaggatgtgggcttcttccactgccaatgcactcaaagtctcttctacctccagacctcatctcttgcatcctttttctttctccagatgcttgtcttccgtcttggatggacttaagtatgcagattcacacgaatgggtcaagcacgaaggctcagtcgccaccattggtatcactgaccatgcccaagaccatcttg

SEQ ID NO: 258767 - DNA, 206 bp, Glycine max
ggcacaagtgagtttgttgatcgagataactagaagcgagtgtgatgaaaatgaagggccttggtttcttcgttgctacaattttggtagcatggcaatgccatgcctaccatatgttcccttttccaatgaacacttgctattgtgcccgtacttcggaggtgaaatgcgcaagttggaagcttgctgtggaagcacacaacatt

SEQ ID NO: 258768 - DNA, 206 bp, Glycine max
cggggcgacccacgcgtacgtccacgcgtactgtagaagacgacagattggtgcacaagtgagtttgtagatcgatatagcttgaaacagtgtgatgaaaatgaatgtccttgttttcttcgttactacaattatggtagcatggcaatgccatgcgtactatatgttctctctcctaatgaacactgtctatcgtgcccgtactt

SEQ ID NO: 258769 - DNA, 270 bp, Glycine max
gaccaacacaaacaatagtgcatagcgtttttcagggtgcattattcaatggccaccacagcagctctatccggaaccatggtgagcacctccttcatgaggaagcaacctatgacgaccaagagcctaaagacattccccaacgctctttttggtctgaaaggtggacgaggtggtcgtgtaacttgcatggccccgtacaaggtgaagctcataaccccagaaagagaagtggagtttgaatgcccagatgatgttttcattgttgac

SEQ ID NO: 258770 - DNA, 271 bp, Glycine max
ggttctagtgtgtgattgtttgttgttgtaactcgggcttcttcttttgttgttctgtgtttgtgtttgttttttctctcacctgaaaatgtcttgctgcggtggtaactgtggttgcggaagctcctgcaagtgcggcaacggctgcggaggctgcaagatgtacccagacttgagctacactgagtcaaccaccaccgagaccttggtcatgggagtggcacctgttaaagctcaatttgagggtgcttaaaatgggtgtgccccgctg

SEQ ID NO: 258771 - DNA, 277 bp, Glycine max
gggctctttgtacgaaaattatggtttgtagtgtaacgctaagaatcatcaatggcgccgaacataacacgtaaggttagcagaaaccctgaattgataaggggaatcgtaaagtactcgacgacgcatatttaccacaagatgggcatttgtgctatcaaggccaaaaactgtgacgttttacctcgccacgaccctaaacccaatcctgaagctcctgctgaaaaaccacccaaattttaccctgcttatgatatcaataaaccctttgtcaaca

SEQ ID NO: 258772 - DNA, 424 bp, Glycine max
tacagaagcacaccacaggaactagaaaagggagcaatcttcaccaccaaaaagaaaataatggcaatggccagtgcaacaactctagccacaatcactgttgtggcggctagccccagtgttggcagcagaaggagtgggaagaggaatgtgaacttcatcagagggttgaattcttttggagggttgaaggctcagaacaatgtgacattactaggccttcctgtgtgcactgagcagtgctttgcaaaggtggtgagctcattgaaatattcatcatcatcatcacgtaaggggagaggtggacgtgcttccttttcaacatgcaatgctgctggtgagattttccagattgcagccatcatgaatggccttgtgcttgttggggtggcaataaggtttgttcttcttcgaatcgaaatgt

SEQ ID NO: 258773 - DNA, 171 bp, Glycine max
gtaaaaataggcagacttctcccgggaaaaaaaagtaggtaaaaaaatatgctaagtataaattgtctactgatgaaatacgaaagctgatgatattgaaaaaaaaagaattgtaaataaggttcaggtccgacttccatagagaatatagatgatattgtctataatgat

SEQ ID NO: 258774 - DNA, 196 bp, Glycine max
tgggagtaacatcttgcagagaaacaaacttacaagtggaggaaattaagaagatcattaatggcttctcttgcaaccttagctgctgttcaaccagctgcgctcaatggccttgctggaagttccctctctggaactaagctctctttcaagccctcttcccacactgtcaaatccaataacttcatgagtggtg

SEQ ID NO: 258775 - DNA, 365 bp, Glycine max
ggtgcacaagtgagtttgttgatcgagataactagaaacagtgtgatgaaaatgaagggccttgttttcttcgttgctaccattttggtagcatggcaatgccatgcgtacgatatgttccctctccgaatgaacactggctatggtgcccgtactccggaggtgaaatgcgcaagttggaagcttgctgtggaagcacacaacatctttggctttgagaccattcctgaagagtgcgttgaagcaacaaaggaatacatccatggcgaacaatatagatcagactccaaaacagttaaccaacaagcttacttttatgccagagacctcgaagtccatcccaaggacacatttgtgttcagtat

SEQ ID NO: 258776 - DNA, 428 bp, Glycine max
gacttacagaagcacaccacagggactagaaaatccatacaatcttcaccaccaaaaagaaaataatggcaatggccagtgcaacaactctagccacaatcactgttgtggcggctagccccagtgttggcagcagaaggagtgggaagaggaatgtgaacttcatcagagggttgaattcttttggagggttgaaggctcagaacaatgtgacattactaggccttcctgtgtgcactgagcagtgctttgcaaaggtggtgagctcattgaaatatccatcatcatcatcacgtaaggggagaggtggaggtgctgccttttcaacatgcaatgctgctggtgagattttccagattgcagccatcatgaatggccttgtgcttgttggggtggcaatagggtttgtccttcttcgagtcgaagcg

SEQ ID NO: 258777 - DNA, 367 bp, Glycine max
aggggagtgtgtgaaaaaacgagcgagcgaacagtttcaaagagaggatttgggattgggaaggcgagggattgcgctgcgtctcttcctcttctctttcgattcatccctcattcataatcttccaatccaacaacctcagcctcacactcacacatacacacatctgaacgcgtatcgtccctcccatggcttcaaagcgcatcctcaaggagctcaaggacttgcagaaagacccaccaacttcttgcagcgctggtccagtagctgaggacatgttccattggcaagcaacgattatgggtcctgctgatagtccttatgctggaggtgtattcctagtcactattcactttcctccggatta

SEQ ID NO: 258778 - DNA, 333 bp, Glycine max
aggggcatagcatattccagtggtgtgcatttcatcgggcattcaatggccaccacagcagctctatccggaaccatggtgagcacctgcttcatgaggaggcaacctatgaccaccacaagcctaaagacattctccaacgttggtgaagctctttttggtctgaaaagtggacgacgtggtcgtgtcacttgcatggcctcggacaaggtgaagctcataacctccgaaggagaagtggagtttgaatgcccagatgatgtttttcatcgttgacaaggcggatgacaaaggcattgaacttccctactcgtgcagggccgcttcttgcgt

SEQ ID NO: 258779 - DNA, 306 bp, Glycine max
gatagctggctgtgagcaattgtggtttcacagaacgtgatcttatcaactatggcggagaaacacaacatcaagaacccagccgtgaagcggattctccaggaggtcaaggagatgcaatcaaacccttccgatgactacatgagcctccctcttgaggaaaatatatttgaatggcaatttgcgatcagggggcctcgtgatactgaatttgaaggtggtatttatcacggacggattcagctgcctttagaatatcccttcaaacctccttcgttatgttgctcacacctagtggccgtttga

SEQ ID NO: 258780 - DNA, 410 bp, Glycine max
cacaccaaaaggtacccgttcgaacaaacatacaaacacgcgggggggcggttagaaaaaaacgacagacggggccacaccaccaccaaaacacacccactaagagggcttctcttttgaatcctccctaaggctgcttcttacaacccttatcctaatccctcaaaggcttgctacttcctccaaaccaattaaaaagccaccagtgtacaagcctccagtgtacaaaccaccagggtacaaaccaccggtttataagccaaaaccacccgcttacaagccgaaaccaccggtttacaagccaccatataagaagccaccatacaagaaaccgccttatggaaagtaccctccagtagaagacaacacccatgcctaaagcaagcaatgacgtctattatctacttaat

SEQ ID NO: 258781 - DNA, 413 bp, Glycine max
gtgcacaagtgagtttgttgatcgagataactaggggcagtgtgatgaaaatgaacgtccttgttttcttcgttgctacaattttggtagcatggcaatgccatgcgtacgatatgttccctctccgaatgaacactggctatggtgcccgtactccggaggtgaaatgcgcaagttggaggcttgctgtggaagcacacaacatctttggctttgagaccattcctgaagagtgcgttgaagcaacaaaggaatacatccatggcgaacaatatagatcagactccaaaacagttaaccaacaagcttacttttatgccagagacctcgaagtccatcccaaggacacatttgtgttcagtatagatggcaccgtactctctaatattccatactacaaaaaacatggatat

SEQ ID NO: 258782 - DNA, 437 bp, Glycine max
  unsure (1)..(437): unsure at all n locations
agacgacagaaggggacagaaaagaaaaaggaaaccctagctgggtaggtcaaacatcatcatgtcggacgaagagcaccatttcgagtccaaggcagacgccggtgcctccaaaacctaccctcagcaagccggtaccattcgcaagaacggctacatcgtcatcaaaggacgcccctgcaagggtgtggaagtttcgacttccaaaactggaaagcacggtcacgccaagtgccactttgttggaattgatattttcactgccaagaaacttgaggatattgtgccctcttctcacaactgtgatgttcctcatgtgaatcgtactgattaccagctcattgatattggctgaggatggatttttgagtctgcttactgaaaatgggaacaccaaggatgacctcaagcttnccactgatgagagtctgctcact

SEQ ID NO: 258783 - DNA, 432 bp, Glycine max
cgtgtagtgccagacgcaatgactaaaccaaacctctcactcggcggcgagggtttctcctttcggttagcaacaacaacaatggttgcagccaaaaaaaccaagaagacccatgggagcatcaacaacaggctcgctctcgtcatgaagaagggaaaattcaccctcggttacaagacgggtctcaaatcacttaagagctccaaagggaaattgattatcattgctaacaactgcccccctttgaggaaatcagagattgaatactatgctatgttggccaaagttggagttcatcattacaatgggaacaatgtggatttgggcactgcatgtggaaaatattacagagtgtgctgccttagcattattgatcctggggattctgatatcatcaagacactacctggcgaacagtaaagtattatttga

SEQ ID NO: 258784 - DNA, 423 bp, Glycine max
ggaggggcaagagtttcgtgggagctataaactagtggatcgtgaggagaatatgaagttgtttgttttctttgttgctgcagtagttttggtaacatggccatgccatggcgcaggctaccaaaggttccctctccgaatgaaaactggctatggtgagcgttcttcggaggtaaaatgcgcaagttttaagcttgctgtggaagcacacaacatccgagcctttaaaaccattcctgaagagtgcgttgaaccaacaaaggactacattaatggcgaacaatttacatcagactctaaaacagttaaccaacaggctttcttttatgctagtgaacgcgaagtccatcacaacgacatatttatattcggcatagataacaccgtaccctctaatatcccatactatgaaaaacatggata

SEQ ID NO: 258785 - DNA, 382 bp, Glycine max
gatctggcagcagaagaacaagtagttgagaactaagaaggagaagcaaatggcttcctcaatgatctcttccccagctgttaccactgtcaaccgtgccggtgccggcatggttgctccattcactggcctcaagtccatggctggcttccccaccaggaagaccaacaatgacattacctccattgctagcaacggtggaagagtgcaatgcatgcaggtgtggccaccagttggcaagaagaagtttgagactctttcctacctgccagaccttgatgatgcacaattggcaaaggaagtggaataccttcttaggaagggatggatttccttgcttggaattcgagttggagcacggcttcgtgtaccgtgagcacaa

SEQ ID NO: 258786 - DNA, 374 bp, Glycine max
gggcagcagaagaacaagtagttgagaactgagaaggagaagcaaatggcttcctcaatgatctcttccccagctgttaccactgtcaaccgtgccggtgccggcatggttgctccattcactggcctcaagtccatggctggcttccccaccagaaagaccaacaatgacattacctccattgctagcaacggtggaagagtgcaatgcatgcaggtgtggccaccagttggcaagaagaagtttgagactctttcctacctgccagaccttgatgatgcacaattggcaaaggaagtagaataccttcttaggaagggatggatttccttgcttggaattcgagttggagcacggtttcgtgtaccgtgagc

SEQ ID NO: 258787 - DNA, 422 bp, Glycine max
  unsure (1)..(422): unsure at all n locations
ggagaagaagaagccttcagcacttgaaggggagaccttgctgatcctcatcatgggaaccatttttcctcctcactctctctctccactcctcaacatcaaaccttcaccctcaagaattctcttggctccctctccccaacccaagtcaaattctctcttttgctccaaacccattgtttcaagtctcagaaagaaccaaacttcatctcccaaaccttcatcgggcacaagctggttggctcatgctcaacagggcctagcagctttggctatctccttggcactcaactttagcccagctttgtttaatggcaatgccatggcatctgagtttgatgtgcttaatgagggtccacccanagattcttatgtcgttgatgatgcacgagtgcttagtagggtgaccaggtctgatttaa

SEQ ID NO: 258788 - DNA, 255 bp, Glycine max
cccacgcgtgcggacggctgaaggcgaacgacaggtaggggtctgaaaaggaacaagtagggtacaacttctataaaacaacagatggctacctctatgataagtccaccaactgataccactgtcaacaagactcggaccggcattatttctttaactacttgtctcttgggcatcgctggcttactcacaaggaaaaccgcccgtgacataacatccatggttagcaacccgtgaatactgcaatgtatgtat

SEQ ID NO: 258789 - DNA, 400 bp, Glycine max
gctaccatagtgctaggaaagtgagtgagagaaagagatcacatagcagaatggcttctactcaatgtttcttgcaccaccatgctcttaccacccctgccagatccccatcacaacgcatcatggttagcaccaagcctaaccagcttgtttgcaaggcacagaagcaagaggatattgatgtcagcccaatctctcgccggttagctctaaccgtgctcattggtgctgctgctgttggctccaaagtccaacctgctgatgcagcttatgggaaagctgccaatgtgtttggaaagccaaagacagacacagatttcctgccatacaatggaaaatggaatcaaactatcgattccctcaaagtggaacccaagcaaagaggttgagtacacaggtc

SEQ ID NO: 258790 - DNA, 450 bp, Glycine max
  unsure (1)..(450): unsure at all n locations
cccacgcgtncgggttgcgaaaaagacgacacgacagagggtgacctccttgcttctctcatgggcaatcctcttgccgctgagctccctttctgctcggtccacagagacaaaatgtaagacaggtgccaacagttcatcacgaaagaaaggactacctgaaccgagatcactaactaaaacgaatttaatactcatcgaacatactcatagaatagaaatagaactgtcttttcatatagatataccttcaacacaacatatgtcatcgaaaggatctcgaagacccaccaacgcacgaaagccggcatctttcagaaaatggattcctattcgaagggtgcataaccgcatggataagctcacactaacccgtcaatttgggatccaattcggttccttaggaggtatcgggaacgaattttggaatgtcataatatcgattcatac

SEQ ID NO: 258791 - DNA, 339 bp, Glycine max
tttcttatgtgagtttgttgatcgagataacggggacagtttgattaaaatgaacgtccttgttttcttctttgctacaatttttgtagcatggcaatgccatgcttacgatatgttctcttctctaatgaacactgtctatttgttcccgtactctagatgtgaaatgctcaatttttacgcttgctttttaagcacacaacatcttttggcttttaaactcatctttaatatttctttttagctatataaataatacttttattgccaacaatattatattttttttttattcagttaatctatttttttttttttatttcttcaatctttttattt

SEQ ID NO: 258792 - DNA, 419 bp, Glycine max
gactcaccaagtgaaccaatatagcccaagccctatacaaccaaaccctaacacacacccatttgattcagtttccatggctagcctcaaggttgcatttttggctgcagtgctctgcatggttgtggtgagtgcacccatggcacatgcagctatcacgtgcgggcaggtgacgagtagcctggccaattgcatcggttacctccagaagggaggaacgccgtcgtcgggatgctgcaacggagtgaagagcctcaatgccgccgccaagaccaccgtcgaccgccagacggcgtgcaactgcctcaagtcggccgccagccaaatctccggcttcaacgccaacaacgccgcctcgctccccggcaaatgcggagtctccatcccctacaagatcagcaccttcaccaactgcgcta

SEQ ID NO: 258793 - DNA, 394 bp, Glycine max
tgtcttcttaaggggaacgcatcataaaaaggggggccttctatcatatagcattctaagaaatgaagagccctaccattttcattctctttctactttctgccttctacacctcactcctaccttcagccaccgctcaagtcgtggttgacatggaaggtaatgatcttcaaaatggtgggaaatattatgtgttgccagtaatagagtcatcatatggtggaataagagtagccccaactggaaaagaaagatgccctctcactgttgtacaatctgccgatcctgatgataaggggattgcaacaattatttcaaccccatattgagttccctgtatccgcgaaagcttcccttttaacattacgttccgtaatttttcaattatactgcc

SEQ ID NO: 258794 - DNA, 418 bp, Glycine max
gattgtggttcatttgcacatttggaaagtggtggttttctttttttcatttgcattgcaaagcaaaaaccttgcaaattgcaatggcttccaacaaggttattgccaccatcttggttctttctctccttgcctactcaacatcattcaccaatgcatgtggcacatgccacccaaaacctactccttctccccctcctccatcagggaagtgccccaaggacacattgaagctaggggtgtgtgctgatgttctaggacttgttaatgttgttgttggttcccctgtctctagcaagtgttgtgcattgcttgaaggtttggctgattcggaggctgcactttgcctttgcactgctattaatgccaatgttcttggaatcaacttgaatgtgcctatcacactcagtgtgctact

SEQ ID NO: 258795 - DNA, 428 bp, Glycine max
agaagacgacagaaggggggtggagtgtgcagaagagcgtcggaggcgcaaccctaatcagaagaagcgcagcttcaagcgagtgacagccaccagccatgggtcgtatgcacagccgcggtaagggtatatcctcttctgctttgccctacaaaaggacacctcctagctggctcaagatctcttcgcaagatgtcgaagaaaatatctgcaagtttgcgaagaaaggtttgaccccgtctcagattggtgtcattctcagagattctcacggtattgctcaggtcaatagcgtcactggcagcaaaatccttcgcatactcaaagctcacggacttgcgcctgaaattccagaggacctgcaccatttgattaagaaagcagtttcaattaggaagcatcttgagaggaacaggaaggacaaggac

SEQ ID NO: 258796 - DNA, 418 bp, Glycine max
  unsure (1)..(418): unsure at all n locations
ggcacaagggagtttggtgatcgagatgacgagaaacaaggggatgaaaatgaacgtccttgttttcttcgttgctacaattttggtagcatggcaatgccatgcgtacgatatgttccctctccgaatgaacactggctatggtgcccgtactccggaggtgaaatgcgcaagttggaagcttgctgtggaagcacacaacatctttggctttgagaccattcctgaagagtgcgttgaagcaacaaaggaatacatccatggcgaacaatatagatcagactccaaaacagttaaccaacaagctttacttttatgccagagacctcgaagtccatcccaaagacacatttgtgttcagtatagatggcaccgtactctctaatattccatactacanaaaacatggatatggggg

SEQ ID NO: 258797 - DNA, 383 bp, Glycine max
gacaaagtcccctcccacaccactgtaacatctacttacagaaacccaccacaggaactagaaaatccataccgtcttcaccaccaaaaagaaaataatggcaatggcccgtgcaacaactctagccacaatcactgttgtggcggctagccccagtgttggcagcaaaaggagtgggaagaggaatgtgaacttcatcagagggttgaattcttttggagggttgaaggctcagaacaatgtgacattactaggccttcctgtgtgcactgagcagtgctttgcaaaggtggtgagctcattgaaatatccatcatcatcatcacgtaaggggagaggtggaggtgctgccttttcaacatgcaatgctgctggtgagattt

SEQ ID NO: 258798 - DNA, 424 bp, Glycine max
  unsure (1)..(424): unsure at all n locations
gatcacaacactaacacagattttgattcgattcgattcgattcagtcgaggttttaagcagcagcaagatgtctgggcgtggaaagggaggaaagggattgggaaaaggaggagcaaaacgacatcgtaaggtgctccgcgacaacattcagggaattacgaagccagcgattcgtcgtttggctcgcaggggtggcgtgaagcgtatcagcggtttgatctacgaggagactcgcggtgttctcaagatcttcttggagaatgtcatccgtgacgccgttacttacacggagcacgctaggaggaagaccgttacggctatggacgttgtttatgcgcttaagaggcagggaaggaccctctacggatttggtggttagggtttttgcttgattntcctcgccagggaaaagtcttgctgtc

SEQ ID NO: 258799 - DNA, 383 bp, Glycine max
  unsure (1)..(383): unsure at all n locations
cagcnggattatatttgagttcaaacaaatcaaagccatggccacctccaacttctctattgttctctccgtctccctagccttctttttggtgctacttaccaaggcacactcgaccgataccgtttctttcaccttcaacaagttcaacccagtccgaccaaacattatgctccaaaaagatgctagtatttcatcctctggggtgttacaactcaccaaagttggcagcaacggcgtgcccacctcgggatctctcggtcgtgccctttacgctgccccaatccacatttgggacagctaaaccggcaaggtagccagcttggctacatccttaaattcaacatttcgcacccaaaaatcaaactcatctgacgggcttg

SEQ ID NO: 258800 - DNA, 401 bp, Glycine max
gacaaattcacacatttcttgttgcattatcgcggacacctcgtccctcgcaatgcaactagcaatggcggccaacgctgtcgtttcaccgtcggcgttccgacctcagccctttctccggtcatccttgtgcggcgtgtgcgtcaagctcactccccaatccataacgctttcacgctccaagcccctcaccgtcttggccgacaccaagaaggccgacgccgtcctcaaggggacctccggcgacgaaggcgtcgacactctcatccaagaagacgatggcccgacgacagtatctgttcgcatcactggccttactccggggcttcatggttttcacctacatgagtatggtgatacgacaaatgggtgtattgctacgggagcacattttaatccta

SEQ ID NO: 258801 - DNA, 424 bp, Glycine max
gatataaacaacgctaacgacacttgtgcctgacgcgattcaaacgcacactctctctcaccaaagccttcctagaacgaaaaaaaaaagaagagcaattttccctcaccaaagaagaagaagcaaacaatggccgatcaacttaccgatgaacagatctccgagttcaaggaagccttcagcttgttcgacaaggacggcgatggttgcatcacaaccaaggagcttggaactgttatgcgttcattggggcaaaacccaactgaggcagagctccaggacatgatcaatgaagtggatgctgatgggaatggtaccattgacttccttgagttcctaaatctcatggccaggaagatgaaggacactgattctgaggaggaagctgaagaggcattccgggttttcgacaaggaccagaatg

SEQ ID NO: 258802 - DNA, 408 bp, Glycine max
ggattgattccctcattcttcagccatagacatggccaccgtcacttctgcagccgttgctattccctcattcactggcctcaaggcaagcgcaggcaaagtgagtgccgcagttaaagtctcagctccccaagccacaaggttgggcatcaaggcttcgctgaaagacgttggagtcgctgttgtggccactgccgcgagtgcagtgctggctagcaacgccatggccattgaagtgttgctgggtggtgatgacgggtctctgactttcgttcccaacaatttctccgtggccgctggggagaagatcgtgttcaaggacaacgcacgtttcccccacaacgttgtgttcgacgaggacgagattcctagcggcgtggatgcagggaaaatctccatgagcgatga

SEQ ID NO: 258803 - DNA, 425 bp, Glycine max
  unsure (1)..(425): unsure at all n locations
gacagcatatcaataatctattntatactatacccacattttgataattatttttctagttgataagccatggctactcgaggaaagcttgaggttgacgttgatctcaagtctaacgcagacaagtactggcaaacccttaggaactccactgaaatattccccaaggccttccccaatgattacaaaagcattgaggttcttgagggtgatggcaaatcacctggttctatccgccacataagttatggtgaaggttcaccacttgtgaagtcatcctttgagaagattgaggctgttgatgaagaaaagaaggtagtgtcgtacactatcattgatggagaactcctccagcactacaaaacattcaagggagacatttctgtgactccagttggcgatggatgcgaggtgaagtggagtgc

SEQ ID NO: 258804 - DNA, 315 bp, Glycine max
ggctcaagtgagtttgttgatcgagataactggaggcagtgtgatgaaaatgaagggccttgttttcttcggtgctacaattttggtagcatggcaatgccatgcgtacgatattgtccccctcctaatgaacactgactatggtgcccgtactaccgaagtgaaatgcgcaagttggaggcttgctgaggaagcacacaacatctttagctttgagaccattgctggaaaatgcgctaaaagaacaaaagaattcatccatggcaaacaatatacatcatacttcaaaacaggtaaccaacaagcttactttta

SEQ ID NO: 258805 - DNA, 419 bp, Glycine max
ggtagttacacctttttttgtgtgtttacgagcgtgttgagtgccacagagttctgagtttcataggagaaaaaaaatgacagaagaacaaaccaaaacggttgagtcagaatcagtaacaccaccacctgctgctgctgctccttcacaggttcctcctgctgctgaggctgaacatgttcctgaggctccaaaggatgtgactgaggagaaatctgtaattccagtgccttcttctgatgacaagcctgatgaatccaaggctcttgtcttggttgagaagactcaagaagttgctgaagtgaaaccaactgagggctctatcaaccgagatgcggtgcttgcaagagttgcaactgagaagaggttgtcattaatcaaagcatgggaagaaagtgaaaaatcaaaagctgaaaaca

SEQ ID NO: 258806 - DNA, 410 bp, Glycine max
gacaacacatcctaaataagcgtgataattcatagtctttcgggccttccttccttcctctgctctagtgtatgccactctggttaattatcatacccccttctaagcatagttcttctccctctgttctctattctacactgtgaaacccagatgaaggtagcatttgtagctgttctacttatttgccttgtcctaagctcctccttgttcgaggtgtcaatggccggttctgctttctgctcctccaagtgcgcgaagaggtgttctagggctgggatgaaggacaggtgcacgacgttctgcgggatttgctgcagcaagtgtaggtgtgtgccatctgggacttatgggaacaagcacgagtgcccttgctacagagacatgaagaactccaagggcaagcccaa

SEQ ID NO: 258807 - DNA, 403 bp, Glycine max
tgttgttagctataagctattttatcgtgaggagaatatgaagttgccgcgggtctttgttgctgcagtagttttggtagcatggccatgccatggcgcaagctaccaaaggttccctctccgaatgaaaactggctatggtgagcgttcttcggaggtaaaatgcgcaagttttaagcttgctgtggaagcacacaacatccgagcctttaaaaccattcctgaagagtgcgttgaaccaacaaaggactacattaatggcgaacaatttagatcagactctaaaacagttaaccaacaagctttcttttatgctagtgaacgcgaagtccatcacaacgacatatttatattcggcatagataacaccgcactctctaatatcccatactttgaaaaacat

SEQ ID NO: 258808 - DNA, 373 bp, Glycine max
  unsure (1)..(373): unsure at all n locations
gattatatttgagttcaaacaaatcaaagccatggccacctccaacttctctattgttctctccgtctccctagccttctttttggtgctacttaccaaggcacactcgaccgataccgtttctttcaccttcaacaagttcaacccagtccgaccaaacattatgctccaaaaagatgctagtatttcatcctctggggtgttacaactcaccaaagttggcagcaacggcgtgcccacctcgggatctctcggtcgtgccctttacgctgccccaatccagatttgggacagcgaaaccggcaaggtagccagctgggctacatcctttaaattcaacattttcgcacccaacaaatcanactcagctgac

SEQ ID NO: 258809 - DNA, 382 bp, Glycine max
ttatctcccatgcttttttcagaagacttccagctggtattcaaaagaacttatctcatattaaaaaatcgacctcttactccatttttaggaacataacaagataacaatacccttacaaagggcttatcacataaaatcgaatccatcattgcctttagatattcataaggcaaatacatcatttctcgccaatgctatgcataatccgaatatacgcacctaaaaaaaattatctttctttactatcttataaacttaaaggtgcttcaaacccccttccctatcttaaatttaaactttaaacggtaccaaaaaattccttttaacttaagtacatctatcccaaaacacacacctacctcaatattattcttttttt

SEQ ID NO: 258810 - DNA, 422 bp, Glycine max
ggttctagtgtgtgattgtttgttgttgtaactcggtcttcttcttttgttgttctgtgtttgtgtttgttttttctctcacctgaaaatgtcttgctgcggtggtaaccgtggttgcggaagctcctgcaagtgcggcaacggctgcggaggctgcaagatgtacccagacttgagctacactgagtcaaccaccaccgagaccttggtcatgggagtggcacctgttaaggctcaatttgagggtgctgaaatgggtgtgcccgctgagaacgatggctgcaaatgtggaccaaactgctcctgcaacccctgcacttgcaagtgaggtgttgggagagcaagcttcaagcagagatagcccttaattaggaataatgataaactattaatgtgtagctaaaaacttatgtattatgtct

SEQ ID NO: 258811 - DNA, 402 bp, Glycine max
atggcaggaaagtacaagaacataccgatattgcggcatctacgtacaactaccaccaagaggatggaagcaattgaaagagagatacgagattcaattgagggtatcataaaaaaacgagagaaagccatggagaatggtgaaacctctaatgaagatttattaagcatacttttggaatcaaatcacaaggaaatccagggacatggaaacagtagggctgttggaatgaccaagcaagaagtaattgaggaatgcaagctattttacctggcagggcaagagaccacttcatctctgctggtttggacaatggtcttattggctaggtatccagaatggcaagcacgagcaagggacgaagtttttcaagtttttggaaaccaaaatccaaacactgat

SEQ ID NO: 258812 - DNA, 416 bp, Glycine max
gaccaacacaaacaatagtgcatagcgtttttcatggtgcgttattcaatggccaccacagcagctctatccggaaccatggtgagcacctccttcatgaggaagcaacctatgacgaccaagagcctaaagacattccccaacgctctttttggtctgaaaggtggacgaggtggtcgtgtaacttgcatggcctcgtacaaggtgaagctcataaccccagaaggagaagtggagtttgaatgcccacatgatgttttcattgttgacaaggctgaggaagaaggcattgaacttccctactcgtgcagggctggttcttgcgtttcatgtgttgggaaaattgtgaaaggtgacgtggaccagtcagatggtagcttccttgatgatgaacaaatagaaagtggatgggttct

SEQ ID NO: 258813 - DNA, 417 bp, Glycine max
gaccaacacaaacaatagtgcatagcgtttgtcggtgtgcattattcaatggccaccacagcagctctatccggaaccatggtgagcacctccttcatgaggaagcaacctatgacgaccaagagcctaaagacattccccaacgctctttttggtctgaaaggtggacgaggtggtcgtgtaacttgcatggcctcgtacaaggtgaagctcataaccccagaaggagaagtggagtttgaatgcccagatgatgttttcattggtgacaaggctgaggaagaaggcattgaacttccctactcgtgcagggctggttcttgcggttcatgtgttgggaaaattgtgaaaggtgacgtggaccagtcagatggtagcttccttgatgatgaacaaatagaaagtggatgggttctc

SEQ ID NO: 258814 - DNA, 424 bp, Glycine max
gactcaagcacaacatctctatcgagtaaattaactgtgaagcctaccctactattatccctttccttcctgcctctctttgctttcctggctctttcagaagatgttgaacaagttgtggacataagtggcaaccccattttcccaggtggcacatattacattatgccatcaacttggggcgctgccggtggtggattgaaactaggccggacaggaaactcaaactgcccagttactgttttgcaagattactcagaaatcttccgcggcacaccagtcaaattcagcatacctgggataagccctggaatcatctttacaggtactccacttgaaatcgagttcgcagagaaaccctattgtgctgaatcctccaaatgggtggcgtttgtggacaatgaaatccaaaaggcatgtgtgg

SEQ ID NO: 258815 - DNA, 295 bp, Glycine max
gacaacacagaacaaaagcggagaaaaaaaaacccttagccaacacaaccatcatggccacctctgctattcagcaatcagcattcactggtcaaactgctctgaagcagctcaatgagttcgtccgcaagaccggtggcgccggcaaggtcgcactaacatgcgccgcaccgtcaagagtgctcctcagagcatttggtatggccctgaccgtcccaagtacttgggtccattctcggagcagattccatcatacctgaccggagaattccctggtgactacggatgggtcact

SEQ ID NO: 258816 - DNA, 440 bp, Glycine max
gaccacataaggggattccataaacaaaacacaagccaagtgaaagggtgcgaatataaaaatcaaagagcataatgtctgggatcattcacaagattggggagacccttcatgtgggagggcacaagaaggtggtggaacataaaggtgagcaccatgctggagaatacaaaggggagcaccatggtgaacacagtagtgagtacaaaggaaagcatcatggtgaacacaaagctggagagtaccatggtgagcacaagccagagcacaaagaggggttcctagacaaagtcaaggacaagatccatggtgagggcggccccgccaagggcgagaagaagaagaaggagaagaagtagaaagagcatggccatgagcatggccatgacaacaacaacatgtgacagtgattaaactgctgcatcacctatatatttaaa

SEQ ID NO: 258817 - DNA, 416 bp, Glycine max
ggcacaagtgagtttgttgatcgagataactagaaacagtgtgatgaaaatgaaggtccttgttttcttcgttgctacaattttggtagcatggcaatgccatgcgtacgatatgttccctctccgaatgaacactggctatggtgcccgtactccggaggtgaaatgcgcaagttggaggcttgctgtggaagcacacaacatctttggctttgagaccattcctgaagagtgcgttgaagcaacaaaggaatacatccatggcgaacaatatagatcagactccaaaacagttaaccaacaagcttacttttatgccagagacctcgaagtccatcccaaggacacatttgtgttcagtataaatggcaccgtactctctaatattccatactacaaaaaacatggatatgggg

SEQ ID NO: 258818 - DNA, 309 bp, Glycine max
gacaccaacatccaaacaaacccactaagatggcgggctgggtatcctcactagtgctgctactagcaacccttatcctcatgcctcaacgacttgctacttactacaaaccaattaagaagccaccaatgttcaagcctttaacactcactccagcaacgtacaaaccaccggtttataagccaaaaccaccgctttacaagccgaaaccacccgtttacaagtcaccatataagacgccaccatacaagaaaccaccttatggaaactacccttcagaacaagacaacacccattcctaaagcaagc

SEQ ID NO: 258819 - DNA, 327 bp, Glycine max
acgcgtacgcccacgcatacgaaccaatgcgagattattattcatagctaatataccagaaatgtgcttcgcagaattataagaaagcatgaacaaacatgactatgcagaagcacttcttgaggcctggcaccagtcccaagccaattcccggtcagaacgtctcctttcactgaactggtttctttaaaaaccattacctttctcataaattctgcagtaccaatcatcctggccaggaccctttcactttctaaatctgacaacgttctgttatcaaatgatggtatgacaagatgctttgcatgcaaaataaatgaatttgct

SEQ ID NO: 258820 - DNA, 404 bp, Glycine max
gacaccaacacgcaaggcaaacccactaagatggcttcctttgtatccttcctagtgctgcttcttgcagcccttatcctcatgcctcaagggcttgctacttactacaaaccaattaagaagccaccagtgtacaagcctccagtgtacaagccaccagtgtacaaaccaccggtttataagccaaaaccaccggtttacaagccgaaaccaccggtttacaagccaccatataagaagccaccatacaagaaaccaccttatggaaagtaccctccagtagaggacaacacccatgcctaaagcaagcaatgaggtctattatctacttaataaataagaggaactgctttgcgttttctagcattgtgatttacaacttcgtagcaatgcatattcttgac

SEQ ID NO: 258821 - DNA, 430 bp, Glycine max
ggcagagtgaaacgatgccgtgcctcaacctctccggcaacgttaacctagacggcgtcgacacctcttccattctctccgaagccacctcaactgtcgccagcatcatcggcaaacccgaggcctatgtgatgattgtattgaaaggatcagtgcctatatctcatggtgggagtgagcagccagcagcttacggtgaattggtgtccattggtggtcttagccctgacgtgaacgagaaactcagtgctggcattgcttcaattctcgaaaacaagttgtctgtgccgaagtcccgattctacttgaagttttatgacactaagggttccaattttggatggaatggatctacattctgaattccgagttatcttggtaacgatgccatggatgtcggatgaactcgtgattctgttttagaactttt

SEQ ID NO: 258822 - DNA, 396 bp, Glycine max
ggtgtgagtgaagaagcagagggagtagcggcattaaaggggcggatcttcgtgaaaactctgacagggaagactataaccctcgaggtcgagagcagcgacaccatcgacaatgtcaaggccaagattcaagacaaggaaggcattcctccggatcagcagcgtttgattttcgccggaaagcagcttgaagatggaaggaccctggccgattacaacatccagaaggaatcaacccttcatctcgtcctcaggcttcgtggtggcatcattgagccttccctcatggctttggctcgcaaatacaatcaagacaagatgatttgccgcaagtgctacgcccgtctgcatcctatggctgtgaactgccgcaagaaaaagtgcggtcatagtaac

SEQ ID NO: 258823 - DNA, 281 bp, Glycine max
  unsure (1)..(281): unsure at all n locations
aacagctataaaaaaacaaaataanttgatttttattaaacataaaaaatatcatcattcacgacgcgttttttcattaaaactctcacacccaacactataaccctcgaagtagataccaacaacacaatactcaatgtcaatgccaacattcaatacaaagaagacattcctcctcatcaccatcacatgatttttaccaaaaaacagattaactatataattaccctggccgattacaacattcacattcaatcaaccattcatatactcctataact

SEQ ID NO: 258824 - DNA, 349 bp, Glycine max
cttctaaaaaactctcacacctaatactataaccctcaaggtccataacatcgacaccatctacaatgtcaacgccaatattcaagacaaagaatgcattcctcctcatcaccatcctttgattttcgccggaaagcaccttgaacattaaaggaccctgtccgattacaacatccataacgaatcaacccttcatatcttcctcactcttcttcctgtcatcattgaaccttccctcattgctttgactcgcaaatacaattaggacaagattatttgtcgcaagttctactcccgtctgcattctattactttgaactgcctcaagaaaaattgcaccatactaacc

SEQ ID NO: 258825 - DNA, 376 bp, Glycine max
gatccaaattcaagttcgcaccaaattttcctccgagagtgtgaggccgcggaaaaggtgggatgggtttggtaaagggaggagctaacatgcacggaaaggttcttcgagacaacattcaaggaatcacgaaacctgcgattcgtacgttagcgagaagaggtggcgtggagaggatcaatggtttgatttacgaggaaaccaaaagagttctgaagatattctttgagaatgttattaacgatggtataacctacactgagcacgctaagaagaaaactgttactgctatggatgtcgcttatgctctcaagagacagggaaagaccctctattgctatgaggctaaaaaaataatctttaagataatgactgt

SEQ ID NO: 258826 - DNA, 442 bp, Glycine max
  unsure (1)..(442): unsure at all n locations
acgacagaaggggaaggcaccagtaattaataacaagctagctattagttcgattttgtagggggtgaggtgccaatatggtgaagatagctcttggtactttggatgactcttttagcgctgcctctcttaaggcttatttcgcagagttccacgcaactctgattttcgtgttcgctggtgttggatcagccatcgcttacaacgagcttacaaaagatgcagccttggatccaacggggctggtggcagtagctgtggcacatgcatttgcactgtttgtaggtgtctccgtcgccgccaacatctcangtggccatttgaacccagctgtcacttttggattggccattggaggcaacatcactctcatcactggtttcttatactggattgcccaattgttgggttctatagtcgcatgcctcctcctcaatttgat

SEQ ID NO: 258827 - DNA, 375 bp, Glycine max
gggatttacaaagtttttaatggggggggggtgtcaaaaaaatcgaagaattacatacgaatatgcaaaaaaaactgaattgcgtgaattgaaaactaaacattgctattgtaaaacttgcatatgcttataaacaccctaatattattgcagaatttatagctggacaattaaagaatagaatttcgcttcgtaaaccaatgaaaaaagctattgaattaactgaacaggctggtacaaaaggagttcaagtacaaattgcaggacgtattgacggaaaaaaaattacacgtgttgaattgatcaaagaacgtagagttgctctacaaaccatacgagcgaaaattgattattgatgctatacagtgcgaacta

SEQ ID NO: 258828 - DNA, 423 bp, Glycine max
ggttctagtgtgtgattgtttgttgttgtaactcgttcttcttcttttgttgttctgtgtttgtgtttgttttttctctcacctgaaaatgtcttgctgcggtggtaactgtggttgcggaagctcctgcaagtgcggcaacggctgcggaggctgcaagatgtacccagacttgagctacactgagtcaaccaccaccgagaccttggtcatgggagtggcacctgttaaggctcaatttgagggtgctgaaatgggtgtgcccgctgagaacgatggctgcaaatgtggaccaaactgctcctgcaacccctgcacttgcaagtgaagtgttgggagggcaagcttcaagcagagatagcccttaattaggaataatgataaactattaatgtgtagctaacaacttatgtattatgtctg

SEQ ID NO: 258829 - DNA, 374 bp, Glycine max
  unsure (1)..(374): unsure at all n locations
gaccaagtgaaccaatatagcccaagccctatacgggcaaaccctaacacacacccatttgattcagtttccatggctagcctcaaggttgcatttttggctgcagtgctctgcatggttgtggtgagtgcacccatggcacatgcagctatcacgtgcgggcaggtgacgagtagcctggccaattgcatcggttacctccagaagggaggaacgccgtcgtcgggatgctgcaacggagtgaagagcctcaatgccgccgccaagaccaccgccgaccgccagacggcgtgcaactgcctcaagtcggccgccagccaaatctccggctttaacgccaacaacgccgnctcgtccccggcaaatgcggagtc

SEQ ID NO: 258830 - DNA, 353 bp, Glycine max
tacttctgcgagaagacaaacagaaggtgcggcgtgcgaaaaaacaacaaaagggaacccccattttttttttaaaagaattttaattttgtattaaaaaaatttatcttattgttagaaatccatgtcttactccattttaaggaacaaaacaagaaaacaattgcctgacaaaaggtttagccataaaatcgaattcatcattgatttgagatattgataaggtgaatactcatttctcgtcaatgctaggcataatgcgggtatatagacctaaaaaaaaatatcttttctttctatcttatgaactttaacgtgtattaaaggacatttcctatcttagattttaattt

SEQ ID NO: 258831 - DNA, 423 bp, Glycine max
ggcacaagtgagtttgttgatcgagataactaggagcagggggatgaaaatgaagggccttgttttcttccttgctacaattttcgtagcatggcaatgccatgcgtacgatatgttccctctccgaatgaacactggctatggtgcccgtactccggaggtgaaatgcgcaacttggaggcttgctgtggaagcacacaacatctttggctttgagaccattcctgaagagtgcgttgaagcaacaaaggaatacattcatggcgaacaatatacatcagactccaaaacagttaaccaacaagcttacttttatgccagagacctcgaagtccatcccaaggacacatttgtgttcagtataaatggcaccgtactctctaatattccatactacaaaaaacatggatattgggtggagaa

SEQ ID NO: 258832 - DNA, 417 bp, Glycine max
ggctgcaagaatatgacgagagctataaactatgtgatcgtgaggagaatatgaaaagctatgttttctttgttgctacaagaattttggtagcatggccatgccatggctcatgctaccaaaaggtccctctccgtatgaaaactggctatggtgagcgttcttcatgaagtaaaatgcgcaagttttatgcttgctgcggaagcacacaacattcgagcctttataaccattcctgaagaatgcgttgaaccaacaaaagactacattaatggcgaacaatttaaatcatactctttaacagctaaccaacaagatttcttttatgctaatgaacgcgacatccatcacaacatcctatttatattcggaataaataacaccgcactttctaatattctatactatgaaaaacat

SEQ ID NO: 258833 - DNA, 330 bp, Glycine max
aacatgtgcgggaacacaacagaaggggataacgggggagggtaaacagagagatatctatctattaattaattcacaatggaccactagctaaccgaccaacacatctataagttcaacgtagcctttcgtctcttccacaaggaccttcacggtcatattaacaccaaaggactttatactgttatgtagccacttgggcagaacccaactgatgcatgatctggacgacatgatacaagaagatgatgctgattgtaatgtgtactattgattttccatgatgcactcaatctcatggaacgcaagatcaaagacactgattcatag

SEQ ID NO: 258834 - DNA, 377 bp, Glycine max
gacagttttaacaattaataaagatgagtttgaagaacgaacatggtggtgctaaaggtgtgtttgttgcttcttttccttgtgggggttacagctgcacgcatggaactgagcttcttcaaaagtgatcagtcatcaagttatgatgatgatgagtattcaaaaccatgctgtgatctctgcatgtgcacacgctcaatgcctcctcaatgcagctgtgaagatattaggctgaattcatgccactcagattgtaagagctgtatgtgcacacgctcacagccaggacagtgtcgttgtcttgacaccaacgacttctgctacaaaccttgcaagtgcagagatgactagaaaaactaatagctctctcaaatgga

SEQ ID NO: 258835 - DNA, 80 bp, Glycine max
tactgttgcttcaagacaacagaagggttcggctcgcagaggacgactgaagggtacggctgctacaaaacaacagaacg

SEQ ID NO: 258836 - DNA, 285 bp, Glycine max
tatgaactgtgcgagagtgtggtgagaactataatctatcttatctttaggagaatatgaacttggttgttatctttcttgctgtagtacattctgtcacatggtcattccatgatgcaaactaccatatggttacctctcctaatgaaaactatgtatcgtgagcattcttcctaggtaaaaacaccacattttaggctttctaaccatgcacacaaaatgcgagcctttaaaaccatacttcattaatgccttgcaccatcaaacgacttctttaacggctaa

SEQ ID NO: 258837 - DNA, 410 bp, Glycine max
ggaagtatgggatcgagcctcagaggagggaatcccgccggggtccactatgccgaagcaaattcactagattaaggacttcctcctcactgctgggaggaaggatgcacgctctgtgaaaatcaagcggagcaaggatgtggtgaagttcaaggtccgttgctccaagtacctttacaccctctgtgtgtttgattctgagaaggctgataagttgaagcaatcacttcctccacgtttaagcgtgcaggatgtgtgattcttactgctgtatgaacatcacgtttttctctggattttggggattcatagttaagaaaatcgttcagagaattttcgtatttgctgttacattcggcatcatgttagtattttgtttaaaacgcatccaacttgcttggggattatgt

SEQ ID NO: 258838 - DNA, 323 bp, Glycine max
gggctttcatttaaacaagtagttgagaactaacgttgagggtatggcttcctcaatgatctcctccccagctgttaccaccgtcaaccgtgccggtgccggcatggttgctccattcaccggcctcaaattcatggctggcttccccacgaggaagaccaacaatgacattaccttcattgctagcaacggtggaagagtacaatgcatgcatgtgtggccaccaattggcaagaagaagttcgagactctttcctacttgccagacctcgatgatgcccaattggctaaggaagtcgaataccttctaaagaaaggatgga

SEQ ID NO: 258839 - DNA, 359 bp, Glycine max
ggaggctgagttctgtaattgtgttttggctgtgggcaatggctctgtcttctgggcttttcttgtgttcttcttcccgtgttctcccaccaccagaaacccacactttcatgaggaccaggccttcttctgctgccttgcgcaccatttccgctagctgttgcaccgtctctcactcgtctaagccagcccgcaaaatccgtggtatcatgaaaccccgcaaagtctcccccgagatggaagacctcgtcggcgctcccgagatggctcgaacccaagtcctcaaacggatttgggcttacattaaggacaacaatcttcaggaccctacagacaagacgactataaattgcgatgag

SEQ ID NO: 258840 - DNA, 259 bp, Glycine max
gaatcggaaaaagtggcgggtccgtgggaattatgtacgggaaggatagagtaccatcacaatgctggaagcatgattccttaccacaagaacctaaccaggctgggctataaggcacttattttcagtggcgaccatgatatgtgcgtgccatttaccggaagtgaggcttggacaccatctttgaaatataagattgtggatgaatggaggccatggaactcaaataaccaacttgctgggtacttgcaagcgtacg

SEQ ID NO: 258841 - DNA, 240 bp, Glycine max
aaattctatattatctttaaaaaatcttataccactgtctaccgagccacataccacaatatctattcattcacttacctctaatccattaattgctatccatccatgaataccaacaatgacattacctatattgatatctactcaataataggcctaatcattgcaattgttacctccaaaagattatatgaaatttctaactttttaatatctaggagaccttaatgatatacacta

SEQ ID NO: 258842 - DNA, 318 bp, Glycine max
catttattgtgtggcagcaaaagaacaattactcgcgaagctttattgaaaagcaaatggcttcctcaatcatctctttcccagctgttaccactgtcaaccgtgcctgtgccggcatggttgctccattcactggccttatgtccatggctggcttccccaccacgaagacccacaatgacatttccttcattgctagcaactgtggaagagtgcaatgcatgcatgtgttgccaccactttgcaagaagatatttgagactcttttctaccttccagaccttgatgatgcacaattttcaaatgaattagaatacc

SEQ ID NO: 258843 - DNA, 405 bp, Glycine max
ggcacaagtgagtttgttgatcgagatggctagaaacagtgcgatgaaaatgaaggtccttgttttcttcgttgctacaattttggtagcatggcaatgccatgcgtacgatatgttccctctccgaatgaacactggctatggtgcccgtactccggaggtgaaatgcgcaagttggaggcttgctgtggaagcacacaacatctttggctttgagaccattcctgaagagtgcgttgaagcaacaaaggaatacatccatggcgaacaatatagatcagactccaaaacagttaaccaacaagcttacttttatgccagagacctcgaagtgcatcccaaggacacatttgtgttcagtataaatggcaccgtactctttaatattccatactacaaaaaaca

SEQ ID NO: 258844 - DNA, 407 bp, Glycine max
ggcataagtgagtttgttgatcgagataactagaggcagggtgatgaaaatgaaggtccttgttttcttcgttgctacaattttggtagcatggcaatgccatgcgtacgatatgttccctctccgaatgaacactggctatggtgcccgtactccggaggtgaaatgcgcaagttggaggcttgctgtggaagcacacaacatctttggctttgagaccattcctgaagagtgcgttgaagcaacaaaggaatacatccatggcgaacaatatagatcagactccaaaacagttaaccaacaagcttacttttatgccagagacctcgtagtccatcccaaggacacatttgtgttcagtatagatggcaccgtactctctaatattccatacttacaaaaaacat

SEQ ID NO: 258845 - DNA, 416 bp, Glycine max
ggatctggcagcagaagaacaagtagttgagaacggagaaggagaagcaaatggcttcctcaatgatctcttccccagctgttaccactgtcaaccgtgccggtgccggcatggttgctccattcactggcctcaagtccatggctggcttccccaccagaaagaccaacaatgacattacctccattgctagcaacggtggaagagtgcaatgcatgcacgtgtggccaccacttggcaagaagaagtttgagactctttcctacctgccagaccttgatgatgcacaattggcaaaggaagtagaataccttcttacgaagggatggattccttgcttggaattcgacttggagcacgggttcgtgtaccgtgagcacaacatgtcaccaggatactacgatggacgctactgg

SEQ ID NO: 258846 - DNA, 411 bp, Glycine max
taatagaaatagaactgtcttttcatatagggatgggttcaacacaacataggtcatcgaaaggatctcgaagacccaccaacgcacgaaagccgggatctttcagaaaatggattcctattcgaagggtgcataaccgcatggataagctcacactaacccgtcaatttgggatccaattcggttccttaggaggtatcgggaaggaattttggaatgtaataatatcgattcatacagatacagaagaaagggttctctattgattcaaacgctctacctacgagatagggatagagaaagaggaaaaaaccgaggatttcacatagtacttttggtcgaaaaatcgatctgatttttttcgtacttttcgctcaatgatgaaatggggcagattctacaggaccaaac

SEQ ID NO: 258847 - DNA, 413 bp, Glycine max
ggcacatgtgagtttgttgatcgagataactggaagcggtgtgatgaaaatgaaggtccttgttttcttcgttgctacaattttggtagcatggcaatgtcatgcgtacgatatgttccctctccgaatgaacactggctatggtgcccgtactccggaggtgaaatgcgcaagttggaggcttgctgtggaagcacacaacatctttggctttgagaccattcctgaagagtgcgttgaagcaacaaaggaatacatccatggcgaacgatatagatcagactccaaaacagttaaccaacaagcttacttttatgccagagacctcgaagtccatcccaaagacacatttgtgttcagtatagatggcaccggactctctaatatttcatactacaaaaaaacaatgatat

SEQ ID NO: 258848 - DNA, 415 bp, Glycine max
gagattttataatggctagccaatcaaacactaaagcagtggacgatttcacagttaaagatgccaggggaaatgatgttaatctcgccgattacaaaggaaaggtccttctccttgtcaatgttgcctcacaatgcggcttgactaattcaaactacacagagcttaatcaattgtatgagaaatacaaagggaaaggacttgaaattctggcattcccgtgcaatcagtttggggctcaggagccaggaactaatgaagagattgtggagtttgcttgtactcgcttcaaagctgagtttcccattttcgacaaggtggatgtgaatggtgacaatgctgctccactgtacaagtttctgaaatcaagcaaaagtggactctttggggatagtatcaaaaggaactttttcaa

SEQ ID NO: 258849 - DNA, 428 bp, Glycine max
  unsure (1)..(428): unsure at all n locations
gatnatanttgagttcaaacaaatcaaagccatgggcacgttcaactggtctattgttctctccgtctccctagccttctttttggtgctacttaccaaggcacactcgaccgataccgcttctttcaccttcaacaagttcaacccagtccaaccaaacattatgctccaaaaagatgctagtatttcatcctctggggtgttacaactcaccaaagttggcagcaacggcgtgcccacctcgggatctctcggtcgtgccctttacgctgccccaatccagatttgggacagcgaaaccggcaaggtagccagctgggctacatcctttaaattcaacattttcgcacccaacaaatcaaactcagctgacgggcttgccttcttcttggcacccgtcgggtctcagccccaatccgacgatggat

SEQ ID NO: 258850 - DNA, 456 bp, Glycine max
  unsure (1)..(456): unsure at all n locations
ggagaagacnacagaagggggaggtgcaagagtttgttgtgagctataagctagtttatcgcggcgagaatatgaagttgtttgttttctttgttgctgcagtagttttggtagcatggccatgccgtggcgcaggctaccaaaggttccctctccgaatgaaaactggctatggtgagcgttcttcggaggtaaaatgcgcaagttttaggcttgctgtggaagcacacaacatccgagcctttaaaaccattcctgaagagtgcgttgaaccaacaaaggactacattaatggcgaacaatttagatcagactctaaaacagttaaccaacaagctttcttttatgctagtgaacgcgaagtccatcacaacgacatatttatattcggcatatataacaccgtactctctaatatcccatactatgaaaaacatggatattgggtggaggaat

SEQ ID NO: 258851 - DNA, 381 bp, Glycine max
ggagggttattggacacattcttcagcgactgcgtttttgggtcggaacctcttctgcggcgtagcaatgggacactccaacgtttggaactctcacccaaaaaactacggtcctggttctcgcacttgccgtgtgtgtgggaatccacatggactgatcaggaagtatggccttatgtgctgcaggcagtgcttccgtagcaatgccaaggaaattggcttcatcaagtatcgctaaaagagcagttgtcaactacggaccaatattgtgttctggcactaggatgttttgaggatgttatgtttgaagaaacttgagactttcttttttcatctaattaattatcagacgtaatttgtgggactaagaatacttttata

SEQ ID NO: 258852 - DNA, 401 bp, Glycine max
tacttaatttgacactcattccatttttacctcgggctgtgtgtcgcaaactcaaataataaaaaacaaggttttagccatggcatcgaatcgcatcttgaaggaactcaaggatctccaaaaggatcctcctaccttatgtagcgctggtcctgttgctgaagacatgtatcactggcaagcaacaattatgggtcctccagacagtccttatgctggaggtgttttcctagtcactattcatttccctccagattattcctttaagccacccaacgttgcattcaggactaatcgtttttacccatatataaatatcaatgtaagcatttgccttgacatatttaaagatcacttgatccctgctctaaatatttcaaaagtgttgctcttattttttc

SEQ ID NO: 258853 - DNA, 227 bp, Glycine max
ccgcttggaaaaaaacaccaaaagggatctgtcattttattaacacgtaacagagaactgtggaggggaagctaaaggcttcctcaatgatctctaccccagctgttaccactttcaaccgtgccactgatggcatggttgctccattcacttgcctcaactacattgctggcttccccaccagaaagaccaactatgactattcctccattgctatcaacaatgga

SEQ ID NO: 258854 - DNA, 375 bp, Glycine max
ggtagccgctgcatctcaacgaaacagagcgagctagagggagagagagagagaaagagaagagagagaagcagcgattcatcacaatgggtaaggttcacggatctctcgcacgtacgggtaaagtgagaggacaaactcccaaagtggcgaagcaagacaagaagaaaaagccacgcggacgcgctcacaagagaatgcaatacaaccgccgattcgtcaccgccgtggtgggattcggaaagaagcgtggaccaaactcctcggagaagtgagggaggcgtgttgaacatcatggtttttcttactttgtgaaatgtatcacttgttttgatttgattgatgaactcaaacttttatgataggtcttattat

SEQ ID NO: 258855 - DNA, 414 bp, Glycine max
tactttttcgagaagacaacagaaggggatctcggcgcatataaacatgtagttgagaactaacaataaggaaatggctttctcaatgatctcctccccagctgttaccaccgtcaaccgtgccggtgccggcatggttgctccattcaccggcctcaaattcatggctggcttccccacgaggaagaccaacaatgacattacctccattgctagcaacggtggaagagtacaatgcatgcacgtgtggccaccaattggcaagaataaatttgagactttttcctacttgccacacctttattatgtccacatttcaatagaatttataacctttttaagaaagatggttttttgtttgaattccattttaaaacttttcttttcctctttcacaaaattttcttttttttt

SEQ ID NO: 258856 - DNA, 406 bp, Glycine max
gatctggcagcaaaagaacaacggcgggagaactaagaaggagaagcaaatggcttcctcaatgatctcttccccagctgttaccactgtcaaccgtgccggtgccggcatggttgcttcattcactggcctcaagtccatggctggcttccccaccagaaagaccaacaatgacattatcttcattgctagcaacggtggaagagtgcaatgcatgcacgtgtggccaccagttggcaagaagaagtttgagactctttcctacctgccagaccttgatgatgcacaattggcaaaggaagtaaaataccttcttacgaagggatggattccttgcttggaattccagttggagcacgatttcgtgtaccgtgagcacaacaggtcaccaggatactactatgga

SEQ ID NO: 258857 - DNA, 381 bp, Glycine max
gagaattattggaatttggaagagaggggggagctgcacaacaacctaagaatgggaggaagttcgagcttcagggatgagtataccttggaacaaaggctcggagaatcgcgggatattgtggccaaatatcccgatcgagtccccgtgattgtggaaagatatgcgaaatgcgatctgcctgagttggagaagaaaaaataccttgttcctcgagacttgtctgttgggcatttcattcatattttgagttccagacttattctgccccctgggaaagctctctttgtatttgtgaagaataccttgcctcaaactgctaatatgatggactctgtgtatagatcattcaaggatgaggatggatttctttacatgtat

SEQ ID NO: 258858 - DNA, 328 bp, Glycine max
gatatctggcagcagaagaacaagtacttgacagcgaagagggagaatcaaatggcttcctcaatgatcccttccccagctgttaccactgtcaaccgtgccggtgccggcatggttgctccattcactggcctcaagtccatggctggcttccccaccaggaagaccaacaatgacattacctccattgctagcaacggtggaagagtgcaatgcatgcaggtgtggccaccacttggcaagaagaagtttgagactctttcctacctgccagaccttgatgatgcacaattggcaaaggaagtagaataccttcttaggaagggat

SEQ ID NO: 258859 - DNA, 294 bp, Glycine max
gacaccaccccccacacacacccactaatatgggtgacttggtgttcttactagtgctgcttcttgcagcccttatactcatgcctgaaggtctcgctacttactacaaaccaattaagaagcacccagagtacaacccttctatgctcaatccaccagcttacaaaccacctgcttataagccaaaaccacccgtttacaagccaaatccacctgtttacaagccaccgtctacgactacaccatacaagagaccaccttatggaaagatccctacaatggaggacaacaccc

SEQ ID NO: 258860 - DNA, 224 bp, Glycine max
tttatccgtgttcacttcatccttcataagtcttcatcatcatcatcatcatcaccgtttattgaagaatattcccttcataaacatttccatcttaaggcctgaatatgctactcacccctacacgtttaattcgcgctttgcttatttcattttcaccttcatcttcttgttcactctttcatgatccggcatcttctacaacaagcttacctacaactttt

SEQ ID NO: 258861 - DNA, 363 bp, Glycine max
tgggacacttgtattgtctcaagcaaccatgggaattgcaacccaagcctctctcttaaccccacccctctccggtctcaaagccagcgaccgcgcctccgtgccatggaagcaaaactccagcctctccttctccagcccgaagcccctcaagttctccagaacaatcagagcagcagccgccgactagaccacagaggcaccagcaaaagtagaggctgcaccggtcgggttcaccccaccagaacttgacccaaacaccccttccccgatcttcgggggcagcaccggcgggctccttcgcaaggcacacgtggaggagttttatgtcattacgtgggactcacccaaagaacacatctt

SEQ ID NO: 258862 - DNA, 319 bp, Glycine max
  unsure (1)..(319): unsure at all n locations
ggagtgcagtgatagagataagaaaatgtggcttgggcagcgctcaaccccatttctgaacggacatggtcattccaccacccttctctccaagcacagttcggcggtgactcagacccactgggccccaccgagtttcctgcctcaaatcaatgcgatgaagacaatgcaggggagagtggtgtgctccaccagcgacaagacggtggcagtggacgtggtgcggctggcccctcacccaaagtacaagaggcgcgtgaggaagaagaagaagtaccaggcccacgaccccgataaccaattcaaagtcngcgacatc

SEQ ID NO: 258863 - DNA, 283 bp, Glycine max
gatccaaaggaacaaaaatattattaagatgatcagcattagtggagcacttgttctactctttgcatttctcttcctcagttgtgtgtatgcacaagacacaacaacccttgtgcctgcaatcataacttttggtgattctgctgtggatgtagggaacaatgactatcttcccgcccttttcaaggctgattaccctccttatgggagggactttgttaaccaccaacctactgggaggttttgcaatggcaaattagctactgatttcactgctgacaca

SEQ ID NO: 258864 - DNA, 386 bp, Glycine max
  unsure (1)..(386): unsure at all n locations
ggaaagagagtgaagagagaagaagatggggtctgtcggagcggtgccgttttggagggcagcggggatgacatacatcacatactcaaacatatgcgcgaatctggtcaggaattgcctcaaggaaccctacaaggctgaagccatctctcgtgagaaggtccattttgctctctccaaatgggtcgacgccaagcctgaaaaacctactattcgttcagacaccccagagcagtgatccggaatagttggaagctataaatgcataaatctttgagatctggaagttcattgtcattttgaacctttctgtgatgtttaattcctttgcttctttttttttcattccatgaaatggaacatacactggattttgattngcatga

SEQ ID NO: 258865 - DNA, 333 bp, Glycine max
  unsure (1)..(333): unsure at all n locations
gatagcagcatcatacggagcatggaattcaaaaacttaagttcattccttgtgttttgctttcttcctcaaaaccaaacatgtcgaacacatgcggcaactgcgactgcgctgacaagactagctgcaccaagggaaacagctatggtgttattgtagagactgagaagagttacatcgagactgttgtcatggatgttccagcagctgagcatgatgggaagtgcaagtgtggcactaactgcacttgcacggactgcacctgtggccattaaggaatatgtatgaaaatgtaattgccatgtgtntggcaatacaaatatccaaataatg

SEQ ID NO: 258866 - DNA, 408 bp, Glycine max
gaagccagtgatagtagctttcagatagctgatgggtgtgtgcaattatttgaattcaagaatgtctcaacccgactcgttggtggctgagattgaggtgaaaacctctgctgatcacttttacgacaccttgaagggtaagaaacagcatcgtattcatgatgttgcccctcatcatatccataaggtggaagttcatgaaggtgagtgggataaatctggcaatatcaaggtgcttacattcgctgatggggacactgttgagaccttaaaggagagagttgattttgatgatgaaaacaagaagataacctacaccatattggagggtgtcatgttgaagtactataagagctacaaggttatcgttcatgttttaccaaaaggtgatgagcacagccttgtgaa

SEQ ID NO: 258867 - DNA, 222 bp, Glycine max
catttccaatggaagcacgtgcagaagcctttcagcggatttcaagaatctctgctcatcttcagccttcaaatttccaggaagggagtgatgttcttcttaagagaggtgagtgcagagcaaaaggtggggcacctggattcaaagttgcaattttgggggctgctggaggaattggtcaatccctttctttgctgatgaagatgaacccatttttggggg

SEQ ID NO: 258868 - DNA, 347 bp, Glycine max
  unsure (1)..(347): unsure at all n locations
cattgactaacaacgccagtatcaaagctgtctcctctactcgctctactactcncttcaagagcnttttagcgtgtgcttttcaaaacctccgaactgaccgtgatactttcggtcatctccaacttccctcttaaagcttgttgggagcccaaacacagccatcattgcaaaacttctatatccttcgtccccgtgaacgtatgccttatcccttgattcgtgctttccgtgtctttaaaaaagaaaaccccttttttacccctttttttccttaaaacaatcaaaacccacatttcccaaaacccccccttttaaaattttttttcccccctcttttttttttt

SEQ ID NO: 258869 - DNA, 335 bp, Glycine max
ggagagaaagagatagaaagatgtcgaagcgtggtcgtggtggtgcggcggggaacaagttccgcatgtcgctgggtcttccagtggcggcgacggtgaactgcgccgacaacacgggggcgaagaacctctacatcatttcggtgaaagggatcaaaggccgtttgaaccgtcttccctcggcctgcgttggcgacatggtgatggccaccgtgaagaagggaaaaccccatctgaggaagaaggtcttgccagctgtcatccttcgccagcgcaagccatggcgccgaaaggacggcgtctacatttacttcgaagataatgctggtgttatt

SEQ ID NO: 258870 - DNA, 318 bp, Glycine max
gaagtagaactagtctaagcagaaatggcctcttcggtgatggcatctgtggccctcaaacctgcccctttcactgttgagaagtcctcagttagaggccttccctccctctcaaggaactcctcttcattcagagttgtggccagtgatggcaagaagaccaagactgacaagccttatggaattaatggtggcatggctttgagggaaggagttgatgcatctggcaagaaaggaaagggaaagggcgtttaccagtttgtagacaaatacggtgctaatgtcgatggttacagtcctatctacgacaccaaggac

SEQ ID NO: 258871 - DNA, 321 bp, Glycine max
  unsure (1)..(321): unsure at all n locations
ggtgttagtgaagaagcanagggagtaggggcattgaaaatgcacatcttcgtgaaaactctgacagggaagactataaccctcgaggtcgagagcagcgacaccatcgacaatgtcaaggccaagattcaagacaaggaaggcattcctccgcatcagcagcgtttgattttcgccggaaagcagcttgaagatggaaggaccctggccgattacaacatccagaaggaatcaacccttcatctcgtcctcaggcttcgtggtggcatcattgagccttcccttatggctttggctcgcaaatacaatcaggacaagatg

SEQ ID NO: 258872 - DNA, 405 bp, Glycine max
ggcacaagtgagtttgttgatcgagataactagaaacggggtgagtaaaatgaaggtccttgttttcttccttgctacaattttggtagcatggcaatgccatgcgtacgatatgttccctctccgaatgaacactggctatggtgcccgtactccggaggtgaaatgcgcaagttggaggcttgctgtggaagcacacaacatctttggctttgagaccattcctgaagagtgcgttgaagcaacaaaggaatacatccatggcgaacaatatacatcagactccaaaacagttaaccaacaagcttacttttatgccagagacctcgaagtccatcccaaagacacatttgtgttcagtatagatggcaccgtactctctaatattccatactacaaaaaaca

SEQ ID NO: 258873 - DNA, 405 bp, Glycine max
ggatacaggaacagcagagaaacaaagttagaagtgaagaagatcatggcttctctagcaaccttggctgctgttcaaccagctacgatcaatggccttgctggaagttccctctctggaactaagctctctttcaagccctctcgccacagtgtcaaatccaagaacttcaggagtggtgccgtggtagcaaagtatggtgacaagagtgtgtactttgatttggaggatctgggcaacactacagggcagtgggacttgtatggctcagatgcaccttcaccctacaaccctcttcagagcaagttcttcgagacatttgctgctccattcacaaagaggggattgttactcaagtttctgatattgggaggtggttccacccttgcatacttcagtgcaact

SEQ ID NO: 258874 - DNA, 294 bp, Glycine max
  unsure (1)..(294): unsure at all n locations
gggccaaggaaccaatataacccaagcccnacacaaccaaacccnaacacacacccacnnganncagcnnccaaggctagccccaaggnngcatcnnnggctgcagtgctctgcatggttgtggtgagtgcacccatggcacatgcaactatcacgtgcgggcaggtgacgagtagcctggccaattgcatccgttacctccaaaagggaggaacgccgtcttctggatgctgcaacggagtgaaaagcctcaatgccgccgccaaaaccaccgccgaccgccagacggcgtgc

SEQ ID NO: 258875 - DNA, 355 bp, Glycine max
  unsure (1)..(355): unsure at all n locations
ttttacaaagagtgctttaaataccttttctttaatatnaacataagaagtttcttgcgtgacttttacaatccnctactcttttaaattgcctgggaggttgccaataaagtccgtggtatctataccgttctcaagaccaaagttccagtcaccgttcacgaatatggcgaccgctactgtcttattggtcccctttcctacaagacggcccccatggaggttgaaagcccaaaattttgggggtaaaagtccccccccccaaaacaaaaagggggaaaaaaaaaattttttttctttttccccgtaaaaaaagggaaaaaaccccgtggcccccctttttttttttttgggt

SEQ ID NO: 258876 - DNA, 342 bp, Glycine max
gccagaccttgatgatgcacaattggcaaaggaagtagaataccttcttaggaagggatggattccttgcttggaattcgagttggagcacggtttcgtgtaccgtgagcacaacaggtcaccaggatactacgatggacgctactggaccatgtggaagctgcctatgtttggttgcactgatgcttctcaggtgttgaaggagcttcaagaggctaagactgcataccccaacggcttcattcgtatcattggattcgacaacgttcgccaagtgcagtgcatcagcttcatcgcctacaagcccccaggcttctaagtgtgaaaaatttgcaaagcatt

SEQ ID NO: 258877 - DNA, 405 bp, Glycine max
gacacaccaacaccaaaacaaacccactaagatggcttcctgtgtatccttcctagtgctgcttcttgtagcccttatcctcatgcctcaagggcttgctacttactacaaaccaattaagaagccaccagtgtacaagcctccagtgtacaagccaccagtgtacaaaccaccggtttataagccaaaaccaccggtttacaagccgaaaccaccggtctacaagccaccatataagaagccaccatacaagaaaccaccttatggaaagtaccctccagtagaggacaacacccatgcctaaagcaagcaatgaggtctattatctacttaataaataagaggaacctgcttgtgttttctagcatcgtgatttacaacttcgtagcaatgcatattcttgac

SEQ ID NO: 258878 - DNA, 345 bp, Glycine max
tttttgctttatcttatcatcaccatctcacgcgagagaggtagagatataatcgctaaaattatctgaacgattgggaagaagaagggagcgagctttgtgatcgattgcgcgaagccggtggaggataaaattatggacattgcttctctggagaagtttcttcatgagaggatttatgttttcggtaaggccggtgcactcggcgattccattactgtcactagggacaagagcaagatcaccgttaccttcgacagcaactttttataaacggtatcttgaaatattttgaccaaaatagtactttgataaaaacacaaatgttgatgggaatttggcttt

SEQ ID NO: 258879 - DNA, 397 bp, Glycine max
gatccctacaacgtaataataaccaaaacagcagagggaagagggggtgtagacaaacacaatctctaatggcactcaggatgtgggcttcttccactgccaatgcactcaaagtctcttctacctccagacctcatctcttgcatcctttttctttctccagatgcttgtcttccgtcttggatggacttaagtatgcagattcacacgaatgggtcaagcacgaaggctcagtcgccaccattggtatcactgaccatgcccaggaccatcttggagaggttgtgtatgtggagctgccagaatcaggaggcacagttacccagaagtctggcttcggagccgttgaaagtgttaaagcaacacgtgacatatactctccaatctcgggggagat

SEQ ID NO: 258880 - DNA, 225 bp, Glycine max
gagttcattatcgttgataaatagagggaaaagggagggtttctgaaactgcataagcggctgtccgcaagcgtgctcaagtgtggcagaggaaaggtgtggcttgaccccaatgaagtcaacgaaatctccatggccaattctcggcaaaacatcaggaagttggttaaggatgggtttatcatcaggaagccaaccaagattcactcacggtcccttttttcc

SEQ ID NO: 258881 - DNA, 389 bp, Glycine max
  unsure (1)..(389): unsure at all n locations
ggtcttgaggacaaaagaagaagtatcacaaccccatcgatgtcccgcgcaactcttgtgcaaaagcggatctcatctcccgttcttggtttgccagcaatgggtaaggtgggaagagtgagttgctccatggaggaaaaaccttattctgtgaaggaaagcagctctagcatgttggggatgggggcatctctgatggcagctgccagcgctgcagccatgtcaggcccagccatggccttggtagatgagagactgagcactgaaggaaccggacttccctttggcctcagcaacaatcttcttggttggatccttttcggcgtctttggtcttatctggactctctattntgtctacactttcactctngaagaggatgaagagtc

SEQ ID NO: 258882 - DNA, 341 bp, Glycine max
  unsure (1)..(341): unsure at all n locations
ttttcatttacttgaacaaactttacaacccgacaagggggatttttacctcttcaanctaccaaccttctttttctttcttagtgccatcttgccataagtttaatttgcccaacaaactttactattcacatctgaatcaacaaacaagacacaccctacccagctctgtaaccaaatctccaatactcctctcatatacattctctcaccaggaccctcacaacaaggttacctctcaaaccttctccaataccaacatattaataactctccaacaaatcacaaccaaggacaacacactctatgacaacaatcaacgttacatatgcaggaacatt

SEQ ID NO: 258883 - DNA, 371 bp, Glycine max
  unsure (1)..(371): unsure at all n locations
aaagaccacaaattttgacctctccgagtcgcataaaaagaaaagagcgatgcntagttttacttcagccttatccactttaagctttcccttctctaccctatctttcacgtatcgaaaccttaaatttaccatcacgtctgagcaatctccttgttaaaaccttttctcttagtgagccaatttttatgtctcaattataccatcaaattcctactgccttccatccttttgctgatgcaaatgctcatgactcgtttgctgcttcaaaggagtatgtgcatattcctgtacagcagcgaaatcgtattaaaagcctgacaacctttcaggtattgaaaaatgaattcatctataacaagatactttaa

SEQ ID NO: 258884 - DNA, 388 bp, Glycine max
tattcatcattttccaaacgggcatttgcgtacttttttaattcaatataacaacttaatttctgcttcaatggctttaagtcatgaagatgtcatcctttttgtgtttattgtaagcccatttcttcactatatgcatattgctctcaactttaatgcatttcaatacaaatatttttaatattattttaacaacaatatttatttgctcctcaagtataacccactttataaaatgattccatctcttccttacaattaaaagtccatatcctattcccttgttatttttgattacatctattacacatgtaaaaacaaccccatcttgccttctcatccttaccatataaccttttctcctttctttcccaatttcatttattac

SEQ ID NO: 258885 - DNA, 410 bp, Glycine max
acgacagaagggggtggtagtgtgtcagcgacacgtatcaacttgagtaatcggatcgtataagcagtttccggtgcatctcatcgtctccgaaaatgaacgacgcagatgtctcgaagcaaatccagcagatggtgcggttcatccgccaggaagctgaggaaaaggccaacgagatctctgtctccgccgaagaggaattcaatatcgagaagctgcagttggtcgaagccgacaagaagaacatcaggcaagaatacgaacgcaaagagcgccaagttgaaattcgcaagaagattgagtactcaatgcagctgaatgcttctcggattaaagttcttcaagctcaagatgacgtgatcagttccatgaaagaagctgcatccaaggaacttttgactgtgagtcat

SEQ ID NO: 258886 - DNA, 395 bp, Glycine max
gaaacaaattccactcaatgtgcaacttcatgaaaaaaatgggtcatcttggcttcttccttctggggtgtctctccatgatctcatatgctaatggttatgtcagcaatgggggttggaccaatgcccatgctacattctatggtggaagtgatgcttctgggacaatgggtggggcttgtggttatggaaacttgtatagtcaaggatatgggactaacacagcagcacttagcactgccttgttcaacaatggcttgagttgtggctcatgctaccaaatcaaatgtgcaaatgacccacaatggtgcctccgtggcaccattgtagtcactgccactaatttctgcccccctggtggatggtgtgacccttccaatcaccattttgatctt

SEQ ID NO: 258887 - DNA, 395 bp, Glycine max
gataccaaaagcaaaacaggccaagtgaaagagagaagaaaagtcaaagacaatgtcagggatcattcacaaaattgaggagacccttcatgtgggaggccacaagaaggaggaggagcacaagggtgagcagcaccatggtggagaatacaaaggggagcatcatggtgaacacagtaccgaatacaaaggagagcatcatgttggtgagcacaagccggagcaccatggaggagaagagcacaaagagggattcctagacaagatcaaggacaagatccacggcgaggagggtggcaccgctgagggcgagaagaagaagaagaagaagaaggagaagaagaagcatgaacatggccatgacagcagcagcagcagtgacagtgattagatta

SEQ ID NO: 258888 - DNA, 378 bp, Glycine max
aactccatcatgttcaaaacctaactgatagagtggatggaagcaagctgcatcatggtgatgactggcatcacaacgagtcgatcaaacactggacttgtacaatagatggtaagattacaacatgtctggagagtattgaatccgttgatgaaccgaacaaaacaatcacctacaagctcttcggaggagatattggtcataagtataaagtctttaagctcatttttcaagctattgacaccgatcatgggggtgttattatcaaatggaccgttgaatatgagaagattgatgagaatgttcatcctccgtatggctacatcgaatacctgcacagtggcacgaaacagattgatggcaatcttcttaatccat

SEQ ID NO: 258889 - DNA, 396 bp, Glycine max
ggtgggcatagtaggggagaaagtggaataagagaatcataagaaagcacgaaagaaaatgggagtggagaagcagttgttgaggcctggcaccggtcccaagccaattcccggtcagaacgtcaccgttcactgcactggtttcgggaagaacggtgacctttctcagaaattctggagcaccaaggatcctggccaggaccctttcactttcaaaatcggccaaggttctgttatcaaaggatgggatgaaggtgtgcttggcatgcaaattggtgaagttgctcgtctccggtgctctccggattatgcttatggtgctggtggctttccttcttgggggatacagcccaactctgtcttggaatttgaaatctaagtcttgagtgcacaatg

SEQ ID NO: 258890 - DNA, 393 bp, Glycine max
ggcacaagtgagtttgttgatcgagatagctagagacagtgtgatgaaaatgaaggtccttgttttcttcgttgctacaattttggtagcatggcaatgccatgcgtacgatatgttccctctccgaatgaacactggctatggtgcccgtactccggaggtgaaatgcgcaagttggaggcttgctgtggaagcacacaacatctttggctttgagaccattcctgaagagtgcgttgaagcaacaaaggaatacatccatggcgaacaatatagatcagactccaaaacagttaaccgacaagcttacttttatgccagagacctcgaagtccatcccaaggacacatttgtgttcagtatagatggcaccgtactctctaatattccata

SEQ ID NO: 258891 - DNA, 353 bp, Glycine max
  unsure (1)..(353): unsure at all n locations
gatagcaaaaggaaaacacaagccaagtgaaagtgagaaagaataaaaatcaaagagcgtaatgtcagggatcattcacaagattggggagacccttcatgtgggagggcacaagaaggaggaggagcataagggtgagcaccatgctggagaatacaaaggggagcaccatggtgaacacagtagtgagtacaaaggagagcatcatggtgaacacaaagctggagagtaccatggtgagcacaagccagagcacaaagaggggnttctagacaaaatcaaggacaagatccatggtgagggcggcgccgtcgagggcgagaagaagaagaaggagaagaagaaaaagggca

SEQ ID NO: 258892 - DNA, 413 bp, Glycine max
  unsure (1)..(413): unsure at all n locations
ggtccaatccaattgaattctccagagagaagaagggacttaggcgatcatcacttcacttcactaatacatcatggcagacgagacccagaacaagtatgagagctctgaggttgaggtccaggatcgtggtgtttttgactttctcggtaagaaaaaggacgaagaagacaagcctcatcctcaggaggaggtcatcgccaccgagtttcaaaaagtcactgtctcagaccaaggagagaacaagcacagcctcttagaaaagcttcaccgatctgacagcagctctagctcttcaagtgaggaggaaggagaagatggagagaaaaggaagaagaagaagaaggaaaagaaagggctgaaagagaagatcgaggagaaaataganggtgatcatcatcatcacaaggatg

SEQ ID NO: 258893 - DNA, 363 bp, Glycine max
ggcaccccgtgagtctgtatgatcgtagataactagtaaacatgcgtgatgagaaatgaaagataccttgttttcttcaaatcctacacattttcgtagcattggcaatgccatgcttaccgatatgttccactctccgaatgaacactgactatggtgcccgtactacggacgagaaatgcgcaagttggacgcttgctgtcgaagcacacaacatcttttgctataagaccatacctgaagagtgccttgcagcaacaaaggactacatccatggcgaacaatatagatcagactccaaaacacctaaccaacaagcttactcttatgccagacacctcgaagttcatcccaaggacacat

SEQ ID NO: 258894 - DNA, 399 bp, Glycine max
  unsure (1)..(399): unsure at all n locations
gagcgccaatgtttgtttcagaggagtttcatcttgtaatcaaaagagtttatcttatagtaagaaatcgatgtcttactccattttaaggaacaaaacaagagaacaatagcctgacaaagggtttagccataaaatcgaatccatcattgatttgagatattgataaggtgaatactcatttctcgtcaatgctaggcataatgcgggtatagggacctaaaaaagattatcttttcttcctatcttatgaactttaaggtgtatgaagtgtcatttcctaccttagactttaattntagtaggtagataaagagtctatttaacttaagttgatctaagccagaagcagacctacgtcaagataatccttctttgaaacactttggtagtgctctt

SEQ ID NO: 258895 - DNA, 421 bp, Glycine max
aggcgtgcgaacacacacaaggggacaccaacaccgccacaaacccactaaggtggcttgctttgtatccttcctagtgctgcttcttgcagcccttatcctcatgcctcaagggcttgctacttactacaaaccaattaagaagccaccagtgtacaagcctccagtgtacaagccaccagtgtacaaaccaccggtttataagccaaaaccaccggtttacaagccgaaaccaccggtttacaagccaccatataagaagccaccatacaagaaaccaccttatggaaagtaccctccagtagaagacaacacccatgcctaaagcaagcaatgaggtctattatctacttaataaataagaggaactgctttgtgttttctagcattgtgatttacaacttcgtaacaatgcatattc

SEQ ID NO: 258896 - DNA, 249 bp, Glycine max
ttcatggacgttgataacatccttccatggagcaggagccttaggatggcatagccttaaagttaagggcgaggttcaaacgaagaaaggcttatggtggatacctaggcacccagagacgaggaagggcgtagtaagcgacgaaatgcttcggggagttgaaaataagcgtacatccggggattcccgatataggtcaacctttcgaactgctgctgaatccacgggctgtcttaataaaaaaaatat

SEQ ID NO: 258897 - DNA, 295 bp, Glycine max
gaaaacaaacgacagagatgaatggcctatcatgggctatgcaccgtctctgcccgagactcttagaaatgacatcatgctgaggtatcttggctttactactttattctggacaagacgagcactcaacaaacaggccgaggcataagccatcttatagaatgcttgcttccacacatataaaaaattagttattactgattcacaagatactttcactataaatgcaggtatatacacctcaacaagaagagatgaaacttgctatcgcatggatccaacatgtgtgtgatca

SEQ ID NO: 258898 - DNA, 421 bp, Glycine max
ggttctagtgtgtgattgtttgttgttgtaactcgttcttcggcttttggtgttctgtgtttgtgtttgttttttctctcacctgaaaatgtcttgctgcggtggtaactgtggttgcggaagctcctgcaagtgcggcaacggctgcggaggctgcaagatgtacccagacttgagctacactgagtcaaccaccaccgagaccttggtcatgggagtggcacctgttaaggctcaatttgagggtgctgaaatgggtgtgcccgctaagaacgatggctgcaaatgtggaccaaactgctcctgcaacccctgcacttgcaagtgaggtgttgggagagcaagcttcaggcagagatagcccttaattaggaataatgataaactattaatgtgtagcttaaaacttacgtattatgtc

SEQ ID NO: 258899 - DNA, 313 bp, Glycine max
gacatgtgagtttgttgatcgaaataagtagaaagggtgttattaaaatgaacgtccttgttttcttcgttgctacaattttggtagcatggcaatgccatgcgtacgatatgttccctctccgaatgaacactgtctatggtgcccgtactccggaggtgaaatgctcaacttgtaggcttgctgtggaagcacacaacatcttttgctttgagaccattccttaagagtgcgttgaagccacaaatgaatacatccatggcgaacaatatagatcagactccaaaacagttaaccaacaaacttactttta

SEQ ID NO: 258900 - DNA, 319 bp, Glycine max
gaatgagaagctcgacaagaaaaggaagactgtcgctaaggatgaagcttctgccatcaagtctgctgggaaagcatggtatcacactatggtgtcagattctgattatacagaattcgacaacttttctaagtggctgggtgttccacagtaaactttatgattcatattttcgtattagatttttgttttgtatgcccatcagaactaaatatctttggcttttttgttttgcgagttaaggttatcataattatgcagacaatttggaaattttgttcgtcggactttatagtgcaaattctggttgtcttatctt

SEQ ID NO: 258901 - DNA, 361 bp, Glycine max
cacaattttaattttattaaaattacttcattctcttggctcattgtcctacctatcctttcaacatccacatcttcgtcaaaaccctcaccgaaaataccatcaccctttatgaggaaacctctgacaccatctacaacgtctaggtcaacatccaacacaaagaatgaatttccccacatcagcaacttctcatcttcactcaaaagcatctcaaggacagccgtaccctttcctactacaacatccacaacgaatcaacccttcaccttgctcttcttctacgtcgtggcatgcacatcttcgttaatactctcactttcaaaaccataaccctatatgtctaaaactctgacaccat

SEQ ID NO: 258902 - DNA, 414 bp, Glycine max
  unsure (1)..(414): unsure at all n locations
ggggttattggacacattcttcagcggcgacgtttgtggatcggaacctcttctgcggcgtatcaatgggacactccaacgtttggaactctcacccaaaaaactacggtcctggttctcgcacttgccgcgtgtgtgggaatccacatggactgatcaggaagtatggccttatgtgccgcatgcagtgcttacgtagcaatgccaatgaaattggcttcatcaagtatcgctaaaagagcagttgtcaactacggaccaatattgcgttctggcactaggatgttttgaggatgttatgtttgaagaaacttgagactttcttttttcatctaattaattatcagacgtaatttgtggtactaagaatacttttatataaattgctttgaaccannccacattgcggaaaaa

SEQ ID NO: 258903 - DNA, 417 bp, Glycine max
gatctcagtctctacctcaaaccactcgagaaaaaatggcggtgcctcttctctcgaagaagatcgtgaagaagaggctgaagaagttcaagaggcctcaaagtgacaggaagatttctgtgaagacaaactggcgcagaccaaagggtatcgattcccgtgttaggagaaagttcaagggatgcactttgatgccgaacattggttatgcttcagacaagaagacccgccactatctcccgaatggtttcaagaaatttgttgttcacaatgtgaaggatttggaactgctcatgatgcacaacaggacttactgtgctgagattgcccacaatatatccacaagaaagagaaaagatatagtcgagagagccacgcagcttgatgttgttgtgacaaataaaacggccagattac

SEQ ID NO: 258904 - DNA, 371 bp, Glycine max
attagcaggagattcgggcctgggaaagggtctgctgagtatgcagctttggctaagaaccctgagaaggagtttttgaagactattactggcaagaaggagaccctcattgaccttacaattatagaaatcttgtcaaggcacacatctgatgagttctaccttggggagagagatggtggtgactattggacttctgatgctggtgcactagaggccttcaagaggtttggaaagaagcttcaagagattgaacaaaagcttatacagaagaacaaggacgatacgttgagaaaccgcagtgcgccggctaaaatgccttacactttgctctatacttctagtgaggagggattgactttcataggaat

SEQ ID NO: 258905 - DNA, 424 bp, Glycine max
  unsure (1)..(424): unsure at all n locations
catgatccaatgtaagcaccgtgccaggagcccaatcaagcgtatgtggaggaatctcntgctcatncttcagcccttcaaatnttccaggaagggagtcgatgttcttcttaagagaggtgagtgcagagcaaaaggtggggcacctggattcaaagttgcaattttgggggctgctggaggaattggtcaatccctttctttgctgatgaagatgaacccattggtttcagttcttcatctttatgatgttgtcaacacccctggtgtcacagctgatgttagccacatggacactggtgctgtggttcgtggctttcttgggcagcaacaacttgagagtgcactcacnttgcatgacctcgtaatcataccctgctgggtgccaaggaaaacctggatgacaagagatgatttatttaaa

SEQ ID NO: 258906 - DNA, 342 bp, Glycine max
  unsure (1)..(342): unsure at all n locations
gagcatattccagtgtttttcatttcatcgtgcattcaagggccagcacagcagctctatccggaaccatggtgagcacctccttcatgaggaggcaacctatgaccaccacaagcctaaagacattccccaacgttggtgaagctctttttggtctgaaaagtggacgaggtggtcgcgtcacttgcatggcctcgtacaaggtgaagctcataaccccagaaggagaagtggagtttgaatgcccagatgatgttttcattgttgacaaggcagaggacgaaggcattgaacttccctactcgtgcanggccggttcttgcgttttctgtgttggcaaaa

SEQ ID NO: 258907 - DNA, 396 bp, Glycine max
aagacgacagaagggggggaaacccagagagtgaagcttagagagagagagagagagagagatgtgagagagtattggcgcttcatcaagatgggtatttctagggattccatgcacaagaggcgtgccactggtggcaagaaaaaggcttggagaaagaagagaaagtacgagcttgggcgtcaggcagcaaacaccaagttatcaagcaacaagacaatcaggaggattcgtgttagaggtggcaatgttaaatggagggcattgaggctggatactggcaattactcatggggtagtgaagcagttactcgcaagactcgtattctagatgttgtttacaatgcctcaaacaacgagctcgtacgaactcagaccctggtcaagagtgctatt

SEQ ID NO: 258908 - DNA, 397 bp, Glycine max
ggtcacattccacaaaaacgaagtactgcgacaagggaagaaaaacttagctactaaggaaggatcaaagagaatggctcaagcaatggcatcaatggctggcttgcgtggttcctctcaggctgtgttggaaggtagccttcaggtgagtggctccacacgcttgaatgtggggagtggaagcaaggtggcctcagtcacacgtgcagggttcacagttagagcacaacaacaacaagtgagtggtgaggtacaaagcagccgtagggcagtgctttcacttgttgctgctggtttggccactggctcttttgttcaagctgtgcttgctgatgccaaatctatcaaagttggaccacctcccccaccttctggtggattgcctggaacgttgaac

SEQ ID NO: 258909 - DNA, 347 bp, Glycine max
gatgtaactaagcaagatatcatcacggggcaaaggaaatacacattacattactaagtctttgttcatttgagtagtagtgatggctagcctcaaggttgcatgtgtggttgctgtgatgtgcatggttgtggaggccatgagtgctgcacccatggcacaggccgcaatcacgtgcgggtaggtcgccggcgacatgtctacgtgcttcagttatcttctaagcggcggaaaaccgtcgcaggcctgctgcaacggagtgaaatccctcagcggcgcggcgaagaccacctctgaccgccagggggcgtgcagttgcctgaaaaaccttgccaataatatgggac

SEQ ID NO: 258910 - DNA, 405 bp, Glycine max
tatgggggtcacattccacaaaaacgaagtaggactacaatggaagaaaaacttacctactaaggaaggatcaaagagaatggctcaagcaatggcatcaatggctggcttgcgtggttcctctcaggctgcgttggaaggtagccttcacgtgagtggctccacacgcttgaatgtggggagtggaagcagggtggcctcagtcacacgtgcagggttcacagttagagcacaacaacaacaagtgagtggtgaggtacaaagcagccgtagggcagtgctttcacttgttgctgctggtttggccactggctcttttgttcaagctgtgcttgctgatgccaaatctatcaaagtttgaccaccttccccaccttcttgtggattgcctggaaccgttaactc

SEQ ID NO: 258911 - DNA, 329 bp, Glycine max
  unsure (1)..(329): unsure at all n locations
accaaaacaaacccactaggatagctgcctttttatacatcccaattctccttcctacaccccttattcttatacctaaataacttactacttactacaaaccaattaataacccaccattttacaatcctacattgtacaagccaccaangtacaaaccaccattttataatccaaaaccacctttttacaatcctaaaccacctctttacaacccaccatatattaatccaccatacaagaaaccaccttatttaaaatacccttcattaaatgacaacacccattccnaaagcaaacaattatgactattatctacttaataaata

SEQ ID NO: 258912 - DNA, 422 bp, Glycine max
ggcattggggcatgcttttaatttcctggatctccgaaacaaattgtagcataagtctcatggccaaagagactagtgttgtttatctatatcccagcaaatcacaagtttggggtgagaattttgatcataaaaaacttgtaataacaacactagctgctaatggaaagaaggaggagagtaatggagcacctaatgacacatatcctgcgtttcccgggtggtatgctgatgtttcctggccaggagaagcacacacatataaaatagaaaagattctattccacgggaaatcagaattccaagagcttcttgtatttgagtcttctagacaaggcaaggttgcaattcttgatgggcatatccagctgacagaaaacgatgaaattgcttaccaagagatgctcactcaccttgcactc

SEQ ID NO: 258913 - DNA, 326 bp, Glycine max
gaaggttgtttttaaagaataaatggaggaagcaaagggagtgttgaagggcgttttccttgcaaagttcaaggaccacctcactccagagcggattgaggagctcatcaaggactatgccaatcttgtcaatctcatcccacccatgaagtcattccattggggcaaggatgtaagtgctgaaaacatgcatcaaggcttcactcatgtgtttgaatcaacctttgagagtacagaaggcattgcagagtatacagctcatcctgcccatgttgaatatgcaactttgttcctttcctacctggacaaagtcattttgatttgac

SEQ ID NO: 258914 - DNA, 354 bp, Glycine max
tgcggtataatatacggtatcgggatttgtatacaagaagaatcaattctaaattgacaacttgagttctaaaattatgaaacataagtttttggaattgcatctataatccgaatttttttgagtatgacgaaaggatctatggagagatatatagaaagtttctttctaatcgtaactaaatcttccatttttttgtatagtagagattgaagcaaaatagctattaaacgattcttttagtttactagagacatctacatttttttagcttgacagaaattttatgcttttcctaaagattctattaaatagaaatagagaacgaagcattatcttttggctttataacaa

SEQ ID NO: 258915 - DNA, 411 bp, Glycine max
gacaccaacaccaaaacaaacccactgggatggcggcctttgtatccttcctagtgctgcttcttgcagcccttatcctcatgcctcaagggcttgctacttactacaaaccaattaagaagccaccagtgtacaagcctccagtgtacaagccaccagtgtacaaaccaccggtttataagccaaaaccaccggtttacaagccgaaaccaccggtttacaagccaccatataagaagccaccatacaagaaaccaccttatggaaagtaccctccagtagaggacaacacccatgcctaaagcaagcaatgaggtctattatctacttaataaataagaggaactgctttgcgttttctagcattgtgatttacaacttcgtagcaatgcatattcttgactcttgcat

SEQ ID NO: 258916 - DNA, 410 bp, Glycine max
cgcacgaagaagagcgtggagacctacaagagctacaggttcaaggtcctcaagcaggttcaccccgacattggtatttccagcaaggccatgggcatcatgaacagcttcatcaacgacatcttcgagaagctcgcccaggaagcgtcgcgtttggctcgctacaacaagaagcccaccatcacctcgagggagatccagaccgccgtgcgtctcgtgctccctggtgaattggccaaacacgccgtttctgaagggaccaaggcggttaccaagtttaccagctcttgaattagggtttgttaggcggttgtgttgcacatctagggttttctgtggatttcttttcttaaaaattagtttgtagatgtaatgatctgaacagttgttaatggaaaggttccgttgag

SEQ ID NO: 258917 - DNA, 343 bp, Glycine max
gtccaaaacaactaacaaagcttagacgtctctttcttcttggcttatcatcccctgccacaacaagaaccaacatggctcccaccatctataatttttcgtattctaaaacgttttcaaactcattcaattcttcaaaatcaaaaagagattcatccagttccaacatccttgctttccactccacagctcaattgaatgctcattataacgccaccaaagaaactaacaaactgatgttacttgatttcacagccacatggtgtgtaccttgcatactcatgcacccacttattcaagagtttgctggatattacacatatgtttacttcatcaaaattta

SEQ ID NO: 258918 - DNA, 414 bp, Glycine max
ttgggagctccaatgtttttttcagaggagtgcatctggtaatcaaaagagtttatcttatactaagaaatcgatgtcttactccattttaaggaacaaaacaagagaacaatagcctgacaaagggtttagccataaaatcgaatccatcattgatttgagatattgataaggtgaatactcatttctcgtcaatgctaggcataatgcgggtatagggacctaaaaaagattatcttttcttcctatcttatgaactttaaggtgtatgaagtgtcatttcctatcttagattttaattttagtacgtagataaagagtccatttaacttaacttcatctaggccagaagcagacctacgtcaagataatccttctttgaaacactttggtagtgctcttagattgtaatcc

SEQ ID NO: 258919 - DNA, 425 bp, Glycine max
  unsure (1)..(425): unsure at all n locations
tattttggctcaagtgagtttcttcatcgatagggctgatgcaaaattatnaaaatcaacgtccttgttttcttcgttgctacaattttggtagcatggccatgccatggcgcaggctaccaaaggttccctctccgaatgaaaactggctattgtgagcgttcttcggaggtaaaatgcgcaagttttaggcttgctgtggaagcacacaacatccgagcctttaaaaccattcctgaagagtgcgttgaaccgacaaaggactacattaatggcgaacaatttacatcagactctattacagttaaccaacaagctttcttttatgctagtgaacgcgaagttcatcacaacgacatatttatattctgcataaataacaccgtactctctaatatcccatactatgaaaaacatggatattg

SEQ ID NO: 258920 - DNA, 374 bp, Glycine max
gacagcagtaaagtgagttaaaagaaccgagtgtaggggttccttcactctccgctctctctgccactgagccaagaagatggcctcacaggtttgcaaatctgcttccagagccgcgaggtcccttctatcctctcgttttcactctcaaggacgtgcgcttggggctgctgcggctgtttcattgagcagcaaagtgcctcttttttacggaaagaacggttctggaaatggatccgcttcttcttcatcatcatcatcatggatttcaggagctcttgctcttcctgccgcagcttacatgttccaagatcaggaggtgcaggcagctgagctggagcgcactttcattgccattaagcctgatggagtgc

SEQ ID NO: 258921 - DNA, 398 bp, Glycine max
ggcttcagaaaaacaagtacttgagaactaagaggaaggatagtgcttcctcaatgatctcctccccagctgttaccaccgtcaaccgtgccggtgccggcatggttgctccattcaccggcctcaaatccatggctggcttccccacgaggaagaccaacaatgacattacctccattgctagcaacggtggaagagtacgatgcatgcacgtgtggccaccaattggcaagaagaagttcgagactctttcctacttgccagacctcgatgatgcccaattggcaaaggaagttcaataccttctaaggaaaagatggattccttgcttggaattcgagttggagcacggtttcgtgtaccgtgagcacaacaggtcacctggatactatgatgga

SEQ ID NO: 258922 - DNA, 385 bp, Glycine max
tggtttggttcatatactacatcacttgggaagcggaagatggtgaaaccaaaaatgtgtatgaaacgaaggtgtgggtgagatcatggttgaactccaaggaggtcctcgaattcaagcccatcagtattaatcctctttcggtgtcggtctagtctttataaggttacagaaataaatggtcgcaagctgaaagttgtactaaaatttattttttataaaaaaatcgaaggtagtattaaatatgttatatgtatgtattgtgcggaataaatgcagccacgcactatatacaatggtacatacggtgtagggctgtacaagttgggcattctatttcaatattaacgaccactaataaatattaccattggagttattacac

SEQ ID NO: 258923 - DNA, 323 bp, Glycine max
gccagaagacgacagacggggataccaaaaacaaaacacaagccaagtgaaagtgagaaaaggaaaaatcaaagagcataatgtcagggatcattcacaagattggggagacccttcatgtgggagggcacaagaaggaggaggagcataatggtgagcaccatgctggagaatacaaaggggagcaccatggtgaacacagtagtgagtacaaaggagagcatcatggtgaacacaaagctggagagtaccatggtgagcacaagccagagcacaaagaggggttcctagacaaagtcaatgacaagatccatggtgagggc

SEQ ID NO: 258924 - DNA, 382 bp, Glycine max
gaaccctaaacccctgtcatattgaaggcagggcggcagatatataaatacaaatcgccacgccgctacgtcttcttcagccatttagctccatagctgcagcattagggtttttcatctgcttcaatggggaagggaacagggagttttggtaagagaaggaacaagactcacactctctgtgtgaggtgtggccgccgcagcttccatctccagaagagtcgttgcgccgcttgtgctttccccgccgcacgcactaggaaatataactggagcgtcaaggcaatccgcagaaagaccaccggaactggcaggatgaggtacttgcgtaacgcgcctcgccgattcaagagtggcttcagagaacgtaccgaagctgcac

SEQ ID NO: 258925 - DNA, 339 bp, Glycine max
  unsure (1)..(339): unsure at all n locations
aaaaatattaactccctctcttttctttttttctacaatatttttcttatcatttccataccattacgcaggctaccaaatcttccctctcctaataaaaactatctattttaagccttcttcttatataaaatgctcacactttangctttcttttgaatcacacaacattctaacctttaaaaccattccttaatatttcctttaaccaacaaaatactacattaatttctaacaatttacatcatactcttaaacagttaaccaacaaactttcttttattctaattaactcgaattccatcacaactacatatttatattcttcatatataacac

SEQ ID NO: 258926 - DNA, 232 bp, Glycine max
  unsure (1)..(232): unsure at all n locations
tttcatgtcattaattaaataccgtnacatgttcaaattcacaagattccttaaaacattcataaacatttataatttgtgtatttaatcgcctttttacactctttatcctttaacaactgatatttccccctgctattatcgcatcacctctgcaatttgtgctttcaatattgggtcactttttactacttctctctgttatgtgacttcaaaagaacatctttttttt

SEQ ID NO: 258927 - DNA, 418 bp, Glycine max
tattggggctcaagtgagtttgttgatcgagatgactagaggcagtgttatgaaaatgaaggtccttgttttcttcgttgctacaattttggtagcatggcaatgccatgcgtacgatatgttccctctccgaatgaacactggctatggtgcccgtactccggaggtgaaatgcgcaagttggaggcttgctgtggaagcacacaacatctttggctttgagaccattcctgaagagtgcgttgaagcaacaaaggaatacatccatggcgaacaatatacatcagactccaaaacagttaaccaacaagcttacttttatgccagagacctcgaagtccattccaaggacacatttgtgttcagtatagatggcaccgtactctctaatattccatactacaaaaaacatggatat

SEQ ID NO: 258928 - DNA, 424 bp, Glycine max
  unsure (1)..(424): unsure at all n locations
ggcacaagtgagtttgttgatcgagagagctagagacagtgtgatgaaaatgaaggtccttgttttcttcgttgctacaattttggtagcatggcaatgccatgcgcacgatatgttccctctccgaatgaacactggctatggtgcccgtactccggaggtgaaatgcgcaagttggaggcttgctgtggaagcacacaacatctttggctttgagaccattcctgaagagtgcgttgaagcaacaaaggaatacatccatggcgaacaatatagatcagactccaaaacagttaaccaacaagcttacttttatgccagagacctcgaagtccatcccaaggacacatttgtgttcagtatagatggcaccgtactctctaatattccatactacnnaaaaacatgatatggggtggagaaa

SEQ ID NO: 258929 - DNA, 384 bp, Glycine max
  unsure (1)..(384): unsure at all n locations
ttcttcatcaacatagcgtattgcagtgttataaaaatcaanntccttcttttcttccttnctacaatttttgtagcatggcaattccatgcttacgatatgttccctctccgaatgaacactggctattttgcccgtactcctgaggtgaaatgctcaacttggaggctttcttttgaagcacacaacatcttnttcttttagaccattcctgaatagtgcgtttaatcaacaaaggaatacattcattgctaacaatatacatcatactccaaaacatttaaccaacaaacttacttttatgccatagacctctaaatccatcccaaggacacatttgtgttcagtatatattgcaccgtactctctaatattccatactac

SEQ ID NO: 258930 - DNA, 383 bp, Glycine max
gacctcacccagttgcagaaagaaaagaccatcaagctttcacgtcagccttatccggtttagggtttcggtttttgacccaacctttgacgtatcgaaaccttaagtttcggatcaggtctgagcaatctggttggtagaacctttggtcttagagagtcaagttttatgtctgaattagacgatcaagttcctactgccttcgatccttttgctgatgcaaatgctgatgactcgggtgctgggtcaaaggagtatgtgcatattcgcgtacagcagcgaaatggaaagaaaagcctgacaaccgttcaaggattgaaaaaagaattcagctataacaagatacttaaagatgttaagaaagagttctgttgcaatggaac

SEQ ID NO: 258931 - DNA, 398 bp, Glycine max
  unsure (1)..(398): unsure at all n locations
cgtccgcccacgcgtncngacgacagaagggggagatgttagaggataagagaagctaaagaaagaaaggagatgtggagtggataagcagttgttgaggtcttgcaccggtccgaagccaattcccggtcagaacgtaaccgttcactgcactggtttcgggaagaacggtgacctttctcagaaattctggagcacaaaggatcctggccagaacccattcactttcaaaatcggtcaaggttctgttatcaaaggatggtatgaacgtgtgcttggcatgcaaattggtgaagttgctcgccttcggtgctcttcggattatgcttatggtgctggtggctttcctgcttggggaatactgcccaactttgtcgtggaatttgaaatcgaagtct

SEQ ID NO: 258932 - DNA, 399 bp, Glycine max
ggcgcctctgcttgcaagagtgaggaccttgtcttacccttctctcaagtttcaagagatttcatcatggctccaaagaaggacaaggctccaccaccttcctccaagcccgccaaatctggcggtggcaagcagaagaagaagaagtggagcaagggaaagcaaaaggagaaggtgaacaatatggtgctgtttgatcagggcacctatgacaagctcctttctgaagctcccaaatacaagctcatcactccttccattctctctgatcgtttgaggattaatggatcacttgcaaggaaggctataagagaattgatggcaagaggttctatcacgatggtgtctgcccatgcaagtcagcacatttattccagggcaacaaacacctaggtggtg

SEQ ID NO: 258933 - DNA, 338 bp, Glycine max
ttgggggcagcagaagaacaagttgtttagagctaagaaggagaagcaaatggctttctcaatcatctcttccccagctgttaccactgtcaaccgtgccggtgccggcatggttgctccattcactggcctcaagtccatggctggcttccccaccaggaagaccaacaatgacattacctccattgctagcaacggtggaagagtgcaatgcatgcaggtgtggccaccagttggcaagaagaagtttgagactctttcctacctgccagaccttgatgatgcacaattggcaaaggaagtagaatactcttttatgaaaggatggattccttgct

SEQ ID NO: 258934 - DNA, 381 bp, Glycine max
gactgacgatggttcacccgaagagttcctctctaacgtggactatttactaggaaaacaggccttcttcggcgaaacacaagccgagggtggttttcatccaaatgcggtggccacggctaacatcttagagacggcaacacctgtgattgatgggaagccgtactattttctgtctgtgttgacaaggactgctgatggagatgaaggtggcaagcaccacataattagagcaactgtaaaagatggaaaactgttcatttgcaatgctcaagctggagacaagaggtggttcaagggagcaagaagatttgtggagagtgcaacaagttctttcagtgttgcttaaaaatcttcaataatagctggttatatatatct

SEQ ID NO: 258935 - DNA, 376 bp, Glycine max
  unsure (1)..(376): unsure at all n locations
ttggggatcctttgcattctattcattcaacgttcatcgtgtactttttggaagcacanacccaaatacttcgagatggcccgtacaaagcaaactgctcgtaagtcaactggaggaaaagctcccatgaagcagcttgcaaccaaggctgcacgtaagtctgcaccaacaactggtggtgtgaagaagcctcatcgttatcgccctggaactgttgctcttcgtgagattaggaaataccataagaacactgaactcctaatcaggaaacttcctttccaaaggttggttcgtgaaattgcccaagatttcaagactgatcttccttttcaaaaccatgctgtgctttcatttcaagaggcttcttaagcatacc

SEQ ID NO: 258936 - DNA, 427 bp, Glycine max
tattgggaaggttcatgactttcttgtgagctagaagctacgttatcgttaagagaatatcaccgctcctccctttctttgttgctgcagaatttattggtagcatggccatgccatggcgcatgctaccaaaggttccctctccaaatgaaaactgcctattgttagcgttcttcggaggtaaaatgcgcaacttttatgcttgctgtggaaccacacatcattctatcctttaaaaccattcctgaatagtgctttgaaccaacaaatgactacattaatgtccaacaatttacatcacactctaaaacagttaaccaacaagctttcttttatgctcgtgaacgcgaagttcatctcaactacatatttttattttttcattatataacacctttctttcttatattccattctattaaaaaca

SEQ ID NO: 258937 - DNA, 280 bp, Glycine max
cgagaatactacagaatgggaccgcatactttctctgtaaagtgcaaagcctctatttttggttgttatgtggaaggactattacttccacaaacgtctcatccacaactaataagggtggtagagggaaacccaagaccacaaagtccgtttcccgttccttcaaagccggccttcatttccccgtcggccgcgtcgctctctacctcaaggcccgtcgctatgcccagcgcgttggttcctgttcccctgtttacctatctgcgcttctcaaatacct

SEQ ID NO: 258938 - DNA, 325 bp, Glycine max
gcgtgcgtacggtgttctaagactacagaaagggattattggaagtccttatcttatagtatcggttatgtctttcagtgcgcaatccgttccaaaccacataatctttaacaaagatggttgtataaaagttgaagaagatggccagttctgtttgaactggtgggaagggtactattagaaggatgaagaaagctgttcacaagactactactacagatgacaaaatgcttcaaagcaccctgaatgggataggagtgaatgctatccctgcaattgaagaagtcaacatctttatcgattaaatagttattcagtttttaaa

SEQ ID NO: 258939 - DNA, 332 bp, Glycine max
gactttagcagaacccaatagcatagaataatcacggaatggtggctattactggtgtgaccctttcatgccccatggttttcttcaacgcatcatgctcaccgcaaaacgcgcatgctgtaaagttctcttttattgtattttgttcagcagattctatgacttgacaggactgcagaatggaattctgaagcgagggagagagattttcctcactggttgctacctccgaactcccactggaggttctggacattcacgtcttttgccaacagagtatcttgtgattctattggatgaaattatggtcaaacattttttaattttaaatt

SEQ ID NO: 258940 - DNA, 307 bp, Glycine max
caaatttcttcctcaatcatctcttccccagctgttaccactgtcaaccgtgcctgtgccggcatggttgctccattcactgtcctcaagtccatggcttgcttccccaccataaagaccaacaatgacattacctccattgctagcaacggtggaagagtgcaatgcatgcacgtgtgtccaccactttgcaagaaaaattttgatactctttcctacctgtccgacctttgataatccacaattttcaaaatgaaataaaattaccttctttatgaaagttattgaattccctttcttttaaatt

SEQ ID NO: 258941 - DNA, 259 bp, Glycine max
ctctttggcaaattttgtaaatttaaaaaaacataaaactcctcccctttaaaaaatccaaacttacttaccccttcattctactttattacttttttattattttacctaaattcaatttattttcctcctttttacaacctctttacttttaaaaccctttccttacccaacttaaatccctttcaacacattccctttttttcaactttctttatatctaaaaaatccttacctatctccctttccaacaattttt

SEQ ID NO: 258942 - DNA, 327 bp, Glycine max
  unsure (1)..(327): unsure at all n locations
tgnnnaacatcattatttagaattacgtttttancctttacaccggtcatttgcaccttctttaacacccatccttctcaaaactgaactatgcctattcattggtgccaacatctacccatgaaagggcatcacatttgttcgtggtgattctcacgttttcctgtttgcaaactcaaaatgtaagacgtatttccacaatcgcctgaatccttcaaagctcaccttgactgcaatgtacataaagcaacacaaaaaggacattgctcaataatcttttatgaataggatacgtgctgccaaaaagccttactctaagtccatttt

SEQ ID NO: 258943 - DNA, 392 bp, Glycine max
gccaggcgcagttacctgttctgttattgagtcaaagggtgtgagtgagtgtgagcaagatgggttctttggcaaagaagggactcaacaattacgtcaaacagctccagcaacaccctttgagaaccaaggtaatcactgcaggggtactatcagcgatcagcgatgttgtgtctcagaaacttactgggatacagaaacttcaactcaaacgtcttcttttcaaagtgattttcggagctgcttatcttggaccctttggacacttttttcgtttaatactggataaaattttcaaaggaaagggagattcaaaaactgtggccaagaaggttctgattgaacagttgacatctaatccttggaacaatttgcttttcatgatttactac

SEQ ID NO: 258944 - DNA, 403 bp, Glycine max
ggcacaagtgagtttgttgatctaaattactagaagcagcgtgatgaaaatgaaggtccttgttttcttcgttgctacaattttggtagcatggcaatgtcatgcgtacaatatgttccttctacaaatgaacactggctatggtgcccgtactccggaggtgaaatgcgcaagttggaagcttgctttggaagcacacaacatctttggctttgagaccattcctgaagagtgcgttgaatcaacatatgaatacattcatggcgaacaatatagatcagactccaaaacagttaaccaacaagcttacttttatgccatagacctagaagtgcattccaaggacacatttgtgttcagtatagatagcaccgtactctctaatatccatacaaaaaaaaca

SEQ ID NO: 258945 - DNA, 420 bp, Glycine max
gataccataaaagaagcacaaagagaagcattaggactaggagcagcaacaactagtctcagctgaaatggcctcttcagtgatggcatctgtggccctcaaacctgcccctttcactgttgagaagtcctcagtgagaggccttccctctctctcaaggaactcttcttcattcagagttgcggccagtggcaagaacatcaagactgacaaaccttatggaattaatggtggcatggctttgagggatggaactgatgcatctggcaggaaaggaaagggaaagggtgtttaccagcttgtagacaaatacggtgctaatgtcgatggatacagtcctatctacgacaccaaggactggtctgcaaccggtgatgtctacgctggcggtacgactggcttggctatctgggctgtgac

SEQ ID NO: 258946 - DNA, 413 bp, Glycine max
  unsure (1)..(413): unsure at all n locations
ggacaacacaacacaaacacacagagttagaggagaaatcatcatggcatcagcagcatctgggtttgtgttgtcacttaatgttgcagctgccaccacaaactcaagggtggtcatgttcaacacaaagaacaacgcttctatgcttgttgtaagggcttcagatgagcctgcagcggcggcacccgccaccgtcacacccccagctgaagctgaagctaaaccaaagccaccacctattggccccaagagaggtgctaaggtgaagattcttaggaaggaatcttactggtacaaaggcactggttcagtggttgctgttgatcaggaccccaacactctctaccctgttgtggntcgattcaacaaagtcaactatgccaatgtatcaacaaacaactatgctttggatg

SEQ ID NO: 258947 - DNA, 340 bp, Glycine max
ggagagagcgagcgagcgacccgtttcaaagagaggatttgggattgggaaggcgagggattgcgctgcgtctcttcctcttctctttcgattcatccctcattcataatcttccaatccaacaacctcagcctcacactcacacatacacacatctgaacgcgtatcgtccctcccatggcttcaaagcgcatcctcaatgagctctaggtcttgcataaagacccaccaacttcttgcagcgctggtccattagctgaggacatgttccattggcaagcaacgatgatagggcctgctgataagccttatgctggaggtgtattcctagtcactattc

SEQ ID NO: 258948 - DNA, 403 bp, Glycine max
gataccaaaaacaaaacacaagccaagtgaaagtgagaaaaaataaaaatcaaagagcataatgtcagggatcattcacaagattggggagacccttcatgtgggagggcacaagaaggaggaggagcataagggtgagcaccatgctggagaatacaaaggggagcaccatggtgaacacagtagtgagtacaaaggagagcatcatggtgaacacaaagctggagagtaccatggtgagcacaagccagagcacaaagaggggttcctagacaaagtcaaggacaagatccatggtgagggcggcgccgccgacggcgagaagaagaagaaggagaagaagacgaaggagcatggccatgagcatggccatgacagcagcagcagcagtgacagtgattaa

SEQ ID NO: 258949 - DNA, 413 bp, Glycine max
aaacaacacaaggggatctggcagcagcaaaacacgtacttgagaactaagaagaaggaaatggcttcctcaatgatcttctccccagctgttaccaccgtcaaccgtgcctgtgccggcatggttgctccattcaccggcctcaaatccatggctggcttccccacgaggaagaccaacaatgacattacctccattgctagcaaccgtggaagagtacaatgcatgcaagagtggtcaccaattggcaagaagaagttcgagactctttactacttgccagacctagatgatgcccaactggcaaaggaagtcgaataccttctaaggaaaggatggattccttgcttggaattcgagttggagcactgtttcgtgtaccgtgagcacaacaggtcacctggatactatga

SEQ ID NO: 258950 - DNA, 386 bp, Glycine max
  unsure (1)..(386): unsure at all n locations
ggttctagtgtgtgattgtttgttgttgtaactcgttcttcttcttttgttgttctgtgtttgtgtttgttttttctctcacctgaaaatgtcttgctgcggtggtaaccgtggttgcggaagctcctgcaagtgcggtaactgctgcggaggctgcaagatgtacccagacttgagctacactgagtcaaccaccaccgagaccttggtcatgggagtggcacctgttaaggctcaatttgagggtgctgaaatgggtgtgcccgctgagaacgatggctgcaaatgtggaccaaactgctcctgcaacccctgcacttgcaagtgaggtgttgggagagcaagcttcaagcanagatagccctttattaggaataatgataaac

SEQ ID NO: 258951 - DNA, 413 bp, Glycine max
  unsure (1)..(413): unsure at all n locations
gacaagtgagtttgttgatcgagataactagaaagagcgtgatgaaaatgaaggtccttgttttcttcgttgctacaattttggtagcatggcaatgccatgcgtacgatatgttccctctccgaatgaacacttgctattgtggccgtactccggaagtgaaatgcgcaagttggaagcttgctgtggaagcacagaacatctttggctttgagaccattcctgaagagtgcgttgaagcaacaaaggaatacatccatggcgaacaatatagatcagactccaaaacagttaaccaacaagcttacttttatgccaaagacctctaagtccatcccaaggacacatttgtgttcagtatagatggcaccgnactctctaatattccatactacgaaaaacatggatatggg

SEQ ID NO: 258952 - DNA, 430 bp, Glycine max
ggcacaagtgagtttgttgatcgagataactagagacagtgtgatgaaaatgaaggtccttgttttcttcgttgctacaattttggtagcatggcaatgccatgcgtacgatatgttccctctccgaatgaacactggctatggtgcccgtactccggaggtgaaatgcgcaagttggaggcttgctgtggaagcacacaacatctttggctttgagaccattcctgaagagtgcgttgaagcaacaaaggaatacatccatggcgaacaatatagatcagactccaaaacagttaaccaacaagcttacttttatgccagagacctcgaagtccatcccaaggacacatttgtgttcagtatagatggcaccgtactctctaatattccatactacaaaaaacatggatatggggtggagaaatttaac

SEQ ID NO: 258953 - DNA, 358 bp, Glycine max
tgcggctgttagtcgacatcactaggggggtagagatatacgatgagaatccatgtgtttagttttctatcgatatgcatataagggaataatccaacatgcctttttgtgaatttaaaaactaccattgatcaatgcctcagaagggctgataataaatgaaaaaaatcaatgcattcatgataaaaccctaccacgcttttttattatgaatttttatgacaattgaggaatcacggcgttggcggatcaaattcgtaaactctttagatgatacatcagatgattagaaacatgactatagctttacaattaggccattgagcattaattgcaatcacatttatcttattgatta

SEQ ID NO: 258954 - DNA, 311 bp, Glycine max
gacatgtgagtttgtcgatcgagataactagaaggagtgggatgaaaatgaaggtccttgttttcttcgttgctacaattttggtagcatggcaatgccatgcgtacgatatgttccctctccgaatgaacactgactatggtgcccgtactcctgatgtgaaatgctcaagttggaggcttgctgttgaagcacagaacatctttgtctttgagaccattcctgattagtgcgttgaaacaacaaaggagtacatccatggtgaacactatagatcggactccaaatcagttaaccaacaagcttacttt

SEQ ID NO: 258955 - DNA, 398 bp, Glycine max
  unsure (1)..(398): unsure at all n locations
ggcatcagaaaaagaaaagccttcaatcatatagcattctaagaaatgaagagccctaccattttcattctctttctactttctgccttctacacctcactcctaccttcagccaccgctcaagtcgtggttgacatggaaggtaatgatcttcaaaatggtgggaaatattatgtgttgccagtaatagagtcatcatatggtggaataagagtagccgcaactggaaaagaaagatgccctctcactgttgtacaatctgccgatccgtatgataaggggattgcaacaattatttcaaccccatatcgagttcctgttatccgcgaaggctttcctttgaacattacgttcggtaattttgcagntatactgccttgtgtnccccttcgttctga

SEQ ID NO: 258956 - DNA, 375 bp, Glycine max
gaaggtgcaagagtttgttgtgagctataagctagtttatcgtgaggagaatatgaagttgtttgttttctttgttgctgcagtagttttggtagcatggccatgccatggcgcaggctaccaaaggttccctctccgaatgaaaactggctatggtgagcgttcttcggaggtaaaatgcgcaagttttaggcttgctgtggaagcacgcaacatccgagcctttaaaaccattcctgaagagtgcgttgaaccaacaaaggactacattaatggcgaacaatttagatcagactctaaaacagttaaccaacaagctttcttttatgctagtgaacgcgaagtccatcacaacgacatatttatattccgcat

SEQ ID NO: 258957 - DNA, 318 bp, Glycine max
ggcatcaaaaaaagaaaagccttcaatcatatagcggggtaagaaatgaagagccctaccattatcattctctttctactttctgccttatacacctcactcctaccttcagccaccgctcaagtcgtgggtgacatggaaggtaatgatcttcaaaatggtgggaaatattatgtgctgccagtaatagagtcatcatatggtggaataagagtagccgcaactggaaaagaaagatgccctctcactgttgacaatctgtcgatcctatgataaggggattgcaacattatttcaaccccatataagttcctgtta

SEQ ID NO: 258958 - DNA, 305 bp, Glycine max
gacgggactatttgctatataagtcgggtgggatgggtaggaggaagtaagaaaacacaacacgaatttcattgccgagtgttattttgagtatcagcatcaatggctccaattgcagtgggaaacgtgattccagacggcattttggcttacttggatgaagaaaacaaaccccaaactgtcttcattcactctctcgccaccggcaagaaagtcatcatctttggggttcctggtgactgcactgctacttgcagcttgaagcacgttcctggcttcattgagagagcacatgagctgaaagg

SEQ ID NO: 258959 - DNA, 398 bp, Glycine max
ggcacacgtgagtttgttgatcgagataactagagaacagggtgatgaaaatgaaggtccttgttttcttcgttgctacaattttggtagcatggcaatgccatgcgtacgatatgttccctctccgaatgaacactggctatggtgcccgtactccggaagtgaaatgcgcaagttggaggcttgctgtggaagcacacaacatctttggctttgagaccattcctgaagagtgcgttgaagcaacaaaggaatacatccatggcgaacaatatagatcagactccaaaacagttaaccaacatgcttacttttatgccagagacctcgaagtccatcccaaggacacatttgtgttcagtatagatggcaccgtactctctaatattccatactac

SEQ ID NO: 258960 - DNA, 408 bp, Glycine max
ggcttcgcctcattttctggctaaccaacccaggcactgcttcttctccgcttcctcttcgatcatcgcttcagaatgccgccgaagttcgacccctcccagatcgtcgacgtcttcgtacgcgtcaccggcggtgaggtcggcgcggcgtgttccctcgccccgaagatcggtcccctcggtctctcccccaagaagatcggagaagatatcgccaaggaaaccgccaaggactggaagggcctccgcgtcaccgtcaagctcaccgtgcagaaccgtcaggccaaggtcacggtggtcccatccgccgtcgcgctcgttataaaggccttcaaggagcccgagcgtgaccgcatgaaaacgaagaacatcaagcacaacggcaacatctcgctagacgacgtcatc

SEQ ID NO: 258961 - DNA, 360 bp, Glycine max
agggatctggcagcagaagaacaagtggctgagaactaagaaggagaagcaaatggcttcctcaacgatctcttccccagctgttaccactgtcaaccgtgccggtgccggcatggttgctccattcactggcctcaagtccatggctggcttccccaccaggaagaccaacaatgacattacctccattgctagcaacggtggaagagtgcaatgcatgcaggtgtggccaccagttggcaagaagaagtttgagactctttcctacctgccagaccttgatgatacacaattggcaaaggaagtagaataccttcttaagaagggatggattccttgcttggaattcgagttggagca

SEQ ID NO: 258962 - DNA, 422 bp, Glycine max
  unsure (1)..(422): unsure at all n locations
gggatcgcgcattcacaaataaggttgaagaggtcactgccggaagaagggagcaacaccatctttcattttccggcgatctcttgtttcttccatcatcaccgttttccggcgatccctaatcctcgcaaacagaaatgacgacatcaaggcgccttgcggacaggaaggtggagaagtttgagaagaacatcacaaaaagaggatttgtgccagacactaccactaagaagggaaaagactaccctgttggcccagtgctgctcggtttcttcgtctttgttgtcattggatcatctctcttccagataatcaggacagcaacgagtggaggcatggcttaaatggagctttgttttggatnttgtgtcatcttctctttcttagcctcctcgtagaaaatgctaatacttctctacatg

SEQ ID NO: 258963 - DNA, 427 bp, Glycine max
gtgtgttgatgctgctgaggatgagttcttgaggtggactaccaaggaaggaaagttgactgtggagagagatgttgtgaggactaaaaccgcggatttttcgccaattttgcagtttggacaagaccccgttcagatccttgatgcactgctgccactgtatttgaacagccaggttctgagggcattgcaggagtccttggcgagtgaactcgccgccagaatgagtgccatgagcaatgccacagataatgctattgagttgaagaagaacttgtccattgtgtacaatagggagcgccaggctaagatcactggtgaaattcttgaaattgtggctggtgccaatgccttgcaatagtgcaatttgtacgtattgtttacttattataatgatgggtggtggttgcccttttcattttctaat

SEQ ID NO: 258964 - DNA, 289 bp, Glycine max
  unsure (1)..(289): unsure at all n locations
cccacgcgtccggaggaaccaagaggaagatcagaaagcttaagattgtcaaaattgataaagatcttaatgtcctcatgatcaaaggtgctctccctggtaagccaggcaatcttctaaggataactcctgccaagattgtcgacaagaacattccaaagaattagcacatcttttctgtattgtatttgttgtgccttcctattagccttttagttgcaagtttatgtattgcttctttcaacccattttacattgattgagttatacacagcacattatttctgng

SEQ ID NO: 258965 - DNA, 364 bp, Glycine max
gatccatagctactgaagaaaatggcaaccatctgtgctgctatcacaaccccatcgatctcccgcgcaactcttgtgcaaaagcgggtctcatctcccgttcttggtttgccagcaatgggtaaggtgggaagagtgagttgctccatggaggaaaaaccttattctgtgaaggaaagcagctctagcatgttggggatgggggcatctctgatggcagctgccagcgctgcagccatgtcaggcccagccatggccttggtagatgagagactgagcactgaaggaaccggacttccctttggcctcagcaacaatcttcttgggtggatccctttccgcgttttggtcttatctggactct

SEQ ID NO: 258966 - DNA, 444 bp, Glycine max
gacaccaacaccaaaacatacccactaagatggcttcctttgggtccttgctagtgctgcttcttgtagcccttatcctcatgcctcacgggctcgctacttactacaaaccaattaagaagtcaccagggtacaagcctgcagtgtacaaaccaccagtgtacaaaccaccggtttataagccgaaaccaccggtttacaagccgaaaccaccgctttacaagccaccatataagaagccaccatacaagaaaccaccttatggaaagtaccctgcagtggaggacaacacccatgcctaaagcatgcaatgaggtctattatctacttaataaataagaggaactgctttgcgttttctagcatatgtgatatacaacttcgtagcaatgcatattcttgactcttgcatgcacttcaatgctcgtagcattaatgatgtgg

SEQ ID NO: 258967 - DNA, 449 bp, Glycine max
ccggggcacgacccacgcgaagacccacgcaggcgacaccaccaccaaaacaattttcagtacagatggcatgactacgggcgtgctgggctagtagctagcttctagtagcccttatcctcatgcctcacgggcttgctccatactacataccaagtaaagacatcaccagggtgcagcgcctcagtgtacaaaccaccagtgtgcaaaccacgcggcttatatagacataaccacgcgttttaccaagccgaaaccacctggattacacgccaccatataagaggccaccatacactacaccacctcatggaaagtacccttcagtagaggacagcacccatgcctaaagcaagcgatgaggtctattatctacttaataaatatcaagaactgcttcgcgttttctagcattgtgatttacaacttcttagcagtgcatattcttg

SEQ ID NO: 258968 - DNA, 347 bp, Glycine max
cggtgtttttgggggggtgattaaggcatagcggctggtggtgcaagggttcatatactacatcactttgtaagcacaagacggtgaaacacaaaaatgtgtatgaaacgaaagtgtgggtgacatcatggttaaactccaaggaggtcctcgaattcaagcccatcagtattaatcctatttcggtgacggtctagtctttataaggttacataaataaatggcaccacgctgacagttgtactaaaatttattttttataaataaatcgaacgtagcattaaatatgctatatgtatgtattgtgcggaataaatgcagccacgtactatatataatggcacata

SEQ ID NO: 258969 - DNA, 266 bp, Glycine max
ggtttttgctgagatgattaggtcataggggcgggtggtactacggctcatatccctcatccttatgcctcaaggacttgctacttactacaaaccaattaataaatcaccagtgtacaagcctccagtgtacaaaccaccatcgtacaaaccaccgccttataaatcaaaaccacctcggtgtacgactagactacatcatgttacacaaccaaatgataacacgccttacactagactacactttatttattacactccactcg

SEQ ID NO: 258970 - DNA, 401 bp, Glycine max
  unsure (1)..(401): unsure at all n locations
ggcacaagtgagtttgttgatcgagataactagagacagggggatgaaaatgaaggtccttgttttcttcgttgctacaattttggtagcatggcaatgccatgcgtacgatatgttccctctccgaatgaacactggctatggtgcccgtactccggaggtgaaatgcgcaagttggaggcttgctgtggaagcacacaacatctttggctttgagaccatttctgaagagtgcgttgaagcaacaaaggaatacatccatggggaacaatatagatcagactccaaaacagttaaccaacaagcttacttttatgccagagacctcgaagtccatcccaaggacacattttgtgttagtatanatggcgccgtactctctaaaatttatactacaaaaa

SEQ ID NO: 258971 - DNA, 222 bp, Glycine max
atcatatccatactatttctcatactatcaaaggttcccttttaaaatgaaaactctctaatttcagccttcttaacacgtaaaatgctcaatttttaagcttgctttataagcacacaccatcctatcctttaaaaccattcctaaaaactgcttttaaccaacaaaagactacattaattacgaacaatttacatcatactctaaaacatttaaccaaca

SEQ ID NO: 258972 - DNA, 432 bp, Glycine max
gaaggtgcaagagtttgttgtgagctataggctggtttatcgtgaggagaatatgaagttgcttgttttctttgttgctgcagtagttttggtagcatggccatgccatggcgcacgctaccaaaggttccctctccgaatgaaaactggctatcgtgagcgttcttcggaggtaaaatgcgcacgttttaggcttgctgtggaagcacacaacatccgagcctttaaaaccattcctgaagagtgcgtcgaaccaacaaaggactacattaatggcgaacaatttagatcagactctaaaacagttaaccaacaagctttcttttatgctagtgaacgcgaagtccatcacaacgacatatttatattcggcatagataacaccgtactctctaatatcccatactatgaaaaacatggatatggggtggg

SEQ ID NO: 258973 - DNA, 419 bp, Glycine max
gacggtgcaagagtttcttgtgagctatgcgctggtttatcgtgaggagaatatgaagttgtttgccttctttgatgctgccacagttttggtagcatggccatgccatggcgcaggctaccaaaggttcccttttcgaatgaaaactgtctatggtgagcgttcttaggaggtaaaatgcgcaagttttaggcttgctgtggaagcacacaccatccgagcctttaaaaccattcctgaagagtgcgttgaaccaacataggactacattaatggcgaacaatttacatcagactctataacagttaaccaacaagcctttcttttatgctagtgaacgcgaagtccatcacaacgacatatttatattcggcttagataccaccttactctctaatattccatacttataaaaacat

SEQ ID NO: 258974 - DNA, 331 bp, Glycine max
aagaagaagaagaaggagcatggccatgagcatggccatgacagcagcagcagcagtgacagtgattaaactgctgcatcacctatatatttaaaaggtttatgggaccatagtagcgagggctgtgccttaatttctctctctctctctccctctctctctctctctctctttttcctttttccctatcttgtgatctatttatgagtgagaaaaacaaaagtgagaaattgtgcgtgtatctggttgctaattcgagtgctattagtctgtggtttggttggtttgtaaccccgctacttgggttatgtttgattgtatattatcccaa

SEQ ID NO: 258975 - DNA, 383 bp, Glycine max
tgacacacacatgcccctatcttccatagcgagcgcggtattattcactccctccctaacaagccacaccgtttcttgctccaatggcagcttgggatctcacactaagcatgttggcactcatagttgttgttgtttctcttggctcgtggggtggtgttcaaggtgcgccacatgttccatgctacttcatttatggtgattctatggatgataatgggaacaacaaccagctccaatctttggctagggctgattacttgccttatgggattgacttccctggaggactcttcttgaaggttttccattgtaaaaaccactgttgatgcaattgctgaacttttgggattctatgattacatacctccatatgctgattc

SEQ ID NO: 258976 - DNA, 380 bp, Glycine max
  unsure (1)..(380): unsure at all n locations
gactcataaaatgatttctgcgatttcgtgggtgcccaaaggggtttcgaagtcggaacctgtcgtggctgatcctactgctgaagaggaaatacaagaaatcatcgccagccacactaccaaaagtggagacagtgacaatgaagtcgccaacaacgatgaagttgtggcacaagcattaaacgtagctgatgcatgtggcaaagcctccaccggaagctgtgacgaaataacccttgcgttgaaggaccttgacatggaccgttatgacgacgaagatgaaggacttgaggtgttcacttctggaattggtgatctttattatcccagntacgacatgcatccatatatcagagataaaaacgatgatgattctgatg

SEQ ID NO: 258977 - DNA, 358 bp, Glycine max
gcactacaaatcagttttttacttgaattttcttggccttctctgttctcctagaacttgattacttgaacattccctatgacagatgaggtggttcttctggatttctggccaagtccatttgggatgagggtcaggattgcacttgctgaaaagggtatcgaatatgagtacaaagaagaggacttgaggaacaagatttctcttctcttacaaatgaaccctgttcacaagaagattccggttctcatccacaatggcaaacccatttccgaatccctcattgctgttcagtacattgaggaggtttggaatgacagaaatcccttgttgccttcagacccttaccagagagctc

SEQ ID NO: 258978 - DNA, 167 bp, Glycine max
gacaagtgagtttgttgatcgagggagcgtggaaacagtgtgatgaaaatgaacgtccttgttttcttcgttgctacaattttggtagcatggcaatgccatgcgtacgatatgtcccctctgcgaatgaacactgtctatggcgcccgtactacggaggtgaaatg

SEQ ID NO: 258979 - DNA, 374 bp, Glycine max
gacacaactgaacaagatagataagccttgcacagcctcacaaaaatgaagaacactacctcgttcgctctctttctactttgtgccttcttcacctcatacctaccttcagccaccggtgcttttgtgcttgacagtgatggaaaccctcttgaaaatggtggcacatactatgtgccagcaccaaataactgcggtggaatagaatacactacatcaggaaacgaaacttgccctatcactgttgtgcaacatcacgacccaacctgtaaggggtttccgataacgatttcgtccccggcccgaatccgttacaatctccgaggcctaatgtgaacatagggttcactttcagaccccctccgtgtgccccc

SEQ ID NO: 258980 - DNA, 215 bp, Glycine max
atccgtatgcggtgcacatgtgattttgatgagcgatatgcctagaaacagagtgatgaaattcaacgtcctcgttttcttcgttgctactactgtggtagcatggcacttccatgcgtactatatgttccctctacgaatgaacactgactatggtgcccgtactgcacacgtgaaatgctcaagttggacgctcgctgtggtagcacacatca

SEQ ID NO: 258981 - DNA, 365 bp, Glycine max
  unsure (1)..(365): unsure at all n locations
gtaacagaacccgttaatttgtgtattgaattaagaattgagaggaatcgtgggtatcgtataaaaacactaaaaaactttcaagatggaagttatcctatagatgccacatttatgcctgttcgaaatgtaaatcatagtattcattcttatgtgaatgggaatgaaaaacaagagatactctntctcgaaatatggacaaatggaagtttaactcctaaggaagcgctttatgaagcctcccggaatttgattgatttatttattccctttttacacgcagaagaagataactttaatttagaaaacaatcaacacaaagttactttggccctttttacttttcatgaaatattggcttaggg

SEQ ID NO: 258982 - DNA, 385 bp, Glycine max
  unsure (1)..(385): unsure at all n locations
caaaaaccctaggtagagagctcttcctccctttctcacagcaatggccgccgcagcacgccctctcgtcaccgtgcaggccctcgacggtgacatggcaaccgatgcctccgccaccgttcccatccctgacgtcatgaaggcctctatccgccccgacatcgtcaatttcgtacactcgaacatctccaagaacagccgccagccatacgccgtcagtcgtcgcgctggtcaccagacctncgccgaatcctggggtaccggccgagccgtctcccgtatcccccgtgttcccggcggcggaacccaccgcgccggccaaggagcctttggaaacatgtgccgcggcngacgcatgttcgccccgaccaagatctggcgccgc

SEQ ID NO: 258983 - DNA, 395 bp, Glycine max
cccacgcgtccggctgtgtatcccgttgcattaataggtagttcaagacaccataaatgttggtacagatactgcagcagctcttaaggctcagacggaacaaatgagcagagttgtcaatgagctggattcaatccatttctctataaagaaagcctctaaattggtcaaggaaatcggtaggcaggttgctactgacaagtgtattatggcacttcttttccttattgtcattggagtaattgcaatcattattgtaaagcttgtgcacccagaaaacaaggacattcgcgacattccaggactagctcctccagttcagaaccgaagactgctctggagtcacagttgaagaattataatgaacatggtgatgactgtgatgagcttatgac

SEQ ID NO: 258984 - DNA, 334 bp, Glycine max
gtccggaattcgacgggacgagtcagactcgatacacgctgtcaagagccttcctcccctgtgcctgtgcctacaagaacatggaaaggaaagggctctttaccagaagctgtagaacttgtgtctgatattgagaaattgaagggtagcaatgattcttttgtggaaactggtccaagttcatttgctggtgctagtcatccctcagaacctgttgatactgatcttatgagaacagtttttgtaccaataggtcaaactaaatctgaagctggatgcttaatgaagagcgtgtccttgaacggtactttcttagaagatctttcaattcgtg

SEQ ID NO: 258985 - DNA, 391 bp, Glycine max
  unsure (1)..(391): unsure at all n locations
ggatttggaaaggtttataaaggacgcttagctgatggatctcttgtagcagtaaaaagacttaaagaggaacgcacgcatggtggggagctgcagtttcaaaccgaagtggaaatgatcagcatggctgtacatcgtaatttgcttcggcttcgtggtttttgtatgacacctactgaacggttgcttgtgtatccttacatggctaacggaagtgtagcatcatgtttacgagaacgtcaagaatcccaaccgccacttggctggccagaacggaagcgtattgcattgggatctgcaagggggcttgcttatttgcatgatcattgtgaccctaagattattcaccgtgatgtcanagcagctaatatattggtggacgaggaatttg

SEQ ID NO: 258986 - DNA, 387 bp, Glycine max
ctacattgctggaggtgttgtaactcctggtgacaaaggtcatgctagatcagctatgaagttcattatgtccattctcttaagcaccagtgcagtacttgttcttctcacaatctatgtcttagtcagaactcacatggccagcaaggtgctcatggaaaatgaaacttgggagatgactttgtatcagaagcttgatttctccattgatgacattgttatgaatttgacatcagccaatgtgattggcactggaagctcaggagttgtgtacaaagtcacaattccaaatggtgaaacactggctgttaagaagatgtggtcatcagaagagtctggagcattcaattctgagattcaaacattggggtcaattaggcacaagaa

SEQ ID NO: 258987 - DNA, 365 bp, Glycine max
gctattccttcactaataaaccagccacaaagaacaccctctctcacattctccttcctcctctttctcgctatctgcaccccattggatgctgctcacaccgacttcgcaggttcagcctgcctcaaagtttcccctagccacttcgccggctcggtcaccgaagtcatcgctgccatacgtcaactcgcttcgatcctctcacgcttcggctctcccttggccaacttccgcctcagcaccgccatcgccgactgcctggacttgctcgacctctcctccgacgtcctctcctgggccctctcggcctctcagaaccccaaagggaagcataaccgtacggggaacctgagttcggatttgag

SEQ ID NO: 258988 - DNA, 427 bp, Glycine max
attgagaaacaggcccatgaagcaaatcaggtgacagctgtgacaacaaagactacaaatgttcacggtgaagaacttatagtaaccaccactagtccttatgagcaagctgcttttggttctaagactgactggcgtgtcagagcaatatcagccacaaatttataccttcgcgtgaaccatatatatgtgaactctgaggatataaaggaaacgggatacacctatattatgccaaagaacattttgaaaaagtttatatgcgtagcagatcttcgaacgcaaatttctgggtacatgtatggcataagtcctccagataatcctcaggttaaagaaattcgctgcattgtgatgccaccccaatgggggacacatcaacaagttcatctgccatcagctcttccagagcatgatttcttggatg

SEQ ID NO: 258989 - DNA, 469 bp, Glycine max
  unsure (1)..(469): unsure at all n locations
cgcctgcaggtaccggtccggattcccggggttcatttctacacatccctagctctgtcgttccgtcgttgacgatggcgtttcgggtgcgaagccctgacctccgctctctctttcttctctctctcttgtccatcgcttccgccaatgtcttcttcgaagagcgtttcgatgacgggtggcaaaatcgatgggtttactctgatcggatagcagcagctaccgtcattcctgtacggaaccacaactatgagcaaatggaaacaggtccctcgtatgggtctcttagcatcctcatgctgcattctcattgctctcctactcctcactcccaaaggtgttatgggtgccaccttcacattctttaacaaatgcgactacacagtgtggcctgggattctcgcanatgccggtagcccaccactcgacagcaccggttttgagctccccaaggacacttctcgcgcct

SEQ ID NO: 258990 - DNA, 430 bp, Glycine max
acgaaaacgaacactcatagccgcgaatcgatctgcatgatgctcatgtttcgctctatcgcgtctaaatccaaaaccagcaacactgctcttcttcttcatcgtgctatcgctacatcccaatcccttcacagcaacattaccaacctacaccctcccaatgctaataattcttatcattcattttctcgccgtcatgctttgtcattctctaagccacgcgccaattctagggctccgacttctcagagcttctgcaccgcgtcctccgacagggactcaatcgagtacgacgtcgtcatcgtcggcgcaggtcccgccggcttatcggcggcgatacggctcaagcaaatgtgccgcgaacgaaacgccgatttgtccgtctgtgtcctcgagaaaggtgcctaagtcggtgctcacattctttctg

SEQ ID NO: 258991 - DNA, 329 bp, Glycine max
gcacaacgaaccactctgaagccgctcacgttatccacaacactctcaaccctccttaaaccctaaccaatccaaccatggcttcttcttccaccttcactgcaatgtccgcctgcaagctctcctcctccgccgccatctcctccttcccctcccgccgccgctccaacgccgtcgttctgtcgaggcgcagccgcgccgccagggtctccgccatggccaaggagttgcacttcaacaaagacggcaccgcaattaagaagctccagagcggtgtgaacaagctcgcggatctggttggggtcacgcttggtcccaaaggaagaaat

SEQ ID NO: 258992 - DNA, 400 bp, Glycine max
caaaattctaagcacaatttctctgagttgttttgtgagataatagcacatagcataacaagggaaggagtattaacaaccgcaaacctgaagagaaaaagagcagcagaagaagaaacaccaacgatgggtgtggattactacaagatcttgcaggttgataggagcgccaaagacgatgacttgaagaaggcttataggaaacttgctatgaaatggcaccctgataagaaccccaacaacaagaaagaagctgaagctaagtttaagcaaatttccgaagcatatgaggtacttagtgatcctcaaaagaaagctatctatgatcaatatggggaagagggtctgaagggtcaagttccttcttctgaagccggttgtgctggaactggaactactt

SEQ ID NO: 258993 - DNA, 403 bp, Glycine max
cccacgcgtccgcccacgcgtccgcacagggctgtggatgcagtcatgggtcctcgtaccattcaacatgaaacagttgttacagaggctgctgctgctgcccctgcacccactgcaaatacttttggtggcgatgcatgcagcattcatacaaaggcattccaggattgcctgaacggctatgggaatgacattagcaagtgccagttttacatggatatgcttgcagaatgcagaaagaactctggagccacgttgagcatgtaactgctacatttgcctgttttggagtttgcatcagtgccctgtctcctatggtttgaactgttaatgtggctaggtattgcatttgaataaaataccatttgcccgagatgcatacaaactaatataaagtcatttt

SEQ ID NO: 258994 - DNA, 426 bp, Glycine max
cccacgcgtccgtgcaacgttctactcgcggaagcgccaaatcccaacgataccccaaaccccactcacccttcttctcccatatcctaatccccaaattccctcattcaactttcccctcaccaccttcttccacttcctgcaagctcagctagggtttcctcttctcttaaccgctccatgtcgaagaggaagttcggattcgaaggtttcggcataaaccgccaatccacctacagcttcgagcgaccccaggcccctcagcgactctacatccctccctccgcgcgtcacggccacgaccactacgaagacaccgacatcgacaacatcgactacgacgacaacaacagcaacaacaacaacaacaaggacgacgacgacgattacgggagcaataataacaacggtggcggcaacgacgaa

SEQ ID NO: 258995 - DNA, 420 bp, Glycine max
  unsure (1)..(420): unsure at all n locations
attctctcactctcttactctttcactctacttctctctcctattgcggctagggtttaggtttttctttcaccgtctccgttccttcaatcttcttattctctttcatctctgatggagacgttgcgggtttagttctaaggggtggttctggccttgggtttttggaacgtacggtgtcgttttggggttgggaaaacaaattctgagagatggcaaccacgaacccttttgatttgttgggtgacgacgctgaggacccttctcagctcatcgccgccgagcaactcaaggcggcggctgcggcctcggcggccaccgcggctcccaagaaggcgccggctcagcagaacaagccggctcagctccctaccaagccgncttctccggctcaggctgtgagggatgccagaaacgagc

SEQ ID NO: 258996 - DNA, 424 bp, Glycine max
  unsure (1)..(424): unsure at all n locations
ataaccctagaggttgaaagctccgacaccatcgataacgtcaaggccaagatccaggacaaggagggtatccccccggaccagcaacgtctcatcttcgccggaaagcagctcgaggacggccgcaccctcgccgactacaacatccagaaggaatcaacccttcacctcgtcctccgtctccgtggtggcatgcagatcttcgttaagaccctcaccggcaagactattaccctagaagtcgaaagctccgacaccatcgacaacgtcaaggctaagattcaggacaaggagggaatccccccagaccagcagaggctgatcttcgccgggaagcagctcgaggacggacgcacccttgctgactacaacatccagaaggagtcaactctncactnggtgttgcgtcttcgtggtggtatgc

SEQ ID NO: 258997 - DNA, 446 bp, Glycine max
  unsure (1)..(446): unsure at all n locations
cgggtcggaccagccgtccgagaatttcaattggcccagggaggcctctcaaagggggtattatgttaaggatgccagtgggaatgactntgatggctggtgctggccgggttcgtcatcatatccggatactatgaacccggaaattaggtcctggtgggctgataagttctcttaccagagttatgagggttccacgccttctcttgacatatggaatgacatgtatgaaccttctgtcttcaatggtcatgacgtgacaatgcctagagatgttacacactatggaggtgtggaacatagggagttgcacaatgcctatggatattacttccacatggcgaccgctaatgggctactgaagcctggagaagtgaatgacaggccatttgttttatcaagagcattatttgctggaagtcaaaggtatggagcagattggactg

SEQ ID NO: 258998 - DNA, 305 bp, Glycine max
cccacgcgtccgctcaatcaccccctcgcactcgctcttcccttcctctggtggcgacaatgtcgactcctgctaggaagaggctgatgagagacttcagaaggctgcaccaggaccggctgcaaggatcaatggtgccccccaagataaccacataatgctggggaatgctgtcatatttggtcctgatgatactccatgggatggaggcacgttcaagttgacacttcaatttactgaggactatccaaattaaccaccgactgtacgatttgtgtctcgcatgtttcattcaaatatttatg

SEQ ID NO: 258999 - DNA, 407 bp, Glycine max
  unsure (1)..(407): unsure at all n locations
gagtgatacaatacagagtgcgttgttgctccttcgccacaactccctgccaacatgggtatctccagagattctatgcacaagaggcgtgccactggtggcaagaagaaggcatggaggaagaagagaaagtatgagcttggtcgccagcctgctaacactaagctgtcaagcaacaagacagtcaggaggatccgggttagaggtggaaatgtgaagtggagggcactgagattggatactggaaattactcctggggaagtgaagctgtaactcgcaagactcgtatactagatgtggtntacaatgcctcaaacaacgagcttgtgcgtactcagactcttgtaaaaagtgctattgttcaagttgatgctgctccattcaaacagtggtaccttcagcacta

SEQ ID NO: 259000 - DNA, 368 bp, Glycine max
  unsure (1)..(368): unsure at all n locations
catttatcaactcactcatcaatctcgtttgttctcactaactattacttcatcatgtcgtcgagcacagttggtcaagtcatcaaatgcaaagctgcggtttcatgggaggcagggaagccacttgtgattgaagaagtagaggtggcaccaccacaagctggtgaagtgcgtttgaagatcctctacacctctctttgccacactgatgtttacttctgggaagccaagggccaaactccattgtttcctcgtatatttggtcatgaagctggagggattgtggagagcgtangtgagggtgtgactcatctcaaaccaggggaccatgcccttccagggtttaccggggagtgtggagaatgccc

SEQ ID NO: 259001 - DNA, 376 bp, Glycine max
cccacgcgtccgcttcctactccaaccgcacttctgctccgcaattatcatgggcaaggtcaagatcggaatcaacggatttggaagaattggccgtttggtagccagagtggctctgcagagagacgatgttgaactcgttgccgttaacgaccctttcatcaccaccgattacatgacatacatgtttaaatacgacagtgttcatggacactggaagcatcacgatgtcaccgttaaggacgagaagacccttctcttcggtgacaagccagtcactatttttggacacagaaaccctgaagagatcccatgggggtcaactggagctgacatcattgttgagtccaccggagttttcaccgataaggacaag

SEQ ID NO: 259002 - DNA, 344 bp, Glycine max
aagcaagacagatgatttatcctcctgataggagatcatcaaaacttggagctttacttccctctttgacagaggttgtggccaaagaacacaagaggcttcttgctcgaaaatcaattattgagaaaaggaaagaagaacaagaacgacagcttcttgaaatggaacgggaggaggagtcgaagaggctaagactgctgaaaataactgaagaagcggaacaaagaaggcttgccactgagtttgagcagaggaaaaatcagaggatcctcagggagatagaggagagagaaaatgaagaagcacaagcattactccaggaagctgaaaagcgtattaaaaag

SEQ ID NO: 259003 - DNA, 420 bp, Glycine max
gttacataggttgcataggaaaggacaaatttggagaggagatgaagaagaaatgtacacttgatggtgtaaaggttaactattatgaaatcgacaatacacctactggaacttgtgctgtttgtgtggttggcggtgaaaggtcccttgttgccaacttatcagctgcaaattgctataagtctgagcatttgacgagaccggaaaattgggcattagttgaaaaggccaagtatttctacatttctggctttttcctcactgtatctcctgattccatacaattagttgctgaacatgcagctgcaaataacaagttcttcatgatgaacctttctgccccatttatctgtgagttcttcaaggatgcactgaataaagttctgccatatatggactacgtttttggtaatgagactg

SEQ ID NO: 259004 - DNA, 372 bp, Glycine max
caacaaccctggtctcaattttctccccctctctctctttctctcttgtggtaacatacacacacacacacacacatatctagctattttggtcccattttcactataactctactaaattaacatggacaaccttcaaaaatgccaagcaaactacacagcactcacacctttaacgtttttgatgagggctgctgcatgctatgcaaacagaacctcagtgatacatgaaggaacccgtttcacttgggcacagacttatgagcgttgtcgccgtctcgccttctccctccgtgcccttaacattgctaggaatgatgttgtatcagtgctggcccctaacatcccagcaatgtatgagatgcatttcgc

SEQ ID NO: 259005 - DNA, 396 bp, Glycine max
acttcaacgacatcatccactccatcatcgacatggacgccgatgttatcaccattgagaactctcgctccgacgagaagcttctgtcagtcttccgcgaaggtgtgaagtatggtgctggaattggccctggtgtctatgacatccactccccaagaataccaccaactgaagaaattgctgacagaatcaacaagatgctggcagtgctcgagaagaacatcttgtgggtgaaccctgactgtgggctcaagacccgtaagtacactgaggtgaagccagccctcacaaacatggttgccgcagcaaaactcatccgcaacgaacttgccaagtgaatggtataagaaagtacaatcttccaagtcattaggttctgctttatattataataca

SEQ ID NO: 259006 - DNA, 385 bp, Glycine max
cggacgcgtgggtcctaaaacaaatcgtgtaaaggcaaagtacagacaaagttagttagaaattgaaagggaaagggaaacgaaaatgagtagtagggtttggtgtgtggtgatggtatcagcgttggcgttgatgttacaatggcacgaagcattcagctcctacgctggctccgcaagtgcgatcatcgacccttccaaggtcaaacaagtttcgtggaaaccgagagctttcgtttacgagggttttctgacggaattggaatgcgatcacttgatttccatcgccaaatcggagctcaagagatccgcggtggccgataatttgtccggcgagagcaagttgagcgaagtcagaacgagctccggcatgttcattcccaag

SEQ ID NO: 259007 - DNA, 280 bp, Glycine max
ctacgaccatttcaggaagaaagaagtgcaatggacatcggaacctatggctatcctacaccagcagtgaaaaagattgagtcttactatgatgtgccagagggagtggatattcggggaagatatgatgcagagtttgcaaaaatcctcacaaaagatcctttgaaattcgtggctgactggcaacgtgagttcaggaaccatatcaggtatgcattaaagtgcagaggagaagcaaggaagaagtccattgaaggggctcttccaaagttggatcctg

SEQ ID NO: 259008 - DNA, 408 bp, Glycine max
aaaggcttaaacctgaaggttttcaaggtcataaggagtggttgactgaggttaattacctcggacaactgtaccaccctaatctggttaaattaatcgggtactgcttggagggagagaaccggctattggtgtatgagtttatgcctaaagggagcttagagaaccatctatttagaagaggaccgcaaccactctcttggtcggtgaggatgaaagtggctattggtgctgccagaggactctcctttcttcataatgccaaatcacaagtcatataccgtgattttaaagcttctaacatcctgctggatgctgagtttaattcgaaactctctgactttggtttagctaaagcgggtcctactggtgatagaactcatgtgtctactcaagtcatgggtactc

SEQ ID NO: 259009 - DNA, 399 bp, Glycine max
agaaaatggcgggtggtggaaaggtttcgttcaaagtcacactcacctccgatccaaagttacccttcaaagtgtttagcgttccagaggcggcaccttttactgccgttctcaaattcgccgccgaagaattcaaagtcccgccccagaccagcgctatcatcaccaacgatggtgttggcataaatccccagcagagcgcatgcaatgtcttccttaagcatggttcagaactgcgcctgattccgcgtgatagggtcggtgccttttagatgttacgggtgtctgacttgatattgaccttttttgcaaaatacatgaactgttgtagcttcctaagtagagtaatcaataaataccatggttactgatttcatataaaatacatatgttagtaag

SEQ ID NO: 259010 - DNA, 415 bp, Glycine max
cagtggtgccttatcgctgtggttatcatcttcttcttcctctttcttagatctctgctttctctacgccgcacgccgaaaccatggccggaaaaggagagggtcctgctatcggaatcgatctcggaaccacctactcttgcgtcggtgtgtggcaacatgaccgcgttgaaatcatcgccaacgaccaagggaacagaaccacgccgtcttacgtcggattcactgacaccgagcgtctcatcggtgatgcggccaagaatcaagtcgccatgaaccccatcaacaccgtcttcgatgccaagaggttgattggtcgtagattcagtgattcctctgttcagagtgatatcaaattgtggcctttcaaggtcattcctggtgctgctgacaagccaatgatcgtggttaacta

SEQ ID NO: 259011 - DNA, 420 bp, Glycine max
  unsure (1)..(420): unsure at all n locations
ctaagactgaaaaaaacccaatggatttgaattcctctccttccaacaacacaattgccgtgaatggaacaatccccgtcgcttccacgttcgcaaccgccaccgcgccgtcggataaccctccgccggcggacagctccggcgaccggaaacccatcgccctgtggccggggatgtaccattctccggtgaccaccgccctatgggaagctcgcagcaatattttcgagaggcttctggaccctcccagggacgctcctccgcagagtgaattgctcacgagaaccccctcgcagagcaggaccagcatcttgtacaacttctcctctgatttcgtgctcagagaacagtatagggatccctgggatgaggttcgaattgggaagttgctcgaagatctngatgccctcgctggaacta

SEQ ID NO: 259012 - DNA, 438 bp, Glycine max
  unsure (1)..(438): unsure at all n locations
cacaaacccgtccctcacactctccaaaccctagcggcactacacactagttctatcgctatctccccaagatgtcgagcgccgatcccgagcacagagaagaggaggaggcacccgccgttggcgacgacgaggacaccggagctcacgtcgctccaatcgtcaagctcgaggaggttgctgtcaccaccggcgaggaggacgaagatgcaatcctggatctcaaatcgaagctttaccggttcgacaaggacgggaaccagtggaaggagcgtggcgccggcactgtgaagttcctgaagcataaggcttccggcaaggttaggcttctcatgaggcaatccaagacgctcaagatctgcgctaatcatctcattttgcctacgatgagtgtgcaagagcacgctgggaacgagaaatcctgcgtntggcatgcta

SEQ ID NO: 259013 - DNA, 418 bp, Glycine max
attcggtgatcactgatcagtggtttggtgttgttgatagagaaaatgcattccagccctttgcttcttgaggaacccattaggatggcatccatccttgagccatccaagcctactttttttccggctatgacgaaaattgttggcacacttggtccaaagtcacgatcagttgatataatttcccattgccttgatgcaggaatgtctgtggcaaggtttgacttttcatggggtgatccagaataccatcaagagacattggaaaatttgagagttgctatcaaaagtaccaagaaactctgtgcggttatgctagatacctggggtccagaattacagattgagaattagactgatcacccaatcacccttgaagcagacacattagttgtcttaacttcagatccaaattaag

SEQ ID NO: 259014 - DNA, 430 bp, Glycine max
cctacattcaattacaccacgcttctaaattctgagaatgaatatcgtaagatcgaagcaataaccttttttcctctgccgccactggtttcgatcccacacccacaaccctccatccttcgaatgctcttgcgttttccttaaactgcctcattccgaagccatacacacataacggtttttctaggtgctagcaatgtcgactcctgctaggaagaggctcatgagagatttcaagaggctgcaacaagaccctcctgcaggaatcagtggcgcccctcaggataacaacatcatgctgtggaatgctgtcatatttggtcctgatgatactccatgggatggaggcacgtttaagttgattcttcaatttactgaggattatccaaacaagccaccaactgtacgatttgtctctcgaatgtttcac

SEQ ID NO: 259015 - DNA, 428 bp, Glycine max
cggacgcgtgggcggacgcgtgggctggaacgccctctcctctctcgaggagcttgtgctgcgggataatcaattcaagaacattcctgacgtcagcgtatttaagaagcttctggttttcgatgttgctttcaacgagattagttcgctacacggcttgtccagggtctccgataccctcaaggaactctacgtgtccaaaaacgaagttgccatgattgaggagatcgagcacttccatcagctgcagcttcttgaactcggctccaataaattacgggtgatggagaatttgcagagcctcgagaatttgcaggagctgtggcttggacggaatcgaattaaagttgtgaatctgtgtggtctcaagtgcattaaacagattagcttgcaaagcaatcgtctcacatcgatgatgggatttgatg

SEQ ID NO: 259016 - DNA, 396 bp, Glycine max
ggactattctattggtaggcatcctgagttccgttacaaaacagagtttcagagtcacgaaccagagtttgactatcttaagagtttggaaattgaagagaaaatcaacaaaatcagatggtgccaaatagctaatggtgccctcttccttctttctacaaatgataaaacaatcaaattttggaaggttcaagaaaagaaggtcaagaaaatttctgagatgaatgttgacccttcaaaatcaatggggaatggatctattgctagttcaagcaattcaagtagttctaggccatatcttgcaaatggaggatctccagatagatacaattatataagcaatgacttttcatttccaccaggaggcataccatcactaagattacccatggtagt

SEQ ID NO: 259017 - DNA, 423 bp, Glycine max
cggacgcgtgggcggacgcgtgggcggacgcgtgggcggacgcgtgggcggacgcgtgggcgattctcgccatgccgaaagccaaatccgacgccaaagccgccgatagccggttgaagcgcaagggcgctggtgctggaaggaagcaatcgaagaaagctgctaaggatcctaacaagccaaagagacctccaagcgctttcttcgttttcatgtccgagttcagagagcagtttaagaaggagcatcctaacaacaaatccgtcgctgttgtcggtaaagctggtggtgacaaatggaaatcgctgtctgatgcttttgcgttcatttaatgtttcaggaaaaggcccccttcgttgccacggccgaaaagaagaaacaagagtatgagaaaactattttggcttacaataagaaattgga

SEQ ID NO: 259018 - DNA, 379 bp, Glycine max
cccacgcgtccgcttctaaaccctatggccgacgaagccaaagccaaaggcaacgcagccttctcctccggggactatcctgccgccatccaccacttctccgatgccatcgccctggctccctccaaccatgtcctctattccaaccgatccgccgcatacgcctccctcaaaaactacgcagatgcattagcggatgccaaaaagacagttgaactcaagcccgactggtccaagggttacagccgtctcggtgccgcgcatcttggcctttcccaatacgatgatgctattttggcttacaaaaggggtctcgaaatcgaccctcacaacgagccccttaagtctggtttggcagatgcgcagaaggccttggccg

SEQ ID NO: 259019 - DNA, 423 bp, Glycine max
  unsure (1)..(423): unsure at all n locations
cagattattacagttctccttcaaagcatgaaggatgttcccaatgttgctgagaaggcctgtggtgctctgtattttcttgcccagggttatgaggatgttggaccaacatctccgctaactcccttgtttcaggaaattgttcaatcccttctaactgttacccacagagaggatgctacagaatctcgattgagaactgcggcatatgaaacattgaatgaagtagtaaggtgttcaacagatgaaacagctactttggtggtacaactagtttctgtcatcatgatggagctgcacaaatgtcttgaagcacataatctttcatcggatgagagagaaaagcggagtgaattgataggccttctttgtgggtgcatgcaagtaattattcagaaactagggtctntggattctaccaaa

SEQ ID NO: 259020 - DNA, 382 bp, Glycine max
cccacgcgtccgatgatgcctggttgaatggggaattcattactactgttcaacaacgtggcgctgcaattatcaaagctagaaagctttcaagtgcactatcagctgctagtgctgcttgtgaccatattagagactgggttcttggaactcctcagggcacttgggtatcaatgggagtatattctgatggttcctacaatgttccagctggacttatatattcattccccgtcacttgtgccaatggggaatgggcaatagttcaaggactttccattgatgagttctcaaggaagaagttggacttgactgcagaagagctttctgaggagaaggcattggcttactcatgcctaaattagacaccattgctttttgg

SEQ ID NO: 259021 - DNA, 400 bp, Glycine max
cccacgcgtccggtggggaccttgaacatgctggggcttgcaaagagagtgggcgcgaggttcttgttgacgagtaccagtgaggtttatggagatcctctgcagcaccctcagaaggagacttactggggcaacgtcaacccaattggttagcattccttctcttattatgttctccggtcaccaccggcctttctgggccatgtttagaattagaattgtcagagacacgccttgcacttgctgcagcacactccgtgtgagacatatttttcaaaactcaataagaaacgtggaacggaagtagaggaccacgtagtaagaattccagggtctggccaacgaggaacccgtgatatgctggtccacaaaatgaagggtagagatatttttttggtgg

SEQ ID NO: 259022 - DNA, 425 bp, Glycine max
aactctttattttattttctttctttctttctccgatcgcatagctcgctcgcaaccaccatgccttcccgaagaagaactctcttgaaggtcatcattctcggtgacagtggggtggggaagacatctttgatgaaccagtatccttcggtttctgtctacaaactccgtgttctttacttttttttttttaatttgcgtttcaatttgttttctattgtttagtactgcatgaaaactatgtattttcccctaacatacgcaatttagatatgtgaataagaagtttagtaatcagtacaaggcaaccattggagcggattttttaaccaaagaagtgcaattcgaagataggcttttcaccttacagatttgggatacagctggccaagaaagattccaaagccttggagttgctttctatc

SEQ ID NO: 259023 - DNA, 417 bp, Glycine max
  unsure (1)..(417): unsure at all n locations
atcacttttctactttgagtcttcttgatccttctttttctccttgaactcaaacatggcagatgaggtggttctgctagatttctggccaagtccatttgggatgagggtcaggattgcacttgctgaaaagggtatcaaatatgagtacaaagaagaggacttgaggaacaagagtcctcttctcctccaaatgaacccggttcacaagaagattccggttctcatccacaatggcaaacccatttgtgaatccctcattgctgttcagtacattgaagaggtttggaatgacagaaatcccttgttgccttctgacccttaccagagagctcangctagattctgggctgattatgttgataagaagatatatgatcttggaagggagatttggacatcaaaaggagaagaaaa

SEQ ID NO: 259024 - DNA, 423 bp, Glycine max
cttgctttgttatcgaacatttctttttgatttcaaaaattttccggaaaaaatttgaatctatttttatatgcgaatcaatcctactacttctggtcctgaggtttctgcgcttgaaaaaaaaaatctgggacgtatcgcccaaataattggtccggtactagatgtagcttttcccccaggtaagatgcctaatatttacaacgctctgatagttaagggtcgagatactgttggtcaacaaattaatgtgacttgtgaagtacagcaattattaggaaataatcgaattagagctgtagctatgagtgcgacagaaggtctaatgagaggaatggaagtgattgacacaggagctgccctaagtgttccagtaggtggagcaactctaggacgaattttcaacgtgcttggagagcccat

SEQ ID NO: 259025 - DNA, 356 bp, Glycine max
tgcatttggagcttcacgtttgagggaagcatgcattaatttcttagagctgtgcaaacaaaagaatgaagacaagctatggatagatgagatagcagccatgcaggcggctgctcagcctgaactgccatacttgaggacatctggaatcatacttgctggagaagatgatacaagcagtaaattaaatggcatagttgatgcctcaatttctgagtcaacaccaagtcatgcaagtttggacataggccatgattatagcttgccaacatcgggtcaaacaccatcaacagatggaagagctcaaataccaatgtcctggccaaaccatcttccacagtacatgcacaactttc

SEQ ID NO: 259026 - DNA, 392 bp, Glycine max
cgagattgaatcgtaagcagcggctaccctaatcctctcctcttcctctctactaatttcagctatggccgacgaagctgtggttgttccagatcccacccagatcgatgtcaagctctttaaccgctggagcttcgacgatattgagattactgacatttctctggctgattatatcggagtggcgacatccaagcacgccacgtatgtgcctcacaccgccggcaggtactcggtgaagcggttcaggaaggcgcaatgccccattgttgagaggctgaccaactctctcatgatgcacggtagaaacaatggcaagaaactcttggctgttaagatcatcaaacatgctatggagattattcatttggtgactgaccagaaccccattc

SEQ ID NO: 259027 - DNA, 388 bp, Glycine max
  unsure (1)..(388): unsure at all n locations
cggacgcgtgggttctctctcacactcactttctctctctataactctttctcacccgctagggtttccttttcatcgcatcttgagtttgcaacctcgtcttgtgatttccatggagggtgctgggatggaagagaataatattattaatgatgatgataataataacaagtctgaggcgcatttgacttctgccgctgcttttgtggagggtggaattcaggacgcttgtgatgatgcttgcagtatatgccttgaagctttctgtgatagtgatccttccacggtgacgagctgcaagcatgagtttcatcttcagtgcattctcggatggtgtcaaagaagcttccagtgccncatgtgttggcagcctatcagtctcaaagat

SEQ ID NO: 259028 - DNA, 425 bp, Glycine max
  unsure (1)..(425): unsure at all n locations
agaaaatctccacccaatacatgcctgcagccacctccaccgccgccaccaccaattacaagtgtaggaagaaattctccatccaacacatgcctgccgccgccaccaccaccgccgccaccgccaattccaactccgcctttggcaagattagctaacacccaaaaggcccctaccattgttgaactatttcactccttaaagaataaggatgggaagatagactcaaaaggatcagtgaatcatcagagaccagtagttattagtgcacacagtagcattgttggagaaattcagaaccgttcagctcatcttctagcaataagggcagacattgaaacaaaaggagaattcattaatgaccttattaaaaaagtagtagatgcagccttcacggatatngaagaggtcctaaaagtttgtga

SEQ ID NO: 259029 - DNA, 429 bp, Glycine max
  unsure (1)..(429): unsure at all n locations
aatttccatgcggtactatgttttctttgcaagtactagcacaaacagctagctactatttttgaacttgtcataattagtctctaattctaattagccatacattgaacacaccagcacaccttaaacgtaagtggtatttgttccacacaggtacactatgccttcactctcagaagcctaccgagcccaccccgtgcacgttcaacacaagcaccctgacttaaactccctacaagaactccccgagtcttacacttggacacaccatagccatgatgatcatactcctgcagcttccaacgagagtgtccccgttattgatctcaacgacccaaatgcttcaaagttgatacaccatgcatgcataacttgnggagcgtaccaagtggtgaaccatgccatacccatgagccctcctccaagaca

SEQ ID NO: 259030 - DNA, 418 bp, Glycine max
gagtgaagcagcagagggaggagcggcattaaaaatgcagatcttcgtgaaaaccctaacggggaagaccataaccctcgaggtcgaaagcagcgacaccattgacaatgtcaaggctaagattcaagacaaggaaggcatccctccggatcagcagcgtttgattttcgccggaaagcaacttgaagatggaaggaccttggccgattacaacatccagaaggaatcaacccttcaccttgtcctcaggcttcgtggtggcatcatcgagccttccctcatggctttggctcgcaaatacaaccaggacaagatgatttgccgcaaatgctatgctcgtctgcaccctagggctgtgaactgccgtaagaagaagtgcggtcatagtaaccagttgaggcctaagaagaagatcaag

SEQ ID NO: 259031 - DNA, 406 bp, Glycine max
aatgactatacattcattatattgatgtgtaaatagaggaaaaactcgatggaaaaatggtggtttaattctatgttgtttaataggaagttagaatacaggtgtgaattaagtaaatcaatggatcgtctaggtcctattgcaaataccagtctaagggaagaccctaaaattctaaccgatatagaactgataattcacagggatttggattatttagaaatggaaggttttttttctagcgatctgaatactgtttctaagaatgatgatgatcattacatgtatgagactcaatctagtcttaacaatactattactagtctcattgatagttgcattgagagcttcaatttaagtgaatttcgacaataccatgatttttatttttatagttacatttttt

SEQ ID NO: 259032 - DNA, 412 bp, Glycine max
  unsure (1)..(412): unsure at all n locations
cttgatttaccaaatttctgtgtactagatatgtatagtgttattgatactgataactctaaagtttgaattgatttttgcaaatctctgttcacttctcttcaagcaaaaatccattggcataaatgtcaattataacacgcagaggcatccgttacatgccaagactagatgcagcaaaagtatctgctgctttgctagaaaaaggccaaaatcgtgtcatagatgcttcacttacacttattcgagaaagagcaaagcttaagggagaacttgtgcgtgctttgggaggtgctaaagcaacttcaactcttcttggagttcctttgggacataattcatcgttccttcaagggcctgcatttgcacctnctcgcattagggaggccatttggtgtggtagcaccaactc

SEQ ID NO: 259033 - DNA, 367 bp, Glycine max
agactttgtaattgaggtgctgcaatggcttcaagtcaggaagaggtgactcttttgggagtaattggaagcccatttgcttgcagggtgaagattgcccttaagttgaagggagttgaatacaaatatgtggaagaaaatttggccaacaagagtgatttgcttctcaaatccaacccagttcacaagaaagttccagtttttattcacaatgagaagcccatagcagagtctcttgtgattgttgagtacattgatgagacatggaagaacaaccccatcttgccttctgatccttaccaaagagccttggctcgtttctggtccaaattcattgatgacaagattgtgggtgctgcatggaatg

SEQ ID NO: 259034 - DNA, 389 bp, Glycine max
cggacgcgtgggtctcagtgcaaacaggtacggaaccccacttgcgacggaagcgcgtgtgcattcaacttcacttatggcacttcctcagtggcagctagcctggtccaagacacagtgaccctagccactgatcctgtcccagcctacgcctttgggtgcattcaaaaggtcacagggagctcagtgccaccacaagggctattgggcctgggccgaagcccattatcactcttggcccaaacccaaaagctctaccaatctacattttcttatggcttacccagctttcaaacacttaaactcagtgggtcactgagacttgggcctgtggccaaccccaggagatcaagtttacccccttctaaaaatcctagaagatcatcact

SEQ ID NO: 259035 - DNA, 481 bp, Glycine max
ctgcatgtaccgttccggaattgacggatccactccagcgcgtccgcatggaagcaagaccattggaggaaggtcttgctgaggccattgatgatggcaagattggaccaagggatgaccccaaggttcgttccaagatcttgtctgaagagttcggttgggacaaggatcttgccaagaaaatctggtgctttggccctgagacccttggacccaacatggtggttgatatgtgcaagggagtccagtatttgaatgaaatcaaggattctgtggttgctggattccagtgggcatcaaaagaaggtgctttggctgaagaaaacatgagagccatctgctttgaagtatgtgatgttgtgctgcacgctgatgctatccacagaggaggtggtcaaatcattcctactgccaggagagtcttctatgcttcccagattactgccaaacccaggcttcttgagcctgtctacctggttga

SEQ ID NO: 259036 - DNA, 419 bp, Glycine max
  unsure (1)..(419): unsure at all n locations
cccacgcgtccggttaaatctgctttccattcctgttgcggggaagggatcagatccagtgagaaaaaaactccaaaaaacaggtttttttttgtgatctcttattcattcccagagctaaggaagagcatgctatgcaactaccttttgtaagcactgtctcatcccagaaaaaaaggacgaatctttgttgaatactaagtatctcagtttccttcgggttatattggaaagaagtaaaatttggagagtgaggaatttccagaatgttcaggttatctccccggaggagccaaagatccaaaggcttcaaggtgaagcatgctctacagttatgtgttctgcttggagtttgtatctggctgatttaccaactcanacactctaatgagaagaaatcgtcctatgtagaaagcaca

SEQ ID NO: 259037 - DNA, 414 bp, Glycine max
cccacgcgtccgggcaaatgcctggaaaagagataaggccaccagactcctctccgcaaagctactgttcctactcttctcctccactctcatagtctccttcttcttcgcattccttacctgacgcccctcaaaccccgccaccaccctcaccgccttcaacacccgcctctccttcaatgcaatctcccccttcgactgcaccgcctcccctcaggcccaccccgtcgtcgccaacaccgtcgagggcgtccgctaccccttcctcttctcgctctccgattttggaaccttacccgaccagccccacacgaacatcgtgaggatgctcaagggcaaaccctttcggaaacccgacatctccgttacggttcatgaggttctcgagaaggccaggactgatggtaaggatgg

SEQ ID NO: 259038 - DNA, 398 bp, Glycine max
cttcctcccttggagaaaaagaagagccaccgctgcgacgccgttcgtgcatttttgaggtgccgctgtcatgtttgggcgtggtggaccaaggaggagtgataactccaaatattatgatattctcgggatttccaaaaatgccagtgaagatgaaatcaagaaggcctatagaaaggcggctatgaagaaccatccagataagggaggagatcctgaaaagtttaaggagttaggtcaagcatatgaagttttaagtgatcctgagaagaaagaactgtatgaccagtatggtgaagatgcccttaaagaagggatggggggaggaggctcgtttcataatccatttgatatatttgaatcattttttggaggagcaagctttggtggtggtggta

SEQ ID NO: 259039 - DNA, 424 bp, Glycine max
cgttatccttctttttttctccttgaactcgaatattcactatggcagatgaggtggttctgctagatttctggccaagtccatttgggatgagggtcaggattgcacttgctgaaaagggtatcaaatatgagtccaaagaagaggacttgcagaacaagagccctttgctcctcaaaatgaacccggttcacaagaaaatcccggttctcatccacaatggcaaacccatttgtgaatctctcgttgctgttcagtacattgaggaggtctggaatgacagaaatcccttgttgccttctgacccttaccagagagctcaggctagattctgggctgactttgttgacaataagatatttgatcttggaagaaagatttggacatcaaagggagaagaaaaagaagctgccaaaaaggagtt

SEQ ID NO: 259040 - DNA, 438 bp, Glycine max
gcctgcaggtactcggtgcctcgatcccaggcgtgcgctttgtagttcgtagaatagccgatgtgcttgtcttagtgtgtcagtcattcctgtgcctcaagtcaagctttgtagtgagcagatataatggctgttgaaaggtccggaattgccaaagatgttacggaattgattggtaaaaccccattagtatatctaaataaacttgcggatggttgtgttgcccgggttgctgctaaactggagttgatggagccatgctctagtgtgaaggacaggattgggtatagtatgattgctgatgcacaagagaagggacttatcacacctggaaagagtgtcctcattgagccaacaagtggtaatactggcattggattagccttcatggcagcagccaggggttacaagctcataattacaatgcctgcttctatg

SEQ ID NO: 259041 - DNA, 421 bp, Glycine max
cggacgcgtgggcggacgcgtggggtggagttcatggagaaggtctccgcctccgccgagagcgaggagctgaccgtggaggagcgtaacctcctctccgtcgcctacaagaacgtgatcggcgctcgccgcgcctgctggcgcatcatctcctcaatcgagcagaaggaggagagccgcggcaacgaggaccacgtcgccgtcatccgcgactaccgctccaagatcgaggccgagctctccaacatctgcgacggaatcctcaaactcctcgacacgcgcctcgtacactccgccggctccggcgactccaaggtcttctacctcaagatgaacggagactaccacaggtacctcgccgagttcaagaccggcgctgaccgcaaggaggccgccgagagcacgctctccgcctacaaag

SEQ ID NO: 259042 - DNA, 421 bp, Glycine max
gtgctctgctctcatctcattcatattcatttcaatggcaactcaaggtcaagtcattacctgcaaagctgcggtggcctgggaacccaacaagcccttaaccgtccaagacgttcaggttgctccgcctcaggccggcgaggtccgtgtccaaatcctcttcaccgctctctgccacaccgatgcttacacttggggcggcaaggatcccgaaggtctcttcccctgtattctcggccacgaagctgcagggattgaggagagtgttggagaaggtgttactaatgttcagcctggggatcatgtcattccctgttaccaggctgagtgtggggagtgcaagacttgcaaatcggcgaagacaaacctctgtggcaaggttcgttccgccactggagttggggtcatgctcaatgatgga

SEQ ID NO: 259043 - DNA, 419 bp, Glycine max
cgcgtcgctccgcaccagtttcaccgcacgaatatcttgttgtttggagcgatccgagaaaaactctgtaaacatgttggtttaccaggacctccttacaggtgatgagcttctctctgactccttccgttacaaggaaattgagaatggaatgctgtgggaagttgaggggaagtgggttgttaaaggagcagttgatgtagacattggtgcaaacccttctgctgagggtggaggagaagatgagggagttgatgatgcagctgttaaggttgttgacattgttgacacattcagacttcaggagcaacccgcattcgataagaagcagtttgttaccttcatgaagaggtttatcaagaatttgactcccaagctcgatgcagagcatcaggagttgtttaagatgcacatcgagg

SEQ ID NO: 259044 - DNA, 357 bp, Glycine max
gaagctgttgagcttttttgcgagtccatttggcaaaagggttgaatgggcattgaaactgaagggtgtggagtatgagtacatagaacaagatatcttcaacaagactagtctccttctacagttgaacccggttcacaagaaggttccggttcttgttcatgcccacaaacccatcgctgagtcattcgtcatcgttgaatacgttgatgaaacatggaagcagtatccactgctgcctcaagacccttatcaaagagcacttgctcgactttgggctaatttcgctgagcaaaagtttttagatgcagcatggattggtatgcatagcagcctagatgagcagcaaaacgctgt

SEQ ID NO: 259045 - DNA, 363 bp, Glycine max
tcggtgcctggactccacggcgtgcgctaagatttctgtttacactcaggactacatactttatttcctctccgtattctcacattttcacaacatggacgaggatttcgacatggcggcggcggagcccatgggcgaggacttcgacttcgccggcagcggcagcaaccccgtcctgaaggtcggcgaggagaaggagattgggaatgagggtttgaagaagaagctcctgaaagaaggtgaaggatgcgacacccttgaagctggtgacgaagtccatggtcactatactgagacgtatcttgatggcacgaatttcgactgtagcacagattggggagctcctggcatcatcgcgcttgt

SEQ ID NO: 259046 - DNA, 416 bp, Glycine max
ggcacctttcgttcactaccgattccatctcactcacacacttctccccaaaaccgagaaccctagctctctttcgcgctcgttctctcgctcgctgcaaccatgaattgctccatctccggcgaagttccggatgatcccgtcgtgtcccggaactccggtctcctcttcgagaagcgtttgattgagcgacacatctcggattatgggaagtgtccaattactggagaaccacttactatggatgacattgtaccaatcaagacaggcaagatagtgaaacccatacctgttcaggcagctagcatccctggcatgcttggaatgttccaaaatgaatgggatggattgatgctatctaattttgcattggagcaacaattgcacacagcaagacaggagctgagtcatgctct

SEQ ID NO: 259047 - DNA, 407 bp, Glycine max
tgcggaactcgctggctcgaacccacgcgtccgcaggaagcccaccaagattcactctcgctcacgtgcccgccgaatgaaggaagccaagaggaaaggacgtcactctggatatggtaagcgtaagggtacaagggaggcaaggcttcccactaaaatcctttggatgaagagaatgcgtgtgcttagacgcttgcttcgcaaatacagggaatctaagaagattgacaagcacatgtatcatgacatgtacatgaaggtcaagggtaacgttttcaagaacaaaagagttttaatggagagcattcataagtccaaagccgagaaggcaagagagaagaccttgtccgatcaatttgaggccaaacgtgccaagaacaaagccagcagagaaagaaaaattgctc

SEQ ID NO: 259048 - DNA, 404 bp, Glycine max
gtactcacattgtatcactctcactctcatgacactttcatatcagccacgatttcaggtacatcgggttctacgctccatggtgtggccactgtaagaagcttgctcccgagtatgagaaagctgcttctatcttgagtagtcatgatcctccggttgttttggctaaaattgatgccaatgaggagaagaacaaagaccttgcatctcaatatgatgttaggggatacccaacaattaagattctgagaaatgggggaaagaatgttcaggaatacaaaggtccccgtgaagcagatggcatcgttgactatttgaagaaacaaagtggtcctgcttcaactgaaattaaatctgctgatgaagctactgctttcattggtgaaaatatagttgctattgtt

SEQ ID NO: 259049 - DNA, 402 bp, Glycine max
gtgaagaagcctaacagcagcaaagagcgttagagctgatcgcttgagataaggtcaatttgcagttgcacgcttcccaattcgcacacccatatcacatcacatctttctccacacgcaacgcaacctttttataatcaatcatcctcactcgcatttgaagacgcagcaatctttcccgtgaaaagggaccatggaggcaaattcaggtgccagcgaccgaatttcgagaatcgccggccacctccgcccccagagagaggatgatgtttgtttgaagcgtagcgattgccgtgcaaaaggtggggtctccggattcaaggtggccatattgggtgccgcaggaggcatagggcaacctctggcgatgttgatgaagatgaatccactcgtttcacttct

SEQ ID NO: 259050 - DNA, 419 bp, Glycine max
ctcgcttgtgctgccttcgtttgcgtttttatcacagaggaattaacatatatatagcaagcatggcagtcacactctacgaccttagctcttcctctgggttgaagaaacttgatgagtaccttctcccacgcagttacatcaccgggtaccaagctacaaaggatgatcttactgtttatgcagctttgccaactgctccatcagatgaatatggaaatgtttccaggtggtacaagcacattgatgctttgttgagaatctctggtgttactggcgagggatctggtgttattgttgagggatctctagttgcagagcctgttgcaactccccctgctgcagacacaaaggctgctgttgctgaggatgacgatgatgatgatgtggatttgttcggtgaagagacagaggaagag

SEQ ID NO: 259051 - DNA, 399 bp, Glycine max
tctttctctctctagaattctcagatttgcggggcgagatgatgcagcagccaggacccggcatggcacctcccaccatgggccagcagccgccgcaacagtaccagcagcctccgccgcagcagcagcaaccctacgtcatgatgccgccgcaggcccaggccccgcaggccatgtgggccccctccgcccagcctccgcctcagcagcagcccgccagcgccgacgaggtccgaaccctctggatcggggatctgcagtactggatggacgagaactatctctatacctgctttgctcacaccggcgaggttacatcggttaaagtaattcgaaacaagcaaactagtcaatctgaaggttatgggtttattgagtttaatagtcgtgctggagctg

SEQ ID NO: 259052 - DNA, 402 bp, Glycine max
aacttgtgtttggagactccgaggttgagtttgaaggtgcattctttgaagggtgtgtttgttatgggttctagttgtggttgtggtgtaactcttgttcttgttttctgcttatggggtgtgttgatctccctctcttctgctgctaggctcagtgcttcaaggcagaatcttgaggttactaagcatttgaatcgcctgtacaagcctactgttaagaccattcagagtccagatggggatacaataaactgtgtacctgtttcgaagcagcctgcatttgaccatcctttcctcaaagatcacaagattcagaccagacctactttccaccctgattggctttttgaagagaacaagttatctgaaaagcctaaagcaaaagcccatacccccatcact

SEQ ID NO: 259053 - DNA, 398 bp, Glycine max
ggaaattttgagggaagggagcagaataagtcttttacattttgacgactcatgttctgcttggtctgtattgcaaatataaaattacctaaaaaattatgttaatttatctgctgtattgtctttaatgattagtataaattgatataggttgtatattttggtcccttttacattttctgatctttgtatttccttgtgtagtttacaatgcaagaaggatctgtggagggtattgcatggcgggcaagctcgctcacctttgagaatgaaatatatccactcaatgagtcgtgggttgtgtctggactgggtcatgattataaaactgatactcagcccattaagacagcttcggtgctacactacgatgggaaaatgaaaccttggcttgatct

SEQ ID NO: 259054 - DNA, 427 bp, Glycine max
actggttctgaggatggcacagtacgcatatggcactccacaacttataggcttgagaacacattaaactatggtcttgaaagagtctgggctattggatacttgaagagttctcgtcgggttgtgattggctatgatgaaggaacaattatggtcaaacttggtcgagaagttcctgtggctagcatggacaacagcgggaaaattatttggtctaagcataatgaaattcagactgtcaatataaaaagtgtaggagcagatgtagaggttgctgacggagaaaggttacctttagctgttaaggagttgggtacctgcgatctctaccctcaaaatttaaagcacaatccaaatgggaggtttgttgttgtgtgtggagatggtgagtacattatatacactgcattggcatggagaaataggt

SEQ ID NO: 259055 - DNA, 420 bp, Glycine max
cccacgcgtccgcggacgcgtggggcaaaacgaaaacgaaatgactgaaaacccaggaaaaactctgaagaaaagttcgttgctttctgcttcactgcgaagatgaacggtggtccatctggtttcacaaatgctcccgtcacaagggccttcatcatcgcttcggcgcttttcacaatctcctctgggatccaaggccgtgtcggcactctggggttgtcgtatcaggatatctttggaaagatacgcctttggaagttgatcatgtccatatattccttctcgtcaacaccagagttgatgtttggactgtatctgctatattacttcagggtctttgagcgacagataggttccaataaatactcagtctttatcgtgttctccatattaacttcactactgcttgaggtccttgct

SEQ ID NO: 259056 - DNA, 415 bp, Glycine max
attaccatatatagtcacattttctttacactttgtgaggtctaaaatgttgtccgtttttcacaaggggtttgctcacccacctgaagagcttaaaagccctgcatctaacagtggctccaacaagcctaagattcctgaggaaactctaagagaatttctttctcatcatccccataacactttttctctgagttttggtcactctgctgttctagcttatactcgtcctgatccaccttcctttgttcatcaaaggttgttttgtgggattgatgacatatactgtatctttttggggagcttgaacaatttgtgctcactcaacaagcagtatggtttggcaaagggcaccaacgaagccatgtttgtgattgaagcttacaagacactccgtgaccgtggtccataccct

SEQ ID NO: 259057 - DNA, 461 bp, Glycine max
accggtccggaattgccgggtcgtacccacgcgtgacgcacacgcgtgggggaatattaaactgacggaatcttagtacttcaaagtgtggtcataatagattctctgcctagtggatctggtattgatacacggaagccactagtgctgcaacttcacaagacggaagatgggacacaggagtatgctgagtttcttcacataccaagaacgagattcaccgactttgctgctgcgaggaaggaaatatcggatgaaacagatcgtataactgggaagacaaagcagatttctaatattccaattcacctcagcatttattctccaaatgttgtgaacttaaccctcatagatcttcctgggttaacaaaggttgcagtagagggacaacaggagagtattgttcaagatattgaaaatatggtccgttcttatgttgagaagccaaactgcattatctt

SEQ ID NO: 259058 - DNA, 433 bp, Glycine max
  unsure (1)..(433): unsure at all n locations
gaagctttgagagagagagagggaggagggagagtgttgacgctccatcaagatgggtatttctagggattccatgcacaagaggcgtgccactggtggcaagaagaaggcatggagaaagaagagaaagtatgagcttgggcgtcaggccgcaaacaccaagttatcaagcaacaaaactatccggaggattcgtgttcgaggtggcaatgttaaatggagggcattgaggttggataccggcaattactcatggggtagtgaagcagttactcgcaagactcgtattctagatgttgtttacaatgcctcaaacaatgagcttgtgcgaactcagaccctggtcaagaatgctattgntcaggttgatgctgctcctttcaagcagtggtaccttcagcactatggtgttgaaaattggtagaaaaaagaa

SEQ ID NO: 259059 - DNA, 420 bp, Glycine max
cttcccgatccctaaggtaagtgagtaatcggtggttgagaatggtggagaaggcgaagggtaggaaggaggaggtggttaccagagagtacaccattaacctccacaagcgcctccatggctgcacatttaagaagaaagctcctaaagctattaaggagataaggaaatttgcccaaaaggccatggggaccaatgatgtgagggtggatgtgaagttgaacaagtctgtctggagccagggaatcaggagtgttccaaggaggattagggtaagaattgctcgcaagaggaatgacgatgaacatgccaaggaagagctatactctcttgtcaccgttgttgagattcctaacgatgagctcaaagggttaggcaccaaggttattgatgatgaggattgatttgtatttggttgaa

SEQ ID NO: 259060 - DNA, 414 bp, Glycine max
aaccaatttaggttctcttaaaacaaaggcccctcaaaccactttccccacactcttttagtgtgtcgtattttttcctctctttctccacaattaggtcttggaccgacccttttgtgtaagtgcaatggccatggctaagcttgtatgtgttctgcttctggcattccttggcatttccatgatcacaactcaagttatggcaacagattctgcctatcacttggatggaaggagttatggacctgggagtctaaagacctcacagtgcccttctgaatgcacaagaagatgtagccagacacagtaccacaagccgtgcatgtttttctgccaagaatgctgcaaagtgtgcctttgtgttcctcctggctactatggcaacaagtctgtgtgcccctgctacaacaactg

SEQ ID NO: 259061 - DNA, 429 bp, Glycine max
  unsure (1)..(429): unsure at all n locations
aacgatcatagcagcttctttgtgaaggtgtacatggaagggattccaatcggaaggaagctcaatatactagctcatggaggctactatgagttagtcaggactcttgaacacatgtttgacactaccattctttggggaacagaaatgaatggagtgcaaccagagagatgccatgtgctaacttatgaagatgaagaaggggatttggtcatggttggagatgtcccttgggagatgttcttatcgacggtgaagaggttgaagatcacaagggtagacacattcgggtgttaagtgaagaacatgacactgcctcttccttcaccggtgattntagattttgtcctctagagtgagactctaatgaggtcgctgatcagaaaatttagaaaaatcttagtgaagtatatgcacagataggtgatg

SEQ ID NO: 259062 - DNA, 431 bp, Glycine max
cttaaacattaaaccttagcaaaactcaacaatgctagacatcaaaggctacctcgtactcttcttcctatggttcatatcaaccattctgatacgttccatcttcaagaaaccacagcgtctaagactcccaccgggtcctccaatttcaatacccttgctgggacacgcgccatatctccgttcactgctccaccaagcattgtacaagctatcactgcgctatggacccttgatccacgtcatgatcggttcgaagcacgtggtggtggcgtcgtcggcggagacggccaagcagatcctcaaaacctcggaggaggcattctgcaaccgtcccttaatgatagcgagcgagagcctaacctacggcgcggcggactacttcttcatcccctacggcacatactggcggttcctgaagaagctctgca

SEQ ID NO: 259063 - DNA, 419 bp, Glycine max
gaacaattactttagtgtgttctcttgtcacataaaagtcatctaagaagaattacaagatcatcatcacaataacatgatgagttcaggaattagagcatggagtgtggcagcaagtgttggaattgtggaggccttgaaagaccaaggtatatgcaggtggaatcatgccttaagatcagctcaacaccatctcaaaaaccatgttggctcattctctcaggctaacaagctttcttcttctgctatgatctgcacaacactaaaacatgacaaggcaaatcaatcagaagagtctttgagaactgtcatgtacttaagctgctggggtcccaactagatatcataagcccaacaacaaaatattcttttatcttttcaattctaggaatcaagcaagcttaattagtctcaaatga

SEQ ID NO: 259064 - DNA, 401 bp, Glycine max
  unsure (1)..(401): unsure at all n locations
gcttgttcttggagagtgggaagatcgcatgcagagagggcttttccgctatgacgttacagcctgtgaaaccaaggtgattcctggggagtatggtttcattgctcagctgaatgagggtcgccacctcaagaagagaccaactgagtttcgtgttgataaggtcctccagccctttgatgaaaacaagtttaacttcactaaagttgggcaagaagaggtcctgtttcagcttgaggctagcaatgatggggaggctcaattctttccaaatgcacctattgatgttgagaattctcctagttttgttgccatcaatgtgagtcctattgaatatgggcatgtgctgctgattccacggatttttaagtgtttacctcanaggattgaccatgcaagct

SEQ ID NO: 259065 - DNA, 429 bp, Glycine max
  unsure (1)..(429): unsure at all n locations
cccacgcgtccgcggacgcgtgggttataacacaacacaacccatggccaccacctgcgcattcctcctccttcccctcctcctgctgctccacctcgccatcgccgctcacggcatcggcatcaactacggcacgctcggcgacaaccttccaccgcccgcggcggtggcgaacttcctgaagacgaagacgaccatcgaccgcgtgaagatctacgacgtgaacccggacatcctgcgggccttcgccggcagcggcatctccgtgacggtgaccgcccccaacggcgacatcgccgccttaaccaaaatcgactcggcgaggcagtgggtggcgacgcacatcaaaccctntcaccctcagaccaaaattaattacatcctcgtcggcagcgaggttctccactggggcgacaccaacatgatccg

SEQ ID NO: 259066 - DNA, 459 bp, Glycine max
  unsure (1)..(459): unsure at all n locations
accggtccggaattcccggtccgacccacccgtccgccaacccgtccgggggcactgactcacacccacattagtcgggggcagcttcaaagtacctccacattgtctcctactcttactgttctcttctcttctcatcatttttattttttccaatcaaaccaaacaaaacataagcaccgctcttttctctccgaaatccccatctcccttcacttctgagctctggacgagatcccagatctcaccatctttcacgcactcttccatcagattcaccctttcgtttaacgcaaactcataacttgaaggttaatggctgctccaccggcaagggctcgtgccgattacgattatctcataaagcttctcttgatcggtgacagcggtgttgggaaaagttgcctncttctgcgtttctccgatggttctttcaccactagtttcatcacaactata

SEQ ID NO: 259067 - DNA, 414 bp, Glycine max
aagctatagatttaattgatgaagcaggttctcgagtccggcttcaacatgcccagttacctgaagaagcaagagagcttgacaaggaggtcaggcagattgtgaaggagaaagaagaatttgttcgcaatcaagactttgaaaaggctggagagctaagagacagagaaatggatcttaaggcccagatatctgcacttatagaaaaaggcaaggagatgagtaaggcagaaagcgaggcaggagatgaaggtcccatggtgactgaagttgacatacaacatattgtctcctcctggactggtattcctgtggagaaagtctcaactgatgaatctgatcgtctcctcaagatggaagagactttacacaagcgagtcataggtcaggatgaagcagtgaaagccataagca

SEQ ID NO: 259068 - DNA, 429 bp, Glycine max
cggacgcgtgggttgcgatcgaagagagatgggggacggaagtgggaaccggtggagcagggcggagtgggtgcagcagtacgatctcttaggcaaaatcggagaaggcacttacggcctcgtcttcctggcccgaaccaaaggcactccctccaaatccatcgccatcaaaaagttcaagcaatccaaggacggcgacggcgtctcccccaccgccatccgcgaaatcatgctgctcagggagattacgcacgagaacgtcgtcaagctcgtcaatgtccacatcaaccacgccgacatgtcgctctacctcgcctttgattacgccgagcacgatctctatgcatcacagggataaactcaaccattccattaaccaatacactgttaagtctttgctctggcagttgctcaatggactaagctatc

SEQ ID NO: 259069 - DNA, 337 bp, Glycine max
gaaaaaagactgagagcaattgcatcaacaacaaattgaaaggatgtcgatcttcgagtacaacggaagcgccgtggtggctatggtcggcaagaactgcttcgccattgccagcgaccgaaggctcggcgttcagctccaaaccatagccacggatttccaacgcatttccaagattcacgacaagctcttcatcgctctctctggcctcgccaccgatgctcaaacattgtatcagcgtcttggtttccggcacaaactgtatcagcttcgtgaagagagggatatgaaaccagagacctttgccagcttagtctctgctctgctttatgagaaa

SEQ ID NO: 259070 - DNA, 427 bp, Glycine max
tccgcggccccttggggttaaaacggagttctaaatttccggcgagttttcctctctcgaatctgcgacaccgacgaatctcgctcaccggaatttcgcattcagaaaatggctctaggtggaacagctcccccaagaggaagtgcagcggctactgcaagcatgaggagaaggagaacaaccggtggtgcggcctctggaggagcagctggaactatgctccaattttacacagatgatgcccctggactcaagatctccccaaatgctgatcttgtaatgagcattggcttcatagcatttgttgccatccttcatgtgatgggcaagctgtactttgtgcgtagggaggcttagagaatagatcaagatgttaggtccaattttttggattttcaatacacctctgttatgaaatttagatttt

SEQ ID NO: 259071 - DNA, 429 bp, Glycine max
gcttccttaagctccttagtgctgctccttgcagctctaattctatcccctcaagttcttgcaaactatgagaatcccccagtgtacaagcctcccactgagaaaccaccagtttataagcccccagttgagaagcctgctgtttacaaacctccagttgaaaaccccccaatttataagcctccagtagagaagccaccagtgtacaagcccccagttgagaaacccccagtttataagcccccagttgagaaaccaccagtgtacaagcccccagttgaaaaaccaccagtgtacaagcccccagttgaaaaacccccagtgtacaagcccccagttgaaaaaccaccagtgtacaagcccccagttgagaagcccccagtttacaagcccccagttgagaagccaccagtttacaagcccccagtt

SEQ ID NO: 259072 - DNA, 417 bp, Glycine max
cccacgcgtccgaaaaaaactccaagttatataaaatattaaataaaaactacaagcttagacatcgctcctctctctctaaaaatctccggcggttcttcagttgaaccttggagatctcctctctctctctcccattttcctttccatttcggatctgataggaatagacttcgtcagtgttgaaatcacgagaaattgatggctgctccaccggcaggagctcgtgcggataacgattatctcataaaactcctctggattggcgatagtggtgttggaaggagttgccttcttctacgattctctgatggttctttcacaactagtttcatcacaaccataggcatggattttaagataggaaccattgagcaggatggaaaacggatcaagctccaaatttgggatactgca

SEQ ID NO: 259073 - DNA, 420 bp, Glycine max
aaatcttaaaaatattcagtgaagatcaacctcaatggcatctcttggcgtgcgaccagttcttccccctccattaacttccatctccgacccacctcctcttttcgatggcaccaccaggttgtacatcagttattcttgcccctatgcacaacgtgtgtggatcgctaggaactacaaggggctacaagataagatcaatttggtccctattaaccttcaagacaggccagcttggtataaggagaaagtctaccctgaaaataaggtgccatccttggagcacaatggcaaggtgttgggagaaagtcttgatttgatcaaatatgtagatgcaaactttgaagggacacctttgtttcccagtgatcctgccaagaaagagttcggtgagcaattgatatcccatgttgatacatt

SEQ ID NO: 259074 - DNA, 416 bp, Glycine max
cagccatggatatgtcgctcgacgacataatcaagaacaacaaaaagtctggatccggaagttcacgtggccggacccgaccctccggatccggacctactcgccggctccccaaccgtgccgccaaccgcgccgcaccttatgcccccgctaaggcgccggaggcaacgtggcagcacgatttatatgcagatcagcatgtggctgcggcggggtaccctgctcaaggtggtcgtgcggcttccatagaaactgggaccaagctttacatttcaaacttggattatggtgtttccaatgatgatattaaggaattgtttgctgaagtgggtgacttgaaacggcatgcggttcattatgacaggaatggcagatcaaagggtacagcagaagtagtattttcacgacgagctgat

SEQ ID NO: 259075 - DNA, 427 bp, Glycine max
caagccaagtgaaagtgagaaaaattaaaaatcaaagagcataatgtcagggatcattcacaagattggggacacccttcatgtgggagggcacaagaaggaggaggagcataagggtgagcaccatgctggagaatacaaaggggagcaccatggtgaacacagtagtgagtacaaaggagagcatcatggtgaacacaaagctggagagtaccatggtgagcacaagccagagcacaaagaggggttcctagacaaagtcaaggacaagatccatggtgagggcggcgccgtcgagggcgagaagaagaagaaggagaagaagaagaaggagcatggccatgagcatggccatgacagcagcagcagcagtgacagtgattaaactgctgcatcacctatatatttaaaaggtttatgggaccat

SEQ ID NO: 259076 - DNA, 415 bp, Glycine max
gaagcggcgcaaaatgacaacaacgacgaggaaaaaccacaggattccgacgatatcccatcttctggctctgaagaaaaacccgaatttgtgtatgtggaacttctggaaattcgtaaggatgtccaatgtccaatttgccttggtattattaagaagacaagaaccgttatggaatgcttgcaccgtttttgcagggaatgcattgacaaatcaatgcgactagggaacaatgaatgccctgcttgtcgcacacattgcgccagtcgtcgttccttgagagacgatccaaattatgatgccctaatttctgctttatatccagatattgagaagtacgaagaagaggagcttgaatttcgtgaagaggagaagaaccgcaataagcagattcaagcttcaatagcaaaagtag

SEQ ID NO: 259077 - DNA, 252 bp, Glycine max
gtagaacccttccacggtggtgactgcgcgatgggtgcctacaagtatgtttcagagctatggcgcaagaagcagtctgatgtcatgcgcttcttgcagcgggtgaggtgctgggagtataggcagcaaccttccattgttcgcttgacaaggtcgacccgccctgacaaggctcgtcgcttgggcttcaaggctaagcagggctatgtgatataccgtgttcgtgttaggaggggtggccgaaagagggcc

SEQ ID NO: 259078 - DNA, 403 bp, Glycine max
cccacgcgtccggcttcttcgagtttcacagccaagtcgtaaaagggtttcaagggatggaaaacatgcagagcttctggcaattgggtgatgaactccgtgggcactcaaaagcatcggaggatcacaagtggttaatggttgcctcgaaactggccgaacagacaagattgaagggggagcgtgtgaacaaccttgatctttcaaagggacccattgaaacaaggtcaagggataaatttgggttccaggaagagaacaaatttgattctcttaacttgagcatgttgaacctggactctaaatttactgagaatgtgagcaaaagctcacttcgaaatggtgtttatggtatgaatgcaatgtatcagaaaaacattgcaaacttggtgagtaatgtgat

SEQ ID NO: 259079 - DNA, 416 bp, Glycine max
cccacgcgtccgcccacgcgtccgcccacgcgtccggcttgtgctgccttcgtttgcgtttttatcacagaggaattaacatatatatagcaagcatggcagtcacactctacgaccttagctcttcctctgggttgaagaaacttgatgagtaccttctcccacgcagttacatcaccgggtaccaagctacaaaggatgatcttactgtttatgcagctttgccaactgctccatcagatgaatatggaaatgtttccaggtggtacaagcacattgatgctttgttgagaatctctggtgttactggcgagggatctggtgttattgttgagggatctctagttgcagagcctgttgcaactccccctgctgcagacacaaaggctgctgttgctgaagatgacgatgatgat

SEQ ID NO: 259080 - DNA, 419 bp, Glycine max
cccacgcgtccgcccacgcgtccgcccacgcgtccgaggaaattgagaatggaatgctgtgggaagttgaggggaagtgggttgttaaaggagcagttgatgtagacattggtgcaaacccttctgctgagggtggaggagaagatgagggagttgatgatgcagctgttaaggttgttgacattgttgacacattcagacttcaggagcaacccgcattcgataagaagcagtttgttaccttcatgaagaggtttatcaagaatttgactcccaagctcgatgcagagcaacaggagttgtttaagaagcacatcgagggagcaactaaatacctgctctctaagattaaagatttccaattttttgttggtgagagcatgggtgatgatgcttgcttggtctttgcctactacaag

SEQ ID NO: 259081 - DNA, 429 bp, Glycine max
ggttacactgaagatgatgtggtctccaccgactttgtgggcgatagcagatcaaggatttttgatgcaaaggctggaattgcattgaataagaactttgtgaagcttgtttcttggtacgacaacgagtggggatacagctcacgtgtcattgacctgcttgtattcgttgccaagaagtctttttaaggtggtgtactgcaaagttgcttgtctacacattatgtgcttgtctagttgcgatttagtgtcttgctcgtgcaaaaaatgagaggtctgaataaatcggtttctggaaccagtggatttaccttgttaggagcattagctctattttggactttgcctcttgtggaggaggatggagtttttggatttttatatatttgctaatgtacttgtcgttattgattgttatagtagatattt

SEQ ID NO: 259082 - DNA, 363 bp, Glycine max
cccacgcgtccgtttcaattttgaacccccttttttgtaatccataaccatagctggtaggatccttggttgagtcgagggatttgattatggataagtatgaggctgtcaaggatttgggagctgggaattttggggtggctaggctcatgaggaacaaggagaccaaggagcttgttgccatgaaatacatcgagcgtggccaaaagattgatgagaatgtggcaagagagattatcaaccacagatcccttcggcaccccaatataattcgcttcaaggaggtggttttgacccccacccatttagccatagtgatggagtatgccgctggaggagagctctttgagaggatatgcaatg

SEQ ID NO: 259083 - DNA, 385 bp, Glycine max
gagagatcctgcacgttcagggaggccaatgcggtaaccaaatcggttccaagttctgggaggtgatatgcgacgagcacggcatcgatcctaccggaaagtacaacgacgaaggcaacagcggcatccaactcgagaggatcaatgtctattacaatgaggcctctggcggaaggtacgttccgagagccgtgcttatggatctcgaacctggaaccatggacagcatcagatctggcccctacggcaagatcttccgccctgacaacttcgtcttcggccagtccggcgccggtaacaattgggccaaaggtcattacaccgaaggcgccgagctgatcgactccgttctcgatgtcgttcgcaaagaagctgaaaactgcga

SEQ ID NO: 259084 - DNA, 352 bp, Glycine max
cccacgcgtccgaaaacatcgtgtgcgcactctctcttctcctaggtttcactcccatcaacaggggcgatggtgcagaggctcacttatcgcaagcgccatagctatgctaccaaatccaaccagcaccgggttgttaagacccctggtgggaagttggtgtaccagaccactaagaagagagcaagtggacctaagtgccctgtcactggcaagaggatccaagggattccacacttaagacctgctgaatacaagaggtctagattgcctaggaaccgcaggaccgtaaaccgagcctatggaggtgttttatccgggggagctggtatagaaaggattattcgcgctt

SEQ ID NO: 259085 - DNA, 453 bp, Glycine max
cccacgcgtccgctgttctgaaaccactcccgcctcgtcgtcaccatgccgcaaggggatgacatagagcgtcacagaagagactatggctaccgtctcgatcacttcgagcggaagcgcaagaaagaggcgcgtcaagttcacaaacgctctgcaattgcccagaaggctctgggtattaagggcaaaatgattgccaagaaaaattatgctgaaaaggcacagatgaagaagactttggctatgcatgaagaatcaacttctaggcgcaagactgatgataatgttcaggatggagctgttcctgcttatctccttgatcgtgataacacgaccagagcaaaggttcttagcaacaccattaagcaaaagaggaaggagaaggcgggaaaatgggatgttcctctacctaaggtacgtccggtggctgaagatgaaatgttcaaagtggtc

SEQ ID NO: 259086 - DNA, 433 bp, Glycine max
gcatttctgtgtgtgaccacattgcttccctctatcgtcttctccctccttcttcaatggtcttagggtttccggtgtccatgcgtagcagctcgcactaatgcgcttttgaaacccgtgttcatctgtatccaacgatttactagaaggaggtcgcaatttctccatcttcacatttcgctagcacgtgaaatcaaaagttatcgacactttcgcgcgacacgaaatattgggaaccaagcaaaatatctatggctgacgaaccattatatccaatagcggtgcttatagatgagttgaaaaatgatgacatccagctgcggttaaactcaattcgtaggctatcaacaattgcacgtgctctttgggaagagcgaacccgtcgagaataattccatttttaagtgaaaataatgatgatgatgacgaagta

SEQ ID NO: 259087 - DNA, 419 bp, Glycine max
gactcgttcttcttcgtcgttatcttcttcttttgttgtttgtgtgtttgttttttctctgacctgaaaatgtcttgctgcggtggtaactgtggttgcggaagcgcctgcaagtgcggcaacggctgcggaggctgcaagatgtacccagacttgagctacaccgagtcaaccaccaccgagaccttggtcatgggagtggcaccagttaaggctcaattcgagagtgctgaaatgggtgttcccgctgagaacgatggctgcaaatgtggagctaactgcacctgcaacccctgcacttgcaagtgaagtgttggagagctaaagcttcaaacagagatggcccttagaaataatgatgaaaactatatgtagtttcaaaacttcaaaaatatgtagtatgtattatgttgcactct

SEQ ID NO: 259088 - DNA, 364 bp, Glycine max
cgactcggttgctatcagcgagtgagagtgagtgagtggttctcttgcagcaacaagggggagtgacaccaaacagactggaaatgggtcgtggggtcagtgctggtggtggacagagttccttggattatctctttggcagtggggtacctgccagcagtgcaaatggtgctcgcactcaaaatgcaagtgctccttcaccaccggttgataagcaaagtccagcaccagcagcagcagcagcacctgcacctgcagcagcagcagcaccagcacctgcaccagcaccagcaccagcaccagctgataagcaaattccagctggaattcctggaagtctcaaaaacaattaccatcgcgctga

SEQ ID NO: 259089 - DNA, 403 bp, Glycine max
cactcttttattattattattattattattattattattattattattattattattttgggtttgactactttcatgatgccagtttcaaccatgtgaagttgttgtgcgtgctgtgtttgttgttgtgtactgttttggacctttataaccaaccatgaatctcagcaacggcaagggatccacttttagttctcctctgaaagccggagattctgtctctgaccagtttccggcgggtctccgtgtgctcgtggtggatgatgactccactcgcctcatgatccttgagaggatgctccgtgcttgtgtctattaagtgactcaatgccagctagctgaggttgcattgtctctctagagagagaacaataacgggtttgatatcgttttaagcgatgtg

SEQ ID NO: 259090 - DNA, 393 bp, Glycine max
gaaaaccctagttcgcttgcagtcacacaagaggccaatcctattcatagctcgagatgggtgaagaagtgaaggtagttgttccagaatcagtgttgaagaagcgcaagagggaggaggaatgggcgttggccaagaagcaagaactcgatgctgccaagaagaagagagccgagagccgcaaactcatctacaacagagctaagcagtacgctaaggagtacgatcaccaggagaaggaattgattcggttgaaacgcgaggccaagctgaaaggtggtttctatgtggatccagaggctaagctgttgtttattattcgcattcgtggtattaatgccatggaccccaaatcaaggaagatcctgcaattggtgcgattgagacagattt

SEQ ID NO: 259091 - DNA, 459 bp, Glycine max
  unsure (1)..(459): unsure at all n locations
cgctctgtttctgtctctgtgtttgcggctgaggattccgaacgagcgaccttggtcgggtctcgcaaagtttaagtcatcatgggtaaggaaaagactcacatcaacattgtcgtcattggacatgtcgactctgggaagtcaactaccactggtcatttgatctacaagcttggaggtattgacaagcgtgtgattgagaggttcgagaaggaggctgctgagatgaacaagaagtcattcaagtatgcctgggtgcttgacaagctcaaggctgagcgcgaaagaggaattaccattgatattgctttgtggaagtttgaaaccaccaagtactactgcacagtcatcgatgcccccggacatcgtgactttatcaagaacatgattactggtacctnccaggctgattgtgctgtccttatcattgactccaccactggtggttttgaagctggt

SEQ ID NO: 259092 - DNA, 272 bp, Glycine max
gaattcccgggtcgacccatcgcgtccgcccacgcgtccgcccacgcgttcgggccgtcctccttgtaccagacggatccctctggcagcttctcggcgtggaaggcgaacgccacctggaggaactcaaattcgattagggagttcctcgagaagaactataaggacacctcttgccaggagactgtcaagtttgctattctcgcattgcttgaagttttggtaagcggaggctagaacattttaattttcttttaatttcttatgagctt

SEQ ID NO: 259093 - DNA, 325 bp, Glycine max
cttgaatatgtgtgcgaggaatatggaggcagagtctagcttgcaaaggcttattacgagtgggttgacaaactctattgtcaagaattttaatggaagtggaatcatcgctagcatgcaccagtgcaacgactttttcttccttggaaccaagcaaattcccatgggaagagttggggatgacatttggttccaagaccccaatggggacccaatgggagtgttctggttacaaagggtgcacatgattcactgtgcctacaacagtttgtggattgggcagattattcagcccgattgggacatgttccaatcggatcatgtg

SEQ ID NO: 259094 - DNA, 434 bp, Glycine max
cccacgcgtccgcagcaatggcggtatataaagtgaagctgattggaccggacggtgaagagaatgaatttgaagcccctgatgacacttacattctggattcggctgaaaatgctggagtggagctaccttactcatgcagagctggtgcctgctctacttgtgctggccaagttgtttcaggctctgtggatcaggcagatcaatcctttcttgatgaccatcaaattgaaaagggttaccttctgacatgtgtctcatacccgaaatcagattgtgtgattcacacccacaaggaggaagatctcgtctaggtggggttgtgtgtcttttgttagtttctctaagcttgaatattgtcacggtagctagacatattgtgaaactttgttggtgttggtacaacttttttgaaccgttctaaatttatgtga

SEQ ID NO: 259095 - DNA, 369 bp, Glycine max
  unsure (1)..(369): unsure at all n locations
gctgcggcacaagcagcagccgcagctgctgctgctgcttccacagcttctgttcaagtccgcatggtgttagatgatggaacatcaaatatactgatgaggtctgttggcacacgcagtgaaccagtcattggtttgcatggaggggcactgcttggtgttgcctatcgaacatctaggagagtcagtcctattgctgctacagctatttcaacaatccagtcgatgcccttatcaggctatggaagcagtggtgtttcttcttttactacttatgatgatggattttcttcacaaagacctnctactgaggcagcaccttaaaactttcagttatacagttgggagacaattcagcctggggggggg

SEQ ID NO: 259096 - DNA, 418 bp, Glycine max
  unsure (1)..(418): unsure at all n locations
ggccgaggagctctatgagaagaccggtgaactccccgaccctaacttcactgagaacggcgagttccagatcgtgcttaccatcatcagagatgggttgaagaccgatcccaccaggtaccgcaagatgaaggagcgtctcgttggggtttctgaggaaaccaccaactggtgttaagaggctatatcagatgcaggcgaatgggactctactcttacctgctattaatgtcaatgactctgttaccaagagcaagtttgacaacttgtacgggtgccgtcactttctccctgatggtctgatgagggctactgatgtgatgattgctggaaaggtggctgttgtggctggatatggtgatgttggcaagggttgtgctgctgcattgaagcangctggtgctcgtgtcatcgtgac

SEQ ID NO: 259097 - DNA, 355 bp, Glycine max
gtgttactacgttagtctatgaacagtcacccccggtagacttaaaatttccaagaccctcaaatcaaactcttctattctctcatcaatcaatcaatccagttccctctcggataggaatgggaatatatctcagcacttcaaatactgaaaagttttctgaagatggtgaaaatgactgtcttagatatggtttatcatccatgcaagggtggcgtgcaacaatggaagatgctcatgcttcatatactgatctggatgagtccacttcattttttggtgtctatgattgccattgatgtaaagttgtttccaaattttttttccaaatttctttatttaccttttgttcaaa

SEQ ID NO: 259098 - DNA, 429 bp, Glycine max
ggacaatatcagtaaagctctacacaaatgtgggtaccaaatgcgtggttttgagactatgtacaatggtcatacagggagacgtctaagtgcaatgattttccttggccctacatattaccaaagactgaagcatatggttgacgacaagatccattctcgtggaaggggtcctgtgcagatcctcactaggcaacctgctgagggacgctcacgagatggaggtctccgatttggagagatggaacgagattgcatgatagctcatggagctgctcacttcttaaaggaaaggttgtttgatcaaagtgatgcatacagggtccatgtatgtgagcgttgtgggttgatagctattgcaaatctcaagaagaattcttttgagtgcaggggatgcaagaacaaaactgacattgttcaagtttacat

SEQ ID NO: 259099 - DNA, 400 bp, Glycine max
tttccgggtcgacccacgcgttcgcccacgcgtccgcttacttaccaggtgatttgaaagagaagaaggaggcgctcggggaggtgctgaatggggaccgtttggttagcgcgccatacaagctggagttccagcgcgacaaggagtcgatttccgtgtgcaataggaagctctccaaacaggacgtatcgcggttcagatccgcggtgaggaaggactactactttcagatgtactacgacgacctttcgatttggggtttcataaggaaggtggacaaggaaaggaaggaccccagtgattataggtactttctggataaacacattcactttgacgtgttctacaacaaggacagggtcttcgagatcaacgtgcgcaccgatcccaaagcgctcgt

SEQ ID NO: 259100 - DNA, 426 bp, Glycine max
aggaaagtaagagtttagagtttgaactctgtttatccaatgcacaaagcgtagatctcggtgttgtgatggaatacaggaaaatcaaagacgaggatgaagttagggatgcgggcgttgaggacgttggaaaatcatttttgctgtcagtcccagataacgatttgacttccgagggagaaaccaaaattgacagccacagggagaaagtaaagtggaagcgcaagtcagttgttacacttgcattgactgttcttactagttcgcaaggcattctaatcgtttggtccaagagagctggcaagtatgagtatagtgtcactactgctaactttatggtggagactttaaaatgtgctatatcccttgtggccttgggaagaatatggaaaaaagacggtgtcaatgatgacaacaggtttgcta

SEQ ID NO: 259101 - DNA, 222 bp, Glycine max
ggacaacatcagtaaacctctacacaaatgtgggtaccaaatgcgtgggtttgcgactgtgtgcaatggtcatacagggagacgtctaagtgcaatgattctccttggccctacatattaccaaagactgaagcatatggttgacgactagatccattcttgtggaaagggtactgtgcagatccttactaggcaacctgctcaaggacgctcaacgaatgg

SEQ ID NO: 259102 - DNA, 458 bp, Glycine max
gaaggaaggtggttccgagaataatgagacaaagcaagcttctgctgacgtgttgtttagttattcaaaatttgcgatggcatgcattggatgtaaggttcgtccgtgtgatttgaggtttcatttgatgaaggagatttcgggtatgccctcttctttaaatagggaatcagaatagaatgcagcatctcctgatgcaatgggtgagtcatccagcacaggaacagcaagatttgacagaacagacagttttcgcgcactatagttgagagtggactgtgaccatgtattttttggttgggtctgtggcatagtaggtgtttgtgtcttgggtaaagcacttttgtcctgcataaatatcatattatgatgttatacatgtaggcagaattatgtttccaattaccatctatgcaatggctcacagattggtatttatgataccacagtcagtcagt

SEQ ID NO: 259103 - DNA, 434 bp, Glycine max
cccacgcgtccgctggctgccatttgcactcccgcggattacaacacgcgccctcttgacgacaattgacagcaacttcatcgacgcgcttcctgtggtgaagtactgttcagagaacaacaagcgtctcattcatttctctacgtgtgaagtctatgggaaaacgattggaagcttcctccccaaagatagtcctcttcgtcaggatcctgcatactacgtacttaaggaggatgagtctccttgtatttttggttcaattgaaaagcagagatggtcctatgcctgtgctaagcagttgattgagaagcttgtttatgctgaaggtgctgaaaatggcttggaattcacaattgtgaagccctttaattggattggaccacgaatggatttcattcccggcattgatggcccaagtgagggtgttccttggg

SEQ ID NO: 259104 - DNA, 438 bp, Glycine max
gcgaaactcttgtattgactcacagtagatagagtgttggtacgaaaaatgtcgaagctgatcttggtgttcctttcgctcattcctcttctctgcacctccttctccccagagagaccctcagatcgacgcgtcctcgttttgctcgatgacttcgccatcaaatcctctcattctctcttcttcaactccctcaaatctcgcggcttcgatctccaattccacctcgcagacgaccccaaaattgcgctccagagatacggccagtacctctacgacgccctaattctcttttcccccaccattgaacgttttggaggatccattgacgcggctgcaattttggattttgttgattcgggtcatgatttgatcgttgctgctgatagcaatgcatctgatttaatcaaggaaatcgccaccgagtgtggagtggac

SEQ ID NO: 259105 - DNA, 374 bp, Glycine max
cttactaagtcttatagtgattgctaccacaaccatgaattgtaggaggttggtttatggagttgtgtggttcaatctgtatgtggcatgcacattcattcaagtttcaagtctggacgcctctaacttcagcaagtgttggttcccagcaatttacaactttggtgactcaaattcagacacaggagctgtttttgcagcattcacaggggtgaagccttccaatggcataagcttctttggaagcctctcaggaagggcctcttatggtcgtctcatcatagattttatgactgaagagtttaagctgccatacctgaatgcatatttggactcggttggatcgaattacaggcatggtgcagactttgcag

SEQ ID NO: 259106 - DNA, 345 bp, Glycine max
  unsure (1)..(345): unsure at all n locations
cccacgcgtccgcagcaatggcggtatataaagtgaagctgattggaccggacggtgaagggaatgaatttgaagcccctgatgacacttacattctggattcggctgaaaatgctggagtggagctaccttactcatgcagagctggtgcctgctctacttgtgctggccaagttgtttcaggctctgtggatcaggcagatcaatcctttcttgatgaccatcaaattgaaaagggttaccttctgacatgtgtctcatacnccaaatcagattgtgtgattcacactcacaaggggggaagatctcgtctaggtgggggttgtgtgtcttttggttagttct

SEQ ID NO: 259107 - DNA, 426 bp, Glycine max
cggtctaaaatcatttcttatattaggaggttccttgatgaccttgatttcttggaggttgaaacaccaatgatgaacatgattgctggtggagctgcagcccgtccatttgtaacacatcacaatgatcttaacatgaggttattcatgaggattgctccagaactttatcttaaggagttggttgttggtggactggatcgtgtgtatgaaattggtaaacaatttatgaatgagggcatatatttgacccataatcctgagtttactacctgtgagttctatatggcttataaggactacaacgacttaatggatataacagagcaaatgttgagtggtatggttaaggaacttaccaaaaggagctataaaatcaagtatcatgctgatgggattgacaaggaacctattgaaattgacttt

SEQ ID NO: 259108 - DNA, 177 bp, Glycine max
gaatgacattgaacttgatgctgtcaacgatcctttcatcaccactgattacatgacatacatgttcaagtacgacaccgttcatgggcagtggaagcattttgatgtgaagctgaaagactctaagacccttctctttcgtgagaagcccgtcaccgtttttggattcatgaaccc

SEQ ID NO: 259109 - DNA, 307 bp, Glycine max
cccacgcgtgcgtttacacgttcgtacactcgttctagttcctggagtttccagcggtggtgactgtaacagccttagtcaagacctatttccttggcggagcaatggacagaggatcgacgattgactggaagttcataaagcacacaggcatacgaatatacttcgaagataaggcggtgccgacactcgtcggtaagttgaatggtccaacttcacagagagttaagtcacaccgttcagttatacagggatatcattcaatgtgcgaacgaaaagctcattacagggtcctagattctgtcaa

SEQ ID NO: 259110 - DNA, 189 bp, Glycine max
  unsure (1)..(189): unsure at all n locations
acacttccgacgatgccgacgtgaggggagagcagtgggttgaagtagtgtcgtgggagccgagagcctntgtctatcacaattttctgacgaaggaggaatgcgagtatctaattgacatagcaaagccaaatatgcataagtcatcagttgttgatagcgaaaccggaaagaagtaagacagcagag

SEQ ID NO: 259111 - DNA, 301 bp, Glycine max
aaatgatacagggtcatctcaaacgagtggcagtcattaccaaagggtgcttgttgttggattggtacagatcacacattctctacacatcttatgaccgctactgggaatttcaattcaaaaaatattctatgacaaggtggatttggtgttgtctacaaaggatgccttgcaaataaaatgttggtggcagtaaagaggctgaaagatcccaattacactggagaagttcagtttcaaacagaaattgagatgaatggcttggctgtgcattggaacctcttgcgtctttatggatttt

SEQ ID NO: 259112 - DNA, 390 bp, Glycine max
tagctagggtttaaaagcagcttgctctccgtagacaatgaatcaaagtcttcttcttcgtctttctattcctcactcaagggttagggatgcgtcggaacagccctgcatactacagtcctccgcggcgaggatacggcggtggtggccgaggaggaggaggaggaggaggaggaggagggtccggcaggaaggggttcggtggaagcaggcgcatggacagcaatgggagcctcttggttcgtaacattcccctcgattgcagacccgaggagcttcgcgtccctttcgagcgatttggacctgttcgtgacgtttacatacccaaggattattactctggagaaccttgaggctttgcctttgtgcagtttgtggatccttatgatg

SEQ ID NO: 259113 - DNA, 457 bp, Glycine max
cccacgcgtccgcatgagcacactttgtatggcggaaaatatgaaggaggtggaagttgaggatggatatgtcttgaaagaagagatccatctcacggtgctaaaaacctctctgttcttcgcgggcgatggcttcagcgtctacgattgcaaaggtcaactcgtgttcagagttgactcttatggacccgacactcgcgacatagacgaactcgttctcatggatcctaacggacgttgcctcctcaccgttcgtcgaaagcggccgagtttgcatcaacggtgggaaggtttcaaaggggagagaatggacggtgataaacccatcttcagcgtgaggagagcgtcgatcataggacggtcgcgtgcgagtttgacggtggagatgtacgataaccccggtgaggaagtccagatcgaggggtgcttctcgcagcgttgctgcacgggtttcaat

SEQ ID NO: 259114 - DNA, 464 bp, Glycine max
ctctgcctgtaagagtgaaaaaaccttctcttttccttctctcaagtctcaagagatttcatcatggctccaaagaaggacaaggctccaccaccttcctccaagcccgccaaatctggcggtggcaagcagaagaagaagaagtggagcaagggaaagcaaaaggagaaggtgaataacatggtgctgtttgatcagggcacctatgataagctcctttctgaagctcccaaattcaagctcatcactccttccattctttctgatcgtttgaggattaatggatcacttgcaaggaaggctataagagaattgatggctaggggttcaatcaggatggtgtctgcccatgcaagccagcaaatttacaccagggcaacaaacacctaggtgtggaactgatcttagcttacggagtattggtaggaatagtaatgaagtattggtcttttgcactttgggaa

SEQ ID NO: 259115 - DNA, 357 bp, Glycine max
tttatttcgaacattgaaatgaaactaaagtagatgtggttatgaaatatgagtgtgatggcgagacacatgagttgttgtgagttaatttaaagtgaggttttgcgcactatccttgttaccgggacaggacgagagtgttacataaagcgttagcctcactcatcactgcgactacaatggagcctgccacatactacatttgcaccgatgaacttcacaagcataacacgcgccacgacgcctggatctccatccactgcaagatctacgacgtctcctcctggatccactgtcactccagcggaccgcttccactactcaccctcgccggcaccgactccaccgacgccttcc

SEQ ID NO: 259116 - DNA, 440 bp, Glycine max
  unsure (1)..(440): unsure at all n locations
cttctcttgcggctagggttttagcgcagcttcttctagatttaaggaagatgggtaaggaaaaggttcacatcagtattgtggttattggccatgttgactctgggaagtccactaccactggccacctgatctacaagcttggaggcattgacaagcgtgttattgagagatttgagaaggaagctgctgagatgaacaagaggtctttcaagtatgcctgggtgcttgataagcttaaggctgagcgtgaaagaggaatcacaattgatattgccttgtggaagtttgaaaccaccaagtactattgcacagtcattgatgcccctggacacagggatttcatcaagaacatgatcactgggacatcccaagctgactgtgctgntcttatcattgattccactactggtggttttgaagctggaatttaaaggatg

SEQ ID NO: 259117 - DNA, 345 bp, Glycine max
  unsure (1)..(345): unsure at all n locations
ggaacaaacaacattagaggggttgtggtgcttctgtgtcctgcaatttccttttgacctggggttggattcatcaaatcatcaaaaatgactgtaggggcaggaatatctggtgcaaatgggaacttgatggtgttggggaacaaagtgctgagccatgtccatgacaaggttcttgttacccctgcatgtggtggtgctttgctcaatggggcattcattggggttcaatcccatcacaagggtagccgcacagtcttcccaattggcaagcttcangggttgcgatttatgtgtgttttccggttcaagatgtggtggatgacgcanagaatgggcacttgt

SEQ ID NO: 259118 - DNA, 377 bp, Glycine max
ggaggctgttctgccaccaaagccttcttcacaattgacagacatggagctggatgaatgggaggaaactacactccatgatgtcaacatggaggaggagactaggaggaagcagcaacaagctcaggaggcatatgatgaggatgatgacatgcctggtggtgcacagagggtacagtgcgcccagcagtaatgactttgtgtggaagctagattcagaattgatgaaaatgatgatatgatgataatactgttgatgttccataactgtagtgtgtggcttaaagataagtagtgtttgatgaaatgattgtgagaaagtgaacagtgtatcacttgcgtttttattattgtcgaaggggtaacttccgttctga

SEQ ID NO: 259119 - DNA, 418 bp, Glycine max
atgggttccctagaagccatgactaaagggagcgatgcaaggtacttgggtgatacagcggagctgaaaattgctcagggggttgttggagctgttaaagataagggctctgtcttgaatttcataccatacaccttgcaagcagtcaggcaagggtttcaggatatcggtgccaactctctacagtctgctcatgaccttctaagatccagggtgttaagactggaggtccggagtggagcagcacaagttgaaggtggaattcatgggctggtttcttatgaaaagaaatacttttgaagtatgaaaccatccaaaaatcataagcggtgctataatcccttgctgcagttcagcataaaagaaagggacacactgttattgggttaatggcaacttgttgctactgtgtctagcg

SEQ ID NO: 259120 - DNA, 378 bp, Glycine max
catgattgttcttcaaggccaagagaaaatcttcctttcagaaaccaaggaaggtggagagattaacaaacagtatacaaacatcaccttcacaccaacacaggcagatcgctttgtcttggcatttcgaaactggctaaggcggcatggcaatggccaaccagaatggtttggcaacagcagcgaccaaccattgccatcaactgttttatcaaaacgtcagatgttggatagatttgaacagcacactctcaagtgttcatcatgtaaagcagcatatgagggattccaaacatggcagaaagtcctaattggtacaacagttgtgttttgtgcaacatcagggatcccatcagatgtccagttgcgtgtactttt

SEQ ID NO: 259121 - DNA, 299 bp, Glycine max
gggatccgcaaagtcaaagtcggaacctccttcgcaatagacgttctggaagcctcgttcgctccctcgaacggtgcgtttcgaaaagacctaagtgcccccgtcatgaaacccatgctaaagttcctcaacagaacaaaatcctttttcttcttagacgtctaccctttcttctcttggtccgctgaccccttgaatataaacctcgattacgctttgtttcagtccaagaatttaacggtaacggatccgggtacgggtctggtttacaccaaccatcttgatcaaatgggggatgc

SEQ ID NO: 259122 - DNA, 329 bp, Glycine max
ccgttcttttctctctgaaattctcatattcatcacttctgagctctggacgagatccctgtctctcccattccagatctcgccatcagattcaccctttcattttaagcaaagtcataacttgaagaaagttcatggctgctccaccggcaagggctcgtgccgattacgattatctcataaagcttctcttgatcggtgacagccgtgttggaaaaaattgcctccttctgggtttctccgatggggctttcaacactaggttcatcacaactataggcattgattttaagataagaaccattgagcttgatggaaaaccgatcaag

SEQ ID NO: 259123 - DNA, 372 bp, Glycine max
cgaaaggcccagccacagagtctccattgcccatcgctctctctattagttcacgcgcggcaattggagattcacgcgccaccatggcctctccatcgagcctccctatatcctcccaatcaagcgcttccgccgccggcgcctcgcagtcccagcctccgatcgcgacgccggcgttccgcgccttcatctcccgcatctcctcgtcgctccgccacgccttcgcgcagcgcccgccgtggacggagctcatcgaccggagctccatgtcccgacccgacaccctcgccgaagcatactctcggatccgtaagaacttcgcctacttccgcgtcaattacctaaccctaatcgtgttggcgctcgcggtct

SEQ ID NO: 259124 - DNA, 347 bp, Glycine max
  unsure (1)..(347): unsure at all n locations
cccacgcgtccgaatttaccagctatacttgttccttttgaaggttagaagtgctacaatgcanacaatggcagctactcaggaagatgtgaagcttttgggtattgtgggaagcccatttgtgtgcagggtccagattgcccttaagttgaagggagttgaatacaaatttttggaagaaaatttgtgcaacaagagtgatttgcttctcaaatacaaccctgttcacaagaaggttccagtgtatgttcacaatgagcaggccataccagagtctcttgtgattgatgaatacattgatgagacatggaagaacaaccccaatcttaccttctgatccttaccaa

SEQ ID NO: 259125 - DNA, 402 bp, Glycine max
cggtccggaattcccgggacgacccaggcagacgccaacacgtccggaagaggaagattgaggatctaactctcgaagaaaaccccgcggagaagctcctggaaccgtccacaaaggagcagctccactctctcgtaacccaggccgtggatatgtttcccgaattcgtcgatagcgagcgccggctcgctgacgaggaccctgcgcacaggaaaatcttcgtccatggccttggctgggacgccactgccgatactctaaccgccgtgttcgggaaatacggcgagatcgaggattgcaaggccgtcaccgacaagggctccgggaaatcaaagggttacgcctttatcctcttcaagcacaggaacgatgctcgcaaggcgctgaaacacccccaaaaga

SEQ ID NO: 259126 - DNA, 442 bp, Glycine max
ctcactcacaaacgcacactgaattcaaaatcatcgaaagagagaggcatggccgagcaaggcttcatcatgatcaagccagatggcgttcaaagaggccttattggcgagattattagcagatttgagaggaagggtttttacttgaaaggggtgaaactcggtactggggaccggccttttgctgagaagcactatgctgatttgtctgcaaagcctttctttagtgggttggtggattacattggctctggccctggtggtgccatgatctgggagggtaagaatgttggtacaactgggcgaaagattatcggagccacaaacccagcttaatctgagcctggaactattcgtggtgactttgctattgacattggaaggaatggtatccatggaagtgattcagttgagaatgctaacaagggaattgcattggggt

SEQ ID NO: 259127 - DNA, 268 bp, Glycine max
aaagagttctctctttcttcaactgatctattccattctccttcaggttttgttcagttgtcgctttcctacactggtgcttcacctgatgttatggcaatttctgcaatgccaaacaaggtggccacagatggtaccgtgcatgactcagatacgtccgagtcactggcccgggatttagacaaaatcgagttcccagatccaaagattgtgaatgaagaccacttgatggtttcagaatacttcggcattcggtgtgaggagactc

SEQ ID NO: 259128 - DNA, 393 bp, Glycine max
tgttaagcaagaagtagatcgtaatgaagacatgattcgaagcgcactccgagctattgcatccttgaatcgcataagtggaggagattgcagtgtcaagttcaagaatcttatgaacgaaatatcaaaatcacaaactctctgggataaatattattcaatccgcaatgaatgattcacatacagtcttaatttttctctctatcatagttctggaatgagtgttcaaatattacttgccgagacatctccgctagttgatgcaaggggtctggaaaactagttaatttcattataacataggagatttagattcaagcaatcggaatactagtggtgatttcttgtataggatgaaagattttgccttttctgtagctacattatctcatt

SEQ ID NO: 259129 - DNA, 286 bp, Glycine max
gcgaaagcgaaataccactacttttaacgtcatgatacttattccgcgaatcggtagcggggcactgcccctctttttggacccaaagtccgcttccgccggtcgatccgggcggaagacattgtcaggtggcgagcttggctggagcggcacatctgattaaagattacgcaagtgtcctacgatgagctcaacgagaactgaaatctcgtgtggaacaaaagggtaaaagctcgttcgattctgatttccagtacgaatacgaacgcgtatagcgtggtctatc

SEQ ID NO: 259130 - DNA, 363 bp, Glycine max
cggaattcccggggttagtggtagtgggcgggggaatatggatggggaactacacataatgttatttccgttcccaggtcaggggcacgggataccaatgagtgatatggcgagagcatttaatggaagaggggtgaggacaaccatagtgaccactccactcaacgtagccactattcgtggaacaataggaaaagagacagagacagatatagaaatcctgacggtgaaattccctagtgcagaggctggtttacctgagggatgcgaaaatacagagtcaatccccttccctgacttggtactgactttcttaaaagcaatcaagatgttggaagcccccttggaacacctactccttta

SEQ ID NO: 259131 - DNA, 254 bp, Glycine max
ctttggcaaaaccgcacctacgatcgcttatagcttcatctcccaaaacagttttgtcaaggaccaaacttccctttccctgaggacttccctgaataccccacaaagtttcagttcataagctaccttgaaagctatgcaaagcacttcaacatttccccacagttcaatgaaacagtgcagtctgcaaagtatgatgagacctttggcctctggagggtcaaaaccatcacgaagatcaagaagttaggaga

SEQ ID NO: 259132 - DNA, 333 bp, Glycine max
cccacgcgtccgctgatctgctgaaacacgccacactcttcttaccatgggccttctcgagcacttgtgggatgacaccgtcgccggtcctcgcccggagaacgggcttggcaagcttcgaaagcaccacaccttcgcttttcgatctggcttcggcaaggaatcagacagcggaagcgtgaaatcgtaccgtgaagatttgccggaagatgccgtgagagtgacgcgaagtatcatgatcgtgaaaccacctggtggttaccagaatccgagccgatccggttcgggtttccccggcgggtctaattcttcggtggcttccttttcgggagc

SEQ ID NO: 259133 - DNA, 444 bp, Glycine max
  unsure (1)..(444): unsure at all n locations
ggcagccatagangnngngngcaacccattttggaaatctggaggagctctaattcagcgggtcatgatcttaacttttgggtcactagctaactcaactccgtacctaggaggggtccttctggtgattgttctagcctggttatcagcagccaagtcgcttgatacacagtttactgccttgcgtcgagaagaagaacttgagaaagagatggagagagcagcaactgttaagataccagtggtggccaaggatgaggatggaaatggttctcttaaaagagttccactgttaaatccaacagctggggactcctcaagtacattgcattgaactcaacttgcaagatttcaagcttaaactacattgaattgcaaggcatgaggatgtagccaaaactcatgagatctgttagcttaaactatttgttgtcggtcattatc

SEQ ID NO: 259134 - DNA, 404 bp, Glycine max
ctgttctcttctgtcattgcttctcctccacacacgcacagagacacacacttttgcagtcacattgagaatggggcgtgttcgcacgaagacggtgaagaaatcctcgcggcaagtgatagagaggtactactcccgcatgacgctggacttccacacgaacaagaaggttctggaagaggtggccatcattccctccaagaggctccgcaacaagatcgcggggttctccacccatctcatgaagcggatccagaagggtcccgtgcgtggaatctccctgaagctgcaggaggaggaacgcgagcgtcgcatggacttcgttcccgatgtcttcggcatcaggaccgaccagatcgaggtcgacaagggagacgcttgacatgctcggcggccttgggatg

SEQ ID NO: 259135 - DNA, 385 bp, Glycine max
gtggttatcatcttcttcttcctctttcttagatctcttctttctctacgccgcacgccgaaaccatggccggaaaaggagagggtcctgctatcggaatcgatctcggaaccacctactcttgcgtcggtgtgtggcaacatgaccgcgttgaaatcatcgccaacgaccaagggaacagaaccacgccgtcttacgtcggattcactgacaccgagcgtctcatcggtgatgcggccaagaatcaagtcgccatgaaccccatcaacaccgtcttcgatgccaagaggttgattggtcgtagattcagtgattcctctggtcagagtgatatcaaaatgtggcctttcaaggtcattcctggtgctgctgacaagccaatgat

SEQ ID NO: 259136 - DNA, 379 bp, Glycine max
attggttggtagttgtctcaaaaatctcttgccctttggccataatcaaaaaccaagacgctgttcatcaagctgctcaattatcaagccaactttgcttggttccactgcagaatttcagtttattcttatctcggtagattggattgaagtagattccttataagtgggcataagttcaagtgtagagaatgagtcagcctaagattaagcgccgagttggtaagtatgaggtggggaggaccattggtgaaggtacatttgcaaaggtgaaatttgcaaggaactctgatacgtgagaccctgtggctcttaaaattcttgataaggagaaagtgctatagcacaagatggctgagcagatcatgagataagtagc

SEQ ID NO: 259137 - DNA, 267 bp, Glycine max
cccacgcgtccgctgtatctcaagaacttggatgatactatcagtgatgaaaaacttaaggaaatgtttgctgaatatggtacaataacttcatgcaaggttatgcgagaccccactggaatcggtagaggatcaggatttgttgcattttcaactcctgaggaagcatctcgtgctctcggtgagatgaatggtaaaatgattgctggaaaacctctgtacgttgcccttgcacagagaaaagaagacagaagagcaaggttacag

SEQ ID NO: 259138 - DNA, 249 bp, Glycine max
ttcaactctgcttcccctggcaaccttcttcttagttctctccgcttcttatgtccagattgctggggcgaaagcacaaccgttgactagtctcaagcttaactctccgatccttcaggagtctattgctaaagagaccatggaaaatcctgaggcaggatgggaggctgctttaaatcctaattcttccaattttccagtggaccatttaaaggcctttttgggagcaaacccaccgcttaaaaggga

SEQ ID NO: 259139 - DNA, 372 bp, Glycine max
tcacttttctactttgagtcttcttgatccttctttttcttcttgaactcaaacatggcagatgaggtggttctgctagatttctggccaagtccatttgggatgagggtcaagattgcacttgctgaaaagggtatcaaatatgaatacaaagaagaggacttgaggaacaagagtcctcttcttcttcaaatgaacccggttcacaagaagattccggttctcatccacaatggcaaacccatttgtgaatccctcattgctgttcagtacattgaggaggtttggaatgacagaaatcccttgttgccttctgacccttaccagagagctcaagctaaattctgggctgattatgttgataagaagata

SEQ ID NO: 259140 - DNA, 407 bp, Glycine max
cggacgcgtgggttcaacagttacttggatcttgaaatggctgagttcactctgcatgaagttctgggtacctcacttagtcaggtcatgacaaaaagtaatggaaagagtatccgaatcgtcaatgatgttgcagagcagattgtgatggaaactttatatggtgatagtcttaggctccagcaggtattggctgactttttacttatctccatcaatttcactccaaatggaggtcaggttgttgtagcaggcactctaaccaaagaacagttaggcagatcctgccatctcgttaagttagagctcatcataacacatggtgggagtaggggaccagaagcattactgaaccaaatgtttggaaacaactggctagaatccgacgaggggattagcctactgat

SEQ ID NO: 259141 - DNA, 398 bp, Glycine max
cccacgcgtccgattcctcccggtacctgtattgtatcagaaggaacgtgatatcatgatgctgtaaagagagagagatatgagataattcacaattcctcctttatcttgtttcatagcagtgaagaaaaaaacagagaaagcatgggcgtggacttctacaagattcttcaggtagatagaagcgccaaagatgaggatctcaagaaagcatatcgaaggctagccatgaagtggcaccctgataagaaccctaacaacaagagagaggctaaagctaaattcaagcaaatttttgaagctaatgatgtttggagggatccacagaagcaaggagtgtatgaccagtattggtaggaggggctgaatggggtgccgttggccccaggtggttttcc

SEQ ID NO: 259142 - DNA, 223 bp, Glycine max
ggctgcggaaaacgttgttgagttcacagacttacccgtcaagaggccaagagaggaagaagaaggaaccaatggcgtctccaacgacgccggttcagcgctccccaatgacccttaataccctggcatctctgcgggtattcccgggtggttctccgaaatcaggccaatgtggcccggggaggcacattccttgaagaattgaaaaaattttgttcaaggg

SEQ ID NO: 259143 - DNA, 218 bp, Glycine max
gctttgcaaccttcctcttctccaaagcttttattgctaggagcagcacttaacagattgggagtatggtcaattggaacaggaattattcttcctaagacatttaatttggtgttgaagccccggctttgatgcttaaaggtgttgaaaaacttgcccattccctcaaaattaccattggcccttaagggccttatgtggttattggaccaaagttt

SEQ ID NO: 259144 - DNA, 381 bp, Glycine max
ctgaaagcgaagaaagaaacagagttagagaattgaatgtgaatggggaatcagaagcagaagtggacgcaggacgaagaagacgctctcatagccggggttgaaaagcacggccccggaaaggggaagaacattctcaaggatccccaattcgccccttttctcacttaccgttccaacatcgacctcaaagataaatggcgcaatttgagcgttagcaacggtgctcaaggctccaaagaaaaatctagggttcccaagcctaaagccttctctgcttctgctgctactaccggcaccaccggcacttcttagaacgcttcttctgcttctcaaagcgcattggctgatgctggtgttgccccttacgcttttaaaaat

SEQ ID NO: 259145 - DNA, 267 bp, Glycine max
cacaaatcttagccgccattgattattcctcttccatttctcttactttctcaggctttgtcgattacccatttggttatttcgccctaatggctcttgctccatccaaagtttccaccttttctgagttttctgccaaacccagtgttgggggtgctcagaaaaacccaacttgctctgtttctgttaactttttgaatgagaaacttggaagcagaaaccttagggtctgtgccataacggggcctctcactgtggtgatttttg

SEQ ID NO: 259146 - DNA, 436 bp, Glycine max
ctctaaggtcctaaacaatcctctttcaaaaacataccgagaaaagtgtggaaatgacgacaccatcattggtagagcctctagttcttcaactgcatgagatctcagctgtcaaatttggcaacttcaagctcaaatctggcatcttctcaccaatctacataagacctggcgtctcatcatatgttacccttctctcctgcaacagatctcttaaacccttatttcttcaaactctttcacttcctttgacctcatatgcggcgtcccttacactggcttacccattgctacatgtgtctctcttgctcagaacattaccatggtcatgcaccgcaaagaaatcaaagattatggcactgctaaagctattgaaggcgattttaagcctggccaaagttgcttaatcattgaagatttggttaccacaggcacg

SEQ ID NO: 259147 - DNA, 422 bp, Glycine max
ggaatccttcttaatagtactgttttagaattgctaagatgaagtcaagttttgaggaattgaagaagaagaagaagaagaagggagaaggagagcattggaagacatagagataaagaattgaagataatgcgaaccctttgcgacgtatgcgagagcgccgctgccattgtcttctgcgccgctgatgaggctgctctctgctccgcttgtgaccacaagatccatatgtgtaacaaacttgctagtagacacgttcgggttggccttgctgaccccactgatgttccacgctgtgacatatgtgaaaacgcacctggtactgaatgctttcttttactgtgagatagatggtagttcgctgtgtctgcaatgtgatatgattgtgcatgttggttggtaaaagactcatggaagatatc

SEQ ID NO: 259148 - DNA, 229 bp, Glycine max
cccacgcgtccggtacaagattggaggtattggaactgtgccagtgggacgtgttgagaccggtgtcttgaagcctggaatggtggtgacttttgcaccaactggactgacaactgaagtcaagtctgtggagatgcaccatgaatctcttacagaggcacattctggtgacaatgtgggattcaatgttaagaatgttgctgttaaggatttgaagcgtggttatgtt

SEQ ID NO: 259149 - DNA, 329 bp, Glycine max
ctcggggccattgacttgagcatattcagtgcgtcctaaagcaaaaagatactgatggctaaagtcatgtttggtttggtctgcagcttcctcgtattatgctggttcacaatcaacactagcgccttctcaccttctggatggaccaatgcccatgccactttttatggacgtagcgatgcctcggggaccatgggaggagcttgtgggtatgggaatctgtattcgacagggtacggaactgatacagcggcattaagtactggcatatttaacgatggagcttcatgtggggagtgttacaaaatcatatgcgattatcaaacaga

SEQ ID NO: 259150 - DNA, 434 bp, Glycine max
aaagaacctttccacggctgcaaactttgccaggaggctacttgagaccaatcctactgttgaaaaccaagctaagacagcaaggcaagtgcttgcagctgcagaaaagaatatgacggatgccttacaattgaactatgatttccgaaacccatttgtaatttgtggagcaacctatgtgcccatttatcgtggacagaaggatgtcgcttgcccctattgtacttcccgtttcgtgccaagccaggcgggccagctatgtgctgtgtgtgagctttcggtggtaagggcggatgcttctgggttgctctgctctcctttccagattcggtgatttcactggatcaagaacgggtaatgaattttggttcaagtcaagtttcaattttcaacaaccgataagagtcctattgatcaattaatatattttcttt

SEQ ID NO: 259151 - DNA, 292 bp, Glycine max
gcagtgttagggtttctgtagcctccaaccagaaagagagggaaatggctcccaaacatcgtagtacgggtttgtttgttggattgaacaagggtcacgttgtcaccaagaaggagttgcctccacgcccttcagatcgtaaggggaaaacaagcaagcgagtgcactttgtgaggaacctcattcgagaggttgccggctttgcaccttatgaaaagcgaataactgagttgctcaaggttggaaaagattagagggcactgaaagttgccaagagaaagcttggaaccca

SEQ ID NO: 259152 - DNA, 250 bp, Glycine max
cggacgcgtgggtttaaacctaattctcatttcttcatcgttcgattcttctcctcctaaagatgcagatcttcgtgaaaactttgaccggtaagaccatcacccttgaggtggagtcctccgacaccatcgataacgtgaaagctaagattcaagacaaggaagggatcccacctgaccagcagagacttatctttgcgggtaaacagcttgaggatggtcgaacccttgccgactacaacatccaaaa

SEQ ID NO: 259153 - DNA, 398 bp, Glycine max
cccacgcgttcgtgcaattaaggtgaaagcatctattataatttggttcacttcatcagggagggctgcaagattgatcgcaaagtattggccaacaatgccagtactatctggtgtgatcccccgactcaagacaaatcaactcaagtggagctttagtggagcttttgaagcaagacaatcacttatcctgagaagtctcttttctatgcttgcagattcacgacatcctggttagtcaacaagtgccaccaatgaatctattcttaagggtgcccttgatcattgaaaatccttgggaggtattaaatcacatgaccaggtaattggttgccagaaacctggtgatgcattaggcgttaagaatattgggcttgaaaatttaactatttaagagc

SEQ ID NO: 259154 - DNA, 208 bp, Glycine max
ctgaagcctgaaaacttgctggttaccaaggatttcatcaaaatcgctgatttgggactagcccgagaaatcaggtcacaaccaccctacactgagtatgtctccacacgatggtatcgtgctcctgaagtgctgcttcagtcttatatgtatacctctaaagttgatatgtgggcaatgggtgctataatggctgagcttttctctc

SEQ ID NO: 259155 - DNA, 415 bp, Glycine max
caagcattgtaagaatcttggttcattgtgggatgatttggggaaagcaatggaaggagaagatgaaatagaggttggagaagtcgattgcggcatggacaaagcagtatgttccaaagttgatattcactcctatcctacctttaaggttttctatgatggtgaagaagtagccagataccaaggtacaagagatgttgaatcaatgaaaacctttggtttggaagaagcttgaaaggcaacagcaaaagcacttgaaagttaccaagaattattaccacttttgaagggccgtcattatctggattacaactaactctttactggaggtggggcacattccagataagttatcacctttggagtcaagcttagacattcattcttctctggtctgatcaacatttggttggtt

SEQ ID NO: 259156 - DNA, 429 bp, Glycine max
cccacgcgttcgggacattagtcttgactatgcactttttaggtctccttcggtggtagtgcaagatggttcacttggttaccgtaacctctttgatgcttcggttgatgctgtttatgctgcattggagaaagcacgaggagggtcattgaacatagttgtgtctgaaagtggatggccttcttctggtggaactgcaacttcacttgataatgcaagaacttacaacacaaacttggttcggaatgtgaagcaaggaacctctaaaaagcctggtgcacccctttgaacttatgtgtttgccatgtttgatgaaaaataaaagcagccagagtttgaaaaattttgggggctcttttctactataactaagcagtccaaatactcgattaatttcaattaatttttagcagaaacataatttggtgt

SEQ ID NO: 259157 - DNA, 384 bp, Glycine max
  unsure (1)..(384): unsure at all n locations
gcagatattccaatgctacaaatgcagctgatcgtcctacatcttcagaattgcagccagagaagcccaatatggattctctatatatgccttgngaccatgttaatatgacacccacatttagaggtagaggcctatctataaggggtgagggtcctttaaggaatgtgaggagccgttctgcacttgatttggaatccaacctggctaggacccatttatcaaatactcatncacacaactcatactctactggtctaccaattgaccattctaacatggtcgatctttcaactcaaacttttggcactttgaccagggattggagcccatgagtatatgtcctnctcatggaaggtgtcatcatcagatgcaaatgctttt

SEQ ID NO: 259158 - DNA, 280 bp, Glycine max
ccagttcaaaggttaggtaggttaacactcttcttcatcgtcgtcgcaatgggacgtgtgatccgtgcgcagcgtaagggagcaggctcggtcttcaagtccgacacgcaccaccgcaagggccctgcacgctttcggagcctggactttggggagcgcaacggctacctcaagggcgtggtcaccgacgtcattcatgaccctgggcgcagcgcgccggtcgccaaggtcggcttccggcaccctttcagatacaagaagcagaacgagctcttgattg

SEQ ID NO: 259159 - DNA, 212 bp, Glycine max
caagattctgttcggctacttgctgttgatggttgtgcagctctggggaaattgttggggcctcaagattgcgtggcacatattcttcctgtcatagtcaatttttctcatgataagtcgtagcgtgttcgttacgtggttgctaattaactatatgaactatgtgaatctgttggtcctgaccccagccagatcagaattggtccctgcat

SEQ ID NO: 259160 - DNA, 394 bp, Glycine max
cggacgcgtgggttctcaccttcggcccctacgccgtctactattctgccacgcccttatctgagtgtgatacactcggaacctctatcaaagccgctgttgtttatcttgcaacggcattagtgaagcttatttgtctagctacttttctcaaggtttcggagagtgatagctttgatccgtatcaggagtttttgaaggcattaataggctttatagatgttgctgggctttattttgccttgacccagttgactcacaggaacatctctcagaatcataaatttcaagctgagggacttggctgggcgtttgctgattctgtactgcatcgattggctcctctttgggttggggccagaggattagaatttacttgggattacattcttta

SEQ ID NO: 259161 - DNA, 312 bp, Glycine max
cccacgcgtccgcccacgcgtccggccgttcataccaaaagcgtgtcatgcttcttgtgagacaatactacggatgagcaacttttaggtcagggattggcactgaatgacagccttcagcgagtactctgtcgacatgatgacattgtgaaaggaactgctgattctggtgccagagaagcagaaacttcagttctaccacttgtaaatgtaaaccacgaagatgatgaatcataggatgattttgctcaactagcccataggtcatcacgtggtactcaggcacagaatcaaaaactagcctatgacaag

SEQ ID NO: 259162 - DNA, 354 bp, Glycine max
ctctctctttctctctcggctactctgcactcatcaatggcgacgcaatcggtagacgagtgaaactgctaagaaagtcatacgacaggttgagttttattaccgcgatagcaaccttcttaccgatggtttcatgcggtatgaaattacctatagcctatatggcatgattagcttggcgctgatttgctcggataatcgaatgcgaaagcaccttaatttgggcgatgtatagatcgaataaatggtccaagataccgtgaatgcttatggttaaactttgagaaattcaactacactcaaggtctcctaagattggaaaaaagttgtcatgaaaactgaactttcaaagtt

SEQ ID NO: 259163 - DNA, 442 bp, Glycine max
  unsure (1)..(442): unsure at all n locations
cccacgcgtccgctttccacacacacaacacaaatacctgtctttctctctcgtcttcggattcttcggacatacaaaaactcacactctctctctctcttcaaatcaaaacccctcacaaaattcacaacaacatacccacaaatcccaaatcctgtcttctcatataaaagaacccttctttcgaatccttcccgctctctctctctcttactctttttccctatccgattcaattcgcgcgcaagtccaaaccctaatccctctctccgagctctgggatttttgggttgataaaaaaaattagggtttgatggctgaccaaggattggaagggagccaaccagtggatctacagaagcatccttctgggatcgtgcctacccttcaaaatataggggccacagtcaatntggacttgaagttggaccttaaaacaatt

SEQ ID NO: 259164 - DNA, 346 bp, Glycine max
atctgttccaccccaccaacaaagtatggttacttgttagcagatattatcaagcttatggaggtgaggttgatgaaagagtaggcatccagataagagtttttgacactggaactggtccatttcaacatgtgttggatcagatcttagctcgctctttgaaggagaatcttttgcctgatgttaaccgaaagggggatattgtcaattcattggcaaagccgaagtcaaaagctgtgctgatgacttccttgagctctgggtattctgacatggtgagagacatgtttatggaacatactactgtgacaggagaagttgttggcatttaccagccaagccatga

SEQ ID NO: 259165 - DNA, 286 bp, Glycine max
gagaaatggcaacaagcgaagaagtggttgctgcgtcgccggaagcagccgcgcctgaggcagggttgaagcacaaactggagagaaaatggacgttttggtgcgacaaccaatccaaacccaagcaaggcgctgcttggggaacctctcttcgcaaggtctacaccttcgacaccgttgaaaagttctggtgtttgtatgatcaggtattcaagcccagcaagttgcaaatcaatgccgattttcacttgttcaagactgggattgaccctaaatgggaagatcc

SEQ ID NO: 259166 - DNA, 181 bp, Glycine max
gctccgtaccagtttcactgcataaattttagagaaaactctgcaaacatgttggtttagcatgacctccttacaggtgatgagcttctctcggactccttccgttacaatgaaattgagaatggaatgctgtgggaagttgatggtaagtgggttgtgaagggagcagttgatgttgaca

SEQ ID NO: 259167 - DNA, 371 bp, Glycine max
  unsure (1)..(371): unsure at all n locations
cccacgcgtccgcaaagatggagatccctgtgatagattttagtaagctcaatggggacaagaggggtgacacaatggccctattgcacgaagcttgtgaaaaatggggctgctttatggttgagaaccatgaaattgacacacaactgatggggaaggtgaagcagttgatcaatgcatactatgaggaaaacctgaaggaaagcttctaccagtctgagatagccaagaggttggagaaacagcagaacacctctgatatagattgggaaagtaccttcttcatttggcatcngcccacctttaacatcaatgaaatatcaaacatctctcaagaagcttggcaaacaatggatgagtacattgcacag

SEQ ID NO: 259168 - DNA, 441 bp, Glycine max
  unsure (1)..(441): unsure at all n locations
aacgttcgcacactccgtcttcaaaccaagatccgtgttcttcacccacgtgtgtctcccgcttcagatcgtaaacgtctcgctgttccaagatgggtgtggctgagaacattcccgatatggaggagggtaccttggagattggaatggaatacagaactgtatctggagttgctggaccattggtcattcttgacaaagttgagggacccaaatttcaagagattgttaatattcgtttaggagatggaactactcggcgtggacaagttctagaggttgatggcgaaaaggctgttgttcaggtatttgaaggcacatctgggatcgacaataagtttacaactgtgcaatttactggagaggtgttaaaaactcctgtctcactggacatgcttggacgcatnattaatggttctggaaaacccaattgaatatggg

SEQ ID NO: 259169 - DNA, 340 bp, Glycine max
ggagccgacattgtgcaaaaggcactgatagctcctgcagcattgattgctcaaaatgctggaatagaaggtgaagttgttgtggagaaaataaagagtggtgaatgggaggtcggttacaatgctatggtagacaggtatgagaatttagtggaggctggagttatctaccctgccaaggtaacaaggtgtgcattgcagaatgctgctttagttgctggaatggtgttgaccacacaggccattgtggtggaaaaacctatacccaaggcacctgtagctggtgccccacaaggccttgaccgttaatatataggttattagggctacggcaaagaac

SEQ ID NO: 259170 - DNA, 334 bp, Glycine max
cccacgcgtccgcgtagccgtcgcactctgtgttttctgcgccgtctccgatctccgacgatggcgacccaaatgagcaagaagagaaagttcgtagctgatggagtggtcttcgctgaactgaacgaggttctgacaagagagttggcccaggaccgttactccggcgtggaagttaggggtacgccgatgcgcaccgaaatcataattagagccaccagaacccaagctggtcttggtgagaagggaaggagaattagggaacctacctttgtgggtcaaaagaaggtcaaagttgccgaaaaccggggtggaccttattcttgaaaaggca

SEQ ID NO: 259171 - DNA, 308 bp, Glycine max
cttgggagtgagtcactcttcttgcataacccagatctgcagacaatatgcgaagaactggcttgttacatttgttatgccttgtcattgctttagtaagtgtgcaagcagaagatgcgtataagtattacacatggacggtgacttatggaactatttctccattgggtagtccccagcaggttattcttatcaatggtcagtttcctgggcctagacttgacttggtgactaatgagaatgtaattctcaaccttatcaacaagctggacgagccatttttactcacttggaacggtattaaacaa

SEQ ID NO: 259172 - DNA, 364 bp, Glycine max
ctcacactacttactctctttctgtctctaaagggtatgctttgatctgttgcaacttcggagagatgtccattctataacgcagaggcatctgttacatgccaagactagatgcaccaaaagtatctgatgctacgctagagaaaggccaaaatcgagtcatagatgctgtactcacacttagtcgagaaagatcaaagcctaagggatatcttgagcgtgcatagggaggtgctaaagctacttctactgatcgtgaaaggcctatgggacctaatcgatagatccattaatggccggcatctgcacattcacacattaagggaggcactaggcgatgttgcacatactttgcaactgaaaa

SEQ ID NO: 259173 - DNA, 420 bp, Glycine max
cccacgcgtccgcccacgcgtccgcccacgcgtccgggcacccacacacacagttcgtcggaatgggaagggtgattcgcgctcagcgtaagggtgctgggtcggtgttcaagtctcacactcaccaccgcaagggtccggcgaggttccgcagcctcgacttcggcgagcgcaacggctacctcaagggcgtcgtcaccgacatcatccacgaccccggtcgcggcgcccctctcgccaaggtggcattccgccaccccttccgctacaagaagcaaacggagctcttcgtcgccgccgagggcctctacaccgggcagttcgtctactgcggcaagaaggccaccctcgtggtcggcaacgtgttgcccatccgatccatccccgaaggtgccgtcatctgcaacgtcgagcaccacg

SEQ ID NO: 259174 - DNA, 376 bp, Glycine max
cccacgcgtccgcttcaatttctctatgattatgattatgatgggttcaaacccaaaacgtcttgcgcacctttctcttctgctcctggtcctcttgtcttcctcaaccgaatccctgagatttgaaatccaatcctggcacaccaaatgcatctcctaggatatcaatagcaattccatgaccggtggcaagtaccaaatcgttagcccctacgagggtcaacctgtgccagatgcccacagattcaccgtcagggtgacttcagcttatgggaacaactatcactacagagatcgcgtgtagacggggcaatttgcgtatgctgcactggaagctggagattacatgacttgcttctgagctgtggatcacaac

SEQ ID NO: 259175 - DNA, 260 bp, Glycine max
gttaaatccttctgctccgcgtcttcttgttcctctcgcccagaatccgagatcaaccgcgactaaggcaaggggtttttgtcggctgcttcagatttctgaaatggcgcctgtttcacctttagccaagtacaacctcgtattcctgggtgaccaatccgtgggcaaaaccagcttcatcactcgcttaatgtatgataaattcgataacacctatcaggctccaatgggtattgattttctatcaaaaactatgtatc

SEQ ID NO: 259176 - DNA, 114 bp, Glycine max
ggaatagttgctgtagaaacacagacagttatgcaaataatacctgctgatgctggtcagcttgattctcacgagagggttgttcctcaagccgggcaagtgtgggtccctgat

SEQ ID NO: 259177 - DNA, 419 bp, Glycine max
gtctttgagagcaatgcaatcgctcgttacgttgctcgactaaagggtgacaacgctttgttctgatcttctgccattgataatgcccacattgaccagtggattgatttttcatccttggagatcgatgctaatctcatgaaattgctcctaccaagacttggatttgccccataccttcctccagttgaggagggtgcaaattctgcgttgaagagagcatttgaggccttgaacactcatcttgcctccaatacttaccttgttggccattctgttacccttgctgacatcataacaacatgcaacttgtatttaggattcagccagctcttaattaagagcttcacctctgagttccctcacgttgaacgatacttttggaccttggtcaaccagcctaacttcagaaagattct

SEQ ID NO: 259178 - DNA, 342 bp, Glycine max
cccacgcgtccggacaaaaatgcagtgtaccattgctcatgctctagaaaagaccaagtgccctgagtctgacatttactggaaaaaatttgaagagaaatatcatttctcatgccaatttactgctgatctttttgcaatgaaccacacagactttatcatcaccagcaccttccaagagattgctggaagcaaggacactgttggacagtatgagagtcacattgccttcacccttccaggactttaccgtgttgttcacggtattgatccatttgatccaaagttcaacattgtctcttccggtgcaaacattggcatatactttccatacactgaaac

SEQ ID NO: 259179 - DNA, 396 bp, Glycine max
caagtgtgaaaggctttcggaatatagacttgtttgtccagcacaacgatgggaaaaagagcataggtcctgaaagccagaaaaccttgtgttcatgcttaaaagaagagatgctttatccgttgcgggtgacgatagtgaaccggtgtctcagacacagaacttgtggttgctaatcctgtggagctgagtggaaaggggagaccccgtgtattctatgatgttacgttgactttaaaagcctagggagtatgcattttctcttgtgaagttgatatacattgtacacaagaacgtcattgtgaagtgtatagatttttgctggaagaatgccgtgactttccattgaccagaagccaatcaataactgaaattggtgactaagttcgaagaaca

SEQ ID NO: 259180 - DNA, 441 bp, Glycine max
cccacgcgtccggctggccaagccttgcaagggaatattgctttttggcccccctggcagaggaaaaacaatgcttgcaaaggctgtggcaactgaagctggagcaaattttattaacatttcaatgtccagcattacatccaagtggtttggtgaaagagaaaaatatgtcaaagcagtcttttctctggccagcaaaattgcttcaagtgttatttttgttgatgaggttgatagtatgttaggaagacgtgaaaatcctggtgaacatgaagctatgcgtaaaatgaagaatgaattcatggttaattgggatggtttgagaacaaaggataaagagcgtatccctgtgcttgctgctacaaatagaccttttgatcttgatgaggctgtattttagagactttcacgaaaaatgatggttaatttggcagatgcttc

SEQ ID NO: 259181 - DNA, 384 bp, Glycine max
tccgatttttaaggaggttgtgtgaattgctggtgagtgatttaaatggctcctactagggtggacaatgccaaaagggctgatcccaaagctcatgccttgaagacagctaaagctgtcaaatcaagtggtcaagttgttaggaagaaagctaatatgatcaggacatctgttacatttcacaggccaaggaccttgaagaatgtaatgaaccctatgtactctcgcattagtgctccaaccacaaacaagtttgaccatgatcatatacttaaatttcctctaacttcttgagtctgctatgaataaaattgaggattacaacacgcttggttttattgttgacctttcgtgcatacaagtaaaaagattaaggatgctgtg

SEQ ID NO: 259182 - DNA, 442 bp, Glycine max
cccacgcgtccgattcagtgaaacactagctagggtattgggagctctcgttgtttcggagttagggaccttacgcagccatggccactgctacgaatgccgccgccgccccaccacgccagctctcccagaaggaagctgacatccagatgatgttggccgccgacgtccacctcggcaccaagaactgcgacttccaaatggaacgttacatcttcaagcgccgcaacgacgggatttacattattaaccttgggaagacgtgggagaagcttcagctagcagctagggttatagttgcaattgagaacccccaggatatcattgttcaatctgcaaggccttatgggcaaagagcggttctgaagtttgctcagtacactggtgctcatgctattgctggaaagcacactcctggtaccttcaccaatcagcttcaaac

SEQ ID NO: 259183 - DNA, 318 bp, Glycine max
ccattatctacttcatagcaggggtccctggagcacatgttctgtggtatcgcccattatatcgtgcttttaggaatgaaagtgctttgaaatttggatggtttttcatgttttatctgcttcacataggattctgcatcttagctgcagttgctcctcctatagttttcaaaggcaaatccctgacgggcattctggctgccatagatgtgctgggcgaccatgctttgattgggatcttctacttcattggatttggattgttctgcgttgaaactttgatcagcatttgggttattcagcaagtatacatgtact

SEQ ID NO: 259184 - DNA, 394 bp, Glycine max
  unsure (1)..(394): unsure at all n locations
aattaccatatatagtcacattttctttacactttgtgaggtctaaaatgttgtccatttttcacaaggggtttgctcacccacctgaagagcttaaaagccctgcatctaacagtggctccaacaagcctaatattcctgaggaaactctgagagaatttctttctcatcatccccataacactttttctctgagttttggtcactctgctgttctagcttatactcgtgctgatccacctttctttgttcatcaaaggttgntttgtgggatggatgacatatactgtatctttttggggtagcttgaacaatgtgtgctcactcaacaagcagtatggtttggcaaagggcaccaacgaagccatgtttgtgattgaagcttacaagacac

SEQ ID NO: 259185 - DNA, 392 bp, Glycine max
tatacttgtcaaccctttgagagttagaatggctgctgctattgaaatcccggcaatagggtttccaaactccggtgccgaacagaggatgccagtggttggaatgggatctgcccctgacttcacatgcaagaaagacacagtggaggctatcattgatgcactgaaacagggttacagacacttcgacactgctgctgcttatggctgtgaacatgctcttggtgaagctctcaacgaagctatccatcttggcctcagctgccggtaagacctctttgtcactttcaagctttgggtcaccgaaaatcatcctcatcttggccttactgctttgcgcaaatcacttaaaactcttcaactagagtacttggacctggatctcattcact

SEQ ID NO: 259186 - DNA, 381 bp, Glycine max
ctcacgcgttcggcaaaaactggcatggcagtggatgaacccgtggtacccacaatatgcgtaaacaggataaactcaattataacactacttgctgtatcttcaggttcaacccaactaagtgtggtgtgaggaatatgtgaaaagtaacatatatgtgaaagagagaggaagagatgtctacgacgctagatcatcctatacgacagaaaaggctaacatatgtcgcagtggtgcatcttaagaaacatggcatgcgctttgaaattgcttgatacgctaacaccgtcctctcttggcattctggcgtggaaaaagatcggcatgaagcgctgcatgtccacactgcttataccaatgtttgcaaaggggatcttggca

SEQ ID NO: 259187 - DNA, 425 bp, Glycine max
cccacgcgtccgctctcttcaaactagggttttacagaatataagctctctctatctttggttttcgtcattcaaatccaatccaatatcaaatatgagtcgtcatcccgaggttaagtgggctcagagacttgacaaggtctatatcacggtgcaattggctgattcaaaaaatgccaaggtggatcttacaccagatggtatttttaccttctctggtagtgctggtgctgaagaccatcagtatgagctaaaactggagctctttgacaaggttaatgtagaggagagcaaaattaatgtaagagtgcgaagcatattctgggtagtgcagaaagcagaagatggatggtggaaaaagttactgcgtggagaaggcaagccttcacattatgtgaaagtagattgggaataatgggtggatg

SEQ ID NO: 259188 - DNA, 490 bp, Glycine max
taccggtctcggaattcccgggtggacccacgcgtccgcccacgcgtccggggaagcagaatcagcgtgatggcgagaaactgggtggttcgatcctgtggcgcttcgtcacgcaatgaagaatagggttctcacactctccttcaaccgaattctttcctcactcacatcaaaatcctcactcttagctcaccacctgcttcgtcactgactgctctcagctctccctccttccctgcttccaccactctcgctccctctcctacggctcatctccttccgacgttgtccttgttaattcctaggaatagttcaacaatatgcttaccaaagtccgagatgactcgttgcacgcggtcttctatttcactgcggcttgctgtggaccttgcaagtttatttcacctatcgttggggagctcagtaagaagtacccgtgatgtacaacatataagattgacattgatcaagaagcacttcaaggcacact

SEQ ID NO: 259189 - DNA, 423 bp, Glycine max
attctctaatctctcgcttcacaattcacatggctctggaagcttacgcagcagcaaacgctgacaaaatccacacagatggcctcaccaaagctagggattcttgttacaaggctcgtgatgcgttctatgcctgcctggagaaggaatcggacaagaagcccacagagattgcatctgtgggtttgttatacccattagaatgcaaagagtgcaggaatgaatatgtcaaacagtgccgatcttcttgggtaacataaccccttcttcaatttcgattttgtgttggtaaaaatttatgcttttcttaattgggtgtgttaatattgttccaggtgaaacatttcgataggcaatactgccagaacaagagggttcagagacttttggatgacaaagggtcgcggaaaggggtgtaaacta

SEQ ID NO: 259190 - DNA, 439 bp, Glycine max
cccacgcgtccggttaaatcattcggaggttatggtgaccccaggtggttttccgctacgtctgctgtccccaggagacctaaacgacgtgccgttttgaagcagccccctattagtcaatctgtctctgacttttttgatccgcagtctcccgaagaggccaaggtagcaccgctgcttgccaggtccaacttgctaattaccagagatatcgagtgggcaaatcttgtactaggctttgaacaggaaaatcgatatgccattgtagatgcttgctaccctcagtcgcccgtaggttttattcgtgaacagagcaacatcattgccagacagttgcttcgtcttaggcggccatttgttgcatacataactgatgccttggggaacgagctctttagggttcgcagacccttttggtggataacatgctcaatttatg

SEQ ID NO: 259191 - DNA, 336 bp, Glycine max
cggatcgaccgacgcgtccgctcaaacgctcgactagatcatccagctaattgtgactgatggagcactggattctgcggctgacgatgcagatgttcaagtaaacttcgaccggcaagaccattgatcgtgaagtggaatactatgacaccatagacagacgtagaagctaagattcaacacaatgaaggatgcctcacctggccagcataaaactagactactatgaaaacaacatgaggatggtcagcccctaatcgattaccgcgtccataaggcatcaaccctacatattgtgctatggctgactggtggtatgcaaatatcatgtgtaga

SEQ ID NO: 259192 - DNA, 324 bp, Glycine max
cgagcacataaacttgcgaattttaagactacttggcgaattgattttggctggctcggcggcacggtgggaggattcttcacttgtccttggttttggaacgacgacagccgagctatgtctcattccattttcatccatcaatggctccagtagcagcagcatcttcagattcaatcaagccaagatatgtttgcattgatggtgttgcacgtacaccaatgggaggatttcttggtaccctgtcatctctatctgccatcaagctaggctctatagctattgaagctgctcttaaaagggccaatgatgatccatcccttg

SEQ ID NO: 259193 - DNA, 305 bp, Glycine max
  unsure (1)..(305): unsure at all n locations
cccaaattcattttaatcctaattctgcacttcttgatcattcgatttttctcctcaagatgcagatattcgtaaaaactttgaccggcaagaccatcacccttgaggtggaatcctccgacaccattgacaacgtaaaagctaagattcaagacaaggaagggatcccacctgaccagcagagacttatctttgcgggtaaacaacttgaggatggtcgcacccttgccgattacaacatccaaaaggaatcaacccttcatctcgtgcttcgcctcangggtggcatgcaaatctttgtcaag

SEQ ID NO: 259194 - DNA, 413 bp, Glycine max
  unsure (1)..(413): unsure at all n locations
ccgctgtcctctgtcgccgccagatctcagacgagactcagtcacactttctctctttcgcttccacaatgcagctcctccgggcggagctcgcggcggcgctgctcctactcgccactctctccgacgcccacaacatcacaaccatcctctcaaagcaccctgagttctccaccttcaaccactacctgaccctgacccacctggccccggaaatcaacggcaaaaccaccatcaccgtctgcgccgtggacaacgccgccatgtcggacctgctcagcaagcacccctacatttacaccatcaagaacatcctctccctgcacgtcctcctcgactacttcggcgccaagaagctncaccagatcaccaacggcacccgcctcgacgncaccatgtaccaggccaccggc

SEQ ID NO: 259195 - DNA, 397 bp, Glycine max
  unsure (1)..(397): unsure at all n locations
cttctctcttcaaccctagcttaagggttatgctctaaaaccctggcttctgaagtttattgggagagaaaaatgctcgtatcgtttgaaacacccgcgggttttgccctgtttaaagtgctggatgaaggcaagctatctaaagttgaggacttgtggaagaacttttccagtgcagatactgctagacaggtggtcaagttgaaagcattttctaaatttgagaacacttcagaagctctagaggcagctactgtacttattgatggaaaagctagcaagggtctccgcaagttcctgcgtgttcattgtgaaaatgaaacactangtgtggcagaatcaaagcttgggaatgtgatcaaggagaaattgaaaatcgactgtattcacaacaatg

SEQ ID NO: 259196 - DNA, 364 bp, Glycine max
ccctaattcacacccacagagaaatgataaaaatgacatcagtggtacgtgatgccaccgaagttcgatccctcgcaggtggtggacgtgttcgtgcgagtcaccggcggctaggtcggcgcggcgagttctctctccccgaagatcggttccttgggactctccccaaagaagatcggataggatattgcgaaggaaaccgcgaaggactggaagggccttcgcgtgacggtgaagctaaccgtgctgaaccggcaggcgaaagtgactgtggtgccatccgtcgacgcgctggtcatcaaggcgctgaaggaacccgaaagggacaggatgaagacgaagtacatctagcacaatgggaaca

SEQ ID NO: 259197 - DNA, 336 bp, Glycine max
tttcttttttcccgcagtcatgggcaaggtcaagatcggaatcaacggatttggaagaattggccgtgtggtggccagggtggctctgcagagagacgatgttgaactcgttgccgttaacgatcctttcattaccaccgattacatgacatacatgtttaaatacgacagtgttcacgggcactggaagcatcacgatgtcaccgttaaggatgagaagacccttctcttcggtgacaagccagtcactgtttttggacacaggaaccctgaagagatcccatggaagtcgactggagctgacatcattgttgagtccaccggagttttcaccga

SEQ ID NO: 259198 - DNA, 382 bp, Glycine max
  unsure (1)..(382): unsure at all n locations
cgccactatctccctaatggttttaagaaatttgttgttcacaatgtgaaggacttggagctgctcatgatgcacaacaggacttactgtgctgagattgcccacaatatatccacaagaaagaggaaagatatagttgagagagccgcgcagcttgatgttgttgtgacaaacaaaacagccagattacgcagccaggaggatgaatagtctaaatgactaaaaaagtcacttatctgtagtgattcagtagttcaatatcaaatttgcagtttaattttaaattgaattctgcttcaatgtattttgcttattgagaaccaagtttgattttgttgagtctcttgcacaataaaaaggtngaaccaaaaagggcggccgc

SEQ ID NO: 259199 - DNA, 409 bp, Glycine max
  unsure (1)..(409): unsure at all n locations
aagcaagcaaaaccctagcggcgcctgctttctttgttcgtgttttgcatcaggatggagtctcaggtgaagcacgcacttgttgtcaaagttatgggtcgtactggatccagaggacaagtgacccaggttagagtgaagtttttggatgatcagaaccgtcacatcatgaggaatgtgaaaggacctgtgagagaaggagacattctcaccctactcgagtctgaaagggaagcaagaagattgcgctagatggtctcttttttttggcttgccttcaaattcgaacaaaagcaatatttntcttgatatttatggtagttagtcngtgctaaaggggttatagcaccctatctttatgtttggatctattttcattcgaattattgcttgaattttgatgtttaaa

SEQ ID NO: 259200 - DNA, 443 bp, Glycine max
cccacgcgtccgcccacgcgtccgtatattgcgtgtgtgagagatgcagcagcacctgatgcagatgcagcccatgatggcagcctactaccccaacaacgtcaccactgatcacattcagcagtatctggatgagaacaagtccttaattctgaagattgttgaaagccagaattctggcaagctgagcgagtgtgccgagaaccaagcaaggcttcagagaaatctcatgtacttagctgcaatagctgattctcaaccccaaccacccaccatgtctggtcagtaccctccgagtgggatgatgcagcagggagcacagtacatgcaggctcaacaacaggcacagcagatgacaccacaacaactaatggcagcacgctcatctcttttgtacgcacagcagccgtactcagcacttcaacagcagcaagccatgcaca

SEQ ID NO: 259201 - DNA, 402 bp, Glycine max
gctcatcctccataacctccgagctctacaccgaagaacgaagccatggggaagacacagggaatgggagctgctcgcaagctcaagtctcaccgcaggaggcaaaggtgggctgataagtcatacaagaaatcccatcttgggaatgaatggaagaaaccttttgccggttcatcccatgccaagggaattgtccttgaaaagataggtattgaagctaagcagcccaactctgctattcgtaagtgtgccagagttcaacttatcaagaatgggaagaaaattgcagcttttgtccctaatgatggttgcttgaactacattgaagagaatgacgaattcttgattgctggatttggacaaaagggtcatgctgtgggagatattcctggtgtcagaatt

SEQ ID NO: 259202 - DNA, 409 bp, Glycine max
gctccgtctccgatctcgccgtggagaaccagaatctgaaaactgcgaagaggaaggagcgagagaagaaggttaaagcgtcgtcgaagaagagcaagagcgtcgccgccgccgacgagatttccggcgacggcgagaagcttccgtacgttcacgttcgagttcgtcgaggtcaagccactgatagccatagcttagcagaaagggctaggagagagaagataaatgctcggatgaagcttttacaagagctggtcccgggttgcaacaagatatcgggaacggcattggctctggataaaatcatcaaccatgtgcaatctctacagaatgaagtggagatattatcaatgaaactggcagcaggtaacccaagaattgctttcaacctcgacaggttactggctac

SEQ ID NO: 259203 - DNA, 467 bp, Glycine max
attcccggactagggtgttggaggctgctgtggtggcaatgccacaccctatgtggggtgaaactccttgtgcttttgagtccttgaagaagaacatcaacagctcatcatcatccaaaattgatgatgtcactgaggctgagataattgcctattgcaggaagaatttgccacactttatggtgcctaaggtggtgaagttcatggatgagctgtcaaagacttcaactgggaagattcagaactttgagttgagggtcatggctaaggttatcgagcagaccaagaataatactaccactgtcaacaagaagtcttgccaagtgagtcaaaatagtattgttggggggtacaataatgagcaagctttggctgcgtctcgtctttgaattaattaagtgttcagatctatatatcaatgatctttgaatctttgcgtatttggataaatgtgtgtacatatacta

SEQ ID NO: 259204 - DNA, 460 bp, Glycine max
gccagcgacctgatccaaagtttaatggcacatcagttgaagctaaagtgcatggaatacgccagtggaagctcctaaatcatggtgaaacatatgaaatgaattgtcctcgcctttttacttagaattcttccagttcctggtgctgattgggctggtacagttaatatacggtgcctagagacaggtctagtagctgaattatcctacagatcaagttcttttctaggaattggggggaatcatagagtgatcaaagggaagatccttgactcttcatcattgaaagttctatatgaagttgatggtcattgggataggaccgtaaaagtgaaggacacaaataatgggaaaagtagagtgatatatgatgcaaaggaagttatgtcaagtctcgaaactcctatactcaaggacataagaggtgtgtggcaaacagaatcagctcatgtttggggtg

SEQ ID NO: 259205 - DNA, 272 bp, Glycine max
gcaaccctagctttcagctgtttgcaatcaatggctggtgaatctgatgtaccggaaaagaccctctcttgtgctaattggggcaaacctgcgaagcttcagtgtccaaaatgtatggaattgaagcttcctcgagaaggtgctgccttctgctctcaggattgtttcaagtcttcatggaactctcacaaatcagtgcatctgaaggcaaaactatcctcacctggcacacaaaattcagactcacttggtgatggttggttatattggtt

SEQ ID NO: 259206 - DNA, 397 bp, Glycine max
cgataacatcgtctaccgcgactatcgtggtgaagctcaaaaaggaagcgctgagacatgtttccgaaaagtaaagttctggaaagaagatgctgagggagatgctccacctgtttttaatatagacggtgtgaactacttccacgtaaaggttgctggattgctatttgttgctactactagagtcaatgtctccccttctcttgttttggaacttttacaaagaattgcacgtgtcatcaaagattaccttggtgttctcaatgaagattcctttagaaagaacttcgtgctcgtttatgaattactggatgaagtcattgattttggttatgtgcaaacaacatccactgaggatttgaagtcatatgttttcaatgagccaatagtgattgat

SEQ ID NO: 259207 - DNA, 319 bp, Glycine max
tgagcaagcagaaaatgcgcatgagtattacacatggacggggacttatggaactatttctgcattgagtagtccccatcaggttattcttatcaatggtcagttttctgggcctagacttgacttggtgactaatgagaatgtaattctcaaccttatcaacaagcttgacgagccattttttctcacttggaacggtattgaacaaaagaaggatttatggcaagatggagtttttggaaccaactgtcccatttcttcaaactcaaattacacacacacgttttaggccacggatcacaatggttcatatacatac

SEQ ID NO: 259208 - DNA, 441 bp, Glycine max
ggcagatcctagttttgatgaggctccttggccttctttatcagttgatgctaaagattttgtaaagaggttgttgaataaggattaccgtaaaagattgactgcagctcaggcactaagtcatccatggctggtgaatcatcatgatgatatgaggatacctttggatatgataatccacaagcttgttaaagcttacatttgctcgtcttccttacgcaaatctgctttacgggctcttgcaaagacattaacagtagctcagctaacatatctcagagatcaatatactctgttagggccaaacaaaagtggattaatttctatgcagaactttaagacggctgttttgaggagctccacagatgcctcaaaggattcacgggtcttagaatatgtcagtatggttagttctatccaatataggaaattagattttga

SEQ ID NO: 259209 - DNA, 461 bp, Glycine max
cccacgcgtccgcacctttctcctaaaacatctccagtgggttcttcttcttctattacggcaacgtcgtccaagaccatgaccatggccatggccacgatcctgctcctgttcacggtcttcgcggtttcatcggccctagacatgtcgataatctcgtacgacaacgcccacgccgccacgtcgcgcagcgacgaggagctgatgtccatgtacgagcagtggctagtaaagcacggcaaggtgtacaacgcgctcggagagaaggagaagaggttccagatcttcaaggacaacctgcgattcatcgacgaccacaactcccaagaggaccgaacctacaagctcggactgaaccggttcgcggatctcaccaacgaggagtacagggcccagtacttgggaaccaagatcgatcccaaccggaggctcggcaagaccccgagcaaccgatacgcgcc

SEQ ID NO: 259210 - DNA, 418 bp, Glycine max
tcgaccgacgcgatccacgcacgcgtacatccacgcatacgatcttgtctgtatgacgatgttatatctgaatacacgtaaaaaggcacaagttcaaattgcttataatgctatacttcgctacttgccactggtttttgtccatcacagatggcttgtatccaaatggatacttcgaggaatgtccagaaccatcagaatctaaaggttcgacagatactacacccaatggcattcacattgtacaatctcaggaatggctgcatacatacaatcattggctaatcaaggtgacatggcactcgatgtgcctcatggtacctatgctgataggcttgccaccgaagcttccattaagcagaagattccaattgcgaacggcatgttctactcattaacattcattgcctcacgcact

SEQ ID NO: 259211 - DNA, 309 bp, Glycine max
atgtacttttaattgttgtaggctataatggaaactttcacggtttccattgaattaatatgtcagttcattcttactttcgtttaccaattatataattaattttttaaagcattttaatatgataatttcttttttatggtaattatgatattaatattaaataatttaattgggagtaataattaatatttatcaaaaatcgggagtggatattaaatggatattttttttaatataaattattttatatttaagatggattatttaatttagagatataaatccatattatttatataaatttta

SEQ ID NO: 259212 - DNA, 327 bp, Glycine max
tagatggaaaaataaaagcatggttgtatgacaatttgggatctcgtgttgattatgaagctcctggtcgttggtgcacaaccatggcttatagtgctgatggtacaaggctcttttcatgtgggacaagcaaagatggggaatcctccattgttgaatggaatgaaagtgaaggagctgttaaaaggacttatcaaggatttcgcaagcgatctttgggtgttgtgcaatttgatactaccaaaaatcgatttttggctgctggtgatgatttctccatcaaattctgggatatggataatgttcagcttttgactactgttgatg

SEQ ID NO: 259213 - DNA, 407 bp, Glycine max
cccacgcgtccgctctcactcaatggcttggcactcgttcctcttattagcgacggccaggctcgccgttgtgtgctccgccgtgagcggttgctcgccatcggatagggcggcgctgctggccttccggaaggcgctgagcgagccctaccttggcctcttcaactcatggacggactccaactgctgtctcgactggtacggcatcagctgcgacagccaccaccggccgagtcaccgacatctacctccgcggggagtccgaagaccccatcttcgagaaagccggtcgctccggctacatgaccggaaaactctcagaggcgatctgcggcagttacaccctcaccaccctcgacgtcgctgattggaaagacattgccggggagatccccacctgcgtcacc

SEQ ID NO: 259214 - DNA, 441 bp, Glycine max
  unsure (1)..(441): unsure at all n locations
gcgatcgatctgtgattgtccgagagagagagagatgatgatgcattcacggatcagaagcgtcgccggaaacatcaaatgcgcggcgagactcttctgttcatcttcgacgatcacgccggcggcggcgccgtcgcagctcccgcagactctggcgggtctccgagcccggctggcggaggaatcgccgtcgctgtcggatttcgtcgcgcttaaatcggacagcgcgtactcagtggaggtcgggacgaagaagaagccgcttccgaagccgaagtggatgaaggaggccgttcccggcggcgagaagtacgtgcagatcaagaagaagctccgcgaattgaagctccacacggtttgcgaggaggcgaagtgccctaatttgggggagtgctggtcccgcggcgagacatgcactgccaccgncactatcatgattct

SEQ ID NO: 259215 - DNA, 438 bp, Glycine max
gtggaagcaagcttacagaagtgcttcgggactcctttgttggaaattcaaaaactgttgtgatctcttgtatatcgccaaatgctgggtcatgtgaacacacacttaataccttgagatatgcagaccgagttaaaagtctatccaagagtggaaatcctagaaaggaccaggccccaaatcctataccaccaccagcaattaaagaggtttcatccacatcttcacttccaggtagtgttggtgcagaggattttaataatggtcaacgtcaagaggtaaaaacaatggacatgagcaggaaagttgtcgaaaaggaaagttctttgtacagctccgctgctgatgttgacaaacaatcaagtttttcttctagttgtcaattcaatgggcgagaggaaaaaagctcagcttctgccccaatggacagggaaaagt

SEQ ID NO: 259216 - DNA, 435 bp, Glycine max
cccacgcgtccgccaatgacgaaattgctgctgacctcaaagagcatgtgatcaagcctgtgatcccagagaagtaccttgatgagaagaccattttccacttgaacccttcaggccgttttgtcattggtggccctcatggcgatgctggtctcaccggccgcaagatcattatcgatacttatggaggatggggtgctcatggtggtggtgctttctccgggaaggaccctaccaaggttgataggagtggtgcttacattgtgagacaggctgctaagagcattgtggcaagtggacttgccagaaggtgcattgtgcaagtgtcttatgccattggtgtgcctgagcctttgtctgtgtttgttgacacctatggcactgggaagatccatgataaggagattctcaacattgtgaaggaaaactttgatt

SEQ ID NO: 259217 - DNA, 450 bp, Glycine max
aattcccgggtcgacccacgcgtgcgctcaaatcaaaatacttaatagcatggcgtttcatttatacaaaacttctaccccaagcagactcagtggagccgtagacagtcaagtaaaatccaatccacgaaatcatttgatctatggacagcatcgttgtggtaaaagccgtaatgccagaggaatcattaccgcacggcatagagggggaggtcataagcgtctataccgtaaaattgattttcgacggaatgaaaaaaacatatatggtagaatcgtaaccatagaatatgaccctaatcgaaatgcatacatttgtcttatacactatggggatggtgagaaaaaatatattttacaccccaaaagggctataattggagataccattgtttctggtacacaagttcctaataaaatgggaaatgccctaactttgaacgatatgcc

SEQ ID NO: 259218 - DNA, 273 bp, Glycine max
tagatggaaaaataaaagcatggttgtatgacaatttgggatctcgtgttgattatgaagctcctggtcgttggtgcacaaccatggcttatagtgctgatggtacaaggctcttttcatgtgggacaagcaaagatggggaatcctccattgttgaatggaatgaaagtgaaagagctgttaaaaggacttatcaaggatttcgcaagcgatctttgggtgttgtgcaatttgatactaccaaaaatcgatttttggctgctggtgatgatt

SEQ ID NO: 259219 - DNA, 253 bp, Glycine max
ccggaatgaccgcatcgacgcacactttccactagttatatatcattcactatcacggttgccctgaaaccttcaacgaccgcttcatggggcaccgtgaacgtttacaccggataggctaactctgatcttactggaaacaacctttccgctttaattgcacgttacgtgttcaaatacccagatcttgttcatgctcttacacataataaccataaccacatacaatataattgtacgatccctgacttct

SEQ ID NO: 259220 - DNA, 412 bp, Glycine max
gtgagagaaggagattctgatttgatctcgccttaatctctcagatctgagcttgccggcgtcgggatccaactcaatctgggtcggattcttaggtatcaccgctccactattagtttaagcctctcaataaaaggtttttatttcgcttcaaattcgaggtttgatttgaagttggaatagcttaactgttgtgtaaaacagccagcacacacaagcatgggaagccaagacaacaacgtagcattgtcatcaaattcatttttagcttacaaatctgctaaggtgtttgtcgctggccaccgaggtcttgttggctcggccatagttcgcaagctcactcaacttgggttcactaatctgggcttgcactcccatgccgagcttgatctcactcgacaatctgatgttg

SEQ ID NO: 259221 - DNA, 347 bp, Glycine max
ggttgcgttgctcaatccagcgtcggcgtcgtcgaacagtggggtcgcttccaccgcctcgcccaacccggcttccactttttcaaccctctcgccggcgaatgcctctccggtatcctctccaccaggatctcctccctcgatgtccgcatcgaaaccaaaaccaaggacaatgtgtttgtgcagttgctgtgttcgattcaataccgagtgattaaggaaaacgctgatgatgctttctatgagttgcaaaaccctcaggagcagatccaggcttatgtttttgatgtgactcgtgctattgttccgagaatgaacttggacgagctgtttgagcagaagggtga

SEQ ID NO: 259222 - DNA, 447 bp, Glycine max
cacccatctaagattacccaataagtagcatctctcaatttctgattttcgaattcgcagacatttcttcaatcgagtgtgtccagtggtatcatccaagaggaacgtaggggaagataaagagatgacgataaaacctgttgttcgtgtttcggaggggaagctggtggtgaaggagcgaacgattttgaccggaatgccggagaacgtggtggagacatcgacggtggaaggaatgtttctcggagtggatttcgagaaggaagacagtaggcaggtggtttcgttgggaacgttgaaggacgtccggttcatggcgtgcttccggttcaagctgtggtggatggcccagaaaatgggagatcgaggaagggacattccgttggagactcaatttcttgttgtggaaaccaaagatgggtcccacctggagtcagataacgacaa

SEQ ID NO: 259223 - DNA, 428 bp, Glycine max
attcaccatatgcaggacacttcaactagaatacatagatctctttctgatccactggcgcattgctactaagcctggaaaagttgtgtaccccattgaagtatcagagatagtggaatttgacatgaagggtgtgtggggatccatggaggagtgccagagacttggcctcaccaaagccattggagtcagcaacttctccatcaagaagcttgaaaaattgctctcttttgctaccatccctcccgcagtgaatcaagtaattagttaataattaagttaatcacacattagtttaattacgtgactgatccactgatcaaaatcactgatcgaactaaaccttaatcaatccttaacaggtagaagttaaccttgggtggcaacaacagaagcttagagatttctgcaaggaaaagggtattact

SEQ ID NO: 259224 - DNA, 321 bp, Glycine max
cccacgcgtccgatcccttgttcgttgcactctcacaatggactccctctctctgggctgcaccggagcccttgtcgcgggcggcctatactggttcgtctgtgttgtgggccccgccgagcagaagggcaaacgcgccaccgatctatccggcggctccatctccgccaagaaagtccaagacaactacaagcagtactggtccttcttccgacgcaccaaggagatctagaccgccgacaaagttgccgactttgtcaacaccttcgacaatctagtgaccgacatttacgacttggactcgggccagatgttccactt

SEQ ID NO: 259225 - DNA, 329 bp, Glycine max
ccggcccggaattcccggatcgaccgacgcgtccgatctctaatctcattctacttctgttcaaacactctctctcatggcatcagataagaagagtaggatcggcatcaacggatttggaaggattggccgattggtggccagagttgcccttcaaaggaatgatgttgaacttgttgctgtcaacgatcctttcatcaccactgattacatgacatacatgttcaagtacgacaccgttcatggccagcggaagcattttgatgtgaaggtgaaggactctaagacccttctctatggtgagaagcccgtcaccgattttggaatca

SEQ ID NO: 259226 - DNA, 373 bp, Glycine max
cccggaattcccgggtcgacccacgcgtggcgcccacgcgtccggtgaaggccattaggagaaagaccaccggaactggaaggatgaggtgcttgcgtgacgtgcctcgcagattcaagagcggcttcagagagggtaccgaagctgcacccaggaagagaggagctgctgcctctgcctaagctttgaatgaatgacagcaatttttgctgggtcagtgaattataggagttaatgtttctgtgttggtgccaaactctttggaacacattttctttctgtcgttttaatttcatttaatatgtagtggctttgtatttcgaaatgaggattgtaaggaattttggtttttcaaagggaagttttgacatcc

SEQ ID NO: 259227 - DNA, 382 bp, Glycine max
cccacgcgtccgcttctcttgcggctagggttttagcgcagcttcttctagatttaagggagatgggtaaggaaaaggttcacatcagtattgtggttattggccatgttgactctgggaagtccactaccactggccacctgatctacaagcttggaggcattgacaagcgtgttattgagagatttgagaaggaagctgctgagatgaacaagaggtctttcaagtatgcctgggtgcttgataagcttaaggctgagcgtgaaagaggaatcacaattgatattgccttgtggaagtttgaaaccaccaagtactattgcacagtcattgatgcccctgtacacagggatttcatcaagaacatgatcactgggacaat

SEQ ID NO: 259228 - DNA, 447 bp, Glycine max
cccacgcgtacgaccacgcgtccggccacgcgtccgcaagggaagcaaggacgatgagtgtagtatgagtaatcagattcagagcgtatagtgattctgattctgtcattttccatagattagcaagcaatcgagcgagggagggagagagagagagagagagagagaatggttcgggaagtatcagagagttgcattgatagcttattgacggagatggtggcgtgctattgcaaccgattctacgcaaacaagcctgaactcgccgcacgccggatcgaggccattggatatcatgtcggtcaccagctctctgaaaggtataccatggatcggcctcggttcacggatcatctggaggccatcaagttcatctgcaaggatttctggtctgagctctttaagatgcagattgacaacttgaagacaaaccatatgggtacattt

SEQ ID NO: 259229 - DNA, 400 bp, Glycine max
atttctctctctctctctctctctaacacggagtgatggctgtgcagctgtgggagaccctgaaggaagccatcgtagcctacactggcttctctccttccaccttcttcacggtgctggcgcttctttttgccgtttactacgtcgtcacgggtctctttggctcctccgacgatcaccatcaccgccaccgccacgtcgaggaggaggaggagatgccgcctctgcgccccccggttcagctcggcgagatcacagcggaggagctcaaggcctacgacggcaccgatcccgagaagcccttgctcatggccatcaaggcccagatctatgatgtctcccagagcaagatgttttatggacctggtggaccttatgccctatttgctggcaaggatgc

SEQ ID NO: 259230 - DNA, 269 bp, Glycine max
acccacgcgtgcacccctcctcccactcctccgagcctaaatttatatgaacttttgcactgaaaatctcactgccaccggtcttagaccatatgggccaaggctcaatactatcaacattagctcagtaaagcattcgcctgttacagactccgatatgtcttgcatatcttgctagccatgacccaactgtgatccatatagatcttaaatgtgactataatcatattaacggaaaccaatgggaacatgaaattggagatcttggg

SEQ ID NO: 259231 - DNA, 277 bp, Glycine max
cccacgcgtccgagcaaatagaaatatcaactttgtgactgaaatgttcacttctggcagccttagacagtataggcaaaagcacaagagagttaacattagggcagtgaagcattggtgtagacagatcctgagaaggcttctctatcttcatagccatgacccacctgtgatccatagagatcttaaatggggatatatttttatcaatggaaaccaagggggagttaagattggggatcttggggtggcagcaattctccgcaagttccatgct

SEQ ID NO: 259232 - DNA, 383 bp, Glycine max
accggtccggaattcccgggtggacgcacgcgtacgcccacgcgtccgctgaaacttgttcgcacattttcacggatctaactaaattgtctccaggaatcgtcaccacgatgccaagcccttcgaagaagaagaagtcaatcctttttcgaatggcactactgctcctgcatcaaagtcacgtattccaccattagcatctgagtcactgggctttggtcaaaggcatgatgctacagttgatattcctttggatactacaaatgactccaagaaaaaaggtcaagagctagcagcttgggaagcacatttaaaacggagagagaatgaaatcacctgaagagaagaggctgtttctagagctggtgttccttgtgatgata

SEQ ID NO: 259233 - DNA, 355 bp, Glycine max
cccacgcgtccggtttcagatagcacataaaccaagcatatatgtcctagataccgcaggggttctggttccaagtatctcagacatagagacagggttaaaactggctctggcaggtactatatctattaaaattatccatcttaaatacttttttggttattaataaaatttgaaatttgatattatcaattcatggctttttttttaaatttttttttatctaaaagtaattactgaaattacatttggttcatctccatatctttgattcctggggattcagtctaaacctcttctggggattgggaaatatgatttgggaagtgagtctttgctttaatttgaatttttc

SEQ ID NO: 259234 - DNA, 436 bp, Glycine max
cccacgcgtccggttaaatcattcggaggttatggtgaccccaggtggttttccgctacgtctgctgtccccaggagacctaaacgacgtgccgttttgaagcagccccctattagtcaatctgtctctgacttttttgatccgcagtctcccgaagaggccaaggtagcaccgctgcttgccaggtccaacttgctaattaccagagatatcgagtgggcaaatcttgtactaggctttgaacaggaaaatcgatatgccattgtagatgcttgctaccctcagtcgcccgtaggttttattcgtgaacagagcaacatcattgccagacagttgcttcgtcttaggcggccatttgttgcatacataactgatgccttggggaacgagctctttagggttcgcagacccttttggtggataacaagctcaattt

SEQ ID NO: 259235 - DNA, 321 bp, Glycine max
  unsure (1)..(321): unsure at all n locations
cccacgcgtccggtggcagaagagtatttgtaacggctaaagcccatatagatgccagcggtaacgtaaatttactgagtggaaaaaaccgttttctgagaaaggattattttcttaccctgaaaagggatcattcatcttgtaagaagagtttgctgtgactatcgatatagatctaangagggtgcaagagagaactgaatntgctgtgatgggcactcgtagatatgcttttggaagagctgatgaagccactcatccagactccatgagggccactttggcttgaaattgttctactttcatctttgtctttgctgg

SEQ ID NO: 259236 - DNA, 338 bp, Glycine max
  unsure (1)..(338): unsure at all n locations
cccacgcgtncggcaaaaaccttcgttcattgtcaaacccacgaactcaaccaccaaatgggtcattttttcagtggtaccttataaaaaaaaatgggttgtttcgccagcaaaaacgctgacaccaaggccagtagggccgcgcgctggcgatccacgggcatcgttgctttgcgcgattccaaattaaagacgtttccggatgaaattctcgagttagacagatctgttcgcactcttgacttgacgcataatcgaatagttgacattcctgtggaaattagcaagttaattaatgtacagcgcctgatattagcggagaacctcattgagagact

SEQ ID NO: 259237 - DNA, 275 bp, Glycine max
  unsure (1)..(275): unsure at all n locations
cccacgcgtccgcccacgcgtccggcatttaacagaaggcggttgtatctccaagagtcagaatccgttttctacagaaccacgaaacgactatngaggaaagcgttttcgcagcgctaacagacgacatcgtcctctccattctggcgaagctagacgacgatccacgacactgggcgcgcgcggcgtgcgtctccacccgattctccaccctcattcgccacttctgctggaagaccaaatgctcccaaaccttcccctcatctctcatcttc

SEQ ID NO: 259238 - DNA, 411 bp, Glycine max
  unsure (1)..(411): unsure at all n locations
cggaatcccggtcgaccacgcgtccgtagaactgaagattcagttcgggatttttgcgcttcgttctcaatttgcagcgcgtgagtgagggaacatggacggtgccgaattgtccaacataaagaaatggattgtgatgtatcctgtttacataaactccaaaaaaacgatggccgaaggaagacgcattggcctcgccaaagcctgcgaaaaccctacttgcgctgaaatcggtgattgctgcagctatctgaagcttccttttgcaattgagatagacaaggcgtaccctcgtgatttcatgcanagagggcgcgtgagggtgttgctgaagaaggaggatggaactctctttaattcaaccatctcatccagaaagcaactaatggtaaaggtgcagagatggtacct

SEQ ID NO: 259239 - DNA, 371 bp, Glycine max
  unsure (1)..(371): unsure at all n locations
cgaagcgaaaagagagaaattcatcgtcgcagtaatcatgggtaaggttcatggatcacttgcacgtgctggtaaggttagagggcaaaccccgaaggtggccaagcaggataagaagaagaagccacgtggccgcgcccacaagaggatgcagtacaatcgccgattcgtcaccgccgtggtgggattcggcaagaagaggggacccaactcgtctgagaagtgaagccgaagcttgaagaatatgttgctactctatttgatttatctttgntggtttttatttatttttaatttgtatgttttgattgtgttctgtgaacggtttttgttagctttatatcaaacttgaaattttgcatacaatatct

SEQ ID NO: 259240 - DNA, 374 bp, Glycine max
tgaaacacacctactacaattgttaaagtcctttcttgtcatagcaaaaatgaagcgtggtctttgccaccctactggtatgttctcttcttctaagctcctctttcttggagccagtcatcgcctatgaagactcgtcttattgcagcaacaagtgttcggacagatgctcatcggcaggggttaaggataggtgtctgaggtactgtggaatatgctgtgctgagtgcaaatgtgttccttctgggacctatgggaacaagcaccagtgtccttgctacagggacaagctcaacaagaagggcaagcccaaatgcccatgaagtcttgaactcaaagaccaagtcacatagagacttaagagaataagacta

SEQ ID NO: 259241 - DNA, 388 bp, Glycine max
aggcatttgagatattctgcaataaaactgttggtggtagttccagtgctgaacgtttagctacattctgtgacaatatccttaagaaaggtggaagtgagaagctaagtgatgaagcaattgaagatacccttgagaaggtagtcaagttgcttgcatatatcagtgataaggatctctttgcagaattttacaggaagaagcttgcccgaagattactttttgacaggagtgccaatgatgaccatgaaaagtgtattttgacaaagttaaagcagcagtgtggtggccagttcacatcaaagatggaggggatggtggtagacttgacattggctagggataatcagctgaaatttgaggagtatcttcgtgataactcacatgt

SEQ ID NO: 259242 - DNA, 432 bp, Glycine max
  unsure (1)..(432): unsure at all n locations
cggacgcgtggggaaacgtgaaccagaaccagaatggatcttcaacaacgaccacggaagcttcactttattggttacctgtcaccggggcatgtgatccctctctgcggcattgcaacactcttcgcctcacgcgggcagcacgtgacggtgatcaccactccctactacgcccaaatcctccgcaagtcaagcccctccctccaactccacgtcgttgactttcccgccaaagatgtgggccttcccgacggcgtcgaaatcaagtccgctgtcaccgacctcgctgacactgcaaagttctaccaagccgccatgctcctccgcagacccatctcccatttcatggaccagcaccccacctgatgcatcgtcgccgacaccatgtatttctggcggatgacgtggncaacaacctccgcatcccacgac

SEQ ID NO: 259243 - DNA, 173 bp, Glycine max
cggacgcgtgggctgaactatacgtcgatgcagtgttaatgtgtatttagaaaggtctttgtctccttccaatgtggtgatcagatctatcatctgtcctgaagcagtctgaaactcaacctcattaaacaaatcaagaagatcaatgtaatatggctttcccctgaagtgct

SEQ ID NO: 259244 - DNA, 279 bp, Glycine max
gcagcagcagagcttgtatacgtcgccgcttcagcgtagcaacatgatcattcccgagaagaaccgtaaagagatctgcaaatacctcttccaagagggagtttgctttgcgaagaaggacttcaatctggcgaagcacccggagattgatgtgccgaatctgcaagtgataaagctgatgcagagcttcaaatccagagagtacgtgagggaaacatttgcgtggatgcactattactggttcctcaccaacgatggaattgagttccttaggactta

SEQ ID NO: 259245 - DNA, 397 bp, Glycine max
gcgacgtgggaggaaggaaagagcatacgtgttgcgttagtgtttagtgttatatctccgcagtggatcaaatcaaacaaacacttccatccatcaccctttctctctgcttagggttttgatcgcatcggatcttcactctcttctccgatctcaaaatgcccgccgtttatggagctcgcttgaccaccttcgaagactccgagaaggagagtgaatacggttacgttcgcaaggtatcaggaccagtcgtcgttgcagatggcatggctggggctgctatgtatgaactcgtgcgtgttggtcatgataatctcaatggtgaaattattcgtctcgaaaggaattctgctaccatccaagtttatgaggaaactgcttgcttgatggtaatgat

SEQ ID NO: 259246 - DNA, 194 bp, Glycine max
  unsure (1)..(194): unsure at all n locations
gcccggaattcccgggtggaccgacgcgtccggaaacagtcaacagtcgcttcataaggtgaagttgacattctagtagtggaaagggccagagtcgagatgattatatgtgtttgatttgcctctacacactggcaatccttaggtctgacagatggctntttataatgaagaagagaagactgaagactacc

SEQ ID NO: 259247 - DNA, 167 bp, Glycine max
ggagtccagagacgtcggcgggggccccgtaaagagttatcttttctgtttaacaggctgcccaccctggaaacggctcagccgaatttagaatccagcgcttgtaagagcaccgaacgtcacttggtgtccggtgcgctccctgcggcccttgaaaatccagagga

SEQ ID NO: 259248 - DNA, 348 bp, Glycine max
aggggatgtatccgggaatcctgtggtgaaaattgcacataactttgataatggtttttgctccgttagtatgtgttctcagcctcaaagcatgcttcctccagtgccaaaccaaaatattcaatttccagtgtttcggacttcttcagcaatgggttattaccatcaaaatccagtttcattgccagctgctcccacaaatgggttgatgcctttcccacacacaaacccctacttatatgctggcccttttggatatagcttaaacgaggatccacgcttctgcttgcagtatggtggcttacagcaaccaacacccctatttaacccagttgcatttccagttta

SEQ ID NO: 259249 - DNA, 329 bp, Glycine max
  unsure (1)..(329): unsure at all n locations
accggnccggaanncccggggcgacgcacgcgtccgcaacaacctttcaaaccctccaaccttagtttcaattctaaacttgttcaccctttattggctgctcttccaaacatgggcgatggcttcaataataaccttggtgacatccaccttgctctttctttctttcactttgtcatgtgctattgacaccttcaccatcaccaactacaccgacaatgaggtcatgaccatgtacgaggagtggttggtgaagcaccaaaaggtgtacaatgggttgagagagaaggacaagaagttccaagttttcaaagacaactttgggttca

SEQ ID NO: 259250 - DNA, 293 bp, Glycine max
cacgcgtccggataaagcacaaagaaaagaagaagaggttcggaccggatgcgatgagcacacaggggcgggagattattgatgaggcggatgcggatgacataatccggcgcttaacggaggtccgactggcccgacccggcaagcaggttcagatctgcgagtctgagatcaagcaactctgcgtcgcttccagagacatcttcattaaccagcccaattggcttgaactcgaagcccccatcaagatccgaggtgacattcatggccaggacagggattagataaggcta

SEQ ID NO: 259251 - DNA, 331 bp, Glycine max
  unsure (1)..(331): unsure at all n locations
cgactctatctctcttagcggngttcttccttgcgctcctcctcgttcgctggttctacctcgcgtagatcggcaatggcggagaccgagacgttagctttccatgctgatatcaaccagctcctcaggctcatcatcaacaccttctactccaacacggaaatcttccttcgcgaactcatcagcaacgcctctgatgctttggacatgattagatttgagagtttgacggacacgagcaagctcgatgctcagccagagttgttcattcatattattcccgacatgactaacaattcgctgaccatggttgacagtggcatcggcatga

SEQ ID NO: 259252 - DNA, 373 bp, Glycine max
  unsure (1)..(373): unsure at all n locations
cgaaaatgtggaagagaacggngtttgaagaagaagcagttcaattgatcagctcagatttcagggacctaagtctagctgctaatagactcgcccatcatgccatcaaacttggtggcattggctttggagcctcttttttcggattgtttgctgccattgctgctatttatctgttgattttggatcgtacaaactggaaaacaaatattctcacagcactactcattccatacattttcttcagcttgccttcattaattttcgacgtcttcaggggagagcttggaaaatggattgctgcagttgctgttgtattacgccttttccttccaagacacttgcctgattggctggaattgcctggtgctct

SEQ ID NO: 259253 - DNA, 375 bp, Glycine max
cggccggagccactcgtccgcccgcgcgtccggttccagagagcacgtctaagaactgtgaacaacagggtaactgcaggccagctagcaaaacagaagacgcagcgatggagaggatgaagagggtgcttctgctgcttctggccttcactgttcttctcatgttgccagaagcttctgctacaaagtttactgttggaaacaaccagttttggaaccccaatattaactacactgagtgggctaaaggcaaacatttctaccttggtgactggctctattttgtgtacaataggaaccaagcgagcgtgttggaagtgaacaagacagattatgaaacatgtaactctgatcatccactcacaaattggacta

SEQ ID NO: 259254 - DNA, 394 bp, Glycine max
accgtaccggaattcccgggtcgactccacgcgtccgcaccgttccagggcagctcgtgatggagatcgtcaagaaaaacaattccttgttggtcaagcagtttggaaggggcacccagagcgtcgaattcagcagagagagcaacaatctctacaacctcaattcgttcaagtactctggtttggcaaacaagaaaactgttactgttcagcctgagggcaaagatcaggctgtgttgttggctacaaccaagacaaagaagcaaaacaagcccgctgcattgctccacatatctgtgatgaagaaggagttcaggaggatggcaaaagctgttgaaaaccaggtggccaaaaattactacaggcctgatctcaagaaggctgcccttgcaag

SEQ ID NO: 259255 - DNA, 395 bp, Glycine max
ccggaattcccgggtcgactccacgcgtccgcaaaagagtagtggcctttagggtttgaagaacaagagctcaaatcaaatggaatcgaaaaaagaaagaaagatcatattcatggcgatggcaagcctggctcgacggaagggttacgccgtcgttttgtcgtcgaggtcgtcgttttgtctgacaagctggaggggattcgcgtccggatctgacgaaaacgacgtcgtcgtcatcggcggcggtcccggcggctacgtggccgccatcaaagccgcgcagctcggtctgaaaaccacttgcatcgaaaagcgtggcactctcggcggtacctgcctcaacgtcggatgcatccctttcaaagcacttctgcatctttccacatgtatcatga

SEQ ID NO: 259256 - DNA, 393 bp, Glycine max
cggaattcccgggtcgactccacgcgtccggtgcgtgggagggtccgaagttgtagatagtgattctggttctgttctggtcttctttctactcacaacaacatcagaatcagaaacaacaatggccaacactaacttggaagatgttccctctctggatctcatgactgagctccttcgtcgtctcaagtgctcttccaaacctgacaagcgtcttattctcattggcccacctggatctggaaaaggcacccagtcaccaatcataaaagatgagtactgcttatgccacttagctactggtgatatgttaagagcagctgtagcagctaagacccctcttggtgtcaaggctaaagaagctatggatatgggagaacttggttctgatga

SEQ ID NO: 259257 - DNA, 181 bp, Glycine max
gatggaagaagacttctacatccccggcggcgaggaaatggagtcggcgaagacgaggtcggcgaggagagggagatcggctctggcggcctcaagaagaagctcctcaaggaaggtcaaggctgggaaacccccgaagtcggtgacaaagtccaagtcaatacaccgggaccttggtcga

SEQ ID NO: 259258 - DNA, 364 bp, Glycine max
  unsure (1)..(364): unsure at all n locations
atccacacagatctacactactctctaaaccctctctctctctctctcgcgggctatcatggctttgcccaatcagcaaaccgcggattaccctagtttcaaactcgtcatcgtcggtgacggcggtacaggaaagacaacgttcgcgaaaaggcatcttaccggtgaattcgagaaaaaatacgaaccgaccattggaatggaggttcacccattggatttcttcacaacctgcggaaagaatcgcttctactgttgggatactgctggacataataagttaggaggcctcaaagatggaaattatatccatggacaaagtgcgattataaggtnggatgttactgcccgactaacatacaaa

SEQ ID NO: 259259 - DNA, 314 bp, Glycine max
acgcgtgcgcgggtcaaaacagaacaaactccttttactctttcgcttctgaatcttcaacaatggggctcgaggcgacgatgatctgtatcgacaattctgaatggatgcgtaacggagattactctccttctcgatttcaagctcaagcagacgctgtcaatctcatatgcggtgctaaaacgcagtctaatccggaaaatacagtgggagttcacacaatggctgggaaaggcgtacgtgtttgggttaccccaaccagtgatctgggcaagatcttagcctgcatgcatggactagatataggtggtgag

SEQ ID NO: 259260 - DNA, 400 bp, Glycine max
  unsure (1)..(400): unsure at all n locations
cggaattcccgggtcgactccacgcgtccggtccattccctcttggccttcaattagctcagttcctactgttcaagtttcgagaccaacactctcttcaatcagttttctaacaacaaacaaccgttcaagaatagtcttccaaggccggaggacttttccaaggccctatacacctttgatattggacaaaatgatcttgcctttggtcttcaacacacttcacaggaacaagttataaagtcaattcctgaaatcttaaaccagttcttccaagcagtgcagcaactatacaatgtangggcaagagtgttctggattcataacacaggtccaattggatgcttgccctacagttacatttattatgagcccaagaagggtaacatagatgcaaatg

SEQ ID NO: 259261 - DNA, 388 bp, Glycine max
cgattcacgcgtccggttcaccgccccaatctctgcagtgctcttcgatctagaaaacatgactaagagaacaaagaaggctggcattgttggaaaatacggtacccgttatggtgccagtctgcgaaagcagattaagaagatggaagttagtcagcacagcaaatttttctgtgaattttgtgggaagtatgctgtgaagaggaaagctgtaggaatatggggatgcaaggactgtggtaaagtgaaagcaggcggtgcttatactttgaataccgcaagtgctgtgacggtacggagcaccatcaggaggttgagggagcaaactgagagttgagctttttgttgatgttatcaattactattagactttgcgtgatatgcctag

SEQ ID NO: 259262 - DNA, 315 bp, Glycine max
  unsure (1)..(315): unsure at all n locations
taatctcatttttcttctgntcaaacactctctctcatggagcagataagaagattaggatcggcatcaacggatttggaaggattggccagatggtggccagggttgcccttcaaaggaatgatgttgaacttgttgctgacaacgatcctttcatcaccactgattacatgacatacatgatcaagtacgacaccgttcatggccagtggaagcattatgatgtgaaagggaaagactctaaaacccttctctttggtgagaagcccgtcaccgtttttggaatcaggaaccctgaggaaattccatggggtg

SEQ ID NO: 259263 - DNA, 241 bp, Glycine max
  unsure (1)..(241): unsure at all n locations
ctaattacagatcatccagcttcatcnattgctgggccggttgtgacgttatgcggccctttgtatgcatcggtggtagcaatagagagccagtccaagttggatgacgagcaatggctagcttattggatcatctattcgttcctaacccttgcggaaatggttcttcaacctatcttaaagtggataccaatttggaacgatgtgaaactattgacggtggcatggctgaagtagccac

SEQ ID NO: 259264 - DNA, 387 bp, Glycine max
cgactccacgcgtcggggcagactagtatccgatcctcatccctctcgaagctttcatcgttcaacagattctcaccatctcagtcatgggcctgctatcttgttttaggtctaccgtcctgagaaaatgttccaaaggaagctctggcatgtcaagattcctgtatacgaacaattttcaacgaaacttgatttcgtctggtggcaatgaatcgtattatgggtattttaacaggagatcatacacttcactttatatgggaactggaactgtgggtgggattacaagtgctagaatcagggtgccaaatgtaggatgtgaaggattcatgtgctcaagtcatctgtcaatcactcaaagaaattcaagattgatccattctacta

SEQ ID NO: 259265 - DNA, 376 bp, Glycine max
cttggcccttcccaatagccaacttctaggttccgtttctgaagactgagggttgatccaataccttcgccacatcgatctctccaacaatttccttaatggctctctacccaacactatcttcaactcttctcaacttcaagtactttccctctcaaacaatgttatctcaggcaaactacctgagctaattggcaaaatgacaaaccttaaacttctcaacctctctgacaatgccttttccggtttgatcccagaaaacctctctactctaccaaacttaaccgttgtttcactgaagagtaactacttttctggcagtgtcccacccgggttcaactacgtggagattctggatctgtcattcaatttgctc

SEQ ID NO: 259266 - DNA, 372 bp, Glycine max
cccacgcgtccgcggacgcgtggtcgactatctcattccttatttgaggaaggtaaatgcaaataccacaaagacttatgctacaagaaccatatttttcttgaaagatgatggaactttgacaccattggccattgagttaagtaagccacatcctcagggtgaagaatatggtcctgttagcgaagtctacgtgcctgccagcgaaggagtggaagcttatatttggttactggcaaaggcttatgttgttgtgaatgatgcatgctaccatcaaatcattagccattggctaagcactcatgcaattggttgagccatttgtcatagcaacaaacagggcactgagtgtggttcaccctatttacaaac

SEQ ID NO: 259267 - DNA, 331 bp, Glycine max
  unsure (1)..(331): unsure at all n locations
ccacgcgtccgcccactcgtccgaattgtttaaacctaattctgaggcttcatcgatcgattcttctcctcctaaagatgcagatcttcgtgaaaactttgaccggtaagaccatcacccttgaggtggagtcctccgacaccatcgataacgtgaaagctaagattcaagacaaggaagggatcccacctgaccagcagagacttatctttgcgggtaaacagcttgaggatgggcgaacccttgccgactacaacatccaaaaggaatccactctccacctcgtgcttcgcctcnagggtggcatgcaaaactttgtcaagactttgac

SEQ ID NO: 259268 - DNA, 407 bp, Glycine max
cggaattcccgggtcgactccacgcgtccggaatttcttagtcagctctgatatttaacatggcctcatcatctccctgtccctctccctctccaatgttcacagtgcgaaggttgcaacccgagttggtggctcctgccatccccactccccatgaacttaaaccattatccgacatagatgatcaagaaggtcttcgtttccacattcctatgatacaagtttatcgtaaccaaccatcaatggcagagaaagacccagttcaagtgattcggaaagcactggcaaaaacacttgtgttctattacccttttgcgggtaggcttaaggagaggcctgaccacaagttaatggtggattgtactggagagggcgtcttggtcattgaggctgatgcttacgtaaca

SEQ ID NO: 259269 - DNA, 387 bp, Glycine max
cgactccacgcgtccgcttcattctcaagggattcttcattgggatctcaaatcagaaaatctgcttttgggggaagatatgtgtgtaaaagtagcagattttggtatctcatgcttagaatctcagtgtggcagtgcaaaaggattcaccggaacataccgttggatggcgcccgaaatgatcaaagaaaagcatcataccaaaaaagtagatgtgtatagttttggcatagttctatgggagcttttgacaggaaagactccatttgacaatatgacaccagaacaggcagcatatgcagtttcgcacaaggaacagtttccgtttgcattattgtttacacgaagatggaaacatgggcatgcataattatctataatgcaaga

SEQ ID NO: 259270 - DNA, 257 bp, Glycine max
  unsure (1)..(257): unsure at all n locations
aaacccggccgagcncacgcgagcgggcgcgcgtccgctaaaccctatggcctactaagccaaagccaaaggcaacgcagcgangggcctccaagactatcctgccgccaaccaccacnacnccgaagccancgcccnggcacccaccaaccaaagccacaaagccaaccgatccgacgcatacacctccctcaaaaactacgcagatgcataagcagaagccaaaaagacagaagaactcaagcccgactggtcca

SEQ ID NO: 259271 - DNA, 149 bp, Glycine max
aagaatgaaaggatcggcagcaacggatacggaaggattggccgtttggtggccagggaagccctacaaaggaatgaagttgaacttgttgctgtcaacgaaccattcatcaccactgattacatgacatacatgggcaaggacgacac

SEQ ID NO: 259272 - DNA, 302 bp, Glycine max
  unsure (1)..(302): unsure at all n locations
ctactccaaccggagtgctgctccgcaattatcatgggcaaggtcaagatcggaatcaacggatttggaagaattggccgtttggtagccagagtggctctgcagagagacgatgttgaactcgttgcccgtaacgaccctttcatcaccaccgaatacatgacatacatgtttaaatacgacagtgttcatggacacttgaagcatcacgatgtcaccggtaaggacgagaagacccttctcttcggtgacaagccaagcactatntttggacacagaaaccctgaagagatcccatgggg

SEQ ID NO: 259273 - DNA, 376 bp, Glycine max
cggaattcccgggtcgactccacgcgtccgcgatcctctgtcctctcgaagctttcatcgttcaacatattctcaccatcggagtcatgggcctgctatcttgttttaggtctaccgtcctgagaaaatgttccaaaggaagctctggcatgtcaagattcctgtatacgaacaattttcaacgaaacttgatttcgtctggtggcaatgaatcgtattatgggtattttaacaggagatcatacacttcactttatatgggaactggaactgtgggtgggattacaagtgctagaatcagggtgccaaatgtatgatgtgaaggattcatgtgctcaagtcatctgtcaatcactcaaagaaattcaagattgat

SEQ ID NO: 259274 - DNA, 416 bp, Glycine max
cgttccggaattcccgggtcgactccacgcgtcggcccacgcgtccgacactccccttttaggtttttgtggataagattgagctagaatggttgccaggagaccgggtttgattgctttgtttgatgttgatggaactcttacagctcccaggaaggtggtcacaccggagatgttgacattcatgcaagaactgcggaaggttgtaactgttggagttgttgggggttctgaccttataaagatatcagagcaacttggcagcacagttaccaatgactatgattatgtattttctgagaatggtcttgtggctcacaaggaaggaaagctcattggaactcagagcttgaagtcattccttggtgaaaaaaagctcaaggagtttattaactttacacttcattatattgctg

SEQ ID NO: 259275 - DNA, 399 bp, Glycine max
  unsure (1)..(399): unsure at all n locations
cggaattcccgggtcgactccacgcgtcggcccacgcgtccgcacactacttattctctttctctctctgacggtttgcggtgttctctttcaagttccaagaaatgtcaattataacacgcagaggcatccgttacatgccaagactagatgcagcaaaagtatctgctgctttgctagaaaaaggccaaaatcgtgtcatagatgcttcacttacacttattcgagaaagagcatagcttaagggagaacttgtgcgtgctttgtgaggtgctaaagcaacttcaactcttcttggagttcctttgggacataattcatcgttccctcaagggcctgcatttgcacctncttgcattagggaggccatttggtgtggtagcaccaactcaacaactg

SEQ ID NO: 259276 - DNA, 364 bp, Glycine max
gtccgggggttgggaattagggttgttcgcgtcatgaagatgatcgaggtggtgttgaacgatggattggggaagaaggtgcgcgtgaagtgcaacgacgatgacaccatcggcgacctgaagaagctggtggcggctcagacgggcacaagagccgacaagatccgcatccagaagtggtacaccatatacaaggatcacatcactctcaaggattacgagatccacgacggcatgggtctcgaactctactacaactaaacacaaggtgtgttttatgcatgatatattactatgatctgggaatgggatgaggcgccaaatgtaattttgacttgcgaaagtccctatgatttgaataatg

SEQ ID NO: 259277 - DNA, 278 bp, Glycine max
aggcttgtagtttcgttgtcgtggatccattcagatcgcatgccaggcagaatcgagagctggtgttcaaggaggaccgacacgagtacgcgcaggtgctccggatgctgggaaacaggcggggccaggcgatgtgcatcgacgggacgaacaggctctgccacatccgcgggaagatgcacaagaaggtgtggaacgccgtcggagacatcatcctggtagggactcaagggactaccaggacgacaaggctgacgtcatcctcaagtacatgcccg

SEQ ID NO: 259278 - DNA, 396 bp, Glycine max
cgtccggcgcgcgtccgagcacttcttcttttactctgccgctgcaacaatggcttcagagaagaaactttcgaacccaatgagggagataaaagtgcagaagctcgttctcaatatctctgttggcgagagtggagatcgtctcaccagagccgccaaggtgttggaacaacttagtggccaaaccccagtgttttccaaagcaaggtacactgttcgttcctttgggattagaagaaatgagaagattgcatgctatgtcactgtcagaggtgacaaggcaatgcaacttttggagagtggtttgaaggttaaggaatatgaacttctcagaaggaatttcagtgatactggttgcttcggctttggtattcaagagcatatcgatttgggaat

SEQ ID NO: 259279 - DNA, 290 bp, Glycine max
gcgtccgcgggtacgcccacgcgtccgtgcactcgttcgatcagaaccagatcgtgttctcggctggcattggcaaacatggcaactcaaatgagcaagaagagaaagtttgtggcggatggagtgttcttcgccgaactgaacgaggttctgacacgtgagttggcggaggacggttactccggcgtggaggttagggttacgccgatgcgcaccgagattatcatcagagccaccagaacccaagccggtctcggtgagaagggaaggagaattagggaacttacctc

SEQ ID NO: 259280 - DNA, 431 bp, Glycine max
  unsure (1)..(431): unsure at all n locations
aatacccggccgagccacgcgtccgagggtcgtcgaagacccaccaacgcacgaaagcttggatctttcagaaaatggattcctagtcgaagggtgcataaccgcatggataagctcacactaacccgtcaatttgggatccaattcggttccttaggaggtatcgggaaggaattttggaatgtaataatatcgattcatacagatacagaagaaagggttctctattgattcaaacgctctacctacgagatagggatagagaaagaggaaaaaaccgaggatttcacatagtacttttggtcgaaaaatcgatctgatttttttcgtacttntcgctcaatgatgaaatgggtcagattctacaggaccaaanccttgtgggagttaaggaatgatgggaagaaaagaaataaaaaaaagtaaataaa

SEQ ID NO: 259281 - DNA, 417 bp, Glycine max
  unsure (1)..(417): unsure at all n locations
cggaattcccggggaaatagtaaatggtgctacggaagttgaagaaggggcattgaaagaaacaacaccagatggtgaggaggatcaagagaaaggagtgcctgcattttggcttactgccatgaaaaacaatgaagtgttggctgaggagatttcagagcgtgatgaaggtgctcttaagtatctcaaagatatcaagtggagcaggatagaaaacccgaaaggattcaaacttgagtttttctttgacaccaacccttattttatcaattctgtcttgacaaaaacatatcatatgattgatgaggatgaaccaatattggagaaagcaattgggactgaaattcaatggcacccangaaaatgcctgacacagaagattcttaagaaaaagcctaagaagggttcaaagaatgc

SEQ ID NO: 259282 - DNA, 380 bp, Glycine max
cggaattcccgggtcgactccacgcgtcgggaaggtcttatgtccatttcttctagttctaggctctccagcttgaaaatgggaatatgcctgaacataactgacagaggacttacctatgttggcatgcattgctcaaaattaaaggagctggatctatacaggtctacaggggtagatgatttgggcatttcagcaattgctcggggttgccctggccttgagatgataaatacatcctattgtactagcattactgacagggcactaatcaccttgtcaaaatgttcaaatttgaagaccctggaaattcgaggatgtcttcttgtacatccataggtctggcagctattgcaatgaattgcagacaactaagtcgt

SEQ ID NO: 259283 - DNA, 302 bp, Glycine max
  unsure (1)..(302): unsure at all n locations
tcgtccgaccgctgacgctttaacttctagcttgcataaattatctgctaaattactttagcactcgctgagttttctgcaactcaacttggtgatgtctttctttgtaaggaagtggtatccagaaaagttttggttgatcagggtcataggcaagtggttgaacttgaccaagcagccattttggaaatttctttggtggtccgggactatatcgattaatgttttggtagatcaaaacaggagaagaccactctatgaagttcaagcanaccaaggctggattcatgaaaaaaatttga

SEQ ID NO: 259284 - DNA, 201 bp, Glycine max
ctagtgcatttctaatctcattctccttttgtttaaacactctctctcatggcatcagataagaagattaggatcggcatcaacggatttggaaggattggccgtttggtggccagggttgcccttcaaaggaatgatgtggaactatgtgctggcaacgatcctttcatcaccactgattacatgacatacatgttcaag

SEQ ID NO: 259285 - DNA, 359 bp, Glycine max
aatcaatcagcctatccgtcttgtggttggagagatcggaggggagagcaggcatggcgcatcgagtagaccacgagtatgactatctgttcaagatcgttttgatcggagactcaggtgtaggcaaatccaacatcctctccaggttcactcgaaacgagttctgtttggagtccaaatccactatcggagttgagttcgccaccagaactcttcaggtagagggtaaaactgtgaaagcacagatctgggacacagcaggtcaagagcggtaccgtgccattaccagtgcttattacagaggagctgttggtgctctacttgtatatgacataaccaagaggcaaacctttgacaat

SEQ ID NO: 259286 - DNA, 404 bp, Glycine max
  unsure (1)..(404): unsure at all n locations
cggaattcccgggtcgactccacgcgtccgattcaataccatttaccaaactcatgcatcaattctcatctttcttctcacgaactattaattcatcatgtcgagcacagctggccaagtcatcaaatgcaaagctgcggtttcatgggaggcagggaagccacttgtgattgaagaagtagaggttgcgccaccacaagctggtgaagtgcgtttgaagatcctctacacctctctttgccacactgatgtttacttctgggaagctaagggccaaactccattgtttcctcgtatatttggtcatgaagctggagggattgtggagagcgtangtgagggtgtgactcatctgataccaggggaccattgccctcctgtgtttaccggngaatgtggggact

SEQ ID NO: 259287 - DNA, 402 bp, Glycine max
  unsure (1)..(402): unsure at all n locations
ctcttgggagaagaggtcgagtttcacagcagcaatggtgtacgtcaaggctcagaaatcaggggcctacttcaagagatatcaagtcaagttcaagagaagaagagagggaaaaaccgattaccgtgccaggattcggttgattaatcaggacaagaacaaatataacactccgaaataccgatttgttgttcgctttagcaacaaggacattgttgcacaaataatatctgctagcattgctggcgatattgttcttgctgcagcatatgcacatgagctgccacgatatggtcttgaagtagggcttacanattatgctgcagcttattgcactggtctnctgttggcccgaagagtccctcaaacactttganatggatgaggagtttgaaggaaatg

SEQ ID NO: 259288 - DNA, 312 bp, Glycine max
cacgcgtccgaacaacgtcaccactgatcacattcagcagtatctggatgagaacatgtccttaattcgggagattgttgaaagccagaattcttgcaagctgagcgagtgtgccgagaaccaagcaaggcttcagagaaatctcatgtacttaactgcaatagctgattctcaaccccaaccacccaccatgtctggtcagtaccctccgagtgggatgatgcagcagggagcacagtacatgcaggctcaacaacaggcacaacagatgacaccacaacaacttatggcagcacgctcatctcttttgta

SEQ ID NO: 259289 - DNA, 378 bp, Glycine max
ttcgcggtgtgagtgagacggagagtgctaagcaatcgtcttctcttctcggagcttgggtgtgcttatcgattctctgtcctctcgtttctctaattccaaggtttgtaaaagatggcagatgccgaggatattcaaccccttgtttgccgacaatggaactggaatggtcaaggcaggatttgctggtgacgatgctcctagggctgtctttcccagtattgttggccgacctcgacatactggtgttatggttgggatgggtcaaaaggatgcctatgttggtgatgaagcccaatccaaaagaggtattcttactctcaagtatcccattgagcatggtatagtcagcaactgggatgacatggaaaagatctg

SEQ ID NO: 259290 - DNA, 423 bp, Glycine max
atacatttcagcctctcaactatcaatttctactccagcctcctggatatatattaaatccaggcagtccttatcaaatttattgacgtcttacttgatagtctttattgaacatctattgcttccactatttctgtgtaaaatgtcagactcctttgactaacccgactttcaattctcatatttgttcaaatttctgctgactttatgatattcttctctattttacgaaaattcttaacccaattttgcttctataccctttccaatatttgctgcactgtactgtattctctttatcctttttgcttaaattgaatatcaattcttcagttcacaaacattaactccatataaaatcttattatcattttactcacacttttccttgaaatatctattcctcaattttttaatcaatac

SEQ ID NO: 259291 - DNA, 438 bp, Glycine max
  unsure (1)..(438): unsure at all n locations
tcggtccggaattcccgggtcgaccgcacgcgtccgcccacgcgtccgcttcttttcgcctcacaccatgaaaccccttctccgcttcggaatcgccgttggcctcctcctccattccgccctcgcttctcatatcccctaccccaaagcaatttccgatttgaaggatacaattgtgaagggatttggggttcacggcggaagatgatgttacgattacggggttcgatcctcgagacgccgaggtagggcattccgtggagtaccaattcgacctcgaaatcgatcacaaggttattcccttcaagctcctcgaagacgtcaaacactgggattacgtcgatcttcccattttccgggccgaggcccaatccggtttggtccctaaacgggcttcngctgacgggcttcccgttttggctccccttcgtctcgctg

SEQ ID NO: 259292 - DNA, 383 bp, Glycine max
cggtccggattctttggtcgaccgacgcgtccgcacgtttctgtttcagttattctcttcgttcgcgacgccattttgtttctcagaatcgacgcccgacgcatctcataacttttgacaaaggatggcttcaagattctggacccagggtggaagtgattccgaggaggaggagagtgattatgatgaggaggttgataccacggtgggtgaatctggtagtcaagcagtgacaagcaggtacctgcaggataatgcaagtgacagtgatgactctgatggccaaaagcgcattgtgaggtcagcaaaggataaacgtttcgaggagatggcttccactgtcgaccagatgaagaatgccttgaagatcaatgactgggtga

SEQ ID NO: 259293 - DNA, 416 bp, Glycine max
  unsure (1)..(416): unsure at all n locations
agcttggcaaacaaaatcctcatcttatgcgattgattcaagagcatcaagttgactggctgggcctaattaatgaacctgttgaagggggtgagggaaatatactgggacagctggctggtgccatgccgcaagcagtgactgtcacccctgaggagcggcaagcaattgagcgtctcgaagcaatgggttttgatcgtgcaactgtattggaggtgtactttgcttgtaacaaaaatgaagagctggctgccaactaccttttagatcacatgcatgagtttgatgaataattagatctcctttacaatttgtcaaaatatttggtttatggttccttttgaatggtctttngtatgtaatgaagggtatatttgataatgacaagtctcgaatggacaaggaatattttaatc

SEQ ID NO: 259294 - DNA, 335 bp, Glycine max
tccacgcgtccgaacgcaaccacatcactctttctttcaaatctaaggtttcctccttggtgaaccatcaatgtcggcaatcgcggcttcccaacacagatcctcgaaaacagagtcctacgttgacaataagcgcaaggaggatatccgccatgccaacatcgtggccgcacgctcaatcgccaacgcggttcgcaccagtctgggccctaagggcatggacaagatgatctccaccttcttcgacgaggtcatcatcaccaacgacggcgccaccattcttaacaagatgcaggtccttcagcccgtcgtcaagatgctcgtcgagctcttca

SEQ ID NO: 259295 - DNA, 457 bp, Glycine max
cccacgcgtccgctaaaggtgaatatgatgagtctggcccatccattgtccacaggaagtggttctaacttctaagtacaaaatatgcttcaatggtgaaatatttttcgcaccagttgtttttatgggtctgtgtcatgtcatgttaacgatattgccatggataagaggtgaggaaagtatcattaaaggagggtctattctttagcttgatgcatcatattttgtgtggggggcagacagttagagagaggcatttcttgcgtttggccatccgtggttcatctatatcttcttagtaggttgtgttgtagcaagggagtgattgtgatgatctctttttcccccattttctttttgtatttttaaagtttacatttgaaggatttttccccttggaaaattgaatcattgatgttaatagtcatatgtttcgagaaatctctatattattgtt

SEQ ID NO: 259296 - DNA, 416 bp, Glycine max
caaacatccctcttgatttgaatgttgttttgtgcttatagataaaagttctgccaaatgaggatgttttttcagatcatagtgtgtgtgtgtgtgttaaacaatggctaagttctttgctgctatgatcttggcactcattgccatttccatgcttcaaacagtggttatggctgctaatgagcaaggaggccacttgtatgacaacaagagcaaatatggaagtgggagtgtcaagagataccaatgcccatcacaatgctcgaggagatgtatccagacccaataccacaagccctgcatgtttttctgtcagaagtgctgcaggaaatgcctgtgtgttcccccggggtattatgggaataaagctgtgtgcccttgctacaacaacttggataccaaggaaggaggaccca

SEQ ID NO: 259297 - DNA, 462 bp, Glycine max
  unsure (1)..(462): unsure at all n locations
ggtccggaattcccgggtcgaccgacgcgtacgctctgtctctctctcagaattttctcctctctccgattccttttattaattggagttttcgcgctcctttttctttccctgaaaacatttcatcttcgtattgatgtcggaaaagggtcggccacttcccaaatttggtgaatgggatgtcaatgatccagcctcagctgaggggttcacagtgatttttaataaggccagggatgagaaaaagacaggtggcaacccagagtcaccaggaaagactgctactgatcctcatagcaaacctgcagtagagcctggcaaaactcagactaaaaaatggttttgctgcatgcaaaacccttctgccgaatcatagcatagcaatggttgctcctgtgaaaagcctgaacagaagaacaatgnttatgtgtaactagcgtcacagtattttctcaaaagata

SEQ ID NO: 259298 - DNA, 275 bp, Glycine max
gtatcccaagatgtcctgcctgacttgactgatgcattcgatcgaaatattttgagcctttaaaatgatcagtgggctgaagtgcacaaactctatgaaggtggaattacactacctacaaactttcttagcaagatcgcccctataccagtgatcaatgaaatttttccaactgatggcgaacagttcctcaagtatccaccacctaaagtgatgcatgttgataagtctgcattgattactgatgaataatttgccagaaaaactattgcttg

SEQ ID NO: 259299 - DNA, 423 bp, Glycine max
ggtccggaattcccgggtcgaccgacgcgtccgcccacgcgtccgaaaaaaagaaaaaaggagaagcatactcagcgcggcggtggaagatgggggggactgcgatcgaggaagtgcgaaccctctggattggcgatttacagtactgggtggacgagtcctatctctctcagtgcttcgcccacaacggcgaagtggtttccattaaaatcatccgcaacaagctaacgggccagcccgagggctacggcttcgtcgagttcgtctcgcacgcctcggccgaagcctttctccgaacctacaatggagcccaaatgcccggcacggagcagaccttcaggctcaattgggcctcgttcggggactccgggcccgaccactccatcttcgtcggcgatctcgcccccgacgtcaccgattttc

SEQ ID NO: 259300 - DNA, 416 bp, Glycine max
cggtccggaattcccgggtcgaccgcactcgttcgctccgcactccgtcttcatcaatcagcatcaccaccgctccaacacaggggaaaatgagggggatccttcacgttcagggagggcaatgcgggaaccagatcggttcgaagttctgggaagtggtgtgcgacgagcacggcatagatccgacggggaagtacgtcggaaactcagatctacaactcgagcgcgtgaacgtgtactacaacgaagcttcctgcgggcggtttgtcccacgcgcagtgctgatggacctggagcccggaaccatggacagcgtgcggactgggccgtacgggcagatattccggcccgacaacttcgtgttcgggcagtccggcgcgggcaacaactgggccaaggtgcactacacggagggc

SEQ ID NO: 259301 - DNA, 448 bp, Glycine max
ccggtccggaattcccgggtcgaccgcactcgtccgcccactcgtacgatgaatttcatggatcacgccaggtcaagatcggaatcaacggtaagtgttctccatccttcgatcggtgttctgtcgtttcagatcatcttagttattttttctactattccattttctctgctctttactatctcaattctatctaaatctacatttaacacgatccgtaagaattggcctgttggttgccaaagtcgctcttcaaagagactatgtgtagctcgatgccgttaacgaccctttcattaccaccgattacatgacatacatgtttaaatacgacagtgatcacggacactggaagcatcacgatgtcaccgtttatgactagaagacccttctattcggtgacaaacccgtcactgactatggacacaagaaccctgcagagatccca

SEQ ID NO: 259302 - DNA, 304 bp, Glycine max
cccacgcgtccgatccaatttctctctggattgagaagactactgaaaaggagatttctggggatgaggatgaggaagagaagaaggatgaggagggtaaagttgaagatgtggatgaagataaggagaaggaggagaagaaaaagaagaccattaaggaggtatctcacgagtggtcattggtgaacaagcagaagcctatttggatgaggaaacctgaagagattacgaaagaagaatatgctgctttctacaagagtcttaccaatgattgggaagagcatttggctggtaagcacttttc

SEQ ID NO: 259303 - DNA, 432 bp, Glycine max
aagaatttccattgcatgcttagcagattctcattatattactagttttagtttgttggatcgttttcttctttgtttgggtaatgatgactagctttaaggttgcatgtgtggttgcgatgatgtgcatggttgtggccatgagtgttacacccatggcacatgccgcaatcacgtgcgtgcaggtcgtcggcgacgtgtctccgtgcctcagttatcttctaagcggctgaaaaccatctgacgcctgctgcaactgagtgaagtcactcaacggtgcggcaaagaccaccgccgaccgtcatgcatcgtgcaattgcctgaaaaaccttgccaataatatgggacagagtttgaatgccggcaacgcatcctctcttcctggcaaatgttgcgtcaacatcccttacaagatcaacaccttcaccaact

SEQ ID NO: 259304 - DNA, 413 bp, Glycine max
ctatcgtaatcgatcatactaaccaccggctcttatttaaatgtgcgggagcatgaccgctttgaaatcatttccaacgaccatgggaacagaaccacgccgtcttacgtctgattcactgtcaccgagcgtcttatcagtgatgcagcctagaatcaagtctacatgaaccccatcaacaccatcttctatgccaataggatgattggtcgtagattcagtgattcctctgatcatagtgatatcaaattgtagcctttcaaggtcattcctgttgctgctgacaatccaatgatcgtggataactacaatgatgtaaagaagctatttgtcgcagaagaaatctctttcatgctgctcatcaagattcgtgagattgcttaagcttacctatgcttcacaattaagaatgc

SEQ ID NO: 259305 - DNA, 484 bp, Glycine max
  unsure (1)..(484): unsure at all n locations
aacagataagggcgctctccgtaccatcttcctaatcctccttacatttgcagtgttcccgggtctcctacccactgaagtcgaacccctatttttcctctccctaatggcttctcaagttcttcttcagcaggcactgtttgcccccaagctaagtttcccttcttcttctcgtaacgtggcgttaatttctagggttccttccaccccaatttcatggcgttgcactcccctcattgctaagcctagtttcgtagtgagagctgacaccaacctcgatggcggtggtgaagccaccgaggatgttccttcggataatgctgaaaaagtttcggaaggcgaagcagaacaagtttcggattctgaagctccgaaatcgcctagaaaaccccgagtcaaactcggagacattatggggatattgaatcagagggcaattgaggcatccgagaagcaaagaccaacttcagacattangactggg

SEQ ID NO: 259306 - DNA, 273 bp, Glycine max
aagaagctcagaggcttcatcgctgagaagagatgcgctcctctaatgctccgtttggcagggcactctgctggaacttacgacgtgagctcgaagaccggtggtcccttcggaaccataaagcacccctccgaactcgctcacggcgctaacaacggtcttgacatcgctgttaggcttttggagccactcaaagcggagtttcctattttgagctacgccgatttctaccagttggctggcgttgttgccgttgaagtcaccggtggacct

SEQ ID NO: 259307 - DNA, 382 bp, Glycine max
ccggctggagccactcgtacgtcagaactgatctatttcccttctccttcttacttctgtcgttctctctgcggcaaatcgaaaaactcaccaaatcgcggggccaaattgcaatttctcgagcgaactttgcgagttctagggttcccccactgccatggaccaggccgaattaacctccgaacaggttctgaggagggacatcccatgcacaaagatcccatattctggcgagaaaatataaacaactttgaagaaaatgatttccagatcctaagggtcctaataacaattttggacacgtccaatgatccaaggactctggctgttgcttgctatgacctttcacagtttatccagtgccattctgctggacggatca

SEQ ID NO: 259308 - DNA, 348 bp, Glycine max
atacacatacaacatatttcgctacattaaaggctatgatcaactctctagcgcatgcatttcaccttaggatggcattcatctcctatatgatacatttacgcatataatcccatcaaaggctctgatccttattactcgttccttactcccaataaagccccttcagctggaacgtaataagagtaatctactggccctgctcacacacatatacaaacaccttaacactagagacacccagacaccaacatcgtaacaatgcactctgaaaaattatcattgactacagcaccatcccacaacattacttaacctacatcccatactatgaatctacaattatca

SEQ ID NO: 259309 - DNA, 388 bp, Glycine max
cttgagatctcatatatcatggctacctccatggtgaagcttatgcttttctctgctctcatactcttgtccttgcaagcagttgtgtctgtaacaccactgcattttcaacatccactagaccctttaaccaaacaagagataagtcttgtccaaaccatagtccaaaacaagtacccaagctcaagtaacaggttgagcttccactacattggactcgacgaacctgaaaaggatgccatcctcaaatgggaatccatcaaaccaactgttataactgtccctcgcaaagccttggccattgttataatcaacagccaaacccacgagatcttaattgatctaaaggcaaggcgcattgtctccgacaatattcactccgggaatg

SEQ ID NO: 259310 - DNA, 258 bp, Glycine max
cactatctatacacaaacaacatggttcgctacattgaaggctatgttcagaaggtgaaccgagggaatgcacctttagttgttgggcagctgctagatgatgaatgcgcagaagattttatcaaaggcttgatcctttctgttcgttcattactgccagtggagccccttgtggaggaatgtgagaagaggaatcgacttcgtatgctcacacagttcttggaacaccttgtaagtgaaggaagccaggatgtacat

SEQ ID NO: 259311 - DNA, 433 bp, Glycine max
cccacgcgttcgagctagctagctagcaagcaagcacagagatggaggcaaagcgaggccgggccctcatgtgcttggcacgtgtttcactcttcctctgcgctctaaccctatccgctgctcacggaagcaccacggttcaagacatcgcgagaaagttgaaactcggggacaacgagcttctgcgcacggagaagaagttcaaggttttcatggagaattacgggaggagctactccacagaggaggagtatttgcgccgcttggggattttcgcccagaacatggtcagagcggcggagcatcatgcgctggaccccaccgccgtccacggcgtcacgcagttctccgatctcaccgaggacgagtttgagaagctctacactggcgtcaatggcggcttcccgtcatcgaataatgccgcccgcggtat

SEQ ID NO: 259312 - DNA, 372 bp, Glycine max
  unsure (1)..(372): unsure at all n locations
tgcttaaggagcagggattcaggggctttttccgtggctgggtgcctaccttgcttggtgacagtgcccagggtgcttgcaaatttggcttctatgagttctttaagaagtactattctgatattgctggcccagagtatgcaagcaagtacaagaccttgatctaccttgctggttcagcatctgctgaggttattgctgatattgctctttgcccatttgaggctgtgaaggtccgtgtccaaactcagccaggttttgcaaggggtttgtctgatgggctcccaaaatttgtcagatccgaaggaaccttanggctgtacaagggattagtgcctctatggggacgacagattccatacacaatgatga

SEQ ID NO: 259313 - DNA, 376 bp, Glycine max
attcccgggtggacgcacgcgtacgcgggcgcgtgggcggacgcgtgggcggactcttggggctccgtaccagtttcactgcatgaattttatagaaaactgtgcggacatgttggtttatcaggacctccttacaggtgatgagcttctctcggactccttccgttacaatgaaattgagaatggaatgctgtgggaagttgaggggaagtgggttgttaagggagcagttgatgttgacattggtgcaaacccttctgcttacggtggaaaagatgagggagtcgattacgcagcttgtaatgttgttgacattgttgatacattcaaacgttcagaaccaccccgcttttgataaaaaacagtttgttacctt

SEQ ID NO: 259314 - DNA, 257 bp, Glycine max
ccgaattccccggtcgactcacgcgtccgcccacgcgtccgtccacgcgtccctccacgcgtccgcaaattagttcattctgtttgcgcagttccctacctctcctttcaagatgcagatcttcgtcaagaccctcaccggaaagaccatcacccttgaggtggaaagctctgacaccatcgacaacgtcaaggccaagatccaggacaaggaaggaattcccccggatcagcaacgtctcatcttcgccggaaagc

SEQ ID NO: 259315 - DNA, 206 bp, Glycine max
ccggaattccccgggtaactcacgcgtcgggtgaacgacgcgcacagataacataagcacagaatcgaaagaagacaacttgtttgagagagattgggatggcttcgacgaagaagatcacactgaagagttcggacggcgaggccttcgaggtggaggaggcggtggcggtggagtcccagacgatcaagcacatgatcgaggac

SEQ ID NO: 259316 - DNA, 138 bp, Glycine max
acgcgtcgggccacgcgtccgtgcagattgagtttgctaagtacaagagcatctcttctcggtttgtagtattgcttaaggagcacggattcacgggctctttccgtggctggatgcctaccttgctagcttacagtg

SEQ ID NO: 259317 - DNA, 447 bp, Glycine max
  unsure (1)..(447): unsure at all n locations
catggatatggaattctcgtgtgattanctctttggggattgctcgtgctttagagtacctacatgaagtttgttcaccatctgtngntcataaaaaatataaagtcggccaacatattgcttgatacagattttaatcctcatctttccgacagtggattggcaagctatattccaaatgcaaaccaggtattgaacaataatgctggatctggatatgaagctcccgaagttggcttgtctggtcattatactcttaagagtgatgtttatagctttggagttgtcatgttggaacttcttagtggacggaaaccatttgatagctcaaggccgaggtctgagcaggctttggttcgatgggcaacacctcaactccacgatatcgatgccctggctaaaatggttgatcctacattggaagggatataccctgtgaagtccctt

SEQ ID NO: 259318 - DNA, 254 bp, Glycine max
gtgagaagcccgtcaccggtgtgggtttctgtaaccctgaggaaattccatggggtgaggttggtgctgattatgttgcagaggcaactggtgtattcactgacaaggacaaggctgctgctcactcgaagggtggtgccaagaaggccgtcatctctgccccaagcaaagatgcacccacgttcgaggttggggtcaacgagaaggagtccaggccagagcttgacattgttgccaatgctagctgcactacc

SEQ ID NO: 259319 - DNA, 274 bp, Glycine max
  unsure (1)..(274): unsure at all n locations
tactgcgcaagtaaaagagattcaatgtcaaattgctgtagaagatgggatgtacttgctgattttttacaagttttctgagatcagggtccctatggttccaaagctttctagtggnctttataatggcaggctaaagatatggccttctaaggactgggaactagagtctattcatagctcggaagttttggatatgataggggacacataactactgtaactggcttgagagcaaaatctagtgtaactgagtgttgggcaacaacccaag

SEQ ID NO: 259320 - DNA, 335 bp, Glycine max
ggaattcccgggttcgacccaggcttcggaaagagattgtttgtgtgtgagttagtatggctggaaaaggcgagggtcctgctatcggaatcgatttgggaacgacgtactcttgcgtcggcgtgtggcaacacgatcgtgttgaaatcatagccaacgatcagggtaacagaactaccccatcctacgtggctttcaccgacacagaacggttgatcggcgatgcggcgaagaaccaggtcgctatgaacccaaccaacaccgtttttgatgctaagcgtttgattggaaggcgtttttccgatgcatcagtacaaggggacatgaaattgggg

SEQ ID NO: 259321 - DNA, 289 bp, Glycine max
cggtcgatcacgcgtccgccacgcgtccgaccttaattttcttctcattcgcttcaaatttcaggaaatgaattatggctcaaccctcaacaagaataggccttgctggactggctgttatgggccaaaatctagcactcaatattgctgagaaaggctttcccatttctgcttataaccgaaccacttccaaggttgatgagactgtagaacgagcaaaacaggaaggaaatcttccagcttatggctaccatgaccccgaagcttttggtcattccattcaaaagcc

SEQ ID NO: 259322 - DNA, 332 bp, Glycine max
accgtccgaattcccaggtcgacccaagccgtcgggaagaatcactcccttatccatgtccacaccacaccatggcctcaaccaacgctctctcttcagcctccattctacgctctcccaaccgccagtctctgacccgaagagcgaaccataatggaagagtaaattaccggaaaccgaataaccgtttctccgtgaaagcctccgccaaagagattgcctttgaccagcattcccgctctgctatgcaggccggcattgacaagctcgccgacgctgttgggctcactcttgggcccagaaggaggaatgttgtgttggatgagtttgga

SEQ ID NO: 259323 - DNA, 337 bp, Glycine max
  unsure (1)..(337): unsure at all n locations
cgacctcgtccgnccgtgtgatataaacctgcgttgcgctaatcgacaccgttttcactgtctctgagaatggaggcactaagtcgctccgtggaagaaatattcgaggatttccagggccgaagagccggcatcatcaaagcccttaccaccgatgttgaagatttctacagccaatgtgatcctgagaaggagaatttgtgcttatatggatttcctaatgagcaatgggaggtaaatttacccgttgaagaagttcctccagagcttcctgagcctgtcctaggcattaactntgctagggatggcaatgctganaaagactggttatcattag

SEQ ID NO: 259324 - DNA, 371 bp, Glycine max
cccgcgcgtccggtccagacgagactgcatatttccgcatgttgttagacagggaaaaggttagtaatgctgccgttatgattcagccgtcattgatatcgtatccattaaatgcactgcctgcaccagcattgttagatgtggcttccattgctgcagacaggattttgttgctagattcatattgcagtgtggttatttttcatgggatgacaatagctcaatggcgcaacttgggataccagaaccaacatgaacaccaggcatttgcacaactattactagctccgcatgacgatgcccaaatgataattagagaacggttcccggtgcctagactggtagtgtgtgaccaacatggttcccaagct

SEQ ID NO: 259325 - DNA, 305 bp, Glycine max
gccacgcgtccgcccacgcgtccgtacgagctgaccccaaacaaagactctcagcagttgaagttcttaatcatccttggatgagagaagatggagcatctgataaacctctagatgttgctgttttatccagaatgaaacaatttagggcaatgaacaagctaaagaaagttgctctgaaggttattgctgaaaacctttctgaagaagaaatcattggtttgaaggaaatgtttaaatccatggacacagattacagtggaacaatcacttttgaagagttgaaagctggtcttgccaaaact

SEQ ID NO: 259326 - DNA, 382 bp, Glycine max
gtcggtaccgttccggaattcccgggtcgactcagccttcggccacgcgtccgcccacgcgtccgtatcagcagtcgttacagagactccatagcccgaaaatgcctttcaagaggtacgttgagattggaagggttgctcagatcaactatggcaaagagtatgggaggctcgtggttattgtcgatgtcattgaccagaatagggctcttgttgatgctcctgacatggtgaggtcccaagtgaacttcaagaggctatcactcactgacatcaagatcgatattaagaggatccccaagaagaaggatctcattcaagccatggaggctgctgatgttaagaacagatgggagaagagttcttggggcagaaaaactga

SEQ ID NO: 259327 - DNA, 382 bp, Glycine max
  unsure (1)..(382): unsure at all n locations
ccgttccggaattcccgggtcgatcacgcgtccggttctttctctctcaaaggaaagataaggaaagaaaagaaaagaaaaagaagagagtgtaggtaaacagaagcacacactacacagttaccaaaatcaggttcaaacgcacagatctgggagaagagaagaagaagaagaagaagatgggacaggatcagaaccagagatcgctgatctacgcgttcgtgtctcgcggcacggtgattctcgccgagtacactgaattcagtggcaacttcaacacaatcgcgttccagtgcctccagaagctccctgcctncaacaacaagttcacctacaactgtgacggccacaccttcaactacctcgtcgacaacggattcac

SEQ ID NO: 259328 - DNA, 388 bp, Glycine max
cggaattcccgggtcgacccacgcctccggcccacgcgtccgataacaagctattattagttcgattttgtagtaagtgaggtgccaatatggtgaagatagctcttggtactttggatgactcttttagcgctgcctctcttaaggcttatttcgcagagttccacgcaactctgattttcgtgttcgctggtgttggatcagccatcgcttacaacgagcttacaaaagatgcagccttggatccaacggggctggtggcagtagctgtggcacatgcatttgcactgtttgtaggtgtctccgtcgtcgacaacatctcaggtggccatttgaacccagctgtcacttttggattggccattggaggcaacatcactctcatcac

SEQ ID NO: 259329 - DNA, 372 bp, Glycine max
  unsure (1)..(372): unsure at all n locations
cggaattcccgggtcgacttacgcgtcgggaaatgcattcaaagataccgagattatggatttaaacacaaaagcaattaatacaagactaagcgatttgaagattgaggggatgcaggaactggaagcagtgacaagtgagattgttaggttgattgaaacagcaacagtgcctattttggcagttgatttttatgttccacccattgaccagcaaaaatatctcaagtcccaaatatcatcttgggagaagttctcaaggtagtgtccttgatatattgcccaatacaactaaggagacactactagatcattgggtgtgcagtcaggaattgctgangcacttttggtcttcatatccaattacaacac

SEQ ID NO: 259330 - DNA, 383 bp, Glycine max
ccgttccggaattcccaggtcgacccacgcgttcggccaacgcgtgggttagatttggtttgcctacaatgtgaaggcacaagcatttaagactgccattgaagccgcttgtatgcttctgaggattgatgatatagtgagtgggatcaagaagaagcaagcccctggagctgctccttcaaaacccaaggttgagaccgaggcagatgctgacagtgagcaaatccttcctgactgagaatctcggttcaacagacattgttttttggtagagttgatgatgtgcaaggttctttatcttccttaaatcttatcactattcttaggagttttgagtcctttattgggatgctgttttttgtgccttctctactgtttgcaag

SEQ ID NO: 259331 - DNA, 286 bp, Glycine max
accgttccggaattcccgggtcgatcatcgctgaagcgttcagagggcacccggcaacacctaaaccaccaccgcctctcctacctgcgggagccatggccgccaccgactcctccgctgcttcgtcacgccagctttcgcagagggagacggacatccagatgatgctcgccagcgacgttcacctcggcaccaaaaactgcgactttcagatggaacgctacgtcttcaagcgccgcaccgatggtatttacataattaaccttggaaagacatgggagaagct

SEQ ID NO: 259332 - DNA, 383 bp, Glycine max
atgtcgaagcgtggtcgtggtggtttggttgggaacaagttccgcatgtcgctgggtcggccagtggcggcgacggtgaactgcgccgacaacacgggggcgaagaacctctacatcatttcggtgaaagggatcaaaggccgtttgaaccgtcttccctcggcctgcgttggcgacatggtgatggccaccgtgaagaagggaaaacccgatctgaggaagaaggtcttgccagctgtcatcgttcgccagcgcaagccatggcgccgaaaggacggcgtctacatgtacttcgaagataatgctggtgttattgtcaatcccaagggagaaatgaaaggttctgctatcactggtcccattggaaaagagtgtgctgattt

SEQ ID NO: 259333 - DNA, 263 bp, Glycine max
cccacgcgtacgcactggtgaggcttaagtctatggtgtcgaagatgaataccagctggaggatctggagattgttgcagcaaattacttgttgaaagtgggggtgtctaattttaggaatgcttgggaaagcttaggccctgattttgaccgagtggatgagtatggccttggtcctaaacagagcttggctgaagctgtaaacactgttatcaacctacttggcttgaagccttgtaagggcacataggaggttccaccca

SEQ ID NO: 259334 - DNA, 304 bp, Glycine max
  unsure (1)..(304): unsure at all n locations
ctcttcttcgtctcaaacctcttctgtccttcgattcattccatttcttccagaatggtcaaagacccagttcgcgttctcgtcactggagccgcagggcaaattggatatgctcttgtccctatgattgctaggggagtgatgctgggtcctgaccagcccgtgatcctncacatgcttgacattcctgcagcagcagagtcgctgaatggagttaaaatggaattggtggatgctgcattccctcttcttaaaggtgttgttgctacaaccgatgtggttgaggcatgcacctgggtcaata

SEQ ID NO: 259335 - DNA, 388 bp, Glycine max
cggaattcccgggtcgcccacgcgtccgatcgcaatggccatggctcttccttttcgcagactctcctccaccctcaacagacctctcgccagcgctacttccatttatcatcgcatgtcctcctcgctctccgctcaggagaaagacaaatctcgcgccgattggataaagcagctcaacgatcctctcgagaccatcgatcccgagatcgctgacataatcgaactcgaaaaagcgcgtcaatggaaggggttcgaacttataccttcggagaatttcacgtcgctgtcggtgatgcaagccgttggatcggtgatgacgaataaatacagcgaaggatatcccggtgctagatactatggaggaaatgagtatattgacatggct

SEQ ID NO: 259336 - DNA, 340 bp, Glycine max
  unsure (1)..(340): unsure at all n locations
cggaattcccgggtcgacttacgcgtccgggtgagtgaaaatggcggtacccttgctctccaagaggatcgtgaagaagcgcgtcaagaagtttatacgcccccagagtgatcgcaagatctccgtcaagccaagctggcgcagacccaagggtattgattctcgtgtcaggagaaagttcaaaggatgcactttgatgcccaacattggttatggctcagacangaaaacccgccattatctaccaaatggtttcaagaaatttgtcgtgcacaatgtgaaagacctggaacttctcatgatgcataacaggacatactgtgctgagattgctcacaat

SEQ ID NO: 259337 - DNA, 342 bp, Glycine max
cggaattccccgggtcgactccacgcgtccgtctgaattagggtttcttttccctttttggcaatgatgaacggaggaggaggacgactaatcgtgctgataactggagtcggaaaaggactcggaagagccctggctcttgaactcgcccatcgtggtcacactataattggctgctaccgatctcaagataacctcaattccctacaatcccaactctatctgtcttcttccaaccatttgttactcaacgccgacgtgagctccaatgagaacgttcaagaaatgtgccgcgatgtcatggacaatagatctgatgctgatatcatactgaacaatgca

SEQ ID NO: 259338 - DNA, 361 bp, Glycine max
cgcgtcgggccacgcgtccggttttttcctcttgctgctctttgccttctctgacacatgtggtgccttgtagagcgtgttttggcaggaaggtggtatggcgaaggacgttgaggttgctgagcgtggctccttctctgggaaggactaccaggaccctccaccagcaccactcattgatgctgaggagctcacaaagtggtccttttacagggctctcattgctgaattcattgccactttgctcttcctctacattactgtgctcacagtcatagggtacaatcaccagactgacctcaaggaaaatggtgaaatctgtggtggggttggcattcttggcattgcatgggcctttggt

SEQ ID NO: 259339 - DNA, 345 bp, Glycine max
gaaggcatggaaggttggtgttctcacttcggtcatcaagcatatgtcccctgatattgccaaaattcgcaagcttgtgaggcagtctaagtgtcttcaagacaaaatgactgcaaaggaaagtgcaacctggcttgccatcatcaaccaaaaggaacccttggctaaagagctttaccctgactatggccctccatttccctctgctggaggtaatggatccttggagatcaatgattgcagcgagtatgatgttgatggggccgaaaaagagctgaactttgatgtggaggaccggaagcctgaccatcttcttccatcaaacctcggtatggagagaatgag

SEQ ID NO: 259340 - DNA, 285 bp, Glycine max
gcaggcttcaactggagcaagaattttgtgattcctcttcatcttccacctggtgacggatttaccgaaagaacattaaaaattgaagggacccctgaacaaattgagtctgccaaacaaatggttaatcaagtcatcagtggcgagaatcgtcagagaaatccatctatgtctggtggttattctcagcaaggttaccaagctaggccaccgactagctggggtccccctgctgctccaatgcaacaatctggttatggctatgtgcagccaggagcatactct

SEQ ID NO: 259341 - DNA, 339 bp, Glycine max
gttggtgggctcccaaattcccaatttagtgatgatcttacgtaaaagaaatgttgttggcaccaagggaaaaatgggtatagatttcatgattctggtgttaacattgtcatggtttcgtctgactactatatgcgtctcagctacaaaacaagcatacccaccaacaccacatccgaaccagaacctaaggtttgaccaaaatggagaattcaagatattgcaggtggcagatatgcactatgcacatggcaagaccacgcattgcttgaatgtgctcccttcccagaatttttcttgctctgaccttaacaccactatctttcttaacagaatgat

SEQ ID NO: 259342 - DNA, 362 bp, Glycine max
acgcgtcggggacgcgtgggcggacgcgtggtcatctttctcctttctttcatcaccgttggaagagactgagatgggttcaaaaaccaagacttttacctttgaggaggtggctaagcacaatcacaggaaggattgctggattatagtcaaagggaaggtgtatgatgtcacccaatttttggatgatcatccaggaggtgatgaagttttagtgactgcaccagagaaggatgccaccactgattttgaagatattgggcacagtgattcagcaccagagatgatggaaaaatactttgttggtgaggttgacaccaacacttcttccagcacaggttaccagcagcagcagtgtacgc

SEQ ID NO: 259343 - DNA, 331 bp, Glycine max
gtcgactcacgcgtccggcctggtggatactggattttgtatggccccccaattaattggaaaacataggaccaaacatggaagcgatccaaggaagatctgaaggcagaacaaacaaaacttgaggagttagctgaaagtctttgttgggaaaagaagtatgaaaagggtgatattgctatttggagaaagaaaataaatgctaaatcctgcaaaagaaagtctcccaatgtttgtggtttagataatgctgatgatgtgtggtaccaaaaaatggaggtctgtaaaacccctttacctgaggtaaccagcaaaaatgaagttgccggag

SEQ ID NO: 259344 - DNA, 287 bp, Glycine max
cggaattcccgggtcgactccacgcgtcggctactgctctgcttcaaccttgcggaagaagaagacgccgcagccatggggaagtactccagagaacccgacaatcccaccaagtcctgcaaggccagaggcgctgaccttagagtgcatttcaagaacactagggagactgcctttgccatcaggaagttgcccctggttaaagctaaaagatacctgaaggatgttttggcccacaaacaggccttccttttccgacgcttctgtggtggtgttgggaggacagc

SEQ ID NO: 259345 - DNA, 301 bp, Glycine max
  unsure (1)..(301): unsure at all n locations
ccgttccggaattcccgggtcgacttaaggcgtcggcgctgttcctacaatcattccatttgtgcccttccggtcgcaccctcctccgttcctccgtctccgatttccgaccggcattcgacgtcctcgatgccgaccgcgacggcaaaatcagccgcgacgacctccgcgccttctacgccggagtcggcggcggaggagatgacgtgatcggngcaatgatgacagtggctgacacgcaataggacgggttcgtggagtacgaggagttcgagcgcgtggtctcnngcgagagaaagcc

SEQ ID NO: 259346 - DNA, 361 bp, Glycine max
cgcgtccggtgacacctgatccgcgagcgagttattgtgaagatgacgacgattcgcagggtttgctgcaacgatcttcttcgctttgccgccgtcaatctcgaccatctcaccgaaacattcaacatgtccttctacatgacctatcttgcaagatggcctgactatttccacgttgccgaaggccctggaaatcgaatcatgggttacattatgggtaaagttgaggggcaaggagaatcttggcatggccatgtaactgcggtgaccgttgctccagagtatcgaaggcagcagttagccaaaaaacttatgaatctgctggaagacatcagtgacaatattgataaggctttttttg

SEQ ID NO: 259347 - DNA, 300 bp, Glycine max
ccagaacactggttctttctcccacttcatctccaccttttccctcgtgatcatcgacggggcgagaggcgcctctcaatctcaatccacagcgtcccacgccaccacgcgaccgggcgtgatggctcctcgcggcaccgctgccgccactgccggcatgcgccgtcgccgactcggcggaggaaccagctccgcctcggtcagcggcggctccggcgccggcggaagcaatatgctgcggttctacaccgacgacgcccccggcctcaagatctcgccgacggtggtgctcgtcatgag

SEQ ID NO: 259348 - DNA, 352 bp, Glycine max
gtggcctcactgaataggagcttctggaacacaatccgaagtggtgagctgtgcaggtggagaagactgaatggcataatagaacactggatttatttttcctgtgccctccttgaatgggaggcctatgatccaattcgtgaacggtggatgcatttaccaaggatggcttctaatgaatgcttcatgtgttcggataaggaatctttagccgtaggaactgaacttcttgtatttggcagggagatgagatcccatgtcatttacagatacagtcttttgactaactcatggacatctggaatgaggatgaatgctccaagatgcttatttggatctgctagcttggggg

SEQ ID NO: 259349 - DNA, 359 bp, Glycine max
  unsure (1)..(359): unsure at all n locations
aattcccggtcgccttatccttcggccaccctccgggaacctggaaatgaatctctgatccattttgtgtgttgagtttgattttgtattgttatagattacagatttggtgggcaatggatagggacaacaaatctcctccaccttcttctctttatgtgaaatcatcatcttcatccttcagccacgacgacataagcgccatgccggagaatccacccaagaacagaggccacagacgcgcccattccgagattataaccctaccggacgacctatccttcgacgctgatnctcttccccgacgacgacacgacttgctctccctctacctncaattcgatcagctcgattcctct

SEQ ID NO: 259350 - DNA, 358 bp, Glycine max
ttcccgggtcgacttaggcgtcggcccacgcgtccgcggacgcgtgggtacacataaacacactccaagcgctcgggagcaacctacgctgtcttcgccaccgcgcgatcgccgtcgatggagtctctcttcgactcgatcaacgtgcgcgaccttctttcggcgcacgatctctcggaccctaactcccctctctcggcgccggatctccgtctcctgatccagcgcctggagtcgcactccctgcaaatccgctctcaggtgcagtcctacctcgtctcgcaccgcgaggatttcgcgcgcctcttttccctctgcaacgacgctggttcgcagacgcgcgaggtctccgacgacg

SEQ ID NO: 259351 - DNA, 344 bp, Glycine max
  unsure (1)..(344): unsure at all n locations
attccccggtcgacccacgcgnncggccaattcgtccgcccacgcgtnctgaaagatcttatccaattgaaatttagaaatgactgggataaacttaagaattcaattattgaaattgaataagtaaacaatttaattggattggtcgaatggtatcaaaaaaatggagtactaactcccatttctcattcatcattgaattaaccgatcaacttgctttgttatcgaacattcctatttgatttcaaaaattttccggaaaaaattcgaatctattattatatgccaatcaatcctactacttctggtcctgaaggttctgcgcttggaaaaaaaaatctggg

SEQ ID NO: 259352 - DNA, 430 bp, Glycine max
cccgattctgcttaaattggcacactaccttttttcgtgggaacccgaaccaatagaacgaaaaaagagtccaattttgtgaaaattattaccattcattcttattcatcaacgtccccccttctgtgcccacttccaaatcttctcctctcgctatgggttgtggctcctcccttccagatagggattcaaggcagttgggtcgacccaattccgagaatggtggagggcaggacgccaagaatctaagggtcaagcttgttctcttaggtgattctggtgttggcaaaagctgtattgttctacgatttgttcgtggtcagtttgatccaacatctaaggtaactgttggagcttcttttttgtcacaaacaatagctctgcaagactctacaacagtcaagtttgaaatatgggatactgctggtca

SEQ ID NO: 259353 - DNA, 330 bp, Glycine max
  unsure (1)..(330): unsure at all n locations
gtaccggtccgattcccgggtgacccacgcgtccgcaaaaaccctaggtagagagctcttcttccctttctcacagcaatggccgcgcggagcacgccctctcgtcaccgtgcaggccctcgacggtgacatggcaaccgatgcctncgncaccgttcccatccctgacgtcatgaaggcctctatccgccccgacatcgtcaatttcgtacactcgaacatctncaagaacagccgccagccatacgccgtcagtcgtcgcgctggtcaccagacctncgncgaatcctggggtaccggccgagccgtctnccgtatcccccgtgttcc

SEQ ID NO: 259354 - DNA, 378 bp, Glycine max
ccggattcccgggtcgccttacgcgtccgccaagatatcgttgctctatctggtggtcacactattggagctgcacacaaggagcgttctggatttgagggtccctggacctctaatcctcttattttcgacaactcatacttcacggagttgttgagtggcgagaaggaaggtctccttcagctaccttctgacaaggctcttttgtctgaccctgtattccgtcctctcgttgataaatatgcagcggacgaagatgccttctttgctgattacgctgaggctcaccaaaagctttccgagcttgggtttgctgatgcctaagcaacgtttaggggattgttgaaaaggcatggtgcccataatatttctctaaaa

SEQ ID NO: 259355 - DNA, 342 bp, Glycine max
  unsure (1)..(342): unsure at all n locations
ccggaattcccggnnnnnttgnnnnnnngggcgcatattctcatttcaatttgctgttgcatttgcgtttcatttggcgtggggtttctttctggaagcttcgttcgggcatcaatggcgtccttcgatgaagctcctcccggaaactccaagaacggcgagaagatcttcaaaaccaagtgcgctcagtgccacaccgtcgacaaaggtgccggccacaaacaaggacccaatctgaatggtttgtttggaagacaatctggtacaactcctggatattcctattctactgctaacananacatggncgtgatttgggaggaaaagaccctctatgattac

SEQ ID NO: 259356 - DNA, 341 bp, Glycine max
  unsure (1)..(341): unsure at all n locations
cgtcgatctgagctcaaaacaatgtcgaaaccaaggtactctcgtcttccagctcgcatgtcatcgtcgtcttccacgctgattctgactctgttcctggtcttcaccttcctcgttctaattctcctggctctcggcatcctctccattcctagctcctcgcgtggaaatttgcccaaacctaacgatctcgcatccattgctcgcaacacaatccacacttccgacgatgacgacgtgaggggagagcagtgggttgaagtagtgtcgtgggagccgagagcctttgtctatcacaattttctgacgaaggangaatgcgagtatctaattgacatagc

SEQ ID NO: 259357 - DNA, 197 bp, Glycine max
gggacgcgtgggcggacgcgtggctggaacgtggaactgcggaaaccggagtgtctcacttctcagatcagatcaatccgacgtcgttgcagttataatggctccattcagcggcgatgagacggcaccgtttttcggcttccttggagccgcagctgccctcgtcttctcctgtatggaagctgcctatggcacag

SEQ ID NO: 259358 - DNA, 340 bp, Glycine max
gaagtcccgtgcggtcagcaagcctgataaggaaattgcaaagaatcacctggtgagaaataagtacacactccagcttggcgagaacgagctcgtccttaaggaactggatttattgaaagatgacacaaatgtttataagttgattgggccagtacttgttaagcaagatttggccgaggccaatgcaaatgtccgcaagaggatcgaatacatctcagctgaatggaagcgtcttgatgccactgttcaagatttggaagagaagcaaaatagcaagaaagatgcaatactaaaattgcaacaaaggattcaatcacttcaggctgggaaaggcaag

SEQ ID NO: 259359 - DNA, 357 bp, Glycine max
aaaccctaggttgagagcgctgatacggtgaatcggagtgcagccatatgggcagcttcagaagtccttgaagtgctgctctagtttgaggcacaatgagattggagaaatgctggttttgctcttcaaccatataccctggacatggaatccagtttgttcgtaatgatgcacagattcttcggtattgtagatctaaatgccacatgacctttaatctgaagagaagtgtttagatgccactgttcaagattgggaagagacgcaaaatagcaagagagatgcaatactaaaattgcaacaaaggattcaatcacttcaggctgggaaaggcaaggcatagttttccctcacata

SEQ ID NO: 259360 - DNA, 343 bp, Glycine max
cccaggcgtccgcccacgcgtacggttgattgacaactatgacagttacacttataatggattccaggaactatctattattaatggcgtgcctcctgtggtgatccaaaatgatgattggacatgggaagaactttgccattacttatacaaagaaaatgcttttgataatattgtaatatcacctggacccggttctccagcatgcccggaagatataggcatttgtcttcagctgttgcttaagtgctgggatattcctattctgggtgtttgcctaggacaccaggcattaggttatgtgcatggagctcaagttgtccatgcatctgaaccaatccat

SEQ ID NO: 259361 - DNA, 428 bp, Glycine max
ccggctcgagccacgcgtccgcctgaacctaacccaatcttcaccttcgatataacaaatcccattcctgcatctcctcgttcagcatcgctgcaaactggactttccatttttgtccttcctccccgagaaaaaaatggcgaacgcagcatctggtatggccgtccatgatgactgcaagctaaagtttttggagctcaaggcgaagaggacgtaccggtttatcggttttaagattgaggagaagcagaagcaagttattgtggagaagctgggtgagcctgcaaatggttatgatgatttcgctgccagtcttcctgccgacgagtgtcgatatgctgtttatgatcttgattttgtcactgaagagaattgccaaatgagcagaattttctgcattgcttggtcccctgatacatctagggtta

SEQ ID NO: 259362 - DNA, 415 bp, Glycine max
ccgacgcgtgggctttcctactctcttctattccattcagtcattatactattaaatctcccatggcgcgttcctttaccaccctcacttgactgattacgactcacatgcactcacgccattctttctttgctgaatcactctgcattatgaactttctgacaagctcagtgtatatgatccacatggaaaccgacgaattctctaagcgtgattccctttcagcttcaattcgataaacccctagcttctcatatcaaaattgcagattggaatcccgagaatgacttgctagccatggcgactgacgattctaacatcttgcatcatcgttccaattggcaacgcttgtggaccattactccaagaagatgcataacatctttgggtcggcgtcctgatggaaaagcaattg

SEQ ID NO: 259363 - DNA, 426 bp, Glycine max
ccgttccgtaattccagcgtcgaccgcacgcgtccgccgacgcgtgcgctttcttactctcttctattccattcaatcattacactattaaatctcccgggacgcgttcctttaccactctgacttgactgattacgactcacatgcactcacgccattctttcattgctgaatcactctgcattatgaactttctgacaagctcagtgtatatgatccacatggaaaccgacgaattctctagcttgattccctttcaccttcaattcgataaacccctagcttctcagatcaaaatctcagatagcaatcccgaaaatgactacctaggcatggcgactgacgattctaacatcctgcatcatcaatccaattggcaacgcttcacgaccattacttcaggaagatgcataacatcttttggat

SEQ ID NO: 259364 - DNA, 334 bp, Glycine max
  unsure (1)..(334): unsure at all n locations
nccacgcgtncgctcgttgattcggatctagagtcttttttcactcttcagttctcgttgttgttgttcgctttcctgaaactagggttttcaatttcgattcattcgttaataattaaagatgtttgggagggcaccgaagaagagcgataatacgaggtactacgaaatcctcggcgtctcgaagaacgcttcgcaggatgatctgaagaaggcttacaagaaagccgccatcaagaatcaccctgacaagggcggtgatcccgagaagtttaaagagctggcacaagcatatgaggttctgagtgaccctgagaagcgtgagatatatgat

SEQ ID NO: 259365 - DNA, 407 bp, Glycine max
cggacgcgtgggcttttctcctctcttctattccactcagtcatttcactatttaatctcccattggtcgttcctttaccaccctcacttcactgcttagggttttcttgcactcacgccattctttctttgctgaatcactctgcattttgaactttctgagaagctcagtgtttctgttcgacatggaaaccgacgaatcctctcgcgtgattccctttcagcttcaattcgataaacccctcgcttctcagatcaaaattgcggagtggaatcccgagaaggacttgctcgccatggtgactgacgattctaagatcttgctccatcgtttcaattggcaacgcttgtggaccattactccaagaagatcataacatctttgtgttggcgtcctgatggaaaag

SEQ ID NO: 259366 - DNA, 353 bp, Glycine max
ttcccgggtcgacgcacgcgtccgaacgtattgctaaccacaagaagatcacttcctactttcttcttcgctcactatataagccagtcatgggtctcttctctattttcaggggctttacccgcctattcaggcatcatggctagcgctaatggctcaggctattaatgtcgcctgcactattgactgagcatacgcctgatcaggaaacggaatccagtacatgagtaagatcgacccacatgatgacagctctactaacaattggattaagaatgacaggttcctcatggcttcatactttcaatcctttggatactatctcgagacctggcatagagttctattctaag

SEQ ID NO: 259367 - DNA, 365 bp, Glycine max
ttcccggctcgaccgcacgcgtccgaacctatagctaaccacaataatatcactacctactttctcctccactcactatataatctatcgatgtctctcttttctattttcagctgctcaacccacctatacaaaaatcataactaacgcttatgactcaatctattaatgtcccagcactattgactgaacacacgcctgatcaacaaacagaatcacacaacattaataagatcgacccacatgatcagtgctctactaacaattggattaagaatgacacgtacctcatggattcatactttcaatccttattatactatgtcgagacctagcatatactctcattctaatgtctccatcgc

SEQ ID NO: 259368 - DNA, 438 bp, Glycine max
  unsure (1)..(438): unsure at all n locations
gaagagggcatgatggtcccacgcatcataatcgcctcctaaatcaacggatggaaacgcacgatgagacaaaaccagttcaaccatccagattcgcggttccaaattacatcatttcgcatttaagatataaaaaaaatgaagaaaaagggcgtcatttcctcgccacaccctgtttcgtgaagctcagtgcatcaagatctctctctctgtaatcgaaaatgagcaagggaccgggtctctttaccgatatcggcaaaaaatccaaagatcttttgactaaggactacaacttcgatcagaaactcaccatttcctcatacagcatctncggagtggccctcacttcaacatctgtcaagaaaggaggactcttcactggggatgtggcagcactgtacaagtataagaacactattattgatgttaaactggaca

SEQ ID NO: 259369 - DNA, 433 bp, Glycine max
attttctcagcaaggacctcgagctatatgcattctttcagctaatggtgtcatatcaagtgtcacagttcgtcagcccgattcttctgggggcacattgacatgagggacggtttgagattctgtcattgtctggctcattcatgcccaatgaaagtggaggaacacgaagcagatcccgtggcatgagtgtatctttggctagccctgatggacgtgttgtacgtggcggagtagctggtctgctggtggctgcaagtcctgtgcaagtagtggtaggaagttttctggcaggaaaccaacatgagcagaagccaagaaaacagatacacgaggttatatcaagtgtgacaccagctgcagttgttccaatctctacacttgatccagtatcaattctatcagcagcgtcttccattcgcaacgataattg

SEQ ID NO: 259370 - DNA, 346 bp, Glycine max
aaagcagagccaacaacaagaagaacaaaaccaacatcaacaaccacaagaagaagaagcttgcaaaggagaagaatcttcagttgaaagggaagaacacacaagaacaaagagaggaagaaacgcgaatgaagggagaattagagttgccaccagggttcagatttcaccccactgatgaagaattggtgaatcactacttgtgtaagaagtgcgcgggtcaaccaatcgcggttcccatcatcaaagaggtcgatttgtacaagtttgatccatggcagcttccagaaattggctactacggcgagaaagaatggtacttcttttctcctcgggatcggaaata

SEQ ID NO: 259371 - DNA, 287 bp, Glycine max
  unsure (1)..(287): unsure at all n locations
cccacgcgtctcgccacgcgtccgaacagcatccgcggcagcgacggtaaccctccaacaacaacagttccgctgcgaaaaatgtctctggtggcgaacgaggatttccagcacattctgcgtgtgctgaacaccaacgtggatgggaagcagaagataatgttcgcaatgacctncatcaaaggtattggaaggagattcgccaacatcgcttgcaagaaggctgatgttgacatgaacaaaagggctggtgagttgactgctgctgagttggatagtgtgatgac

SEQ ID NO: 259372 - DNA, 479 bp, Glycine max
  unsure (1)..(479): unsure at all n locations
cccacgcgtccgcccacgcgtccgagcgccttcaattctcccttctggactacaaattctggtgctgctatttggaacaacaactcctctttaaccgttggagctagaggtccaattctgctggaggattatcatcttgtggagaagcttgcaaattttgatagggaacgtatcccagaacgtgttgtccatgccaggggcgctagtgcaaagggtttctttgaggtcacccatgacatttctcacctgacatgtgcagatttccttcgagcccctggagttcagacgcctgtaattgttcgtttctcaactgtcattcatgagcgtggtagccctgaaaccttgagggaccctcgaggttttgccgtgaagttttacaccagagagggtaactttgaccttgttggaaacaaccttnccgtcttctttgtacgtgatggcatgaagtttccagatatggttcatgctcttaaacccaa

SEQ ID NO: 259373 - DNA, 355 bp, Glycine max
tgagttttgaaaatggtgtcgtcgcaggttgtgaatacttacccgttgtccagctacacgttcggcacgaaggagcccaagatggagaaggatacctccgtcgcggatcgtctcgctcgcatgaaagtcaactatatgaaggagggaatgaggaccagtgtggaaggaattttactggtacaagagcacaatcatcctcatatacttcttctccaaattggaaacacattctgcaaactcccaggcggtcgtctcaaaccaggagagaatgaaattgagggcttgaagaggaagttgactagcaagcttggtgctaattcaccagctcttgtgcctgactggcagataagtgagt

SEQ ID NO: 259374 - DNA, 449 bp, Glycine max
agttaagtggcagtagagagaaaatgagcgtgaaggtgaattgcgtgggtggcgacactcataacgtcttcgtgtacggtagtctgttagctgatgaagttgtccataccctattgaagcgcgtccctccaaccgcacctgccatccttcacgactatcacaggtttaagatcaaaggtcgcgtttatcccgctattctccctgtccagaataacaaagtttatggcagggtgcttcttggtatctccggagtagaactagatattttagatgaatttgaggatgttgaatatactagaactgatgttgaggtttccttgaaggacaagtctgaaaagttacaagtttgcgcttatgtttggagcaacccaaatgatcctaacttatatgcagagtggaattttgaggaatggaaacaagttcacatgaatgatttcgtcaagatgact

SEQ ID NO: 259375 - DNA, 444 bp, Glycine max
  unsure (1)..(444): unsure at all n locations
cccacgcgtccgcccacgcgtccgcccacgcgtccggcaaagcatccttcgtttcaatttctctctgtcagcgctttctgcaatcgaacctttcatctccaaagggatccacaggccgaaggagaaatggggctgacattcacaaagcttttcagtcggcttttcgcgaagaaggaaatgcgaattctgatggttggtcttgatgctgctggtaagaccactatcctgtacaagctcaagctcggagagatcgttaccacaattcctaccatcgggttcaatgttgagactgtggaatacaagaacattagcttcactgtttgggatgttggtggccaggacaagattcgtcccttgtggaggcactacttncagaacacccagggtcttatttttggtgtagacagcaatgatagggacaagagtgttgaggccagagatgag

SEQ ID NO: 259376 - DNA, 497 bp, Glycine max
cccacgcgtccgcttcttcttcttcctctttgcatcgcttcttccttcatcacttatcttcatctgcttctgtcacatcatcaagcattctcacatcgcttctcagtttctcgttttcccaatcgcagctaaaaaatcctctgtacccttttacccttttctcaataagaagaaattaggaaacgcaacaatggctcaagcggttgaagaatggtataagcagatgcccgtcatcacgcgctcctatctcaccgctgctgttgtcaccactatcggatgctcccttgatataatttctccgtatcatttgtacttgaaccctatattggtggtgaagcaatatcagttttggcgcctggttactaatttcttgtactttcgtaaaatggacttggatttcctggttcatatgttttttcttgctcgttactgcaagcttcttgaggagaactcggtcagggggaggactgctgatttcttttacatgctcttatttg

SEQ ID NO: 259377 - DNA, 360 bp, Glycine max
cggacgcgtgggtgaagatcatgcccgtccagaagcagacccgcgccggtcagcgaacccgcttcaaggccttcgtggtggtcggcgacaacaacggccacgtcggtctcggagtgaagtgcagcaaggaagtcgccaccgtcatacgcggcgccatcattctcgcaaagctctctgttattcctgtgaggagaggctattggggtaacaagatcggaaagccccacaccgttccctgcaaggttaccggaaagtgtggctccgtcaccgtccgcatggtccccgtccctcgtgggtccggaatcgtcgccgctagggtccccaagaaggtcttgcagttcgctggaatcgatgacgtct

SEQ ID NO: 259378 - DNA, 480 bp, Glycine max
cccacgcgtccgcacacactaaagataagcagcttttattctacgactgtataactatcttcgacttggcggattctttaaacccttccgagtccttccaatatgacaatcttctattcaccaccaaccgcatttccccagcggcacgagtctttcaaacctcactcgcgttcataccgcgcgttaaccgaggaatccactcttccatgataccaagagagggccagccacaccaacaacaacaacaagcgtcgtctctcagagacgctctcgtcaacagatcattccgaatcgacttcttcgaggccatcgtaagaaccgcatcgctctacaactgcctctccgaaacgaaccttcacgccaccgttacatgcctcaagtccaacactcgtggcaaaattcgagatatatactacactgatgattacctcgtttttatgaccactgatctgcataatacgattgatcagaattcttgct

SEQ ID NO: 259379 - DNA, 454 bp, Glycine max
cccacgcgtccgcacacactaaagataagcttttttcattctacgacactataactatcttcgggttggcgtttacattaaaccctgcaaaatccttccaatatgacaatctcctatccaccaccaaccgcatatccccatcggcatcagtctatcaaaccttactcgcgataaaaccgcgctttaaccgaggaatccactcttacatgataccaagagatggccagccacaccaacaacaacaacaagcgtcgtctctaatatactctctcgtcaacagatcactccgaaacgacatctactagaccatcctaagaaccgcatcgctctacaactgcctattcgaaacgaacctacacgctaccgttcccgtcctcataatcaaaacccgtggcataattcgagatatatacaacactgataattacctcggtttggtgaccactgatcttca

SEQ ID NO: 259380 - DNA, 440 bp, Glycine max
aattcccgggtcgaccgcacgcgtccgcccacgcgtccgcactcactaacgataagctgcttttattctacgactgtataacgatcttcgagttggcggatactttaaaccctggaagagtccttccactatgacaatcttctatccaccaccaaccgcatttccccagcggcacgtgtctttcaaaccttactcgcgttcataccgcgcgttaaccgaggaatccactcttccgtgataccgagagagggccagccacaccagcaacaacaacaagcgtcgtctctcgaagacgctctcgtcaacagatcatgccgaatcgacttcgtctaggccatccgatgaaccgcatcgctctccaactgcctattcgaaacgaacctacacgctaccgttccatgcctctagttcaatactcgtggcatatttctagatatata

SEQ ID NO: 259381 - DNA, 458 bp, Glycine max
  unsure (1)..(458): unsure at all n locations
cggtccggaattcccgggtcgaggcacgcgtccgcccacgcgtccgcccacgcgtccgctcttctccttttatttcatcactctcttcgttcctttcttcgtctccaaagttttcaattttcacacttttcgaaacatcttttcaatggcgtcccaaattacccgtgagtggtctggaatcaatacattcgcacctgctacccagactaagttgcttgaactcttgggaaaacttaaaccagagaatgtgaactccttaactatacttgggatgggaaaagggggtggtggaaaatcttcaactgtgaactccatcattggggatagaagtggttcgattaatcctttccagtcggaagggccaaagacccgtgattgtgtcgcgatcaagggctggttttacattgaacatcattgacactcctggtctcatttgaaggggatacatcantgatatg

SEQ ID NO: 259382 - DNA, 468 bp, Glycine max
  unsure (1)..(468): unsure at all n locations
cccacgcgtccgcagtaagtaaagagaagcagtttccagtctacgtcagtaaaacgatgggcgacttcacggttgcgttaaaccctcccaaaaccttccgctccgacaatctcctatccaccaccaaccgcatttccccagcggcgcgtggctttcaaacctcactcgcgttcaaaccgcgcgtttttcgaggaatccgcgcttcggtgatgccaagagagggccagccacaacaacgacaacaacaagcgtcgtctctcggagacgctctcgtcaacagttcgcgccgaaacgacgtcgtcgaggccatcggaagaaccgcatcggtctccaactgcctctccgaaacgaacctncacgccaccgttcccgggctcgagtccaaaacccgcggcaaagttcgagatatatacgacgcttgggattaccctcgtttggtgaccactgatcggcagaatgcgtttgatc

SEQ ID NO: 259383 - DNA, 376 bp, Glycine max
cccacgcgtccggttaataccatatttactgatattggcgcatttctttgagaaagttactaattggtagatagaggcaaaaatgttgggaattttcaaggagaagttggttaaagcacccaaagagctgaacagtccagcttcggtgaattcatgcactaagcctaagctaagtcacgaaatccttcaagatttcatgtcctgcaattcctccaatgctttctcaatgtgctttgggaatgaagctttgctagcctattccccttcaaacaagcccttcattcatcaaaggtttgttagtggtttggataacatatactgtgtcttcctgggtggcctgcacaaccttagcatgctcaacaagcagtatgggcta

SEQ ID NO: 259384 - DNA, 506 bp, Glycine max
  unsure (1)..(506): unsure at all n locations
ccggtccgtaattcccgggtcgaccgcacgcgtccgcccacgcgtacgtccacgcgatcgatgctaccaccttctcaagcttccacttcacaagtcatcagtgcgtgtcaatcatattgatcatctgatcctactaagataaacctccattctgtatcagccactatgacccttttatgctatcacgtcaatcaacgtaccttttacttttctctgcccttattcacctacgctacccttcattctgcgcagactaacagaacgaataaagcaggcattgtcggaaaatatggtacccgatatggtgctagtctgctgaagcagattaatatgatggaagctagtcaacatagcaaattctattgcgaatcctgtggaaagtatgctgtgaagaggtntgctgtgggaatatggagatgcatggattgcggataagtaaaagctggcggtacctacactttgaagtaatgccctttctgctatctttcactcataaattttgatat

SEQ ID NO: 259385 - DNA, 407 bp, Glycine max
acattttctgaagagtatgatacctggaataatgtgatataggaaaaagagcttcgaaggaaaccggtgaacaaaggcttagtttaaaagaagctgatcttcctttagtgggaattattactcgattgactcatcagaaaggaatccatctcatcaaacatgccatatggcgcaccctagaacgtggtggacaggttgtactacttggttcagctccagatcctcgtatccaaaatgattttgtgaatttggccaatgaattgcattccgctcatcatgatcgtgctagactttgccttgcatatgatgagcctctttcacacttgatatatgctggtgctgatttcattctagttccttcaatctttgagccatgtggactcactcaactcacagcaatgagatat

SEQ ID NO: 259386 - DNA, 326 bp, Glycine max
cccacgcgtccgtccacgcgtccgctgctaccaccttctcaagcttccacttcacaagtaattcggtggtgtaaattatattttcatctgatcctactaagataaaccttcattctgtatcagtttttattttttttttatgctatcacgtagataaacgtaccttttacttttctctggttttattcaccttcgctacccttcattcggtgcagactaagagaacgaagaaagcaagcattggcggaaaatatggtacccgatatggtgctagtctgcggaagcagattaagaagatggaagttagtcagcatagcaaattcttt

SEQ ID NO: 259387 - DNA, 366 bp, Glycine max
gcattttcagaggaaaatggcggatacggcttcgacttggttcttcttcgcgtttcttctttctctccttgttccttttcagatctccgctgaggaatcctcggagaaggagttcgtactcacattggatcactctaactttcacgacactgtcagcaagcacgatttcatcgtcgtcgagttctacgccccatggtgtggtcactgtaagaagcttgctccggagtatgagaaagctgcttctatcttgagtagtcatgatcctcctatgggtttggctaaagtagatgccaatgaggagaagaacatagaccttgcatcacaatatgatgttaagggattccccacaataaatattctgagaaa

SEQ ID NO: 259388 - DNA, 394 bp, Glycine max
gaagaacatccaagagaggaaggagaggcgctgggttttagaaagaaaattggcatcatcagatgtgccaaatgaggagcggatcaacctcatcaaagatttagagaggaaggagactgaatatatgcgattgaaaagacacaagatttgtgttaatgattttgaacttttgaccatcattggaaggggggcttttggggagtttagactgtgccgggagaagaaatctggaaatatttatgctatgaaaaagctgaagaaatctgaaatgcttatgagaggccaggtggaacatgttagagctgagaggaatttgctggccgaagttgccagtcattgcattgtgaaactttactactcatttcaggatgctgagtacttggatttaattatg

SEQ ID NO: 259389 - DNA, 316 bp, Glycine max
ctgacgcatgcgttgctgaacaggcagtctcatatatatagacctaatatgcatatactaatgagggatgggccaaatattcatacgcatcatcactgcttgctactcttagatatctgatattaatcagtctagatcaaggcctatgccttggatgacatatggtcttgaaaatgttctagtgcattacaactctgagttgaaacgctcccgattatacatggctaagctcatggatgcgaaattataacatgctcagatcgctgagactctaaatagctcaggattgacttaagctgcctcagatgactactca

SEQ ID NO: 259390 - DNA, 333 bp, Glycine max
aatttcaagttccgggtcgacccacgcgtacgcccacgcgtccgcccacgcgtccggttggtgcaaagcatccttcgcttcaatttctctctgtgagcgctttctgcaatcgaacctttcatctacaaagggatccacaggccgaaggagaaatggggctgacattcacaaagcttttcagtcggcttttcgcgaagaacgaaatgcgaattctgatggttggtcttgatgctgctggtaagaccactatcctgtacaagctcaagctcggagagatcgttaccacaattgctaccatcgggttcaatgttgagactgtggaatacatgaaca

SEQ ID NO: 259391 - DNA, 332 bp, Glycine max
  unsure (1)..(332): unsure at all n locations
cccacgcgtccgaatgtttccaaggctgaacttaaggagaagctagctaggatgtatgatgtgaaagaccctaatactgtatttgtcttcaaattccgaacacattttggaggtggcaaatccactggatttggtttgatttatgacacagtggaaaatgctaaaaagtatgagcccaaatacaggcttatcaggaacggccttgacactaaggtagaaaagtcaaggaagcaaatgaaggagagaaagaatagagctaagaagattcgcggagtaaagaagaccaaagcttncgatgctgccaaagctggaaaaaagaaataagttttgag

SEQ ID NO: 259392 - DNA, 407 bp, Glycine max
acgcgtccgattgtctcagcaaggacctctagctatatgctttctttcagctaatggtgtcatatcaagtgtcagactttgtcagccctattcgggtgggggcacattgacatgagggacggtttgagattctgtcattgtctggctcattcatgcccaatgaaagtggatgaacacgaagcatatccggtggcatgagtgtatctttggctagccctgatggacgtgttgtacgtggctgagtatctggtctgttggtggctgcaagtcctgtgcaagtagtgttatgaagttttctggcaggaaaccaacattagcataaaccaataaaacagaaacactatgttatatcaagtgtgacaccaacctcaattgttcaatctctacacttgatccaatatcaattc

SEQ ID NO: 259393 - DNA, 379 bp, Glycine max
cccacgcgtccggagaatttgttcgatcagagtatgaccatgcatgcttgcgctcttgccgttcacgagcactttatgaagggctgaaggtagctgcaacatctgatctgatgctgggatatctggatttcttccttggtggggatgagaaaagacctgatctgcctcctcgtctttatcaaagatttcccatgtctataatttttgggggagatggaagttacatgagtcctttctctattcacagggataatattcttactagcatcatgagtcagtctgttccaccaactatatggtatcgattagtggctggtcttaatgctcaactacgattggttcgccgtggacatctaaaaataacttttggcctgttatc

SEQ ID NO: 259394 - DNA, 348 bp, Glycine max
  unsure (1)..(348): unsure at all n locations
cccacgcgtccgcccacgcgtccgcccacgcgtccgcccacgcgtccgcccacgcgtccgttgcagtcgcagaggaaaaccctagctagtagtctcagttcgtttgagagagaaaaaatggcagagggtctcgttctccgcggaaccatgcgcgcccacaccgacgtcgtgacggcgattgccactcccatcgacaactccgacatgatcgtgacggcgtcgcgcgacaaatccatcattctctggcacctcaccaaggaggacaagacctacggtgtcccccgccgncgnctcaccggacattctcacttcgtccaggacgtcgtcctctcatccgacggtcagttc

SEQ ID NO: 259395 - DNA, 459 bp, Glycine max
  unsure (1)..(459): unsure at all n locations
agatgatgagtttgctgatctctatattgtgaaatggacatcccttatgattccacctatgacaggtatgatggtcaacttaatagcaatagcagttggagtaagcagaaccatatacagtgtcataccacagtggagccgtctactaggtggtgttttcttcagtttttgggtcttggctcatctctatccctttgcaaaaggtttgatgggaagaagagggaggacacctaccatagtntttgtgtggtcaggcctcatagcaatcacaatttctctcctctgggtggctatcaacccccctgctggtactgaccaaattgggggttcattccagttcccttgacaggtcattctttnntgtcagatgaatgaatctgtcagctatttttttatttacaattaggttcttttttctcttgattctacatatgggtggttctactaatgaatggactt

SEQ ID NO: 259396 - DNA, 345 bp, Glycine max
accacgcgtccgtccacgcgtccgcccacgcgtccggccacgcgtccgcacacgcgttcgtggcaggctcataggaaaaccctagctagtagtctcagttcgtttgatagagaaaacatggcataagatctcgttctccgcggaaccatgcgcgcgcacactgacgtcgtgactgctattgccacttccatcgacaactccgacatgatcgtgacggcgtcgcgcgacaaattcatcattctctggcacctcaccaaggaggacaagacctacggtgtcctccgtcgactgctaccggacattctcacttcgtccaggacgtcgtcctctcattcgacggtcagt

SEQ ID NO: 259397 - DNA, 490 bp, Glycine max
ggaattcccggctggaggcacgcgttcgaaagcagagccaacaacttgaagaacaaaattaacatcaacaaccacaagaagaagaagcttggaaagtagaagaatcttcagttgaaagggaagaacacacaagaacaaagagaggaagaaacgcgaatgaagggagaattagagttgccaccagggttcagatttcaccccactgatgaagaattggtgaatcactacttgtgtaggaagtgcgcgggtcaaccaatcgcggttcccatcatcaaagaggtcgatttgtacaagtttgatccatggcagcttccagaaattggctactacggcgagaaagaatggtacttcttttctcctcgggatcggaaatacccgaacggttcacggccgaaccgtgccgtcggaagcggctattggaaagccaccggcgccgataaagcgatcggaaaaccgaaagcgctagggatcaagaaagctctggtttttt

SEQ ID NO: 259398 - DNA, 336 bp, Glycine max
acgactatttccaactcattcttcatgtcttaactcaaactattaatgtccctagtctattatcttatcatagacatgcttaacaaatataatcaggaaaattaacaacatcgatcacaataatgattactttaccatcaactggattaataatgtcatgactttcactgctttgtactttcaatcctctgtatactatatccctacctagaataaattctcattctaaagtattcattgcaacttcttcacctctaactacatctaccataaacttgccccaaaccctctttgaacgtttcacttagaaaaccatcaaagtcattattctatccc

SEQ ID NO: 259399 - DNA, 315 bp, Glycine max
aacacacaacaacaaatacagtaataaacgctaatgaatatagaattagagttgctaccagatttcaaatttcaccccactgatgaacaattggtgaatcactacttctctaagaagtacgcgtttcaaccaatcacggttcccatcatcaaacaggtctatttgtacaagttttatccatggcagctttcagaaatttgctactactgctagaaagaatggtacttcttttctcctcaggatcggaaatacccgaacggttcacggcctaaccgtgccgtcttaaacggctattggaaaaccaccggctcctat

SEQ ID NO: 259400 - DNA, 421 bp, Glycine max
gcgatgcggatgaggcgccactcgatgtttccatttgcctgcatgcctttggtattgtggggtgtggttcgtttagtggtgtcaagtcttgcgaacgtgagggtgcatgagtggtaatcgggatgtttttgttgcacggctccatgcttgcgcatgcaacgtgtgacatgcatccttttcattgtcaccttagccttcgtggcttaggtgctgacgattggttcctgtgttgcctacctaccaaacggtattcgtgtggctagtcagacccattccatccaggcctctttgttggggacgctggaggatttcaaagtcccacacgtgaaccacgttagtcgtccatcataacggcttcctgtggcacacgtgtggtgattgttctctcggatgcggtgcatgcagtgaaacgtggtggtct

SEQ ID NO: 259401 - DNA, 428 bp, Glycine max
cccacgcgtccgggagaattaggtttttagggtttacaccgagcagcgacacctccctcccgcagtggccatggttctcaaaactgaactatgccgattcagtggtgccaagatctaccccggaaagggcatcagatttgttcgtggtgattctcaggttttcctgtttgccaactcaaaatgtaagcggtatttccacaaccgcctgaagccctcaaagctcacctggactgctatgtacagaaagcaacacaaaaaggacattgctcaagaagctgtgaagaagaggagacgcgctgccaaaaagccttactctaggtccattgttggtgccactctggaagttatccagaaaaagagagctgagaagccagaagttcgagatgcagctaggggaagctgctcttcgtgaaaataaggagaggatc

SEQ ID NO: 259402 - DNA, 403 bp, Glycine max
  unsure (1)..(403): unsure at all n locations
gtggaacatgctagtgtgttgctgccaccgctggagacactttgcactgttgaggaaacctgtgtgagagataaagctgtggagtcactttgtagaattggatctcaaatgagggagagtgatttggttgaatattacatcccattggtgaagagattggcagcaggtgaatggtttaccgcccgagtctctgcatgtggactatttcatattgcataccctagcgcaccagatacatcaaagacagagttgagatcaatatacagtcagttatgtcaggatgatatgcctatggttagaaggtcggctgcatcaaatcttgtgaaatntgctgcaactgttgaatatgctcatttgaaggctgatgtcatgtcaatttttgacgatcttactcaagatgatc

SEQ ID NO: 259403 - DNA, 387 bp, Glycine max
cacttttatactaccctttccactcacttgccgacttaatatcccaagatggagaaggatacctacgacgcttatcgtctcactctcatgaaagtcaactatattaaagaaggaatgaagaccattgtggaaggaattttactcatacaagatctcattcatacatatatactcattctccaaattagaaacacattctacaaactcccaagcgttcgtctcaaaccagtagataatgaaattgatgtcttgaatatgaagtctactaccaagctttttactaattcaccagcttttgtgccttactggcatattaatcagtatgtaacaatctggtagaatccaaattattcaaccataatgtatccctactgcccttcttatata

SEQ ID NO: 259404 - DNA, 483 bp, Glycine max
aattcccggctcgagccacgcgtccgtgagttgtgaaaatggtgtcgtcgcaggctgtgaatacttacccgttgtccagctacacgttggcgacgaaggatcccaagatggagaaggatacctacgtcgcggatcgtctcgctcgcatgaaagtcaactatatgaaggagggaatgaggaccattgcggaaggaatattactggtacaagagcacaatcatcctcatatacttcttctccaaattggaaacacattctgcaaactcccaggcggtcgtctcaaaccaggagagaatgaaattgaaggcttgaagaggaagttgactagcaagcttggtgctaattcaccagctcttgtgcctgactggcagataagtgagtgtgtagcaatctggtggaggccaaattttgaaaccataatgtatccatacttgcctcctcatataacaaaacccaaagagtgcaaaaagcttttccttggtc

SEQ ID NO: 259405 - DNA, 406 bp, Glycine max
cacgcgttcgaccacgcgtccgcccactcgtccgcccacgcttacttcaaagcatccttcgtttcaatttctctcgggtagcgctttctgcaatcgaacctttcatctacaaagggatccacaagccgaaagaaaaatggggctgacattcacaaagcttttcagtcggcttttcgcgaagaaggaaatgcgaattctgatggttggtcttgatgctgctggtaagaccactatcctgtacaagctcaagctcggatagatcgttaccacaattcctaccatcgggttcaatgttgaaactgtggaatacaagaacattagcttcactgtttgggatgttggtggccaggacaagattcgtcccttgtggaggcactactttcataacacccatggtcttattttt

SEQ ID NO: 259406 - DNA, 483 bp, Glycine max
  unsure (1)..(483): unsure at all n locations
cggaaccacctactcttgcgtcggtgtgtggcaacatgaccgcgttgaaatcatcgccaacgaccaagggaacagaaccacgccgtcttacgtcggattcactgacaccgagcgtctcatcggtgatgcggccaagaatcaagtcgccatgaaccccatcaacaccgtcttcgatgccaagaggttgattggtcgtagattcagtgattcctctgttcagagtgatatcaaattggggcctttcaaggtcattcctggtgctgctgacaagccaatgatcgtggttaactacaagggtgaagagaagcaatttgccgcagaagaaatctcttncatggtgctcatcaagatgcgtgagattgctgaggcttacctaggctccacagtgaagaatgctgntgtcaccgtccttgcttacttcaatgattctcagcgtcaagctaccaaagacgctggtgtcattgctggtctaaatgtgatgcg

SEQ ID NO: 259407 - DNA, 332 bp, Glycine max
cccacgcgtccggcagtctgcaacaacttcttcttcagttcttcacaccaatcatgtaccggtttgcaacctccctcgcctccaaagctagaattgctaggagcagcactcaacagattggaagtagggtcagttggaacaggaattatgctgccaaagacattaagtttggtgtggaggcccgggctttgatgcttaagggtgttgaagagctcgccgatgccgtcaaagtaaccatgggccctaaggggcgtaatgtggttattgagcaaagttttggagcacccaaagtgacaaaagatggagtaaccgttgctaagagcattgaattc

SEQ ID NO: 259408 - DNA, 239 bp, Glycine max
ctcttctccgccacttctgaatctattgaatcaacaatcatgtcggacgaagagcaccatttcgagtccaaggccgacgccggagcctccaaaacctaccctcagcaagccggtaccatccgcaagaacggctacatcgtcatcaaaggccgcccctgcaaggttgtggaagtttcgacttccaaaactggaaagcacggtcacgctaagtgtcactttggtggaattgatattttcac

SEQ ID NO: 259409 - DNA, 404 bp, Glycine max
actttatatgtaatcgcgtaatttgcgacactcatgaacgtcttcttatactatggtgggttagctaatgaatttatccataccctattgaatcgcatccctccaaccgcacctgccatccttcacgactatcacatatttaagatcaaatgtcgcgtttatcccgctattctccctgtccataataacaaaatttatggcactcaacttcttggtatctcctgagtataactagatattttagatgaatttgacgatgtttaatatactataactgatgttgacgtttccttgaaagacaagtctgaaaagttacaagtttgcgcttatgttttgaacaacccaaatgatcctaacttatattcaaagttgaaattttaagaatggaaacaagttcacatgaa

SEQ ID NO: 259410 - DNA, 490 bp, Glycine max
acgcgtccgcccacgcgtccggttgtcattcataattggttactaattgcccatgaatttgtatgttttggggaggagctatataccatctgagaatcatcgatatccgatcgagaaaacgattaccagctaccatgctagtcatagctctaggagttgttgcatcaattctagtggttctctgcctattatgggttggcatagagtacatcgactctcatatcatagggaccacactcaatcttgcaactcttcctgttgctgatggtctttatggctactggtactctggacatgctgtgttcccaaacatttatacatccatggcaaatccaaaccaattccctggagtcctcttagcatggtaaatgacttataactataatctataattcatctgccactattcctttcactaaatattaaatcttcttaagtcctgtacaaattcaaattacctatattaatcaaagatataattattctgttt

SEQ ID NO: 259411 - DNA, 381 bp, Glycine max
  unsure (1)..(381): unsure at all n locations
cagaaagtgaatggcactgccaagcttggtggaggtgaggatgcagagtgagtccgatggatgatggaatgttccataggattcgatgcatgcgtttgggaatgaaacatgagggccgattacttatctgtgtattagctagagatagggattctattgtttcctctttgtttcctgttggattgcccaatacttcccgataggggaaagagatactccatttgtgctatatttatggtatgtttttatttgtgtggtgtctggaaatggcctatttcattcccaatccgtttcctccagtctctgggggatttgattgatgagaattgcttatggtgngtgtatttccttttncaatgaaatgctacaacatttactgca

SEQ ID NO: 259412 - DNA, 216 bp, Glycine max
attttctgaacgttctcacgacacgcctactcattgcactcttcgatcgcaactctctttggcttggaaaagggaaaacgaatctcaaacttcacaagtgtttgaagcgccatggcggatcggttgacgcgtattgccatcgtcagcaacgacaggtgcaagcccaaaaagtgccgccaggagtgcaagaagagttgccccgtcgtcagaaccggg

SEQ ID NO: 259413 - DNA, 165 bp, Glycine max
cttctaatggtcggcgacaacaactgccacgtctgtctctgagtgaagtgcatcaaggaagtccccaccgtcatacgcggcgccatcattctcgcaaaactctctgttattcctgttaggaaaggctattgtggtaacaagatctgaaagccccacaccgttccc

SEQ ID NO: 259414 - DNA, 284 bp, Glycine max
cacgcgtccgtccactcgtccaatcttatacttttatttcatcactctcttcaatcctttcttggtctccaaagaattcaatggtgacacttttccaaacatcttttcaatttcatcccaaattacccatgattgatctcgaatcaatacattctaacctgctacccatactaaccagcttaaactctccagaaaacttacacatgacaatgtcaactccttaactatactacagatggtaaaaaatacattcccaaaatcttcaactgaaaactatctcattc

SEQ ID NO: 259415 - DNA, 425 bp, Glycine max
  unsure (1)..(425): unsure at all n locations
ctctctgctcctagggtttctccttcgagtgagggaaatggctcccaaaccgcctagtacgggtctgtttgttggactgaacaagggtcacgtcgtcaccaagaaggaattgcccccacgcccctcagatcgtaaggggaaaacaagcaagagggtgcactttgtgaggaacctcataagagaggttgctggttttgcaccctatgaaaagcgtataactgagttgctgaaggttgggaaggataagagggcactgaaggttgcaaagagaaagcttggaacccacaaacgtgcaaagaagaagcgtgaggaaatgtccagtgttctcaggaagatgagggctggtggtgctggagacaagaagaaataagtcttatttatttactcntttccagattcactagatggacctgtgtattgatgga

SEQ ID NO: 259416 - DNA, 417 bp, Glycine max
ctctcacctcacaacagaagcagcaatgaagaagaagatgatggcaagcaccgccatctccgtcgtcttcgccgcgctcttcctcttctcctccgtccactccttctacctccccggcgtcgctcctcgcgattttcaaattggtgaccccctctctgtcaaagtgaacaagttatcatccaccaagactcaacttccatatgactactacttcttgaagtattgcaaacccaaaaagatattgaacaacgccgaaaatttgggagaggttcttagaggtgatcgcattgagaattcagtatatacatttcatatgaggaaggaacagtcttgtactggtgtttgtcatgaaattttggatgctgaatctgcaaagagttttaaggaaaaattgatgatgaatatcgagtgaacatg

SEQ ID NO: 259417 - DNA, 466 bp, Glycine max
cccacgcgtccgcccacgcgtccgaaaaaaaaatcagaaaaaggaaatgagagattgttggacaccgtgcggatcaagcactttgcttgttatttcacgcgccctctctccattttgacctccctttcctcttcgttccccactcactgcaacggcgccggagatccgtcgctctcctcctcctcctcctcctcctcctactactccgacgagatgggcgccaattacatgctctccgagtcctctcacgatcttgacgaccagatcgttcagatcatgcagtgcaagccactctccgagcaacaggttagaggtttatgtgagaaggctaaggagattctaatggatgaaagtcatgttcagcctgttaaaagccctgtgacaatgtgtggcgatattcatgggcaatttcatgatcttgctgaacatgttcgaattgacggaagtgtccagatactaactactt

SEQ ID NO: 259418 - DNA, 388 bp, Glycine max
cccacgcgtccgcgaaaaactcccgtcaatacgaaccaccaaagtcaccaccaaaaggttatcagcatttaatagccaaaaaataaaaacacattttgcttgtcattgttattagtcagaagctagaaattcgtgttgagtgttgagttgaggcagagattcaagagaatggagggtgtgagccccgagcccctgagatcagaattggattccaaatccaaacatgacacagcaaaagaagatgatgacgctttgaaagacagcactgaagccgaagtcaccaaaattcgtctcatgagagcctttgttgaaagccgagatccctcttccaaggaagaaaatgatttgatgatgagaagattcttgcgggctcgtagtttgggatgtg

SEQ ID NO: 259419 - DNA, 268 bp, Glycine max
ccagatcacgaaactaaagaagatggagaaagcgatcagcagacaggggattttgcttcatcatctcaacccttcatcgtctacccacgtcaacgaatcatcctccctctatgcttcagcatgtgtggccggggacagcgctgcttatcaaaagacatcgacattcagggatgatggtgtgatcgtggctgcttatcggactgctcattggcaaaggtaacgtggtggtttcaaagatactcttcctgatgatctactggcctctggt

SEQ ID NO: 259420 - DNA, 453 bp, Glycine max
aattcccgggtcgacgccacgcgttcgcccacgcgtccgcagtaagtaaagagaagcagtttccagtctccgtcagtaaaacgatgggcgatgtacggttgcgttaaacccggccgaaaccttccgctccgacaatctcctatccaccaccaaccgcatttccccagcggcgcgtggctttcaaacctcactcgcgttcaaaccgcgcgtttttcgaggaatccgcgcttcggtgatgccaagagagggccagccacaacaacaacaacaacaagcgtcgtctctcggagacgctctcgtcaacagtccgcgccgaaacgacgtcgtctaggccatcggaagaaccgcatcgctcttcaactgccttttcgaaacgaaccttcacgccaccgttcccggcctcgagttcaaaacccgcggcaaagttcgagatatatacgacgcttgggatta

SEQ ID NO: 259421 - DNA, 359 bp, Glycine max
  unsure (1)..(359): unsure at all n locations
cccacgcgtccgtcctccatggcttcctcttctctgtttcagtctctccctttctctctccaaaccgctagagccctacgcgcctcccaaacccgccgcccacttcgttgtccgcgcccaatcccccctcactcagaacaacaactcctccttcaagcatcgccgccccgccgacgagaacatccgcgacgaggcccgccgcatcaatgcgccccacgaccaccacctcttctcggccaagtacgtccccttcaacgccgacttcttcttcttcttcttcacggagtcctactcgctcgacgagatcgtctaccgctcccaatccggcggcctcctggacgtncagcacgacatggatg

SEQ ID NO: 259422 - DNA, 468 bp, Glycine max
  unsure (1)..(468): unsure at all n locations
ctgcaggccaatgtgcagaggctcaaaacctacaaggctaagttggttgtgttcccaagaagggcacacaaggtcaaggctggtgattctagccttgaagagctggcaaatgccactcaagtccagggtccattcttgcccattgtgagggagaagccaactgttgaccttgttaaggtaacagatgaaatgaaggccttcaaagcatactataagcttcgtcttgaacgcaccaacaaacgccaccatggtgcccgcctaaagaaggctgctgaagcagagaaggaggacaagaaataaggtccttgagaagacagtttgtaatccatattatagttgtgagaaatttttgtttgatggtctgcgcccttagctttatggagatcatgagttttaaagcaccacccttacaatntttgtttgaactcaagtctngtaatntaattagcactctggtctgttttgatt

SEQ ID NO: 259423 - DNA, 355 bp, Glycine max
cccacgcgtccgcccacgcgtccgggattttctggttttgttgttggtgggtttcagcgttccgctgcaacttcaaattctcagtgaaaccaattcagttcagtccaaatcccaaatccgaagtgagatttgcgatggagaggcttcagcgaatgttcgcaggtgcaggtggagctctagggcaccctcccccagattccccaactctcgattcctccgagcaggtctacatctcctcactcgctctcctcaagatgctgaagcacggaagggctggggttcccatggaagtgatgggtttgatgcttggagaattcgtggacgagtacaccgttcgtgtggttgatgtcttcgc

SEQ ID NO: 259424 - DNA, 374 bp, Glycine max
  unsure (1)..(374): unsure at all n locations
ggtgaggtagaacccttccacggtggtgactgcgcgatgggtgcctacaagtatgtttcagagctatggcgcaagaagcagtctgatgtcatgcgcttcttgcagcgggtgaggtgctgggagtataggcagcaaccttccattgttcgcttgacaaggtcgacccgccctgacaaggctcgtcgcttgggcttcaaggctaagcagggctatgtgatataccgtgttcgtgttaggaggggtggccgaaagaggccagttcccaaaggtattggttatgggaagcccacaaaccagggtgttacccaactgaaatttcagcgtagcaggaggtcagttgctgangagcgagcntgacggaagctgggtggact

SEQ ID NO: 259425 - DNA, 407 bp, Glycine max
  unsure (1)..(407): unsure at all n locations
ggggagtccatcagatgcatcattcgaatgggggagtaaatctatatcagaccaatgatgacatgacatggtccctgttgggggactgagttctctttctggttgtgaaaagaagaaaataaatttcatatatgatatatatccctttaggattattgaatttgtgaaaacttgtgagtttgagtgtagagaatgatagggcctttgctgctgttattgtctaatgcatgataaataaaatgtcgtttttttgtcgatttggtgttcttatggtaatttaagtgacagatatgtagtaccacaattgttcaacgcatgtccaatggtgtggngttttggtaaaaaaaaaaagtcacgttcaaatggcttgaacttttatggatttatcaaacttgattttcattana

SEQ ID NO: 259426 - DNA, 264 bp, Glycine max
cgccgacgaccccaaaattgcgctccagagatacggccagtacctctacgacgccctaattgtctgttcccccaccattgaacgttttggaggatccattgacgcggctgcaattttggattttgttgattcgggtcatgatttgatcgttgctgctgatagcaatgcatctgatttaatcagggaaatagccaccgagtgtggaatggactttgatgaggatcctgctgctgtggttgtggatcattcggcatatgcagtctc

SEQ ID NO: 259427 - DNA, 390 bp, Glycine max
gacagaccctcctacttctgtgctgcttacctacgacccttctctctctgaccccttactgcgtggcctcgtcctaatggctgtacccgactctccatacagccgcatctccctgatcctcttcttcatctacttcactatctccatcactcttcctgaactccacacacttaacttcatctccgacatcgccacctaccatccaccggacaaccttcacgccccatctcacgtcctaatgatatccctctcccagctagtcactcatcatctagatgtactcctgcgcctactactactgctgaaccgaccaaggaatactcaattgtggcctgactcacatggtcggcactcctactgacctaggccattgtgatattcactaacgat

SEQ ID NO: 259428 - DNA, 426 bp, Glycine max
accggtccgtaattcccggctcgagccacgcgttcgcccacgcgtcctgtttataccatatttactgatattggcgcatttctttgagaaagttactagttgctagattgaggcaaaaatggtgggaattttcaaggagaagttggttaaagcacccaaagagctgaacagtccagcttcgttgaattcatgcactaagcctaagctaagtcacgaaatccttcaagatttcatgtcctgcaattcctccaatgctttctcaatgtgctttgggaatgaagctttgctagcctattccccttcaaacaagcccttcattcatcaaaagttgtttagtggtttggataacatatactgtgtcttcctgggtggcctgcacaaccttagcatgctcaacaagcattatgggctatcaaaaggaacaaa

SEQ ID NO: 259429 - DNA, 362 bp, Glycine max
ttccacgcgtccggttaataccatatttacttatattttctcatttctttgagaaagttactagttcgtagatattatcaaaaatgttgggaattttcaaggagaagttggttaaatcacccaaagagctgaacagtccatcttcgttgaattcatgcactaagcctaatctaagtcacgaaatccttcatgatttcatgtcctgcaattcctacaatgctttctcaatgtgctttgggaatgaagctttgctagcctattccccttcaaacaagccctccattcatcaaaggttgtttagtggttttgataacatatactgtgtctttctgggtggccttcacaaccttaacatgctcaac

SEQ ID NO: 259430 - DNA, 223 bp, Glycine max
cccacgcgtccgcaagcatatctcatttgaatacattccttgtagtttatactgaaagatgggtttgaagatggcgttactgatcctaggcctttccctcatgctccttttggtctcctctgaggtggcatccacgaatacaaaagaggaagcaaatggagtggatgatgccaaatatcccggtggaagctatggagggggttacccaggtcatggcggtggc

SEQ ID NO: 259431 - DNA, 276 bp, Glycine max
gcgtactggtcgtgcaggaaagacgggtgaggctaccacattcttgactcttcacgactctgatgggttatatgacctcaagcagatgcttattcaaagtatcagccctgttgcacctgaactggcaaggctcgaaacttcaaaattcaagccaggaactattccagacagaccacctagacgaaatgacactggctttgcgcattagacagattctttttttgagctatccacttctttagaatgcatcaactattcaacttttcaagtcatatc

SEQ ID NO: 259432 - DNA, 347 bp, Glycine max
gcgttcgccacgcgttcgccactcgtccgctgctatcaccttctcaagcttccacttcacaagtaattccggcgtgtaaattatattttgatctgatcctactaagataaacctccattctgtatcagtttttattttttttttatgctatcacgtagataaacgtaccttttacttttctctgtttttattcaccttcgctacccttcattcggtgcagactaagagaacgaagaaagcatgcattgtcggaaaatatggtacccgatatggtgctagtctgcggaagcagattaaaaagatggaagttagtcagcataacaaattcttttgtgaattctgtggaa

SEQ ID NO: 259433 - DNA, 346 bp, Glycine max
tcgagcacgcgttcgccagcgttcgccacgcgtccgctgctccaccttctcaagcttccacttcacaagtaattcgttggtgtaaattatattttcatctgatcctactaagataaacctccattctgtatcagtttttattttttttttatgctatcacgtaaataaacgtaccttttacttttctctgtttttattcaccttcgctacccttcattcggtgcagactaatagaacgaagaaagcatgcattgtcggaaaatatggtacccgatatggtgctagtctgcggaaacagattaagaagatggaagttagtcatcatagcaaattcttttgtgaattc

SEQ ID NO: 259434 - DNA, 517 bp, Glycine max
ctcacgcgttcgtccactcgtccgaagagtatttcaccaaaaagaaaaatggcaaggaaacggtatttttttatcaattttaactctattctctttttaatttataagttgattttattaatttttttttatattaagatattttactttttttttttttattttatcattttttattattattgatttttttatattttattttaatttattttttaaatttttttttttattattattttattatatatttttttttattttttttctaatattttttttttatattttaattatttttatttaatatctttatattagttatataaattttttattttttttatatttataaatttttaaatttatattatatattattttaatttatttcatatttacttattaatataattattttttttattattttatttcatttttaaaattattattttattatttctttttttatatatttaaatttattatttttttatatttattttattttttt

SEQ ID NO: 259435 - DNA, 451 bp, Glycine max
  unsure (1)..(451): unsure at all n locations
gttcgaacagtacggagacaggaggtatttataatncgccctcttcctctaatgatgtcggcatcttatcaaaactcaccgttcttattaataataattgatatactttcttatatcttcaattctcatttaatttttctatataattttatattatttttcattatttatttattttatatatcatttttaatcttatttatatattcttatctatttctattttttcttttattctcattctattctttcttctttcatttattttattatataatatcttatattacctaacttattctttttattatctttttccttattttataaaatttattttatatttatttttttattctatcttattattatatttttatatccttttctattcttctttattccttcttatatttttattaattctcatctttatctctttttattatat

SEQ ID NO: 259436 - DNA, 344 bp, Glycine max
cgggccgaccgacgcgtccggtccaggcaagccctactcaaccaccacacttacttctcgttcacgctacccctttctgcggttgttttacctttcaagttttaaaggtctaaagatggcagagacatttctatttacctcatagtctgtgaactatgtacaccctgactagcttctcgaccaaatttccgatgctgtcctcgacgcttgcctcgtgcatgtctcatacatgtatgtatcctgtgaatctttcacaattatctactttgtttttgtcttttttgtattttttacatctttcttactatttcttattatattaatgtatttttatcttatttatt

SEQ ID NO: 259437 - DNA, 419 bp, Glycine max
cccacgcgtccgcccactcttccgatctctctctttcgatctgtgtactaaccctaacccgcttctaaccatgtcttccttactctctcataacctatctttaataaaacttacttctttctctttcttcttaatcatatcatattatattttttctactctattttatacatttctttattcctatcctaatctattctctcttttcatcttttattttatctattttatattatttattcctttcttctttatattttataataatattatatcctatttataaatattctataaattttctacatctaatatctctatttatattttatatattttcttattatattctaatcattttatttccttttctcatttatttctatctttatttttactcttatcttcttttcattatt

SEQ ID NO: 259438 - DNA, 319 bp, Glycine max
  unsure (1)..(319): unsure at all n locations
cccacgcgtccgcaaggatggattaatgtatttgctaatgttcttacagaatntaaagaggtttgactcataccttatttgttcatctataacacattgatctatgcattttatattttattttttatttcttttttttattatttcttattttatataataatttttattctttttatctttcttattttattattcctattttttatatcttttataatttattttcttataatttatttcttttctttcttattatttattttttttttattattttctatattatttttaatctatttattttatatattttttc

SEQ ID NO: 259439 - DNA, 438 bp, Glycine max
cccacgcttccgctctaatctctctttattattcaacaaaagttaatataattccggacggctttataccttctcaaaccgcttaacataacaccaaactttgtcatctccataaaccaataaatgagtaaaaaatgcattacatatgtcttaacattctaccaattgtttaaactttctatccataatactctgtttaaatgtgtatcatatgtttgtactattccttttatctttatcttatttttatattttatcttttcattttttcttcaatttatttttttatttttttcatatatttaatttattatttttctcaattttatatatatatctcttttcttttatttttttattttctttttattattattttttttattatattatttatttttttttttttcttttattttattatttttttatttttta

SEQ ID NO: 259440 - DNA, 352 bp, Glycine max
  unsure (1)..(352): unsure at all n locations
cggaanncccgggtcgaccgcacgcgtccgaaaaggtctccaaacacatagaagcacgtgtatttatgtattgtgcaagtcatagtattcaacgttaacaccactgactcacttgtaaaatgcgctttaacaccaaacggagtctccctatcaaaaaaagctacctagagcttgcacctattggtatcttctacaatatcctaaagtgtttttcttcttcttcatcaccatgtctttacttcagacctcatcaacctcaatctctcagaatccacagaaaagatcattgctgagtacatattggttggtggatctggtatggacctcataagcatatccaggactttttctt

SEQ ID NO: 259441 - DNA, 410 bp, Glycine max
cccacgcgtccgatcatacccttcaatattaaaccgtacctacttccaatattcctggtggtctttatccttctctaccaagccatatcaactatttctactataaatattaatgttctgataaacaaaattagatattttttttacattctttctatcttttattttttatttatttttccattttattttatattttctatctattttttattttttatttttttatcaaattttatctatttattttattttatatttactattttatttatcattacattttttaatttattatattctattttattctattttattatatttttatattttattattttattttatattatcttatctattattttctattttattctcttattatctacttctattattatttt

SEQ ID NO: 259442 - DNA, 426 bp, Glycine max
ataatacaagaacccaatccaagctattcattaatcattattaacacacacaacacgcagattttttctaaactctaatccccaattttgattcctattcctactagattctatttagcatatcatatcctttctatctaaatttctttctttgtttatctttttttatttatatttcatttattatattatatcttttatttttattatattgtttcttttattataaatttatatttttatatctcatttcatttatcaatttaattattttttttctcataatatattattatatttatttaataatattattttatttttttatttttatattcttatcattcttttattattatttttttaatcttatattaatttttttattcctaattcttatatatatcttttttaatctttttatct

SEQ ID NO: 259443 - DNA, 438 bp, Glycine max
  unsure (1)..(438): unsure at all n locations
ccacaactctcatcctcatgcttcttacattttttcgtntcttgtttctattattggttggttttttattataatattttggctctaaaaataatatatataatttttatatttttattaataaatattatatataaattatattatattattttaattatatttttttatatattatatattttttatataatatataatatatttattttttaattttatatttttttaaaattatatattatttttataatttatattattataaaattaattattatattattatattttatataatattataatttttttataattaattataatctttttaatttataatatatatttatttatattttcataataatattattataattttattatatatatatatataattattattttctttatatataatattattat

SEQ ID NO: 259444 - DNA, 304 bp, Glycine max
ccctaataagccatactactaccattctttttcaccaccatcaccttcttcaccaaggaggccatattacaaccactctccgcccccacctttaccttctccaccttactagaagccatactactatcactcaccacccctttcacaccaccttcacctattctattctattaccactcaccacctctaccaccactatacaatataccatactactctccttcaccatctttctatgattccatactagtacctaatcatctccattaccaattcactccctctacacttttcatctatttta

SEQ ID NO: 259445 - DNA, 421 bp, Glycine max
cccacgcgtccgcaaacccacattaatcatggtcacaacaaccattggttattgttgtcggatcatgtctaacttctacatgtttcatgtaatttctctgtgtttttatttaaattatttatattttttatttttatatatttttattttattaatttattttttctatattaatattatttttattttttattttatcttttttttttatattatatatattttttttttattattatattttatattttctatatattaattattattttttatttttttttttttatttttatttaatttattttttctttttcttattttttttatcttctattttattatattatattatatttattatattcttatttatcttttttttttattttatttttatttttatttttttttttttttt

SEQ ID NO: 259446 - DNA, 323 bp, Glycine max
cccactcatccgatttatattaaatataattttatgaacaaaagctataaaattggttgggtttttataataatattgaatgtaatttaaaaaataaaattatattaatttatatttattataattaaattttatatattttatattttaatattttattttatatttttaattttattttatttattaaattatttatattatatattataaatatatataaatatataaatttttttttaatttaatttaatattattatatttaattaaatcttaattaataatataaaataatataaaattataattaataatatttaa

SEQ ID NO: 259447 - DNA, 485 bp, Glycine max
  unsure (1)..(485): unsure at all n locations
cttgcaatctcatatgaaaaccctatttattattctcagttctnntatatatatatgattgtttttattttaaattattttattatatatatattaaaataaatttatattattattatcatttattatatataattttatttttatatttaatatattataaatattttattaaatatatttttttaattttttatatttataatatattttttattttatattattattatttataattatatttattatatataaatattttaaaaattattattataaaattatattatttattattatattatttaatatctattttaataaattttttattaattaattttaaataaaattttatatataaaataaataattaatttatataaatattattttaatattataatacttattaattttaattttatatattattatattaataattatatataattattttattattatatctaatatat

SEQ ID NO: 259448 - DNA, 390 bp, Glycine max
ccggtccggaattcccgggtcgacccacgcaatctcatactcataatattataaataaaatttttttatacaatcatattaattatatcaaattgtcgggttattaaataatattttatctgattaaataaaataaaatatatataataatataaaaataatctattatatatcatattaataatataattaatttatttattttatataaaatatataaataatataaataattaataataaatatctaatttatatataaaatataaattatatatctattaatcataatttaataaataatattatatatattatatatatttaatataatttatatataaaattaatttatatttataatatataaaattataaaattatatatat

SEQ ID NO: 259449 - DNA, 446 bp, Glycine max
ggaattcccgggtcgacccacacgtccgcccactcatcctaatatgtctttacatactatttccaccaaagaatccttttttatcggtggtattttataaaaaatatattataatattataataaatatatattattttaattaatacataataaataatttaataattttaatatattttttattttatatattttataattaatatatttatatttatatataatataatatttatttttattatttattatttatattattatatatttattatttattatttatataatattttttattattatattattatattatttatatataatatatttaataattaatataattatatatatttttaaattatataatatcttattttattataatatatatttttattattatatttatttttaaatttttttatttatattaat

SEQ ID NO: 259450 - DNA, 460 bp, Glycine max
ctctctgctcctagggtttctccttcgatttagtgaaatggcttccaaacctcctagtgcgggtctaataaattaacagggcataaatatactatatctaattatataatatttataatttataaatataatatataatctatattataaatttattatataatataaattataatattaatatatattatatttattataattaatatatattatatttaatattatttaatattttatataattaattataatatttaatattaaataatattaaattatcatcatattatcatatatcataatattatatattaatatattataaatatattttattatacatatatcacattattttattattatattttattatctatattatattatattatcattaaaattactataatatcaatattaatatataataatatattttttattatattaataa

SEQ ID NO: 259451 - DNA, 453 bp, Glycine max
  unsure (1)..(453): unsure at all n locations
ccggnncggaaaacccggcccgacccacacatcctaagatattaacaattattntaaaatttaaatanatctcatacaaaaaaatataataggatgattaattataaaaattttttttccctaaccaaatactataatttaattaatttttatatattataatatttattttatataattatatatctattatttaattataataaattttatttataatataataaataaatatttaaataatttttattaatcataaatatatttattaattataattatttaattatataaatattatatataattaatttattttatttattaaaatatttattttctatattatattatatattatattataataatattttatatatatattataaaatattaaaatatttattatttttatataatatttatatttaaaattatatatttttaaaa

SEQ ID NO: 259452 - DNA, 472 bp, Glycine max
  unsure (1)..(472): unsure at all n locations
ttttcataagtaacattattatttatttttattaaataatatgataatatattttagtntgttattatatataatatgattattaataaatattatcaaatatattataatattatataattttataaatattttaatatataatattatatatataatattattttatataaaattaatttaatatataatatatattattaaatatataatatattataatattatatatattatattatatattatattatatatattttaatttataatattatatatatatatataatatattttacaatatataataatatattatatattaattatatataatatttatacttaattatatattataataatataattatatattaatattaatattattattatatttaaattatcattataattaataataataatataattattataataatattattttattattaatatt

SEQ ID NO: 259453 - DNA, 424 bp, Glycine max
cccacgctttcgaagaaaccaaaagatattcaagaacaagtcaatttttcaattttgaatggaaaactaaaccttatcgattcattttttcatccttgaacatgtttagtatttgattttgtttttactttttcttattctcttattttatttatttcttttcatttttcttttttattttttatcatttttatttctctttttttcttttttttttcttattttatttttttttttttttattttattttttttttctttttattttatttatataattttattatttaatttattttttcttatttttttttctttatatctttatctattttttttatttttttttattttttttttttttttttttttttatttttattttttttttatattattttttttttattcttttttttatctt

SEQ ID NO: 259454 - DNA, 452 bp, Glycine max
aaaagaggttgtgcctcccattcttaccaagttaggcaaggttaaaaatccatggcctaatgttgatgctcacagtggagtgctactgaactattatggtctaactgaggaaaactattatactgttctctttggtgtatcaaggagcttttggagttggccctctatttatatggtacatggctctttgattgctactcgaaaggtctaaatgtgttactattgataagctcgtgctttttttctatatatcattctttaatttaatgtatttaattctgtttatattttctaatattcctacttctgtattttttttgttttatttatttattaatatttttatttatattttatgatttataatatctacttttctttttttttattttatatttttatttattatataatatcttgtttttttttatttaatatttttttttattttt

SEQ ID NO: 259455 - DNA, 289 bp, Glycine max
agatatggagcttctatttccatttgttgactcggctttacctttagcatatggtgtcttgggggttcttctgtttcatgaggttggacactttctagcagcatttcctaaacaagtaaaattaagcatacctttcttcattccaaacatcacacttggcagctttggtgctattacacagtttaaatccatccttccagatagaagtacacaagtagacatatcacttgcaggtccctttgctggtgctgtattatcattttcgatgtttgctgttggtcttcttctc

SEQ ID NO: 259456 - DNA, 355 bp, Glycine max
accacgcgtccgtcaccaacactttcatattcaaaccccccatctctcatcacccatagcagctgcttgattcccaccgctcttctctacgctttctcaccaaatttaaaaccccctccggagcgaattctcggcggctggttccgaaagccacggcggctcccggggccaagaagacagaaaagccgcacgagagagtccagcgagtccacagcgtggaggagttcgagtcggcgctcgaatccgccaaagacaggcttgtggtggtggaatacgctgccagcgacagcgaggagagcagccagatataccctttcatggtggagctgagccgcagctgcaacgacgtgggagt

SEQ ID NO: 259457 - DNA, 411 bp, Glycine max
tcccgggtcgacccacgcgtcctgtctacgttggcgccaaacgtggatgattacagtgggagtttcgcgagatggatggcaacagggtctgtgcaagtggttagggggattctgtgggctggggatgtgactgtggacaggttgaagtgggggaatgatttcttgaagaagaggttggagcctggttcacactcccaggttagtcctcaggcactggagagcatcaaaagggttaagaagttgaccaagatgtctgagaaggttgccactggtgtcctctctggggttgtcaaggtgtctggattcttcacaagttctgtagtcaactccaaagctggaaagaagttctttagccttctttcaagggaaattgatcttgctaccatggatggattcaataaggttttggat

SEQ ID NO: 259458 - DNA, 276 bp, Glycine max
cttatgtctcacacaaaacactagtcccttcctttttacttgtctctttctcttcgcaacaacgggcagatcttccacaagactgtgactggcaaaaacataaccctataggtccatagtctcgacaccatcgacaacgtcaatgccacaatccaggacaaggaaaggatcccttctgaccaacacagggtgatttttgctggtaagcagcttgaaaatggtcgcactcttgctgattataacattcaaaaggaatcaacactctacttggtcttg

SEQ ID NO: 259459 - DNA, 344 bp, Glycine max
ggtcgacccacgcttacactcctttccaaagggagaacaacacttgagttttctgatactatcgaataaattagagccgggaaaaccttaattgagaaagatgcttaaaccagcattgataggactattgataatgtccgtacaaatttcagttccataatgacaggtagagcaatacccatccatgcttgacaaaattcaggtggaatactatggaatcccagttagctttaatagcatcgctcaaattatcacttctgatgccagttctcttttggtacagtcatattacaaatcaagctttaaggctatagataaagccataattagctctgatcttttta

SEQ ID NO: 259460 - DNA, 338 bp, Glycine max
ggaatttttgggtcgacccacgcgtccggaaagacgccaagggtccattatctcacgaggctagggaccatgggattgaccactatatcgctgaatgcagcgcatggggcaacatctgtgggaaccatgcagatgatagagagctcattcattggagatatatgacgtatgctaggggtccagatcagccagccgatgtctacggagttaggacctgatacagcacaatgccacctagacagcggatcgtcaaggtctacactggagagaccatggatagagtgcaggtgccagatgtagcatacgctgccaagctatccgatatcatggtattaaag

SEQ ID NO: 259461 - DNA, 303 bp, Glycine max
cacgcgttcgggcttattacattacaatttgtgcattggctcatgtcctttttcttctttgcttgtcaaaaagggtacggcacatgtatctagcaaatgggttctcaccatctagaaccatggctattggagaatgggaaacccaaggtgttgaccaaggagaatatgcatggccgatactgacacagtatgttctccacgtctttgcgcaagaagtctaacccaactcttggtttccagctttcatgtgccacactcagaagcatcctttttaaatattgcaatgagggttattcttgggta

SEQ ID NO: 259462 - DNA, 395 bp, Glycine max
  unsure (1)..(395): unsure at all n locations
aattcccgggtcgacccacgcgtccgggcttatcacatcacaatttgtgcattgcctcgtgtcctttntcttctntgcttgccaaaaagcttacacacacaggtatctagcanatgggttctcaccagcaagaaccatggctattggagaatgggaaaccgagggtgttgaccaaggagaataggcatggccgttctgcacacagcatgtcctccacgtctttgcgcaagaagtctagccgaactcttgtctccaagcttncatgtgccacactcagaagcatccttttaaatttgcaagaggttattcttggtaccaagctttccattctcatccctgccatttcagctgccatcattgccgagtgctatggctttgaaagacctgggatttta

SEQ ID NO: 259463 - DNA, 397 bp, Glycine max
cggaattcccgggtcgacccacgcgtccggaagaacaagttgttgagaactaagacggactagcacatggctcactcaatgatctcattcagagctgtgaccactgtcaaccgcgcccgtgccgacatggttgctccattcactggcctcaagtccatggctggcttctccaccaggaagaccaacaatgtcattacctccattgctagcaaccgtggaagagtgcaatgcatgcatgtgtggccaccagttggcaagaagaagaccgagactctgttctacctgccagaccttgatgatgcacaattggcaaaggaagtagaatgccctgttaggaagggatggattccttgctacgaactcgagtttgagcacgcttttgtgtaccgtgagcaca

SEQ ID NO: 259464 - DNA, 403 bp, Glycine max
ggaattcccgggtcgacccacgcgtccggacttatcacatcacaatttgtgcattgcctcttgtcctttatcttctatgcttgtcaaaaatgttagtgacacatgtatctagcacatgggttctcaccatcaagaaccatggctatcggagaatgggaaaccgatggtgttgaccaaggagaataggcatggtcgttctgcacacaacatgtcctgcacgtctttgcgcaataagtctatccgaactcttgtcttcgagctttcatgtgccacactcataagcatccttttaaatttgcacgatgttattcttggtaccaagctttccattcttatccctgccatttcaactgccatcattgccgagtgctatggctttggaagaccttggatttttatattg

SEQ ID NO: 259465 - DNA, 362 bp, Glycine max
ccggtccggaattaccgggccgacccacgcgtccggaacaagtagttgagaactaagaaggagaagcatatggcttcctcaatgatctcttgcccaggtgttaccactgtcaaccgtgccggtgccggcatggttgctccattcactggcctcaagtccatggctggcttccccaccaggaagaccaaccatgacattacctccattgctagcaaccgtggaagagtgcaatgcatgcaagtgtggacaccagtcgtcaagaagaagtttgagactctttcctaactgccagaccttgatgatgcacaattggcaaacgaagtagaataccttcttaagaagggatggattccttgcttgga

SEQ ID NO: 259466 - DNA, 402 bp, Glycine max
  unsure (1)..(402): unsure at all n locations
cggaattcccgggtcgacccacgcgtccggagaaaataaacgtttttaaaggcatattgcataactatgtttccgtgggtgtcatcagtgctactggtgtcttccaaatcatactacttgagtacctgggaaccttcgcaaacacaacacctgtcacgctgtcacagcggttcttgtgctcgtaggttggatctttgggcatgccaaatgctgctcgcttaaagaagatccctgtttgaagcacctgaatggataagaagcaatacttggttaccgtcagctgtcgcattgcttcaaggtccatgatgcctttacattcactaactcccctggtaatgctngaggctctcttgggctggaatcagaaatcgagcactgtaacagatcactggattgatgtct

SEQ ID NO: 259467 - DNA, 335 bp, Glycine max
tcacatgatcaatcctaaaatgccgtaccctattgcaatcttagacatgacaatcgagagcacgcccaccagccggatcatcatggacctctactccgatgtcactccccgcactcacgagaacttccatgcactctgcactattgagaatgaagtcagcaaacgcggcaaaccccttcattacaaaggatcctccttccaccgtatgatccctaatttcatgtgccatggacgtgattacacccccggatatgctacatgatgagaatcaatctacagatccaagctctccgattaaaacttcatcaagaagcacaccgaacctagtattctat

SEQ ID NO: 259468 - DNA, 351 bp, Glycine max
gaattcccgggtcgacccacgcgtccggaagaacttacagatcatcgatataggctgcggtcgttgtcgaggagatggtgtctgcgtcggtgagtggcgctgtgtctcaacgagtgtcatgctatttcatatttgaagactcgttgtagtattacgggaacaattgtcagcttcaatctttagcatgagctgattatttgccttatgggattgatcttggtggacctactggaagattctgcaactgctgaactactgctgacgctattgcctagctactatgatgtgacgatcatatttcaccgcatgccacagcacgaggtctagacatattgagcagtgtcaattatg

SEQ ID NO: 259469 - DNA, 482 bp, Glycine max
attcccgggtcgacccacgcgtgcgagaataccctctctcttgctgcatcagaggagttgctaattaagagcatggctgcacaagctcttgtgtcatcatcttctcttaccttctcagcggaggctgcaagacaaagtcttggaccaagatcactccaatctccatttggcttctccagaaaagcctcctttcttgttaaggcagctgctaccccccctgtcaagcaaggatcagacagacctttgtggtttgcatcaaagcaaagtctttcttacttggatggcagccttccgggtgactatggatttgaccctctgggactttcagaccctgaaggaacaagagggttcattgagccgaaatggctagcatatggtgagataatcaatggtcgttatgcaatgttgggtgcagttggtgcaatagcacctgaaattctatgcaaggctggtctgatccctcaagagacagcactcccatg

SEQ ID NO: 259470 - DNA, 492 bp, Glycine max
aattcccgggtcgacccactcgtccgctaagaaggcggcccatggtttccccggaatttagcacttggctgttcgattaccggctgagggacgacgttatccccgtccgcgacgcctccttttccgtcttcgtctacgacttctcctggcccacaccttccgccaatgtcagtgctgaaattgatgcttcgcttgctgattctgatggccccaaagatactgctctgaagaaaagggctagatgtgattcaagtactgcttgtagctctaaagcgcgtcgggagaagctgcggagggatacgctcaatgacaaatttgctgaattgggctccatattggagcctgctaggcactccaaaacagactaggctgacattctgattgatgctgtccctatggtgacacagctgagggatgaaaccctgaaagtgaaagactcaaatacgagtcttcacgagaagattcaagagttaaaggctgaaaagaatgaac

SEQ ID NO: 259471 - DNA, 472 bp, Glycine max
tcaattcccgggtcgacccacgcgtgcggaattgcgtccgctacactggcatcacacatggctacaatcaccatcactttcatgttcaggccccccatctctcatcacccaaagcagctcctatattcccaccgctcttctctacgctttctcaccaaatttaaaaccccctccggagcgaattctcggcggctggttccgaaagccacggcggctcccggagccaagaagacagaaaagccgcacgagagagtccagcgagtccacagcgtggaggagttcgagtcggcgctcgaatccgccaaagacatgcttgtggtggtggaatacgctgacagcgacagcgaggagagcagccagatataccctttcatggtggagctgatccgcatctgcaacgacgtggagttcatcctgatgatgggcgactagtcggagaagacgaatgagctcctgaagcggcagaaggtgg

SEQ ID NO: 259472 - DNA, 347 bp, Glycine max
cacgctttctgtatggcacgttcttactcttagtcctccaataaggaaaaccaacgaagatggaggcgcctactcatgccacgatgcaaattgtggctacactctcttgatctctcttgatgagcttgtcaaagatggtgtgctcacaaaagatgagtttgccagaaccagtcgaccatgaccatgtagtcttctccactgttgctgatataaaagatcccttgatagcaaaagctgccgaaaggttaattcaaagtgatggtgatcttaaaagacagcttggagaattttgttaagaccctgaaatatcaaactggcttgaaaaaacaacttattttgctgctatt

SEQ ID NO: 259473 - DNA, 264 bp, Glycine max
  unsure (1)..(264): unsure at all n locations
ctcattatgatgcgttcaatcctgctgaatatggtccacaaaaagagccaaaggatggcgtcatttttgctatatttaactgatgttgangaaggtggggaaactatgtttccatttgagaatggcttgaacatggatggtaactatgggtatgaagactgcattggtttaaaaggtaaagcacccccaaggggatggcctctaatttaatcaatggttacttaagggtccaattgttccaccttaattccttggaacctgccc

SEQ ID NO: 259474 - DNA, 202 bp, Glycine max
acgcacgcgtccgcccacgcgtccggtagaaaattgctagagcaacaatgattcccagaagtcatggagaggggtttaatatcctacgctatgaggttgatcaaagatatgattctcattattatgctttcaatcctgctgaatatggtccacataatagccaaaggatggcgatatgtttgctgtatttaactgatgttga

SEQ ID NO: 259475 - DNA, 356 bp, Glycine max
  unsure (1)..(356): unsure at all n locations
aattcccggctggacccacgcgttcggaaggcgaaagagtagcagcagcaggcggcgccgagtagcggctccccacctcgagctggccaccatggctagaggattgaagaagcatttgaagaggctcaatgcgcccaagcattggatgctggacaagcttggcggagcttttgctcccaagccatcttctggacctcacaagtctaaggagtgcctgccactgatcctcatcatcaggaacaggctcangtatgctcttacataccgtgaggtcatttccatcctgatgcaacgccatgtacttgttgatggcaagggtcgggacagacaagacctaccctgctgggttcatggat

SEQ ID NO: 259476 - DNA, 209 bp, Glycine max
ctatatctctagcgcccgtcgactatctttatataatcatatatataacagggaaaggatacaaaataaggaagaatctctatatatataaaaataatatatctaaggtacacatagtaaatctaggtacccatcttatgataaactttccttccatatttgatcctctaataagcctataatttcctgcaattgcaataacttcttta

SEQ ID NO: 259477 - DNA, 340 bp, Glycine max
tcgactatctttatataataatataaataagaataaaggaataaaaaaaaaaaaagaatctatataaatataaaaataatatatataaggtacaaatagtaaatcgaggtacccattttatgataaactttccttccatttttgttcctctagtaggcctagtatttccggcaattgcaatggcttctttatttctttatgttcaaaaaaacaagattttttagatacagaaaacaaagtaaaattctggggttttttattccccaattataatactaaattcaaaaaaaggagagtaatgagtataatctttcgctcagacgatgtactgatatattct

SEQ ID NO: 259478 - DNA, 387 bp, Glycine max
cggaattcccgggtcgacccacgcgtccggaaaacacacccggagccaccgtgaatgacgaccgttttgaggccaccgattgggttgcgcttcctccaaccaccacagctttccccttctcccacatcgtgtgtttctttctccctctcactcaagcttcccagaatcaactctaattactcctctttcgaagttagagacgttacctatcaacccccggggactcagcttagacttctgaattcagttagtttttcacttccagagaagagttttggtttaattttcgggcacagtggaagcggaaaaacaactctgttgcagcttcttgcaggaataagcaaaccaacctctggatctatttacattcaagaatatgagagtgat

SEQ ID NO: 259479 - DNA, 441 bp, Glycine max
gttccggttcggaattcccgggcggacgcacgcgtccgagaaaagccgcacgagagagtccagcgagtccacagcgtggaggagttcgagggggcgctggaatccgccaaagacaggcttgtggtggtggaatacgctgccagcgacagcgaggagagcagtcagatataccctttcatggtggagctgagccgcagctgctacgacgtggagttcatcctggtgatgggcgactagtctgagaagacgaacgagctcctgaagcgggagaaggtggagaatgtgcctcacttaagcttctacaagagcacggggaacatacacgacgaggaagggtatggtcccgacatgctggcaggggatgtgctatactacagggaccaccactctggggttgtgcaactggacaacgtggaggacgtgcagaagcttatagaggac

SEQ ID NO: 259480 - DNA, 466 bp, Glycine max
ccgggtcggaccaagccgtcggccaagccttccaacctgtccttgttccaccaggacctatcccaaacctgatggggaaagctgatttttccatgggtccaggattgaaggctttctctgatgggttactgaaaactatggtggtcggcaaacttgatgccatcttttccagctgctactcgtgaatatgccccattgattgaggaattatggaatgatgctgccattaaggctacatacgaaaggagaagcgaattagaaatgctgcctagtgttgccagttatttcttagagcgggctgttaaaatattaaggacagattatgaaccctcagatttagacatcctttatgctgagggagttacttcatctaatggggtggcttgtgtggagttttcatttccccaatcagcttctgacgaaactgttgacactactgatctacatgattctttggtcaggtatc

SEQ ID NO: 259481 - DNA, 414 bp, Glycine max
cccacgcgtccggatatgcaaagctacttaatcagggacgtagcaaccttcatcccttttgtccaccaaaagctgatgacattgcaggcgagtttgctacacaagtggtacaactggaaccccaaaaggtgctatcttgacccatggaaactttattgcaagtgttgctgggagtactatggacgagaaattcggtccttctgatgtttatatatcctatctccctttggcacacatttatgagcgagcaaaccatgtcatgacagtacattttggcattgcagtgggattttaccagggggatagtatgaaattaatggatgacatagctgctctaagacctactgtcttttgtagtgttcctcggctatataacagaatatatgctggtattactaatgctggtaaaacatc

SEQ ID NO: 259482 - DNA, 426 bp, Glycine max
tcgacccacgcgtccggtcgttccggccggtgacttggaggacctacagtgggtttcacacttcgtggacgattcgagtcccggagctgtggggtgttatacccggttcgttcggaggaagcgaaccggtttgttgaaccggaaccctcagtgaagaaaacgcctcgttttccgtgggaaatgaaaataacgagcaaggcgagaagcgtacggaataggaagcccaacactcgcgtgtggtcattgggcagcacgttgctctcgctcccgtcttcgccgcccacgaagaagcataagaagcgggccgaggcccatgtccagcccgttggagtccagattcagcggcggtgcagtcactgccaggtgcagaagacgccgcattggaggaccggcccactgggcgccaaaaccctttgcaacgcgtgc

SEQ ID NO: 259483 - DNA, 301 bp, Glycine max
aactttaaccccaaaatgtgctttttttacccatggaaactttattgcaattgttgctaagaatactatgaactagaaattcggtccttcttatgtttatatttcctatctccctttttcacacatttattatcgatcaaaccatttcatgacactacattttttcatttcagtgggattctaccatggggatagtattaaattaatggatgacatagcttctctaatacctactttcttttttattgttcctccgctttataacaaaatatattctggtattactaattcttttaaaaca

SEQ ID NO: 259484 - DNA, 355 bp, Glycine max
aaattgggcgtgcgtgcattacagaaggagatgcaagatcagagcgccgtgctgtgatgaggtttttgactgtaggcattgccataatgaagctaagaattctgaggaggttgatgctgtggatcgtcatgatgttccacgccatgaaattaagaaggttatctgctccttatgtgatgtagagcaagatgttcagcagtactgtataaactgtggaatatgcatgggcaagtacttttgtactatatgcaaattctttgatgatgatatttcaaagaatcaataccactgcgatgaatgtggcatttgcagaactggaggcaaggataattttttccacttgaaccgatgtgga

SEQ ID NO: 259485 - DNA, 448 bp, Glycine max
  unsure (1)..(448): unsure at all n locations
cgacccacgcgttcgcggacgcgtggggttgtatcgtcatctcatattaaagcctttaaactattgaacctcagagtataaattgggggtgcgggcattacanaaggagatgcaagatcagagcgccgtgctgtgatgaggtttttgactgtaggcattgccataatgaagctaagaattctgaggaggttgatgctgtggatcgtcatgatgttccacgccatgaaattaagaaggttatctgctccttatgtgatgtagagcaagatgttcagcagtactgtataaactgtggaatatgcatgggcaagtacttttgtactatatgcaaattctttgatgatgatatttcaaagaatcaataccactgcgatgaatgtggcatttgcagaactggaggcaaggataatttttttccactgcaaccgatgtggatgttgctactcaa

SEQ ID NO: 259486 - DNA, 412 bp, Glycine max
gacccattcgttcgaagcagggttgtattgacaatggaaggcctgatttggggcaccttttctggaggtggaaaccaagtgaatgccatcggccaaggtttgaccctggcacttttctccaactcataagcaacaagcacatatcttttattggagactctctggccaggaaccacctagagtccctcctttgctttttagccactactgaaaaactacaaggattcacccaattccaagaaggttatactcggtggctctttcgttctcacaaggcaaccgtgtccttctattggtccccttttcttgtagatggtgttccaagaaaaaatccgggactcccttataacaaaattcatttggatcgtgctaatatgaagtgggaaaaggatttggatcatatagacatcat

SEQ ID NO: 259487 - DNA, 418 bp, Glycine max
cgcgtcgacccacgcgtccgaagcagaattgtattgccaatggaaggcctgatttggggtaccttttctggaggtggaaaccaagtgaatgccatctgccaaggtttgaccctaacacttttctccaactcataagcaacaagcacatagcttttattggagactctctggccaggaaccacctagagtccctcctttgctttttagccactactgaaaaactacaaggattcacccaattccaagaaggttatactcggtggctctttcgttctcacaaggcaaccgtgtccttctattggtccccttttcttgtagatggtgttccaagaaaaaatccgggactcccttataacaaaattcatttggatcgtgctaatatgaagtgggaaaaggatttggatcaaatagacatcat

SEQ ID NO: 259488 - DNA, 441 bp, Glycine max
ttcccgcgtcgacccacgcgtccggaaagaaggaaggagacatttataaaaagctctttcccttcccctaaatccctcacactcattccatttttacctttctctctcgctcgcaaacgcaaataataaaaaacaaggttttagccatggcatcgaagcggatcttgaaggaactcaaggatctccaaaaggatcctcctacctcatgcagcgccggtcctgttgctgaagacatgtttcactggcaagcaacaattatgggtcctccagacagtccttatgctggaggtgttttcctagtcactattcatttccctccagattatccctttaagccacccaaggttgcattcaggacgaaggtatttcacccaaatataaatagcaatggaagcatttgccttgacatattgaaggagcagtggagccctgcgctaacta

SEQ ID NO: 259489 - DNA, 413 bp, Glycine max
gcaaagaaggaccaacacacttatacacggccgtcaaaactttcccttaatcccttacactcggaccattaacacctgggtgtgtggctcaacgacgacactgttcatataacacagttttagccatggcatcgaatcgtaatcttgaaggaactcactgatctccaaaaggatccttctacctcatgcaaagcctttcctgtagctgaaaacatgtttcactggcaagcaacaattatgggtcctccagacagtccttatgctggaggtgttttcctagtcactattcatttccctccagattatccctttaagccacccaaggttgcattcatgacgaaggtatttcacccaaatataaatagcaatggaagcatttggcttgacatattgaaggagcagtggagccctgc

SEQ ID NO: 259490 - DNA, 450 bp, Glycine max
tcccgcgtcgacccacgcgtccgcccacgcgtccgttctctttcatctgaattttccctttcaaatctcttcctttgaagctgtcgtagttctctgcatgagggagatggaacgcgtcttcgagtttcctcacactcacatggatcggcgcccgagaaagagagcgagattgggctgggacatccctgaggtccccaagataagatacatagcaaaatgggtgaaggaacttttgggcaggtcttagaatgctgggatagagaaaggaaggaaatggttgccgtaaaaattgtccgtggtattaagaagtatcgagaagcagccatgatagaaattgaggtgttgcaacagcttggtgaacacgataaaggaggcaatcgtcatgcatgacttgcgcatgattcatactgacctgaagcctgaatacatactactagtttcaccagagta

SEQ ID NO: 259491 - DNA, 380 bp, Glycine max
  unsure (1)..(380): unsure at all n locations
gaattcccgggtggacccacgcgtccgtacatgaagaacataatccagatgaaggaacgggaagaccggggatgtataanatcatagcatgagtgattcggcagatttggattcctatatacccactcgtgcggtacttcattgtatgatctatatctatatatctatatctatatatctatctatagatatatagatatataagatccatctgtatagatatcatcatctacatccagaaagccgtatgctttgtaagaagcttgtacagtttgggaagaggttttgattgatcaaaaaagaagaatctactttaaccgatatgcccttaggcacggcaatacataacatataaatcacactcggaaagggtggacaat

SEQ ID NO: 259492 - DNA, 337 bp, Glycine max
gacccacgcgttcgcgctgttgctgagtcggtcccataaattgaagaatgactcgcttacgactctgtacaagcgtgcttctgtgaggcgggccaaggataaagcggtgagtgcctaagcattaaagccgcttctcgaactttttgcggaggatgggagcggaatggctgataaatcgatggtggtgctgaacaacttgacgggcattgagaataggaaagatgccattgttgaataaagtgggattgatgcacttctggaagcaattgatgattgttctgtataaagaaatgaattcgattgtttgactatgtgcagctgtaggctcacaacattt

SEQ ID NO: 259493 - DNA, 442 bp, Glycine max
ccggtacggaattcccggttcgacccacgcatccggtgaagtttttggcccatatcaacctattgctctcaaattgtggggatcagaacggtcagtccaagctcttgaaggtgttgcaatggaattggaggactctttgtttcctttgttgagggaggttagtattggtatcgatccttatgaagtgttccaagatgcagaatgggctttgctaataggtgcaaaacctcgaggacctggaatggaacgagcagacttgttagacataaatgggcagatttatgcagcgcagggaagagcattaaatgccgttgcatcccgcaatgtcaaagttatagtagtgggaaacccttgcaatacaaatgcattaatttgcttgaagaatgctcctaacattcctgccaaaaattttcatgctttaactcgtttagatgagaacaga

SEQ ID NO: 259494 - DNA, 351 bp, Glycine max
cgacccacgcgtccggcgtttgccacggctaaacaggccttcgaggaaccaattcctgggcccgacacccttgggaggaaatcttaccaagagggcacgctcataatgcgcagcttttaagacacaacctcaccctttgcacttctgatgttcaggaccagctagattagccctgttatcccttatagggtgatgggtggtattcttcctatcatggaggtgcgctaagaatgtcatttatttgcgctaatgaagaatcgccctagtttataaaatgattggcaacccgtgatataatgttgcataaacagagaccaggcttctttcttatgtgagtcatatggtatcggc

SEQ ID NO: 259495 - DNA, 375 bp, Glycine max
tcgacccacgcgttcggcgtgtgccatggctaaacatgcttttgaggaagcaattgctgagcttgacaccttgggggaagaatcttacaaagacagcacgctcataatgcagcttttaagagacaacctcaccctttggacttctgatgttcaggaccagctagatgagccctgatatcccttataggtcgatgggtggtattcttcctctcatggaggtgggctttgaatgtcatttatttgtgctaattaagaatcgccctagtttataaaatgattggcaatctgtgatataatgttgtatgaacagagaccaggcttcttttttttgtgtgtcatatggtattggaaaaaattaactagtgatccttattt

SEQ ID NO: 259496 - DNA, 438 bp, Glycine max
cgacccacgcgtccgcccacgcgtccgcccactcgtccgaaacgacgtgaggaggatgcaacgctgcctcatcgagggatacggtttctccggggacgacatcaccgttttgatcgacacggacgagtcctacacggagcccacggggaagaacatccggtcagcgttgaccaggctggtccgatcggcgaagccaggggacattctgttcgtccattacagcggacacggcacgcgcctccccgcggaaaccggagaggatgatgacactggctttgatgaatgcattgttccgtctgacatgaacctcatcactgatgatgatttcagggaatttgttgatggggtgcctagaggttgcacgatcacaattgtgtctgattcttgccacagtggtggcctacttgaagaagctaaggagcagataggagagagcac

SEQ ID NO: 259497 - DNA, 406 bp, Glycine max
attccccggtcgacccacgcgtccggttccactccccccaatagccgctattctactcgcaagcaaatcagaacaagagaagagaatggcaggagcagaggggctaaacagagaacagtacgtgtaccttgcgaagctgtcggagcaggcggagcggtacgaagagatggtggagttcatgcagaaggtggtggtggggtggacgccggcgtcggagctcacggtggaggagcgcaacctcctgtcggtggcctacaagaacgtgatcgggtctctgcgtgccgcgtggcgcatcgtgtcctccatcgaacagaaggaggaaggacgcaggaacgacgaccacgtgtgcctcgtgaagcactacagatccaatgtcgagaacgagctcacgcatgtctgcgccagc

SEQ ID NO: 259498 - DNA, 242 bp, Glycine max
gtcgacccacgcgtccggcgagtgccacgtccaaacaggccttcgagtaaccaataactgagccctacacccttgagaaagatatcttacagatgcgtgtctctcataatgcagctcttaatacacaaccccaccctttgcacttttaattatcaaaaccacctatatgaacccttatatccactatcgggtgttttgtttttatttttattaaataattatttctacttaatttttttttt

SEQ ID NO: 259499 - DNA, 464 bp, Glycine max
  unsure (1)..(464): unsure at all n locations
cggaantcccgggtcgacccacgcgtccggttgagagtttttacaggcctggttcgggagactataggatacggctttttatccgaactgaactgttggggaagggaattccacccactcatcaatggcatctactctcttcgcttgcccgtcgttgtgttcctcctcttcttctatattttctacttccgtcaaattctccttaaacccgaataaaatttctcttccgttcgccggaaacaaaaaacctctttcggctccaattcgaaggcggttcaatgtcattgctatggctccccctaaacccggtgggaaggccaagaaagtggttggaattataaagctggctcttgaagctgggaaagctacacctgctcctcccgttggccctgctcttggttccaagggtgtcaatattatggctntctgtaaggattacaacgctagaaccgccgacaagcccg

SEQ ID NO: 259500 - DNA, 437 bp, Glycine max
cggtccgaatttccgggtcgagccacgccttcgcttgcctaaccttggatcctcggtccttggtttggtccggttccgcgtttggccttcttccgggaccttgaccaatgaagaatgcaaagggcaagggagcagcaagggcctcaaaagaatcactgaagcccgttgatgaccgctgttacaggaaataatgtagtgatggaacatatatctctgttgttttcagaaaggttggaaagcggaaggcttccggtaagcctgggagaagtagtgcaccaaagaaggagaagaaggccaagaaagaccccaacaagcctaaaagaccacccagtgctttctttgtgttccttgaggagttcaggaagacctttaaggctgagaatcctaatgtgaaggctgtatcagttgttgggaaagctggaggagagaaatggaaa

SEQ ID NO: 259501 - DNA, 308 bp, Glycine max
accgggccgaccgacgcgtaacgataaatttttccaacattgtcccaccatattaccagtcaaaatacgctctaactggggctgcagttttgtatgctggggtgcatcttaatgtctcaaaaattgtggtcattggacacagtgcttgtggtggtattaatgcgcttctgtctttaccatatgatggaacctactctactcattttatttattatatagtgaaaaataaattgacttcctggccaaggttataacacaacgttcccgatgacccttttgctgacttgtgctcacactgtgagaatgaa

SEQ ID NO: 259502 - DNA, 363 bp, Glycine max
gaattcccgggtcgacccacgcgtccgcttcacaccattctcacaaaacaactttcatactctgagaaagaatggctgccaacacatggatgagtactgctatctcagccttcccatctctcctttcttcctcaaaatccagatttgccaccgcagttcctctttctagctttggtgtcaccaatgcctcttcttctcgcttttctatgagtgctgactggatgccaggccagcctagacctccttaccttgatggttcagcacctggtgactttggattcgaccctcttcgtcttggtgaagtaccagagaatcttgagaggttcaaagagtcagaactcattcactgcagatgggccatgc

SEQ ID NO: 259503 - DNA, 337 bp, Glycine max
atcaatggaaccctttatactaggcaggctctatattcactgctcaacatcaaaccttaaccctcaagaactctcttggctccctctccacaacccacgtcaaattctctcttctgctcgaaacccatagattctagtctcagaaagaaccaaactttatctcctaaaccttcatcaggcacaagctggttggctcatgctcaacaaggcctagcacctttggctatctccttggcactcaactttaacccacttttgttcaatggcaatacactggcatctgagtttgatgtacttaacgagggtccacccaaagatccttatgtgtttgatgatg

SEQ ID NO: 259504 - DNA, 401 bp, Glycine max
gtttggaattcccgggtcgacccacgcgtccgcccacgcgtccggttgaatccttgctgatccccatcatgggaactatttttcctggcgaggctctctctccactcctcaacatcaaaccttcaccctcaagaattctcttggctccctctccgcaacccaagtcaaattctctcttttgctcgaaacccattgtttctagtctcagaaagaaccaaactttatctcctaaaccttcatcaagcacaagctggttggctcatgctcaacaaggcctagcagctttggctatctccttggcactcaactttagcccaattttgttcaatggcaatgcactggcatctgaatttgatgtacttaacgagggtccacccaaagattcttatgtgtttgatgat

SEQ ID NO: 259505 - DNA, 441 bp, Glycine max
cttccgaccaggggtttttttgccggcttcttaactttttctcgtttcaatcgaaaccaaaacaaaggcatgggcagaaaattcttcgtcggtggcaactggaaatgcattgggaccactgaggaggtaaagaagattgttactactttgaatgaggctaaagtccctggagaagatgtcgtagaagttgttgtgagccctccttttgtgttccttcctgttgtaaaaagtttgctgcgccctgatttccatgtttcggcacaaaactgttgggttcgcaaaggtggtgcttataccggtgaggttagtgctgaaatgcttgttaatttgggaattccttgggttattattggtcactctgaacggaggcagcttttaaatgaatcaaacgagtttgtgggagataaagttgcctatgcacttcaacaaggtctaaaagtt

SEQ ID NO: 259506 - DNA, 457 bp, Glycine max
ccggaatttcaggttcgacccagccgtccgaccaagggtttctttgactgcttttcaactttttctcgtttaaatcgaaaccaaaacaaaagcatgggcagaaaattcttcgtcggtggcaactggaaatgcaatgggaccactgaggaggtaaagaagattgttactactttgaatgaggctaaagtccctggagaagatgtcgtagaagttgttgtgagccctccttttgtgttccttcctgttgtaaaaagtttgctgcgccctgatttccatgtttcggcacaaaactgttgggttcgcaaaggtggtgcttataccggtgaggttagtgctgaaatgcttgttaatttgggaattccttgggttattattggtcactctgaacggaggcagcttttaaatgaatcaaacgagtttgtgggagataaagttgcctatgcacttcaacaaggtc

SEQ ID NO: 259507 - DNA, 388 bp, Glycine max
gtttggaattcccgggtcgaccgcacgcgtccgcttcacaccattctcacaaaacaactttcatactctgagaaagaatggctgccagcgcatgtgtgagtactgctatctcagccttcccatctctcctttcttcctcaaaatccagatttgccaccgcagttcctctttctagctttggtgtcaccaatgcctcttcttctcgcttttctatgagcgctgactggatgccaggccagcctagacctccttaccttgatggttcatcacctgttgactttggattcgaccctcttcgtcttggtgaagtaccacagaatcttgagaggttcaaagagtcataactcattcactgcagatgggccctgcttgcttgtccatggatttt

SEQ ID NO: 259508 - DNA, 451 bp, Glycine max
aattcccgggtcgacccacgcgtccgcatgaaggtatatcaacgagaaagacaaaatgggcattatggtgtgactgcatttgtcatggggaacaccttgtcatcaatcccatacttgctaatggttacattcattcctggggctatatcttattaccttcccggtcttcagaatggatgcgaacattttctgtatttcatttgtgttttattttcaagtctcatgttagtggagagtcttatgatgatagttgctagtgtggttcccaactatcttatgggcatcattgctggttctggaattcaaggaatcatgcttttacttagtgggttctttaaattgccaaatgatattcctaagccagtttggaagtacccattacactatgttgcttttcatacgtatgccaaccaaggaatgttcaagaacgaatataaaggactaagattta

SEQ ID NO: 259509 - DNA, 324 bp, Glycine max
gtcaactggagctgacatcattgttgagtccaccggagctttcaccgctaaggacagggctggcgtacattctaagggcggtgccaagaatggtattattgtctggccccagttaggatgcccccatgttcgttgttgggggtaatgagcacgaatacacgccagagcttgatattatttgcaacgctagctgctcatccaactgtcttgctccactcgccaaggttatcaatgacaagcttggcattgctgaaggttcgatgaccactgttcattccatcactgctacccagaagactgttgatgggccatcatccaaggact

SEQ ID NO: 259510 - DNA, 410 bp, Glycine max
ccgaacccttcttttcggcacaaacacaactggttaaaggtccacggggcacaacttatgatgcatgccataccagatgagcggctcatgcacctcgggcgctgctttttattaccgtaaaggtcattagaagggtctcctttctgtgactcaaagtgcgcgcagaggtgtgccaaagctggggttcaggacagatgcttgaggttttgcgggatctgctgcgagaagtgcaactgtgtcccatctgggacttacggaaacaaggacgagtgcccttgctacagggacatgaagaactccaagggcaaggacaaatgcccttgaagaatatctaatttcatcatcacactccattccaataaactaccttgtattgtatcttcagccttccttttcagagtattgcatta

SEQ ID NO: 259511 - DNA, 455 bp, Glycine max
ggtcgaccgacgcgtacgcatttttcttcctccatctttatcttaaacataacttgaactctccattccttaaattttgggtacgagctagttccgacacagacaaagcaatggcaaagaccgagttagaggtgactgttgagagcaagaacaaagacctcaagcacctggggtttgtgaggattgctgctattcaaacatttgtgattgtgtcaaatctgtatgagtacgcaaagcagaattctgggcctttgagatccgtcgtaggaacggttgagaacactgtaaccaccattctcggtcctgtctgcaacaaattcaaggacgtccctgatgatgtccttgtttttgttgacaaaaaggtggatgaagcttcccacaagttcgatgagcaacgctcctccttttgctaaacacattgcggatcaagccaagggtgtgattcagaaagtgac

SEQ ID NO: 259512 - DNA, 432 bp, Glycine max
cggaattcccgggtcgacccacgcgtccgtctcttttaaagttctggcccgaaccctttctttcgctacattcacaacctgtttaagggggtccgtgcaatatagatgaagctcgagttcccaaatgtgctacttctgtgccttgcccttagctcttctttcttgtaaatctcaatggctggttctcctttctgtgactcaaagtgcgcgctgatgtgtaccacagcttgggttcaagacagatgcttggagttttgcgggatctgttgcgagaagtgcaactgagtcccatactggacttacagaaacaaggaccattgctcttgcttcatggacatgatgaactccaagggcaaggacaaatgcccctctaaaatatcaacattcattatcacactttattccaataaactaccttggattgcattattt

SEQ ID NO: 259513 - DNA, 330 bp, Glycine max
tgaattcgggggtcgacccacgcgtccgctccaaaaagcatcacatgaggctgatgattccaaatcacttgctcaagcatctcagtcggggctgattgaagcacaagaagacgttgaacaagccaaggccaaatcaagcacattggaaagtagtttattggcagcacaaaatgagattgaagcatccaaggttgccaagatgttggccatatatgcaatcacagcattgaataagagtgaatcatctaaaggcaacaaaaatgacaaggactcttcctcaattgtgacactcacactagaaaaatatcatgagctcatcaggaaagccta

SEQ ID NO: 259514 - DNA, 368 bp, Glycine max
ttgaattccgggccgacccacgcatactattgtcctccaatttatgaaagatgactttgtttttctgaaatgtctttccctggtatgggcaacttatatcgggccggctgacccttcttttttccatttacatgacccaagttcacttctttggttgccctcctcgaagaccaacacatatattatgctttttgttatcaacagaggtaataagctattctttcaaatgttgacaccacatgctaaaaataaatttgatactattttcttcctaccaaacaccttttttgctcaatttgctaaagaagtttaataccctcttaagaagggaaggattcctttctttgaaatccaatttgaacaccgat

SEQ ID NO: 259515 - DNA, 307 bp, Glycine max
acgcgtgcgaacaagtatttgataactaataatgagaagcaaatttcttcctcaatgatctcttccccagcgtttccactgtcaaccgtgccggttgccccattgtttctccattcactggcctcaatttcattgcttgctttcccaccatgaataccaacaattacatttccttcatttctatcaaccgtgtaagagtgcaattcattccagttttgccaccactttgcaagaaaaaatttgatactcttttctaccttccataccttgattattcacaattttcaaatgaaatttaataccctct

SEQ ID NO: 259516 - DNA, 437 bp, Glycine max
ggtcggcccacgcgtccgttggaatccaaaaatgagagaaatcatcagctttcacataggtcaggccgggatccaggttcgcaactgctgcttggaacggtactgcctggaacatggcatccagcccgatggcatgatgccaagtgactcctccttcggtgtagcccacgacgccttcaacaccttcttcagcgaaaccggatccggctagcacgtccctcgcgccgtcttcgtcgatctcgagcccaccgccatcgactaattccgttgtggcacttaccgtcaactcttccaccccgaacaactcatctccggcaaggaagatgccgccaacaactttgccagaggccactacaccgttggcaaaaagatcgtatatctgtgcttggatcgcgttcgaaagcttgcatacaactgcactggttttcagggctttc

SEQ ID NO: 259517 - DNA, 453 bp, Glycine max
ggaattcgggggtcgacccacgcgtccgggaagaagggtaaactatgagtctgagggaagaagggttgaaggaagaaaaaaaggggggcgcagaaatggagggtgggaacaacagcagcagtaacaacaaccctgatgagttggcggaggggtgcttgctttcgatcaagacaacgttgggcgacgaattcgaaggccaagtcgtcaccttcgatctcccctccaacattctcatactccaagaaccttccaaacctaaccctcgtcgaaatcttacgttgctcaaagccaattacatcaaagacttcacctttctcggccatgcccaagaccctcttgatcccaacacctgctttcttgacctcaccgctctacaacaaacggaagatgttgctgttagacaagcggaagctgatgctgagaagattgtggttggtgttaccagcgaagcac

SEQ ID NO: 259518 - DNA, 401 bp, Glycine max
  unsure (1)..(401): unsure at all n locations
attgcattagttctaantgctaacaccttcagtgttcaatggcctctgcatcancatcgatgctgaagtcttcacttgttcttgacaantctnagtgggtgaaaggacaaaccctttcccaaccttctgcatcagttgtgagatgcaaccccaccaccccatcatgcctcaccatcagagctggttcctatgctgatgaactcgttaagaccgcgaaaacagtggcttcaccagggaggggtattttggccatggatgattccaatgctacctgtgggaagcgtttggcttcaattgtgctaaagaacactgaagctaaccgccatgcataccgtaccctcctctttacagtttcaggccttggtcagtacatctctggtgccattctctttttgaaacac

SEQ ID NO: 259519 - DNA, 442 bp, Glycine max
taccggtccggaattcccggtcgcccaaccctccgtgggattccaaaatggaaagaaatcatcaccttccacataggtcaggccgggatccaggttggcaactcctgctgggaactctactgcctggaacatggcatccagcccgatggcatgatgccaagtgactcctccttcggtgtagcccacgacgccttcaacaccttcttcagcgaaaccggatccggcaagcacgtccctcgcgccgtcttcgtcgatctcgagcccaccgtcatcgacgaagtccgttgtggcacttaccgtcaactcttccaccccgaacaactcatctccggcaaggaagatgccgccaacaactttgccagaggccactacaccgttggcaaagagatcgtagatctgtgcttggatcgcgtccgaaagctcgcagacaactgcactggtc

SEQ ID NO: 259520 - DNA, 284 bp, Glycine max
ttacctgtaataccatcaccctttatgtggagtcctccgacaccatcgataacgtgaaagctaagattcaagacaaggaatggatcccacctgaccagcatatacttatctttgcgggtaaacagcttgaggatggtcgaacccttgcctactacaacatccaaaaggaatccactctccacctcgtgcttctcctcatgtttggcatgcaaatctttgtcaagacttttactggcaagaccatcaccctcgatgtctaattctcggacaccattgataatgtt

SEQ ID NO: 259521 - DNA, 251 bp, Glycine max
ccaaattctttctgggcttaagtatatacattctgcaaacgtaatccatagagatttaaaaccttaaacttgattcaaacaaaaatgtatcccacctaaacagcaaagacttatctttgcgggtaaacagcttgaggatggtcgaacccttgccgttttccaatataatacaaaaccccccaacacctgttgcatttccttaattacaccattcatatatattttaaaaacttttacttgcaataccatta

SEQ ID NO: 259522 - DNA, 296 bp, Glycine max
tcctgcggggagttacattttattagttctacatggtgaaacagaaacactcaggaggacacaatgagacgcgggggaggaaagatgcaagagtatactaccctctcatgcctcaggtgaaaaaacaatagctgaaggacgactactccaagttcgagctaccgaacaccgactcgagcatagtcaacgcactgcagaacacgatgatcaccgaggagccaacggtctccaaagaacccttggagatcaaggtcaaatgccctgaactcaataacgaggatatcgctcacaggctg

SEQ ID NO: 259523 - DNA, 398 bp, Glycine max
  unsure (1)..(398): unsure at all n locations
gcgtncgtccacgcgtncggggttttacattttattcgttctccggtgagaaacagaaacacacagaagacagagtgagacgcttctcacgatggagggaggagtatcctacgcgcgcatgcctcgggtcaaaatccgcgagctgaaggacgactacgccaagttcgagctccgcgacaccgacgcgagcatcgtcaacgcgctgcggcgcgtgatgatcgccgaggtgccgacggtcggcatcgacctngtggagatcgaggtcaaactcctggtgctcaatgacgagtttatcgctcacaggctgggcctcattcccctcactagcgagcgcgccatgtccatgcgcttctcacgtgactgcgacgcgtgcgacggtgacggacagtgcgagtttt

SEQ ID NO: 259524 - DNA, 389 bp, Glycine max
  unsure (1)..(389): unsure at all n locations
accggnccgagaggagggtgcgtctatgcgttctggaaatttcagcccccatcgaaaaacaagatgcgccaacgatagtaatcatcgaaggaatttgaaaggtcgaaacttgagcatctgggatcgcgaaattggggattttggttaaaagggtataatcttcggaactgattgatggcaaaactgtacgtgaaggcggtgccaccggcggatctgaacaggaacacggattggttcacgtaccctggcgtttggaccagttacatcctcatccttttcttttcttggatcctcgtactctctgtcttcggttgttctcctggcatcgcttggaccatcgttaatctcgcacactttgctgtaacatatgacttttttcactggaagaa

SEQ ID NO: 259525 - DNA, 391 bp, Glycine max
  unsure (1)..(391): unsure at all n locations
ccacgcgtccagacacgcctacccatcctcacacaacaactcncaaggcctaacaaaaaaagggtgccggcccatttatgagtactggtctctcagccttcccatctctcctctcttcctcaaaatccagattcgccaccccaattcctctttttagatttgccgtcaccaaaacctcttcttctcgcttttctatgagtgctgactggatgccaaaccagcctacacctccttaccttgatggttcaccacctggtgactttcgattccaccctcttcgtcttggtgaagcaccacacaaccttgagaggttcaaagagtcaaaactcattcacttcagatgggccatgcttgctgttccaaggattttgggtccatacgcattgggctt

SEQ ID NO: 259526 - DNA, 317 bp, Glycine max
  unsure (1)..(317): unsure at all n locations
cacgaatatggagatgcctggagcgaagcgcaaaaaacacatnacacatgctgggatagcatgacctcattacagggggggggcatttctctgactccgcccatgcaaggaaacaaaaatggaatgctgtgggaagatcaggggaagtgagctcattaacgagaatgtgctgtaaacactggtgcaaacccttctggtgaaggtggaggacaagattaaagagacaatgatgcacttcataaagttgctgacattggtcacacatgcaaacttgaggagcaacccgcattggataaaaaggagtttgtgaccttaat

SEQ ID NO: 259527 - DNA, 431 bp, Glycine max
  unsure (1)..(431): unsure at all n locations
gacccacgcgtccgcccacgcgtncgctgagggcttccaaagctatgcaagataggttgattatcacgaatgtggcagagtgtttgacaatcccaatgtcgctgtgcacttcaatacagatgcagtggaccttgtaagcaacaccaaaggacagatgtctggcattttagtaagaaagattgatactggggaggaatatgtgcttgaggcaaaagggctgttttatggcataggccattcgccaaataccgaactgttgaaaggccaagtcgaattagaccactctggctatgtacaagttcaggagggtactgcaaaaacttcagttgaaggtgtatttgctgctggagatgtgcaggaccatgaatggaggcaagctataactgctgctggatctggatgcgttgcagctttatcagttgagagatatc

SEQ ID NO: 259528 - DNA, 372 bp, Glycine max
ggagtgcaaggatcactagctctttcattcgggcagagtggccggcagttggcatcccccttgatcatgaagcatttgcaggtccaaaaggttataatgcacctcaacaagtgcacatcacgcaaggtgactatgatggaaaagcaggaatcatctcatgggtgaccacaaaagaaccagggcacagccatatacagtatggcacatcagagaataaatttcaaactagtgaagaaggcacaagtacaaactatactttccacaaatacaagtctggctacattcatcactgtcttattgaaagccttgagtatgagactaaatactactatagaattggaagtggtgattcttctcgagaattttgggttc

SEQ ID NO: 259529 - DNA, 430 bp, Glycine max
  unsure (1)..(430): unsure at all n locations
gttttgaattccnctgtcgacccactcgtccggaaagatacaaaagcatcatttgaagcttcttgaggaggatggtttaccctttcaaaagggaggtttcagacagcagagatcctattccagccacatcttgccggagtgcaagctatgggtcttcaccaagccatagctctttgtgtggaacattgccattctgcagatttagcatgttacagtgattggtacaagactatagtcttatcaggggggactgcatgcttacctggtttggctgaaaggatagagaaggaactccatgccttactttctccctacgtgttcaaaggaattagaatcataccttctccatattgtgctgatactccatggtttggagcaaaaaatgttggcaattttagcacctttccttgtcattggtgcttcacaaaaa

SEQ ID NO: 259530 - DNA, 409 bp, Glycine max
  unsure (1)..(409): unsure at all n locations
ccggttttgaattcccnnntcgacccacgcgtccgggcttgcttagctgttgttcaaccatctactgttaagagcctttctggaactaagctcggtttcaagccctctcgccagagtttcagacccaagaatttcaggagtggtgctgtggtatcaaagtatggtgacaagagtgtgtactttgatttggaggatctaggcaacactactggtcagtgggacttgtacggctccgatgcaccttcaccctacaaccctctttagagcaagttcttcgagacatttgcctctccattcacaaaaaggggattggtactcaagtgtttgatcctgggaggttggtccaccctggcatatcttatttccacagctttatgtgacattctaccaatcatgaaaggcccacaat

SEQ ID NO: 259531 - DNA, 425 bp, Glycine max
acgcgtccgcgcacgaatatcttgttgtttggagcgatccgagaaaaactctgttaacatgttggtttagcaggacctccttacaggtgatgagcttctctctgactccttccgttacaaggaaattgagaatggaatgctgtgggaagttgaggggaagtgggttgttaaaggagcagttgatgtagacattggtgcaaacccttctgctgagggtggaggagaagatgagggagttgatgatgcagctgttaaggttgttgacattgttgacacattcagacttcaggagcaacccgcattcgataagaagcagtttgttaccttcatgaagaggtttatcaagaatttgactcccaagctcgatgcagagcaacaggagttgtttaagaagcacatcgagggagcaactaaatacctgctct

SEQ ID NO: 259532 - DNA, 396 bp, Glycine max
cgcgttcgcccacgcgtccgatctttgaacgacgcataatgttcatccaatctccgaatcctttaatggcattgcaaccatgtcgaggggaaaggtcagagagccaaaggaggaaaacgtgactcttggcccagctgttagagatggcgaacatgtctttggcgtcgctcgcatatttgcctcctttaatgataccttcattcatgtcactgatctgtctgggagggaaacgcttgtccgcatcactggtggaatgaaggttaaggctgacagagatgaatcatctccttatgctgctatgcttgcagctcaagatgttgctgccagatgcaaggaacttggcattactgctcttcatatcaagcttcgtgccacgggtgggaacaagacaaaaac

SEQ ID NO: 259533 - DNA, 403 bp, Glycine max
  unsure (1)..(403): unsure at all n locations
gcgtncgtacacncctgtgcatatcccttatggacagcacaagaagcatatcgcactagcaatgatagaatgtccagatcaactgccgaggctattgaccaggctatgacccatgcggctgacacaaaagtcaaatttgttagtgtaaatctttctgtggaagcacaattacatgattggccagagaggactgaagcagatctatgtggtggatatcggcatcctgcttcaacttacagagatggtatacaagaagtggcaaggtcaggacatgacagtgatattgagtgggtgcaggtagtgttgaaagctgatcctggggttagaatggaagatatctaggatcaagcaccaagacggcggaaggaacatcgtcgtgttccaagtacagtggcaatagagg

SEQ ID NO: 259534 - DNA, 335 bp, Glycine max
aacccttcgttcctctctcgttccctgcttcaattcgatcaaacacagggtagtacttttttattatgatggccgtggcccgaaaggaaatggaccggatcaagggcccgtggagcccggaggaagacgaggctcttcagaagctcgtggagcggcatgggcccagaaactggtccctcatcatcaggtccattccgggccggtctgggaaatcgtgcatgctccgatggtgcaaccagctgtcgccacatgtcgagcaccggtccttcacgccggaagaggacgagaccataattagggcccatgctcggttcggttacaagtgggccaccata

SEQ ID NO: 259535 - DNA, 433 bp, Glycine max
ccacgcgtccgctgcatcaaccaaacaaacaaataaagcaaaaggcctttttattccaaagcaaggaagggagaaataaaccgaatgagagcattaacctcttcttcttccactttcattccaaagcgttattccttcttcttcttcctctccattctcttcgctcttcgatcctcgtccgggggctgctccgaataccaccaccaccacgcgccgatggccacgataggaggcttacgcgactcccaaggctctcagaacagcgtccaaaccgaggccctcgctcggttcgccgtcgatgaacacaacaagaagcagaattcacttctggagttttctagggtggtgaggacacaggaacaggttgttgcgggaaccctgcatcaccttactctcgaggctattgaggcaggtgagaagaagctctatgaaa

SEQ ID NO: 259536 - DNA, 383 bp, Glycine max
ggttcttgtgggaggtgcagagtactacagaattattaatggcctgaacttcgaagacaaagttcatccaggtggtccattggacccattggggcttgcaaatgatccacaccaagctgcactgctaaaggtgaaggaaattaagaatggcagacttgctatgtttgccatgcttggtttctacttccaagcatatgtcaccggagaaggtcctgttgagaacctatcaaaacatctcagtgacccttttggcaacaacttgctcactgtcattgccgggtctgctgagagagctccaactctctaaatcattcatcttcatgtttttctccaatcttaatgtacaatacatatcactgagatattattaaagcattttgctt

SEQ ID NO: 259537 - DNA, 374 bp, Glycine max
  unsure (1)..(374): unsure at all n locations
aatgttcanaaaccagtacgacacggacgtgaccacatggagccctgcggggaggctgttccaggtggagtacgctatggaggcggtgaagcatggctcggcggcgatagggctccgatcgaagacccacgtggtcctcgcatgcgtcaacaaggccaactccgaactctcctcgcaccagaagaagatcttcaaggtcgacaatcacatcggcgtcgccatcgctggcctcaccgccgatggccgcgtcctctcccgctacatgagatccgaatgcatcaactataattacacctacgagtcgccgctccccgtcggcagactagtcgttcagctcgccgataaggctcaggtttgcacacagcggtcttgga

SEQ ID NO: 259538 - DNA, 414 bp, Glycine max
gcgtccgctcttttctttgcgcgctgggttttagcgcagcttcttctagatttaaggaagatggggtatgaaagggttcacatcagtattgtggtcattggccatgtcgactctgggaaatccactaccactggtcacctgatttacaagcttggaggcattgacaagcgtgttattgagaggtttgagaaggaagctgctgagatgaacaagaggtctttcaagtatgcctgggtgctggacaaacttaaggctgagcgtgaaagaggaatcaccattgatattgctttgtggaagtttgaaacaacaaagtattattgcacagttattgatgcgcctggacatatggatttcattaagaataatattactgcgtgcaacatcgcatgctgattgtgctgtttttatcattga

SEQ ID NO: 259539 - DNA, 416 bp, Glycine max
  unsure (1)..(416): unsure at all n locations
tccagaattcccggctcgacccactcttccgtcttaactcatttaacttcacaactttctcttactaatagcaccatttttaatttgagtccatctccaaagccttcaaaacctacccttagcaattcggtaccatccttaagaacggctacatcgtcttcaaatgccttccttgatagtttttttaattttttcttacattattgtaatgcacagncacgctatattttaattttatctaattgttattttcacttctcagaaacttgacgatattttgccctattcttacaattatgatgttcctcatgttaatcgttctgattaccatcttattgatattgctcaagatggatttttgagtctgcttactgaaaattgtaacactaatgttgacctcaagctttccactgatt

SEQ ID NO: 259540 - DNA, 313 bp, Glycine max
acggacgcgtccgatcaagtttaagggtagctgtgtatgctttttactatgccaaggctcatgggggataggcgatttctgccatacacaaagccaatattatgcataagacttatggcctttttctcaagtgttgccttgaggttgtagacaaatatactgatataacttatgacgaagttgtcattgacaattgctgcatgatgcttgtgaataatcctgcacttttccatgtactagtgatgcctaacctttatggtgatattatcaatgaccattgtgctagcttgattggaagattgttcttaacacc

SEQ ID NO: 259541 - DNA, 400 bp, Glycine max
gacggacgcgaactaacgaagagaaacaaaacggctttactcaatgatctcttccccagctgatacgactgtcaggcatgcccgagccggcatggctgctccattcactggcctcaagtccatggctggcttccccaccagaaagaccaacaatgacattacctccattgctagcaacggtggaagagtgcaatgcatgcaggtgtggccaccagttgtcaagaagaagattgagactctttactacctgacaaaccttgatgatgcacaatatggaaaggaagtataataccttcttaggaagggatggataccttgcttggaattcgagttggaacacgggatcgtgtaccgtgagcacaacaggtcaccaggatactacgattgacgctactggacc

SEQ ID NO: 259542 - DNA, 458 bp, Glycine max
tccggaattcccgggtcgatttgacaggagggaatatattccatggagctatggggttggattcccttttcctcatgcgacctgcaaagggatggtgaaactacaagactccgcttcgagggttatacttatgcggaagtggggcacatcctggtggtggtgttatgggagcacctgggcgtaatgctgctcgtttagttcttcaagaagttggagaaagaacttaaagtggtgatactgagttatgattctcacccaaatggttactgcctgcaaactggctcggaaagatggctatggctctttcattggaattatatgcagtaactattgcaaaatttgcaacgcgtcagatagaagaatcatcgtgacaatgatttatcaatttggatgagctgcataacaaagatgcagaaacctgtaatgtggatttccgaacactacaaacttgtaaatcc

SEQ ID NO: 259543 - DNA, 452 bp, Glycine max
  unsure (1)..(452): unsure at all n locations
accggnccggaattcccggaatgaccggtcgaccacgcgtccggcacgcatccgttgaaatctcactgncagcaaaaacnccnnnttggattatggattcaagggagctgaaaattgaaatggcctcttattgctctgaaactccaatacttggcgaacccgggacaggccgtgcaagggccacacacacccaaagggactctttcgggctgatttcatcaaggaagacacatgangctattgagatcctcaagctcatgtnctccactttcctcattgcactttgccaagccattgacttgaggcatttggaggagaatttgaagaacacggtgaagaacgttgtgagccaagttgctaagcggactctcaccacaggtgtcaatggagagcttcacccttcaaggttttgtgagaaggacttgctcaaggttgttgatagggagtacaca

SEQ ID NO: 259544 - DNA, 368 bp, Glycine max
cgcgtccgcaagcagcctccaattcgtgccactctcttcaaaaaggccgttaccttctcaagggtccacgcagaatcaggtctcaagtccctcgactacttcctctctgggaaggtctacgtttctggggatcagttcacaaaggacgacatcaaagtgtatggtgctgttttcgagaagccaggtgactcttttcccaatgctgccaagtggtacgaggttgtctcatctcagcttgctgcaagcttccccggcaatgctcaaggggtgagattcagtggcaaagcttctgctccagcggacgctgctcctgccaaaccggatgcttctgctgctgaagatgatgatgaccttgatctctttggcca

SEQ ID NO: 259545 - DNA, 437 bp, Glycine max
ggcccggaattcccgggtcgacccacgcgtccgcccacgcgtccgcccacgcgtccgcccacgcgtccgcagcattgagcaatcagtctctatgatccatttgagagagccacctcctatcttgaggccatcagagagcaattcagagacagaagctattgaaataacagtgacaaagttgcttttgagatcatactacggcattgtcagaaaaaatgttgaggatcttatccccaaagcaattatgcatttcttggtaaacaacaccaagagagagctgcacaacgtcttcattaaaaagctatatagagacaacctgtttgaagaaatgttgcaagaacctgatgagatagctgtgaaaagaaagcgctgtcgagaacttctccgagcttatcagcaggcttttaaggacttggaggaactgcctctggaagctg

SEQ ID NO: 259546 - DNA, 425 bp, Glycine max
cggaatcgacccgaccggcccgcgcacgcgtcgaggttttttggtctttctttggttttggtacctcggaggaaaggcaccatgtgtgtcgggtgtcaaagcagcactgattccgtggcatcttatggaagagctttggcacacatttggtgtgacaatccttgcattgttgacaaacaaacctgttctcccaccgatggtgatgctgatcaccctgcttggaacgctagagggaaccacagagccatttggaaaatgtaatagatggctgagcactaatggtgttggaatagaatggctgagtatgaaatcatgaagctggtctagagctattgagaattgagatagttcatcatcatttggcattaggaatgtcaaatcattgctttgcagtgagctgggctggctgtttattattttgagga

SEQ ID NO: 259547 - DNA, 407 bp, Glycine max
cgaccgcccgaatccggtcgccacgcgccgttttttttctccttagtcaaagggattcatcgttcttcttcccgggtaatttaaaaaagcaaaatggtgaagatttgctgcattggtgctggatatgtggggggtcctactatggcagtcattgcacttaagtgcccatccattgaagtcgctgttgttgatatctctaaatcccgcattgcagcctggaacagcgaccagcttcctatctatgaacctggccttgatggtgttgtgaagcaatgccgtggcaagaacctcttcttcagcactgatgttgaaaagcatgtctttgaggctgacatagtgtttgtctctgtcaacaccccaaccaaaactcaaggtcttggagctggcaaagcagcagatttgacata

SEQ ID NO: 259548 - DNA, 397 bp, Glycine max
  unsure (1)..(397): unsure at all n locations
ccgggtcgacccacgcgtccgcccacgcgtccggcgaaggtggtctcacttgactcgattgcaagtgatccacgacacactgttcgcttgacaaaagcttcgaatccaattcctcagtaacatctgcaagaagtcttctccttcaccatgccaccaaagcctttagactatgggtcaataaatgaaaacgtgaagaagagtcaatatgctggcagaggtgaattataccttcgagcttctgagcttcagaaagagggcaaaaagattatatttactaatgttggcaacccacatgcattgcgacagaaaccactgagcttncctcgtcaggttggtgctttgtgccaagctccattcctacttgatgatcctaatggtggactgctattccctgctg

SEQ ID NO: 259549 - DNA, 538 bp, Glycine max
  unsure (1)..(538): unsure at all n locations
cggaattcccgggtccgaccacgcgtnccggtgatgctctctggtgtggtgggtggtcgctcactggtcaacaacaacaacaaccaacaactgaacgcgcagacgcagacgccaaacgccgaataagaagccgagaaccattctctnnntcagctcaacccnnttttctttttcgatgggcttaatcggcacccacgattattctaatgggcagacctctgcagaacagaagcnnaactaggacgttnncatggattattgaatccataactcagnngccatgtgatgtgcatatgtgcnnactgtatgaaaaggannaactgaaaggagttgaaatccggcttatttcagaaatctcttcttaatgacatnnntactgatctctacannacttcatagaatggtcttgcggggacatgagtnngccctagtgtatgataagttcaaattcaacgcttacttttgccgcatggaatcgacttgtggggatcaaagcaacgaaacatttccaacaattttgaagggaaattagcacact

SEQ ID NO: 259550 - DNA, 414 bp, Glycine max
cgggtcgacccacgcgtccgcccacgcgtccgactctttggtgcctgggaaacgctcacacttcgcaagcgtttttaattccggaccaggaggaggcaaaggtttattttgataaggcagctgtgtactttcagcaagctgttgatgaggatccttcaaatgaactttaccgcaaatcattggaagtggctgctaaggctcctgagctgcatgtagaaatccataagcagggatttggtcagcagcagcaggcggcagcaacagctggatcttctacttctgcttcgggtacaaagactcagaagaaaaagaagagcagtgatctgaagtatgacatatttggatggataattctggcagtcggcattgttgcatgggtgggatttgcaaaatcaaacctggcaccgcctcccc

SEQ ID NO: 259551 - DNA, 445 bp, Glycine max
ccggaattcccgggtcgacccacgcgtccgtttttctctctccttagtcaaagggattcatcgttcttcttcccaggttatttagaaaagcaaaatggtgaagatttgctgcattggtgctggatatgtggggggtcctactatggcagtcattgcacttaagtgcccatccattgaagtcgctgttgttgatatctctaaatcccgcattgcagcctggaacagcgaccagcttcctatctatgaacctggccttgatggtgttgtgaagcaatgccgtggcaagaacctcttcttcagcactgatgttgaaaagcatgtctttgaggctgacatagtgtttgtctctgtcaacaccccaaccaaaactcagggtcttggagctggcaaagcagcagatttgacatattgggagagtgcagctcgcatgattgctgatgtctcg

SEQ ID NO: 259552 - DNA, 371 bp, Glycine max
aatctcaaagcgcttgagttcatctacctgtgtgctggtatcatggaagtttggttggtctgcaaacatggagagactaatgaaggcgcaagcccttggggacactgcaagtttggagtttatgagggggaggagaatattggaaattaatacagatcaccctattatcaaagacttgagtgctgcctgcaagaatgcacctgacagcagcgaagctaagcgagcagttgacctcttatatgacacagcactaatttctagtggattttcttctgacagccctgctgagttgggaaataagatttatgaaaagatggccttggccttgggaggaagaatgggtagatcaaaagaagaaggaggagatgcac

SEQ ID NO: 259553 - DNA, 372 bp, Glycine max
  unsure (1)..(372): unsure at all n locations
gaanacccgggtcgaccgcacgcgtccgcccacgcgtccaactctttggtgcctgggatacgctcacacttcgcaagcgtttgtaatgggggaccattaggaggcaaaggtttattttgataaggcagctgtgtactttcagcaagctgttgatgaggatccttcaaatgaactttaccgcaaatcattggaagtggctgctaaggctcctgagctgcatgtagaaatccataagcagggatttggtcagcagcagcaggcggcagcaacagctggatcttctacttctgcttcgggtacaaagactcagaataaaaagaagagcagtgatctgaagtatgacatattttggatggataattctggcagtct

SEQ ID NO: 259554 - DNA, 266 bp, Glycine max
  unsure (1)..(266): unsure at all n locations
ggaannnccgggncgacccacgcgtgcggcagcatatgaggaaagtcgtcaacctgnatgatgtcttgcactgaaaatcaccacaaatgggcttcaggataattgagtgactggttcagtgttatactatccttgtgatagcgcccttttatttttccttctatttttgtcaaatattttctttttccttattttcctttttctctcttcattcagaaaacaatgtctcgctgctgattatcagtcttctcgtgttgactggaaac

SEQ ID NO: 259555 - DNA, 435 bp, Glycine max
ggaattcccgggtcgacccacgcgtccgggaaccccttcccaatcctaaaggtaaggaagtaatcgtgggttgagaatgcaggagaaggcgcagggtaggaaggaggaggtgcttaccagagagcacaccattaacctccacaagcgcctgcatggctgcacatttaacaagaaagctcctaaagctattaacgagataaggaaatatgcccaaaaggccatggggaccaatgatgtgagggtggatgtgaagctgaacaaatttgtctggagccagggaatcaggaatgttccaaggaggattatggtaagaattgctcgcaagaggaatgacgatgaatatgccaatgatgagctatactctcttgtcaccgctgttgagattcctaaggatgagctcaaagggttaggcaccaaggctattgatgatgaaga

SEQ ID NO: 259556 - DNA, 440 bp, Glycine max
ggaattaccggctcgacccacgcgtccgaccctatctagccacaatgcagatattcgtgaaaaccctaacggggaagacgatgaccctggaggtagagtcatcggacacaatcgacaatgtgaaggctaacatccaggacacggagggcatcccgccggaccagcagcgcctgatcttcgccggtaagcagctggaggacggccgcaccctcgccgactacaacatacagaaggagtccacgcttcacctcgtcctccgtctgcgcggcggcgcctagaagcgcaagaagaagacctacaccaagcccaagatgatcaagcacaagcacaagaaagtcaagctcgcccttctccagttctacaaggtccacgactccggcaaggtccaaaggctccgcaaggaatgccccaacgcccgattgcggcgccgggacttttat

SEQ ID NO: 259557 - DNA, 343 bp, Glycine max
ctggtttccacgctttctcccacacctcctttttcatttttttttcatcaatcatcaccaggggctcgtgacttttcactgcgttccaattgttttttgcaaaaatgggatgttcagagaaagaccctctttcccaattgagtttgcctcctggttttcggttttaccccaccgactaggagcttctcgttcagtatctgtgccgcaaggacgcttgccaccatttctctctttcaatcattgccgaaattgacttgtacaagttcgacccattggttcttccaagttaagccattttcggtgaaaaaaaatggtacttttttagccccatatacaggaaata

SEQ ID NO: 259558 - DNA, 496 bp, Glycine max
  unsure (1)..(496): unsure at all n locations
accggcccggaanncccgggtcgacccacgcgtccggtcggaagcgcgtggggctgaccgggttcaagtgcaggtgcggagtgacgttctgcggggcccacaggtgcccggaggagcacgcgtgcgggttcgatttcaagacagtgggaagagaggagattgcacgtgccaaccccgtgatcaaagcggagaagctgcggaggatttgatgatttcaatctgggccgttcgatgggaccggagcttggtgatttaatctccaccgtcctcgtgtatgcgagagaaagaaaaagagagagtgagagggaaaatgcggttattatgtaacattatgattatgatgatctgtgttttaattaagacgaaagcttgaaaagtcggtttgtctggtctagaagggatgatgaaatgaacgagttatatttattttggctttgttccactgtccgggggtggttgaaagttaaaatgatttgtgataagagtcttagggcaa

SEQ ID NO: 259559 - DNA, 307 bp, Glycine max
ggaattgccgggtcgacccacgcgtccggagagaacaaaacacaatgggcgtcttggtgatcgacggcagcaccgtgcgcgagtgcgtgggcgactaaaccgacttcaccaatagcgtgtacaaacatttctcggcgctggacctaaacaacgacggagtcctgtttcgctcggagctccgcacggtcttcgagtgcatgcgcctcatcgagacacacttcggcatcgacgtttccacgccaccggagcagctcgcgaatctctacgacttcatattcgacaagtttgacggcgaacggagcggctc

SEQ ID NO: 259560 - DNA, 390 bp, Glycine max
  unsure (1)..(390): unsure at all n locations
tggaanncccgggccgacccacgcgtccgcccacgcgtnctaaatgatttgataggagagaaaagtaatgatgtggctgcagagacaaaggcagttgaaccagaacctccagtttatgcaaataagatggaggctaaagatgcattcaaagcactcttggagtctgtaaatgatggatctgactggacttgggatcggaccatgcgtttaataattaatgataaaaggtatggtgccttaaaaacacttgttgaaaggaagcaagctttcaatgagtacttaaatcagaggaaaaaacaagaagccgaagaaaagcgtatgaaacagaaaaaagcccgggaggattttaaaaaaatgttagaagaatccacggacttgacttcatccact

SEQ ID NO: 259561 - DNA, 440 bp, Glycine max
  unsure (1)..(440): unsure at all n locations
cggaattcccgggtcgacccacgcgtccgcccacgcgtncgnccacgcgtncgcccacgcgtncgcccacgcgtncgcccacgcgtncgcgcacgcgtgcgcccacgcgtncgatttttcctctgcgcctttgcatttcagcagcacaccacaatggccaccaatgcattcactggcacatctctctccatgcgatctgtcattcctcaaacacaggcatttgcctcaatttctggcccgacatctgcttcaatttccagctttgggagaaagaatgtttcttttagcttgcagccacgcttaattcgccttaaaatttcctgtgctgccgctaaaccagagacagtagagaaggtgtgcaaaatagtaaagaagcagctggctatgcctgaaactgatgtggtgactggggagtcaaaatttgcaactcttggggctga

SEQ ID NO: 259562 - DNA, 456 bp, Glycine max
  unsure (1)..(456): unsure at all n locations
accggcccggaattcccggtcgacccacgcggtcggccacgcggtcggccaagccttcggttaaaccttttttaaaactctttaaaatccccctttcccagttcccaacttcatttcaaatcaatatgaaaaaaattgtgctaaagttggaaatccatgacgacaaaaccaagaaaaaggccatgagggcagtatctggtatttcaggtataaaatctcaacatctaataatcgntctcatgttagttactatatatatgcttttttatgcttagttaatcaagggtaaaaaatcatatgttatacaaaattgaattttttggggtcattttttcaggggtggagacagtctcagtggacatgaatgacctgaaaatgactataattgggaatgttgatgctgtaataatagttggcaagcttagaaaatgttgtgatcatgctgatatactatca

SEQ ID NO: 259563 - DNA, 284 bp, Glycine max
  unsure (1)..(284): unsure at all n locations
cgaccgcccgaattcggtcgccacgcgtcgggatactagaacagtgtgagaaaagaagtccttgttttcttcgttgctacaattttggtagcatggcaatgccatgcgtacgatatgttccctctccgaatgaacactggctatggtgcccgtactccggaggtgaaatgcgcaagttggaagcttgctgtggaagcacacaacatctttggctttgagaccattcctgaagagtgcgttgaagcaacanaggaatacatncatggcgaacaatatagatcaga

SEQ ID NO: 259564 - DNA, 327 bp, Glycine max
cacgcgtgcgattattgctctggaccgattggtcgtttggtggccacggttgcccttcaaaggaatgatgttgaacttgttgctgtcaacgatctgtctttcctcacacactagctttcgtcttagtttatgtcgacaccgttcattgacagtggaagcattttgatgtgaaggtgaaagactctaagacccttctctttggtgagaagcccgtcaccgtttttggaatcaagaaccctgaggaaattccatggggtgaggttggtgctgattatgttgttgagtcaactggtgtattcactgacgaggacaaagctgctgctcact

SEQ ID NO: 259565 - DNA, 443 bp, Glycine max
gaatttccgggtcgacccacgcgtccggccacgcgtccggctggagtggtggacgccttgaaggaccaaggtatatgcaggtggaacagtgtgatgagatcagcacaacaacatgctaaacataatatgaagtctttgtctcaaaccaagaagctttcttctcaatcatctgttatggcttcagccaaattgaaagatgagaaagctaagaagtcagaggagtccttgagaaccgttatgtacttgagttgctggggtcccaactaaatacagatgcatggattttatgcaattctggatttttatgttcttggaatatgaattgcatgaagatgagaaatggaagactcagaagatacaccaatcagagaagagtttcaactctcaaccaacaccatgttacttgcatgctatgcttgaacacctgttgatcaaaccgatcg

SEQ ID NO: 259566 - DNA, 423 bp, Glycine max
ttcccgacccaagcgacccgtccgttttgaatctatacaatcaacaatcttgtttaacgaagagcaccatttctagtcggagggctacgccggagccttcaaaacctaccctcatcaagccggtaccatccgtaagaacggctacatcgtcatcgaatgcctttctttctagaattagaattttatacttttatgactttaaggcacggtcacgcataattattaattttgtgatgattatattttcactgccaagaaacttgatgatattgtgccctattttcacaattatgatgttcctcatgtgaatcgtactgattaccagcttattgatattgctgaggatggatttttgagtctgcttactgaaaatggtaacactaaggatgaccttaagctttccactgatgagagtctgctcac

SEQ ID NO: 259567 - DNA, 416 bp, Glycine max
aattcccggatcgacccacgcgtgcgcttgctaatgagcaccacatacatccgcgctcatgctgaggattacaaatcatggacttgccttgcagcatccactgctggtggttgccttacaacgtcacaactgctagaacaccctatcaacctaactgaagccacaaggacaacttcatccgcctgtaaccctgcctacttcaaaactgtccctctctgctccaaattgaaagctgcacctccaactgaagctgcaactgctgctactgccaatgatgagcttgaccagtgctatggtcctgacagaacgaacttctagcctgacggtctctaggaccgatctgacatcccatagtacttgaccggagaagtctccggagactatggttatgacccatctggaacttaacaagaagc

SEQ ID NO: 259568 - DNA, 329 bp, Glycine max
cgacccacgcgtgcgaagtaacttaaggtttcaaacctaggaagttggaattcatggcagcaacattgatgtcagggacaggttctgtcactcttaaagcaactcctttcctaggccaaggcaagggtgccaatgccaatgctcttagggatgttgtttccatggtaactggtaagtacaccatgggcaatgatttgtggtatggaccatacatagtgaaatacttggtaccctttttaactcataccccttcatacttgaaaggataattcccagtggattatggatggtacactgctggcttatcttgctgacccgaaagcattttc

SEQ ID NO: 259569 - DNA, 263 bp, Glycine max
atgaattatctaaccttctttactgttctactcttcatacgaccatggaccttatcttcccaggatttgctgaacaaccttctcactcatcgcaagatattcctaaaaaaagacaacattattacctcgtacgctgtcatctttgacggtggtagcacaggaacccgtgtgcatgtcttccatttttaccagaatttgtatctccttcccattggtgatagtcttgagcttaataaaaagatcacaccctttttaagtgctta

SEQ ID NO: 259570 - DNA, 319 bp, Glycine max
aattcccggctcgacgcacgcgttcgctattctacttaccttttctcttaatccaaatatcatcatctgaaactatgggggccatgacaaccacaaccctctcttcaaacccgaaactctcatttttccacggaaagcccgttacatattcttcccgcgtcgcacccaccaccaagttattctcatccaaacaaggcacaatctccatgtccctaacccaacccccatacgacctccaatccttcaaattccaacccatcaaagaatccatcgtctcacgcgaaatgactcaccgctacatgaccgacatgataaccta

SEQ ID NO: 259571 - DNA, 428 bp, Glycine max
gtctggaattcccgggtcgatgcgacaggagggaatatattccatggagctatggcgttggattcccttttcctcatgcgacctgcataagggtgggtaaactacaagactccgcttataaggttatacttatgcggaaatggggcacatcctggtggatatgttatgagatcacctgagcaataagcttctaaattaattattaaagaatttggagaaagaacttaaagatgataatctaaatttagatgctcaaccaaatggttactgcctgcaaactggctctgaaagatggctatcgctaatatattggaattatatgcagtaactattgcaaaatttgcaacgcgtcagatagaataatcatcgtgacaatgaattatcaatttggatgaactgcataacaaaaatgcaaaaacctgtaatgt

SEQ ID NO: 259572 - DNA, 354 bp, Glycine max
cgacccacgcgtccgattccacaagaaattgggaacttgaaaaatctaaaatccctatcattggttggttgtgggttctcgtgtcctattccggattcaatagggtctttaaagcagctgacatttctagcacttaattctaataagttcagtggaactataccacgctctcttggcaatctatcaaatattgattggcttgatcttgctgaaaaccagcttgaatggactattcctgtctctgatgaccaatgaagaccaggccttgaccttctccttaaggcacaacactttcatatggtgagcaataagctcactggtacaataccagaagaactctttaactccagtatg

SEQ ID NO: 259573 - DNA, 340 bp, Glycine max
gaattcgcggatcgacccacgcgtccgaccacacgtccgacgccgatgctcaacgcacggacttgatgaccatcacccgggttctgcggaaccaacaatgcatccaccctgagtctcgtggcgatttctcaatcttgctcagtcacatagttctcgattgcaagtatctctgctctgctgttaacaaggcgggtcttgctaagcttatagcacttgcaagacagacatatgttcacgtctaacagcatatgatactggatgtcctttccaatgatgtctttatcaaggctttcgtcagtattgtacgaacatgcatcttgtagcttgaacaatatcagga

SEQ ID NO: 259574 - DNA, 386 bp, Glycine max
gtccggaattcccggggcggtcaaaaccatgtctacctggctagggatttcacctacattgatgatattgtgaagggttgcgtcggatcgtgggaggcttcggctaagagtaccgggtcgggtgggaagaagcgtggacccgctccgtatagaatatttaacctggggaatacttcgccggttactgatcctactagtgtgagtgtattggaactgcattcgaaggataaggcgaagatgaatattgttgacatgttctggaaacggtgacgttccttttactcacgcgaatattagttcggtctgtatagagctcgggtacaagcccacgaccgatttgcaaaccgggttgaagaagttctgcaagtggtatccatgctattacg

SEQ ID NO: 259575 - DNA, 297 bp, Glycine max
aacacgtatggccagtagctcaagtatagcagttattgtaaaggaatcggtttaatgtttgaggaggttgctttcagaagatacaccggttattcaaagggttgcaaccataatgcttgaaaaaatgggagccgtcgttgtaactgtatgtgatggacaacaggcagtggatgctctaaatggcatgcctggtgtttaatattgtataagggagtctcttctgaaggaaagaaacacaatatcatctcaaacttatattctcggttgccctccatattatttgatcctaatggattg

SEQ ID NO: 259576 - DNA, 452 bp, Glycine max
  unsure (1)..(452): unsure at all n locations
ggtcttgaattcccgggtcgacccacgcgtccgctcctactcgtcaatcattgtgaagaaaagaagtgaacactgactctgttattgttctgggtttgctcaccctatacaactagttttaacgaacatggaaactgaaaagtctaatgtttcaaaggctgaagaatttaaactccttgccaatgaatcattcaatgctcgaaaattcttcatagccattgatctatatacacaagcaattgagctgaactgtcaaaatgcagtttacttttctaatcgtgcctttgcccatcttcggcttgaggaatatggtagcgcaatacaagatgccacaaaggctattgaaattgatcctaaatattcaaagggttattacaagcgatgtgctgctcatcttgggctggggaaattcaaggaagctctgaaagattttcaacantgtcaagaaaatg

SEQ ID NO: 259577 - DNA, 415 bp, Glycine max
cggaattcccgggtcgacccacgcgtccgcccacgcgtccgggcacaaagcattcactgtgtcggaaaaagaagaagagaaaaaagatgagcgacggaggaaaacgacaaggtggaagagcgttgccgccgccgccaagaggccctccgcctcctcccccctctcgccctcgcctcgaacccgtcgatcgcgaaaagacatgtccgttactgctgcgagtgttcactaagattgggagtcaccattccatggaagactttgccgtcagaggcaaagagcccaaagacgaggttcagatttacacctggaaggacgctactctccgagaactcaccgatcttgtcaaagaagttgctccggctgcaaggagaaaaaacgccaaactctccttcgcctttgtattccccgacaaaaa

SEQ ID NO: 259578 - DNA, 433 bp, Glycine max
  unsure (1)..(433): unsure at all n locations
cggaattcccgggtcgacccacgcgtccgcttatggcttgaatcgtacttggttaaatggccaaaaacatttatcgttgtttctcatgctagagaatttttaaacacggtggttactgatataattcacttacaaaaccaaaagctgactacttataaagggaattatgatgcttttgagaagactcgagaagaacaagttaaaaaccagcaaaaagcattagaggcaaacgaacgtgctagatctcatatgcagaccttcattgacaagttccgttataatgcgaagagggcatcacttgttcaatctagaatcaaggctttggatcgaatgggccatgtggatgaaattgttaatgatcctgactacaaatntgacttccccactccagatgatagacctggtgcaccaataataaagtttcagtgatgca

SEQ ID NO: 259579 - DNA, 276 bp, Glycine max
cttccgaaaaaataagccgttcattaccttcccataaaaaggaaaaatcctatcgtgggggctctctttctacttggggccttcaccacctaatacctaccttcaaccaccgcggtggtcgataccaacggtgatattcttcagaatcctggcacatactttatcttgtccgtttttcgacccggcggcggagtagaattcgccgccactggaaacgaaacttgccctctcactgttgtgcagactctcttcgggaggggatttccagtaatctta

SEQ ID NO: 259580 - DNA, 316 bp, Glycine max
acgcgtccgtcttcatcacttcattcaacatttttccccttagctcgtttcaccaatggctgctgcggggagtgctgcagcctcttttccatccaccaagtctacctctcttccaagcatgacctccctcattgccccatagagagttgtgttcaagacagctccattgcaaaacagagatgtttctagcagttcacgggtagtttccatcaaagctcaagtcaccactgaggcaccagccaatgttgaaaaagagtccatgaaacatgatgaaggtgtggctgtgaacaagtttaaacccaagaccccttacatt

SEQ ID NO: 259581 - DNA, 348 bp, Glycine max
catatatctttgttttttctatttaggaagcatggcaatgccatgggtgggttatttactctctgccactgaacactttctatggagcccgtacttcgtaggtgaaatgcccaagatgcaggcttgctgatgaaacacacaacatactttgcctttggaccattcctgaagagtgcgttttatcatcaaaggaatacatccatggcgaacaatatatatcacacttcttaacagttaaccatcaagcttacttttatgccatagacctctaactacattccaacgacacatttttgttcagtataaatcgcaccatactcttttatatttcatactagcacaaaatat

SEQ ID NO: 259582 - DNA, 510 bp, Glycine max
  unsure (1)..(510): unsure at all n locations
taccggtcttcggaattcccgggctcgacgccaacgccgtccgcctctacgcgnntccgcaaaagggtcaatggctgaagttcgaggcctgaangtccgccactatnnatccactgaggatggtttnnggagccgnngtgatgagctcagcagacacttttgagtttcaattggggggaaacccaccacaagacatttatgtggaaaatctgaaaaaacanaattgttngggacccagagcttnngatgggaaatcactttagaagagattattagtgnnacatcatataatannagggtgacattcttccagctttttcaacaatgcagcacaggtatnnggaaccatgacttctntctgggagtgggcatgaaaccaggtggagggtggaaagggccatccggngaggcttctagaaactgatttgaaagagacttttggctcatttgaaaaattcctttgatgagtntaagggctgctgctgcaacacaatttggttcaagatgggc

SEQ ID NO: 259583 - DNA, 268 bp, Glycine max
gccggaatcccggtcgaccacgcgtccgagaaaatgaaggcacttgatttcttcgttgctacaattgtggtagcatggcaatgccatgcgtacgatatgtactctctgcgaatgaacactggatatggtgcccgtacttcggaggtgaaatgcgcaagatgcaggcttgctgtggaagcacacaacatctttggctttgagacacattcctgaagagtgcgtcgaagcatcaaaggagtacatccatggcgaacaatgtatatcagac

SEQ ID NO: 259584 - DNA, 325 bp, Glycine max
tccgagaaaatcaaagcccttgttttctccgtttttacaattgagggagcatggcaatgccatgggtgggatatgtaccctctgcgaatgaacactggctatgatgcccgtactccggaggtgaaatgcgcaagttgcaggcttgctgaggaagcacacaacatctttggctttgagaccattcctgaagagtgcgtcaaagcatcaaaggaatacatccatggcgaacaatatatatcagactccaaaacagataaccaacaagcttacttttatgccagagacctcgaagtacatcccaaggacacatttgtgttcagtatac

SEQ ID NO: 259585 - DNA, 453 bp, Glycine max
cggaattcccgggtcgacccacgcgtccggagagatgcaaaagccataaagatttttcttgaggatggtcatttaataggacttgctcagtcatatgcaaaaaatatgggactgtatggccagcgagcaggaagcctgagtgtgctttgtgaagatgagaaacaagctgtggctgtaaaaagtcagttgcagctgattgctagacccatgtacagtaacccacctctccatggagcacttatagtttctactgtccttggtgatccagatttgaagaagttatggcttaaagaagtcaaggttatggcagaccgcatcatcggaatgaggactacactacgagaaaacttagaaaagaaggggtctactttgccatggcagcatataactaatcaagatggtatgttctgctacagtggattgacacctgaacaggttgatcgtatgacaaac

SEQ ID NO: 259586 - DNA, 472 bp, Glycine max
  unsure (1)..(472): unsure at all n locations
cggaattcccgggtcgacccacgcgtccgaaagggaataacggtaacggagatatggggcttctgtctaacagagtaactagagagagcctgagaccaggggatcacatctactcttggaggactgcttacatatacgctcatcacggcatttatgtcggcgatgacaaagtcattcacttcactagacatgggcaagaagtaggaaccggtactgcactagatcttctcctcatcagttcaggaccagccaagcctcgagaaagttgcccaacttgtacagcaccccaagaggaacacggggttatctcctcatgcatgaactgcttcctagctggtggcgttctgtatcggttcgagtatgccgttaccccagccctcttccttgcgaaagcccgcggtggaacgtgtactctngctgtctctgatgacgatgaatatggtcgtccatcggcaaaatatctgctcgaaaa

SEQ ID NO: 259587 - DNA, 413 bp, Glycine max
cggaattcccgggtcgacccacgcgtccggaaaatggctagtgtcttttctgcatgttcaggttctgctgttcttttctacagcagaaactccggtccctcaaaaggatctttcattcacctcaaaaggcctctctctgccaactgtgtagcttctttggggactgaggtatcagtgtctccagcagtagacactttctggcagtggcttaaagaagagggtgttgtctctgccaagaccccagtgaagcctagtgtggtgccagaaggcctaggattggttgcactcaaagacatttctaggaatgaggttgtcttgcaggttcctaagaggctgtggattaaccctgatgctgtggctgcttcagagattgggaaggtgtgcattggattgaagccttggttggctgttgc

SEQ ID NO: 259588 - DNA, 416 bp, Glycine max
  unsure (1)..(416): unsure at all n locations
ccggnccggaanncccgggtcgacccacgcgtccgtgcaaaaggaagacaaagtgaagcgtgataaccagactctcactaatttactagcggacggccatagagactacgttttgagtcacactcacacgggactcaaaaaggtacctgtagcttccctagtgggtaaaacaattggactctacttctcagcggaatggtgcgtcccatgcgccaagttcactcccaagctgatttccgtttacgagaagataaagcacgagctagccgaaaagggagaggaggacttcgaagttgtgctaatatccagcgaccgcgaccaagcatcctttgactcctactacagcaccatgccttggttggccttgcctttcggtgacccagagatcaagaacctcgttagacactacaacgtgc

SEQ ID NO: 259589 - DNA, 350 bp, Glycine max
  unsure (1)..(350): unsure at all n locations
cggaanncccgggncgacccacgcgtccgacacaatacagagtgagttgttgctccttcgccacaactctctgccaacatgggtatctgcagagattctatgcacaagaggcgtgccactggtggcaagaagaaggcctggaggaaaaagagaaagtatgagcttggtcgccagcctgctaacactaagctgtcaagcaacaagacagtcaggaggatccgtgttagaggtggaaatgtgaaatggagggcattgagattggatactggaaattactccttgggaagtgaagctgtaactcgcaagactcgtgtactagatgtgtgttaacaatgccttaaacaatgagc

SEQ ID NO: 259590 - DNA, 295 bp, Glycine max
cggaattcccgggccgacccacgcgtccggttcattctctttgcgcagttccctacctctcctttcaagatgcagatcttcgtcaagacgctcgccggaaagaccatcacccttgaggtggaaagctctgacaccatcgacaacgtcaaggccaagatccaggacaaggaaggaattcccccggatcagcaacgtctcatcttcgccggaaagcagctcgaggacggccgtaccctcgccgactacaacatccagaaggaagtaacccttcaccttgtccttcgtctcccggggg

SEQ ID NO: 259591 - DNA, 384 bp, Glycine max
ccggaattcccgggtcgacccacgcgtccggtttctgatctcttctaagttactattagaaaacctctctctctctagaaagacccagcaagtcaggttgataaaggcgggaagaatggatgctataaggaagcaagcaagcaaattgagggagcaagttgccaggcaacagcaggctatacttagacagttggtccaaattagcaatgaaccgctcatgactgatgaatgtgaaattgaatgtctgcaacaacttcaaaagttatacacttatacaaagacatccaagcatttttagcggaatattgctcgttctatcgaaggattcatttttgtttgctacaatcacatggagatactgaggaggatggcatgggacatgct

SEQ ID NO: 259592 - DNA, 230 bp, Glycine max
  unsure (1)..(230): unsure at all n locations
acccacgcgtccggncatgtccactttaacgtggattttttgtcccatatgatccccttgatggctccgcattgttacacaaatgtacgggaccaccatatttggtgattgcctgcacataagtgactgggatcaccgaaagagataagttgcttcagtcatgcagctttttgttcctacaacaacatatgtacttgctataaaagactttactgacacccatgaattta

SEQ ID NO: 259593 - DNA, 467 bp, Glycine max
cggaattcccgggtcgacccacgcgtccgcggacgcgtgggcggacgcgtgggtgtttatgcaattggagatgtaattccaggcccaatggtggcacacaaggcagaagaagacggtgttgcttgtgttgagtacataactggtaaggtgggccatgtggattatgacaaagtccccggtgttgtctatacaatgcccgaggttgcatctgttgggaagacagatgagcaggtgaaggaacttggagttgaataccgtgttggcaagttcccgttcatggctaatagcagagctaaggcaattgacaatgctgaaggactggtgaagatattggctgaaaaggagacagacaagatattgggagtgcacattatggcacccaatgcaggagagcttattcatgacgcagcaatagcactacagtatgatgcatctagtgaggacattgcacgtgtgtgccatgcaca

SEQ ID NO: 259594 - DNA, 466 bp, Glycine max
ggaattgcagggtcgacccaggcgtacgcggacgcgtggtcggacgcatgggtgtttatgcaattggagatgtaattccaggcccaatggtggcacacatggcataagaagacggtgttgcttgtgttgagtacatagctggtaaggtgggccatgtggattatgacaaagtccccggtgttgtctatacaatgcccgaggttgcatctgttgggaagacagaggagcaggtgaaggaacttggagttgaataccgtgttggcaagttcccgttcatggctaatagcagagctaaggcaattgacaatgctgaaggactggtgaagatattggctgaaaaggagacagacaagatattgagagtgcacattatggcaccgaatgcaggagagcttattcatgaagcagcaatagcactacagtatgatgcatctagtgaggacattgcacgtgtgtgccatgcaca

SEQ ID NO: 259595 - DNA, 398 bp, Glycine max
cggaattcccgggtcgacccacgcgtccgcccgactcaattacaccacgcttctaaattctgagaatgaattcgtaagatcgaagcaatagcctttttctctgccgccactggtttcgatcccacacccacaaacgcaaaccctccatcctttgaatgctcttgcgttttcctttcactacctcattcctaactcacacacacacaacgggtgatatcaatgtcgactcctgctaagaagaggctcatgagagatttcaagaggctgcaacaagacccgcctgcaggaatcagcggggcacctcaggataacaacataatgctgtggaacgctgtcatatttggtcctgatgatactccatgggatggaggcacgtttaagttgactctccaatttac

SEQ ID NO: 259596 - DNA, 462 bp, Glycine max
cggaattcccgggtcgacccacgcgtccgcccacgggtccgcccacgcgtccgcttcaattcacaaaaaaacacacaaacctcttcagttcacaaagcacacaacctcttctaatattcgttttctgatctacgcaaggttaaggttaatttgcttctatctacatggacattaacgagatcgatgttccttcattctttctctgccccatttcgttagaaatcatgaaggatccagtgacggtctcaacaggcatcacctacgaccgtgaaagcatcgaaacatggctgttctcgaagaaaaacacgacatgccccatgaccaaacagcccttgatagattacaccgatctcacaccaaaccacacccttcggagactcatccaagcgtggtgtaccatgaacacttctcacggcatcgaaaggatcccaacccccaaaccccccattaacaaaaatcaaa

SEQ ID NO: 259597 - DNA, 304 bp, Glycine max
gctcctaaacattctctgcacccaaaccgtgtgattaatcgcgctgtttacttaacacaggcttggtgcacaaattgctccgtctcaaccccattatggacgcagctcacttttttacaccaaaagcagtatgttttctggagtaacaaccagacgggcaaatgcagcagacacaagaacctatgtgataacatgtgcagcatgagactcacagacagaggtgattggactgtctgcatactcagggtgtgggaagagcaccttaatgaggaggctgaccagtgtgctaggaggagcatcagat

SEQ ID NO: 259598 - DNA, 479 bp, Glycine max
  unsure (1)..(479): unsure at all n locations
cggaattcccgggtcgacccacgcgtccgcccacgcgtncgactggttaccattttgtataccatgttcactctggaagctttaattatgttatgggcatggaaaattttgttgacagtgccactgtttattgtgattttgacgtgtaaatggagaaaaagacatttgtcaatgtttgaaagtattgaaaattatctagaacaaaataacttgatgcctattagatattcatacaaggaagttaagaagatggcgggaggttttaaagacaagttgggtgaaggaggatatggctctgtgttcaagggaaaattgcgtaacgggtcttgtgtggcaataaagatgttaggttaatcaaaaggaaatggccaagattttattagtgaagttgcaaccattggaagaacatatcatcaaaatatagtacaattaattggattttgtgttcatgggtcaaaacgtgctcttgtctatgaatt

SEQ ID NO: 259599 - DNA, 406 bp, Glycine max
  unsure (1)..(406): unsure at all n locations
cggaanacccgggtcgacccacgcgtccgcccacgcgtgcgatctgatgtcgtcaagagagtattgtcaattgaagatccctctgcacaggatggggttcgacttgggataaaggactacccttatgctgctcatggacttgaaataaacaatgctattaagacatgggtacatgaatatgtatccttgtattacccaacagatgcagctgttcaacaacatactgaactacaaacatacaggaaggaagctgtggacaagggtcatggtgacttaaaagaaaaagcttggtggtctagaatgcacacaacttattatgtgatttcaatcatgctttattatcgtttggacagcttccgctatacatgctgctgttaaattttgaacaatattcttatgggggctt

SEQ ID NO: 259600 - DNA, 481 bp, Glycine max
  unsure (1)..(481): unsure at all n locations
cggaattcccgggtcganccacgcgtccgccaacgcgtccgggggctttaatttcgtttccgaagcgacaggcagcacccactctctcttctcggcgcttccaaacatggaacgcatcgttggcggcaagtacaagctcgggcgcaagatcggaagtggatccttcggcgaaatctacctcgcgacgcatattgataccttcgagatcgtcgccgtcaagatcgagaatagtaaaacaaaacatccccaactgctttacgaggcaaagctctacaatattcttcaaggaggaagtggcattcctaacataaaatggtccggcatagatggggaggataatgtgcttgttattgacttgcttgggccgagtcttgaagatctctatgtgtattgtggaaggaagttttcattgaagactgtattattgttggctgatcaaatgatcactagaatagaatatgtgcattctaaacgattttta

SEQ ID NO: 259601 - DNA, 425 bp, Glycine max
cgggacgacccacgcgtgcggcggggataagattaaagatgcaacaatggcctctgcttctgctactcttctcaagtcatctccttgtgttgacaagtgcgagtgggtcaaaggccagacccttcgccaacctctcgtgagatgtaacccttcctcagcatcagctctcaccatcaaagctgcttcctatgctgacgagctcgtcaaaaccgccaaaacagtggcctcaccggggcgtggtattttggcgatggatgagtcaaatgcaacctgcgggaagcgtttggcatctattgggttagagaacacagaagctaatcggcaggcataccggaccctacttgtgacagtacctggtcttggtgaatacatctctggtgccattctctctgaggaaactctctaccaatccactggcgatggaa

SEQ ID NO: 259602 - DNA, 336 bp, Glycine max
caattgggactgaaattcaatggcacccacgaatttgcctgacacagaagattcttaagaaagcgcctaaaaagggttcaaagaatgctaaaccaattaccaaaactgaaaattgtgaaagcttcttcaatttcttcaacccaccgcaagttcctgaagatgatgaagacattgatgaagatgcggctgaggaacttcagaatcagatggaacaagatttttacttatggtcaacaataaaaaacaaaactattgcccatgctgtataatgatttactggggaggccattcatggggatgacgttctgacatttggcggatgtctatgattatgta

SEQ ID NO: 259603 - DNA, 465 bp, Glycine max
  unsure (1)..(465): unsure at all n locations
ccggancggaataaccgggccgacccacgcgtccggggcagcctatcaaaggtaattgggcatatgtttgtggtcagagagaggatacgtggggtgactacaatatatttgttggcgatctaagtcctgaggttactgatgctacgttgtttgcatgcttttctgtctatcccacatgttcagatgcaagggttatgtgggatcaaaagactgggcgttcaaggggatttggatttgtttcattccgtaaccaacaggatgcacaaagctctataaatgatttgactggtaagtggcttggaagtagacagatacgttgtaactgggcaacaaaaggtgctgggggttatgaagagaagcaaaactcagatgcaaaaagtgtggtggaacttacaaatggctcatctgaagatggtaaagagacatctaacagtgatgctcctgagaacatccttaaaatactac

SEQ ID NO: 259604 - DNA, 483 bp, Glycine max
  unsure (1)..(483): unsure at all n locations
cggaattcccgggtcgacccacgcgtccgcccacgcgtncgattctctttgcgcagttccctacctctcctttcaagatgcagatcttcgtcaagaccctcaccggaaagaccatcacccttgaggtggaaagctctgacaccatcgacaacgtcaaggccaagatccaggacaaggaaggaattcccccggatcagcaacgtctcatcttcgccggaaagcagctcgaggacggccgtaccctcgccgactacaacatccagaaggagtcaacccttcaccttgtccttcgtctccgtggtggcatgcagatcttcgtcaagactctcactggcaaaaccataaccctagaggtcgaaagctctgacaccattgacaacgtcaaggccaagatccaggacaaggagggaatccccccagaccagcaacgtctcatcttcgccggaaagcaacctgaggacgggcgcaccctcgccgactaca

SEQ ID NO: 259605 - DNA, 465 bp, Glycine max
cggaattcccgggtcgccccacccgtccgaattatttccaggtgggacgataggatgtcagcatctataccaaacgaggaggttttctacacagttggatttttgcactcaagtgggtttgatacttggaaagcatatgatgctcaaaacagtgaaattttggagttctgtagagatgctggcatcaaggtcaagcaatatcttcccaaccacagcacacaggaagattggacaaaccattttggtgctaaatggataaaattcttagaaagaaaacatcagtttgatccaagaatgattctatcaccagggcaaaaaatcttccacaaacaattacagccagcgttttaaatatttcccctaattaaaaaaagtaaatgttttatggtgggactaccccatttagatggctacctagggacaggtgtaaatacaatgagaccaagaccaagatggctttaattt

SEQ ID NO: 259606 - DNA, 477 bp, Glycine max
  unsure (1)..(477): unsure at all n locations
ccggaccggaanaccgggtcgacccacgcgtccgttcagaggcaacaaaggagttgtaaattaagagcatggctgcacaagctcttgtatcatcgtgatctcttaccttctcagccgaggctacaagacaaagtcttggaccaagatcactccaatctccatttggcttctcaagaaaagcctcctttcttgttaaggcagctgctactccccctgtcaagcaaggatcagacagacctttgtggtttgcatcaaagcaaagtctttcctacttggatggcagccttccgggtgactatggatttgaccctctgggactttcggaccctgaaggaacaggagggttcattgagccgaaatggctagcatatggtgagataatcaatggtcgttatgcaatgttgggtgcagttggtgcaatagcacctgaaattctangcaaggctggtctgatccctcaggagacagcactcccat

SEQ ID NO: 259607 - DNA, 209 bp, Glycine max
ttctattcaattttctcttacttgtattatccaaactacaccttatggttctcaagcataacattcatggaatcaccaatccctctattctccgtactgtccatacttgatgtcgtcaagcgtatcaatgttcttatctattaataaactctctgtgttctcaatatctttctatagaacgtccattctctaactctttcaccctacac

SEQ ID NO: 259608 - DNA, 453 bp, Glycine max
gaccggccgggtcgacccacgcgtacgttttcaagcgaccaaacgtttcaaacctaggaagttggaagtcatggcagcaacattgatggcagcagcaagttctggcactcttaaagcaactcctttcctaggccaaggcaagggtgccaatgccaatgctcttagggatgttgtttccatgggaactgggaagtacaccatgggcaatgatttgtggtatggaccagacagagtgaaatacttgggacccttttcagctcagaccccttcatacttgaaaggagaattcccaggggattatggatgggacactgctggcttatctgctgacccggaagcatttgccaagaacagggctcttgaggttatccatgggagatgggccatgcttggagcactaggatgcatcaccccagaggtgctagagaagtggttgagagtggacttcaagga

SEQ ID NO: 259609 - DNA, 435 bp, Glycine max
aattcccggcccgacccacgcgtccgcccacgcgtccgcccacgcgtccggtatattcattttagcatcaaggttgggtctcagggaaaaagaaacatcgacaagcatgtctggaagaggaaagggaggcaagggtctcggaaagggaggagccaaacgacaccgtaaggttctgagggataacattcagggaatcaccaagcccgcgattcgccgtctggccagacgtggtggcgtcaagcgtatcagtggtcttatctatgaagaaactcgcggtgttctcaagatctttctagagaacgtcattcgcgacgctgtcacctacactgaacacgctcgccgcaagaccgtcactgccatggacgttgtttacgccctcaagaggcaggggaagaccctttacggatttggcggttagacaattggggatttcag

SEQ ID NO: 259610 - DNA, 307 bp, Glycine max
tctaacactcgttcgttatattcaatttaacatcacatttggagctcaccgaaaaatttacattgtcaagcatacttctaacataaaacgaagccaagggtattcatacacgatactatccaaacatacatcctttacagttctaactgataacatctccataatcaccaatccctcgattcgaccactcaccatacattacttcgtcaagcttatcactgatattatctattaacaaactagcgaagttctcaagatcttactatagaaccacattcgcgacactttcacctacactgaacactct

SEQ ID NO: 259611 - DNA, 421 bp, Glycine max
gtacccgtccggaattgccggttcgacctagacgtacgcgtccgcataaggatctggctgaaaagtatgatgtgagtggatttcctaccttgaagttcttcccaaagggcaacaaagctggtgaagagtacggaggtggaagagacttggatgactttgtggcttttatcaatgagaaatctggaacaagtcgagatgtaaaaggacaacttacttcccaagctggtatagtagaaagcttggatgtcttggttaaagagtttgtagctgccagcgatgaagagaagaaattcgtgtttacccgaatggaagaggaagttgagaagctgaagggttctgcctcaaggtaacttaaataaacatcatgcttctaaaacatttgctttgagttatgtcacttgagaataggttaatttgcatt

SEQ ID NO: 259612 - DNA, 462 bp, Glycine max
tcccgaactggaattcccgggtcgacccacgcgtccggtttggttaggttacttgctcgaatttcctcgaatcgcttaatttgtatttgattagttaaaccgcaacgcggaatctcttttctcgaactggctaactctcaggcaagtggttcggacgctgattccagcaacaagcggctggtgctcgcactgtatgacgccctaaactccggcgactccgacgccgtcgtcaagatcgtcgccgtcgacctcgagtggtggttccatggtccgccctcacaccagtttttgatgcgcatgctcaccggcgactccgctgccgacaactccttccgcttccttccgcagtccatcgtcgacttcggctgcaccgtcatcgtcgagggctgcgacaccgaccgcaacattgcctgggtccacgcctgcaccgtcacggatgggataattactcagatcagagag

SEQ ID NO: 259613 - DNA, 366 bp, Glycine max
aattcgggggtggacgcacgcgtccgggaaagtttaaggccactgattcttccctttcgactgttccgggctacgatgtagctgagttggttttgaaggttggtagtcaagtgaaggactttaaagtgggtgatgaagtgtatggagatgtaaatgataaagcactagaaggacctaagcaattcgggtctttggctgagtacacaactgttgatgagaaattgttggcatcaaaaccgaagaattattacttttctcaatctgcttgtttttctctagcaattgatactgcttattatggttaggagaggacttgattttcttcttgtaaatttatttttgttctaaataattctagtttaattt

SEQ ID NO: 259614 - DNA, 396 bp, Glycine max
  unsure (1)..(396): unsure at all n locations
attcccgtgtcgacccacgcgtccgtgcaaataaagcttctctaatggctgccattgattacataagctctgagaaaactcatggtttcatgcgatctaatggaagcaatatgggccatgcacttcacgtataaagatttatataactaatatacatggccgcttctataattatattgtaataactcatattcttaatgtgacaatttctataattattgaaactaaatgttatttcagggtcaccgggcctacgcacgacacaagaaatatataaccccaaacaaaagacagatgctcccctattttctggattcttccctccccgaagaagagttcaatatgattatcaaggaattgcatcangattcattatgtcagccagaattcaggact

SEQ ID NO: 259615 - DNA, 350 bp, Glycine max
ctcgggcttgaattcccgggcggtggtactacatgacgatatgctcgagctttattcttaaccatttccaaacggctggcgagtggacaggctagggcttggattcacagcaattgcaattcattatcagacagtgatcaacttcgtcctgtttcaataccagatatgcattcagccagtgcaggaattactgaaggtttttccatgtgtggaggtgactttgttgaagtttacagtgattcaagccaagttggtgcatgggatgcagttgtaacttgtttctttatcgatacagctcataatattgttgagtacattgaaataatttcaaaaattttgaaagaaggggg

SEQ ID NO: 259616 - DNA, 449 bp, Glycine max
aattcccggtcgacccacgcgtccggaagtgagtagtgagtgctgaatcgaatcgaatcgattctccgaacatggcggcgagcggtcgcacagtgttgcaatgctcttcatcatcttcttcttcttcgcagatcttgtccgcgaaggtccaccctctggtcatcttcaacatctgcgattgctatgttcgacgccctgaccaagccgaccgcgtcatcggaaccctactcggctccgtccttcccgacggaaccgtcgatatccgaaattcctatgctgttcctcacaacgagtctatcgaacaggttgcattggatatagagtaccaccacaatatgttaatatcccaccaaaaagtgaatccaaaggaaatcatagtaggatggtattcaaccggtcttggagtaactggtggtagtgcattaatccacgagttttattctcgagaa

SEQ ID NO: 259617 - DNA, 202 bp, Glycine max
ttgcaaacaagatatcctgttgggtctcaaacgcagtaacagcattgctttcagctaaaaggaaacccccaaagatgagacagagatccaagtaatgcgttaaacctaatttgcttacgaagcttttacaaatgcttatcttaacaaatatgacacccagttcatagactgactagtctctccttattgatgctttgataca

SEQ ID NO: 259618 - DNA, 420 bp, Glycine max
tcgacccacgcgtccgaacaaacagtcggctgaaaatgtacgtccttgtattcttggctgctacaattttggtagggtggcaatggcatgcgtacgatatgatccgtctccggatgaacactggctatggtgcccgtacttcggaggtgaaacgcgcaagttggaggcttgctgcggaagcacacaacatatctgggtttgagaccatacctgaagagtgcgtagaagcaacaaaggaatacatgcatggcgaacaatatagatcagactccaaaacagataaccaacaagcttacttttatgccatagaccatcaagtccatcccaaggacacatttgtgctcagtatagatggcaccgtactctctaatattccatactacaaaaaacatggatatggggtggagaaattaactcgac

SEQ ID NO: 259619 - DNA, 335 bp, Glycine max
gaaatcccggctcgacccacgcgtacgccgcgatctatttctcagtctctgcgtttgcggctgaggattccgaacgggtgaccttggtcgtctctggcaaagtttaagtcatcatgggtaaggaaaaggttcacatcaacattgtcgtcattggacatgtcgactctgggaagtcaactaccactggtcactagatctacaagcttgcaggtattgacaagcgcgtgatcgataggatttagaaggatgctgccgagatgaacaagatgtcattcaagtatgcctgtgtgcttgacaagcttaaagctgatcgtgaaagatgaataaccattgat

SEQ ID NO: 259620 - DNA, 333 bp, Glycine max
cacgggggacggacgcgtgcgccgtgtatgactttgtccaattcgatatggtcgacgagaccgccttgctccactctctcgggcgacgcgaccgggcgtcgtcttctctctccgcctttcattccttgaccagtggcacaaagacatcatatgtagggaacaagtgggcaagtttgtctcggccgttcagttcaaagcctgctggtaatgatgtcattggaattgatctgggtactaccaattcatgtgtttctgttatggaaggaaagaatcccaaagttattgagaattctgaaagagctcgaacaacaccatcagtggttgccttcaacc

SEQ ID NO: 259621 - DNA, 375 bp, Glycine max
ccgggtcgacccacgcgtccgcccacgcgtccggtttctattcctcactaggagctcctctccactggttcttcatctgcatgcacacagttgcgtagttttggaaaccaagaattcctgaagaagggtagcatcaacaagcagttctgaaaatggagatcaccaatgtcagtgagtatgaggctattgcaaagcagaagttgccaaagatggcgtttgactactacgcatctggtgcagaagaccagtggactctgcaagagaacagaaatgccttttccagaattttgtttcggccacgtattcttattgatgtgagcaagatagacttgacaactactgtcctaggcttcaaaatatccatgccaatcatga

SEQ ID NO: 259622 - DNA, 405 bp, Glycine max
ccgggtcgacccacgcgtccgcccacgcgtccgggaaaaaacttgacagatttattctgtgggaaggttctcaactgccttgatattggtggggaaggttctactctgatagctgctggtggttctgatcctgtcattaggatttgggatcctcgtaaaccaggcacttctgctcctgtttttcagttttcttctcatatgtcttgggtttcggcttgcaaatggcatgatcagtcttggtttcatttactttctgcatcctatgatgggaaagttatgttgtgggatctgagaactgcgtggcctctttcagtcattgaatcgcacagtgataaggtattgtctgctgattggtggaaaaagaacagtgttatcagtggtggagcagactcaaaactttgcatt

SEQ ID NO: 259623 - DNA, 415 bp, Glycine max
accccgggtcgacccacgcgtccgctgcagaacatggcacagattttggctccctctacgcaatggcagatgagaatctcaaaggcctctcccaatgcaactcccattacatcaaacatgtggagttctttattgtggaaacaaaataagaaagtttcacctaccagttctgctaaatttagagtgctggcaattaagtctgacaatagcaccatcaacaggctcgagggtctacttaatttggatatcactccattcactgacaagataattgctgagtacatttggattggggggacaggaattgatgtgcgcagtaaatcaagaacaatatcaaagcctgttgaagatccctctgagctccctaaatggaactatgatggatctagcactggacaggcacctggtgatgata

SEQ ID NO: 259624 - DNA, 465 bp, Glycine max
gaactcccgggtcgacccacgcgtccgctctcgtgtcttctttaaccctcaatcagcaacgtgcgccctcctcgggtcaagctcaggcagcactgcaccgcaaatttttctttgcccctttcgatgagtaacgccacagactccgccggcgagatcccaccggagacgaggtccgccgagagtgacggtggtgggccccggcccacgattaagatcaatgttacgcacggttcctctcaccacgatttacacctcccggcccaatcaacttttggggatgttaagaaactccttgtcaataaaactggtttagagcctgcagagcaacgacttttcttcagagggatagaaaagggtgataaccagcgtttgcaggctgaaggtgtaaaggataagtcaaaactttttcttttggaaggcattggtagcaaagagaggaaacttgaggaaaccagaaaagaaaat

SEQ ID NO: 259625 - DNA, 144 bp, Glycine max
atataacgaaggatgcaatggaggacttatggactatgcatttgagttcattatcaacaatggcggatttgattttgaaaaggataaccttaaccggggggtggatggtaaatgtgacacatataggaaaaatgctaaggtggt

SEQ ID NO: 259626 - DNA, 441 bp, Glycine max
  unsure (1)..(441): unsure at all n locations
attcatattcatcttgcttttagaatctctttcataaaaagtcaccgggtaatacatatcgtcatgtttctaaatgtatttttttncatntacaacatataatccattacaacaactcatattcgaccatatatccatcccattctcttttttcgatcgctacataccccttcatcacatcattaatcaacgtttctctctcgttctacactttttgcctatctctcattttataaaattattttattattttaacctatgtacttaaaaaatatttcattttacaaatttttctattaattccctcaaaaccctttttttttttttctttatttaatctttaataatttttctcatctcaccttttccataacatttccgctttccatttcatcatcaaaaaaatttaattaaaaaaattttttttttttttcttataaa

SEQ ID NO: 259627 - DNA, 449 bp, Glycine max
  unsure (1)..(449): unsure at all n locations
ccgggtcgaccgcacgcgtccggaaagcaagctcatcctanagttttaaaaatggcagcagcctcctccatggctctctctgccccatccttggggggcaaggccgtgaagctgggcccatcagcccccgaagtcgggagggtcagcatgaggaagaccgtcaccaagcaggcctcctccggaagcccatggtacggcccagaccgcgtcaagtacttgggcccattctctggcgagcccccgtcctacctcactggcgagttcccaggtgactacggctgggacactgctgggctttcggccgacccagaaaccttcgccagaaaccgtgagctcgaagtgatccactccaggtgggccatgctcggggccttgggctgcgtcttccccgaactgttgtcccgcaacggggtcaagtttggaaaagctgtgtggttcaaggccgggtc

SEQ ID NO: 259628 - DNA, 400 bp, Glycine max
ccgggtcgacccacgcgtccgaaatcctgtcacagtgacgaaacgacacgaattgaagacaaaagagtcaaacataaatgatagatacatagggttcattcagagtttagtcaaatgcttcgttcacggcggcgctccccttacggcgcctacctctgcgccgtgatctccgccgtgctcctcctcttctccgtctccctcctctactcccgcctctcccgctcccacccccactcccaccacctcccccgtccctccctcgtttcccactccacctccgccgacatctccatcgcctcctccgacgaccccatcgacgagctcgacttcatcgacgaaaccctagatcccccctccctccgcctcaaccctcccccctaccacctcttcttcgatcccc

SEQ ID NO: 259629 - DNA, 146 bp, Glycine max
  unsure (1)..(146): unsure at all n locations
gacccacgcgtncgcccacgcgtncgnccacgcgtncgagaacaagtagttgagaactaagaaagagaagcaaatggcttcctcaaggatctcttccccagctgttaccactgtcaaccgtgccggggccggcatgggtgctccat

SEQ ID NO: 259630 - DNA, 434 bp, Glycine max
  unsure (1)..(434): unsure at all n locations
cccgggncgacccacgcgtccgctctcgcatatggatcaaatttcggctcgctttacgcaacggcttattagaatgtcaaggtgctattcatatggcatgtctattacatcaaacattttgcaattccttattgtggaaacaaaataagaacgcttaacctaccagttatgctaaatttacagtgctgtcgattaattctgacaatagcatcatatacttactcaagggtcttcttactttgtatatcactccattcactgacatgataattactgagtacattatgattggctgtacaggaattgatatgcgcatgtaatcaataacaatatgaatgcctgttaaacattcttttgagctccctaattggaactatgatggatctagcactcgacattcaccttgacatgatcgctaacttatcctatttcct

SEQ ID NO: 259631 - DNA, 349 bp, Glycine max
  unsure (1)..(349): unsure at all n locations
cggaactcccgggtcgaccgacgcgtccgcttgagtttangatgggtcaaacatggtttttgcattcaccaagatgtttgaatctgccgtagaaacatgatggtaaattatggactcaagtctcattgaagtatttggaatcagtttttgcatcacccttgacttgagtcattaatttgttccaagtataattctgtttaatattgatattggcatgataaatagcaagaaaaaacatatttttttagttgaaaaaaaaaaaaaaaaaaaaaaaaaaaaaaaaaaaaaaaaaaaaaaaaaaaaaaaaaaaaaaggaagagggggggaaaaaaaaaaggggggaagcgcc

SEQ ID NO: 259632 - DNA, 439 bp, Glycine max
gaatccccgggtcgacccacgcgtccgcttcattttggagaattaagtgcaaggaaagtttttcaagtgacttgtatgaagcaaatattatggacaaatgaaggaaacagtgctggtgaagagagtgcaaatcttttcctcagggccattggacttagggagtactcacgctatctttgtttcaactttcccttcacccatgagagagcacttctggggcacttaaagttttttccttggaatcctgatcctgatatctttaagacttggagacaaggtaggactggctttcctttggttgatgcacgaatgagagaactttgggcaacaggatggatacacaacagaataagagtaatagtttccagttttgctgtgaaaatgttgcttctaccctggaaatggggaatgaaatatttgtgggacacactttctgatg

SEQ ID NO: 259633 - DNA, 340 bp, Glycine max
  unsure (1)..(340): unsure at all n locations
accgggccggaatacccgggtcgacccacgcgtccgcaaaaacaaanaaattaaaaaacccttatccaacacaaccatcatgggcacctatgatgtgcggcaatcaacattcactgttcaaactgctctgaagcagctcaatgagttctgcctcaagaccggtggcgcctgcaaaggtctaactaacatgcgccacaccgactaaagtgctcctcagagcatttggtatggccctgaccgtcccaagtacttgggtccattctccgagcaaattccatcataccttaccagagaattccctggtgactacagatgggacactgcttgattatcagctgac

SEQ ID NO: 259634 - DNA, 466 bp, Glycine max
ccggaatccccgggtcgacccacgcgtccgggatggccacagcagaagaaatttcaactttgaaactgttgcgccaatatctcttgggggatatttcagaccgttttctcaccaatctcattccagtaaaacttgaagacccctcatcaggacttgatatgggttcaaacttctcagaacaaagcagcttctgcaagtttctggagtgctttgattttgaagcagaagtggtaggtctcacttctcatcataaggtccaaagctccattgcaacaagtccaccccagaatttcaattttccagaagaaccaatggtgtcaatgaaaaaggaagcaacatgttatgcaacaaggcattacagaggagtgaggagaaggccatgggggaagtttgcggcagagattcgcgaccccaaaaagaaagggagcaaggtgtggcttggcacatttgacactgagaatgatgc

SEQ ID NO: 259635 - DNA, 462 bp, Glycine max
gacccacgcgtccgggatggccacaacagaagaaatttcaactttgaaactgttgcgccaatatctcttgggcgatatttcagaccgttttctcaccaatctcattccagtaaaacttgaagacccctcatcaggacttgatatgggttcaaacttctcagaacaaagcagcttctgcaagtttctggagtgctttgattttgaagcagaagtggtaggtctcacttctcatcataaggtccaaagctccattgcaacaagtccaccccagaatttcaattttccagaagaaccaatggtgtcaatgaaaaaggaagcaacatgttatgcaacaaggcattacagaggagtgaggagaaggccatgggggaagtttgcggcagagattcccgaccccaaaaagaaagggagcaaggtgtggcttggcacatttgacactgagattgatgcttctaaagctta

SEQ ID NO: 259636 - DNA, 468 bp, Glycine max
ccggaattcccgggtcgacccacgcgtccgcggacgcgtgggcggacgcgtgggtctcactcaaccaaatctcagttttgagttcaactggactaaactatgtcttccttatccctatatgccaacctctcctctctaccatcctccctcaccattcgttcttcttcatccaaagatacctctttgaaacaggattggaggacaaagtccaaacctatcccaccaggtggcacataccctgcaaaagatcattgcagtcgttgtgggttgtgtgatacttactatattgcccatgtcaagaatgcatgtgctttcttgggagatggaatgtctaagattgaaagattggaacctgttgttcatggtagaggcaggaagactgataacttggatgagacctacttaggggtatatgaggaactgctatatgctcggaaacttaaccctgtggaaggagctcaatggact

SEQ ID NO: 259637 - DNA, 397 bp, Glycine max
cccacgcgtacgggttgcagtcactgctttgtttaaatcacaaccacatcgtgttctcttattccattggcggacatagcaactgagatgagcaacaagagaaagtttgtggctgatggagtgttcttcttcgaactgaacgaggttctgacacgtgagttggcggaggacggatactccggcatggaggttaaggttacgccgatgcgcaccgagattatcattacagccaccagaacccaagccgttctcggtgacaagggaaagagaattaaggaacttacctcaatggtgcataagaggttcaaatttcccgagaacagtgtcaagctttatgctgagaatgtcaacaacagaagcctttgtgccattgctcaggccgagtcgctttgctaca

SEQ ID NO: 259638 - DNA, 305 bp, Glycine max
cccgggtcgacccacgcgtccggtttgcagtcactgctttgtttagatcagaaccagatcgtgttctcttcttccattggcgggcatggcaactcaaatgagcaagaagagaaagtttgtggcggatggagtgttcttcgccgaactgaacgaggttctgacacgtgagttggcggaggacggttactccggcgtggaggttaaggttacgccgatgcgcaccgagattatcatcagagccaccagaacccaagccgttctcggtgagaagggaaagagaattaaggaacttacctcagtggtgc

SEQ ID NO: 259639 - DNA, 367 bp, Glycine max
gacccacgcgtccgggaaaaatggcatcattcaccatgacagcttccatccttggcggcccaaccgtcaccaaggggttggcagtcggaacgcagacgaaatcactcgtaatgaatgctgccaaagctgttgaagcggaaaaggtcagttatgacaatgacatggatggtagcaatggaaggaggaacttgatgttcgccgcggcggcggccgctgctgtttgctctgctgctgggatggcagtggcagatgagccataaccaggaaccccagctgccaagaaaaagtatgctccgatttgtgtcaccatgccaactgctaggatttgtcgcaattgagggactcggtttttattttacttttgatg

SEQ ID NO: 259640 - DNA, 480 bp, Glycine max
  unsure (1)..(480): unsure at all n locations
accggtcctgaattcccgggtggaccgacncctacgcgaagactttgtagcaaaagtaaaagaagcattggaaaatgagccttatcctctaagagcggagcaaagatatcaactttcttgggaagctgctactcaaagatttatggaatattctgagcttgataggatcctgaacaaggaaaataatggtgaaaaggcaagtgtagataaaggaaagctcattgctaagtcagcatcaatgcctaatctgacagaactagtagatggaggcttagcatttgctcactattgtcttactgggaatgaatttctgagattatgtacaggagcaatacctgggacacgtgactatgataagcagcacttgtaagaccttcatctcttgccttcactggtagaaaatcctatctatggctggtgaatgggttgactagtttggatgtttgaaggaaaacttgtcacaccagattatgacaagca

SEQ ID NO: 259641 - DNA, 486 bp, Glycine max
attcccgggtcgaccgacgcgtccgtatttttcaagtaacttaaggtttcaaacctaggaagttggaagtcatggcagcaacattgagggcagcaacaagttctggcactcttaaagcaactcctttcctaggccaaggcaagggtgccaatgccaatgctcttagggatgttgtttccatgggaactgggaagtacaccatgggcaatgatttgtggtatggaccagacagagtgaaatacttgggacccttttcagctcagaccccttcatacttgaaaggagaattcccaggggattatggatgggacactgctggcttatctgctgacccggaagcatttgccaagaacagggctcttgaggttatccatgggagatgggccatgcttggagcactaggatgcatcaccccagaggtgctagagaagtggttgagagtggacttcaaggagccagtgtggttcaaagctggagcccaaatat

SEQ ID NO: 259642 - DNA, 474 bp, Glycine max
ggaattcccgggtcgacccacgcgtccgcttatggagctgtgggccatggtgggcattaccactctcagtctcctgaggctttcttctggcatgttcctggtatcaaagtggtcatccctcgaagtccacgacaagcaaaagggttattgctatcttgcatacgagatccaaatcctgtagtattttttgaaccgaagtggctttatcgtttggctgttgaagaagtaccagaggatgactacatgctgcctttatctgaggccgaggtaattcggcaaggaagtgatgtaacacttgttggatggggagctcaattagctataatggaacaagcttgtcttgatgctgaaaaagagggaatttcttgtgaattgattgatctgaagacactaattccttgggataaggaaacagtagagtcctcagttaacaagacaggaagattgcttgttagtcatgaagctcctataact

SEQ ID NO: 259643 - DNA, 486 bp, Glycine max
  unsure (1)..(486): unsure at all n locations
gaaattcccgggtcgaccgacgcgtccgcccacgcgtccgagagaaggtggtaccgccttcaattctctctctccatttctcatcctcagcatcttattatacggcttccatctccataacatccacttgtaaaaaaaacccattaatatatatcacacacacatgtatctctgagctccaatccaatccaagaccacaccttgtcgcgtcggacgaaccttggtgtctgtcttttttttttttttgtttcattagtttctccgaagagatgcggaagggcagatgaggaggagcctcagcggcagcggcggcggcggtgaacggatccgttttaaaggagcctcggtaccggggcgtgcggaagagaccgtgggggagattcgcggcggagatcagagacccgttgaagaaagccagggtttggttgggaaccttcgattctgccgaggatgctgcacgtgcctacgacaccgncgctcggaatc

SEQ ID NO: 259644 - DNA, 492 bp, Glycine max
ggaattcccgggtcgaccgacgcgtccgatcactaccaattgctaaagatatttcactcactggtcacactactaatacagctttctggagatggcttcaactgtctcttacatgcttctacttccccttctagtgatggttgcctttgctggggacttaaacaaagactttgacatcacatggggagatggccgctccaagatactaaaccatggagagttactcactctttcattggacaaagcatctggctcaggttttcaatcaaagaatgagtatctctttgggaagattgacatgcagctcaagcttgtccctggaaactctgctggcaccgtcactgcctattatttatcttcaaaaggatcaacttgggatgaaatagactatgaatttcttggaaatctgagtggtgatccatacatccttcacacaaacgttttcagccaaggcaagggggacagggaacaacaattctatctatggtttga

SEQ ID NO: 259645 - DNA, 473 bp, Glycine max
gtcgaccgacgcgtccgggaaggaagagtgggtgttggtggttgtcctcctccctcctcatgtgtatggcaaccctgtgctcctctcttccgcttttccatcgctaccctaaccctaaccctaatccttcgctctttcgcccctccctttccctctccttctccttctctcgcactaaaccccgtcgtgccccctttctcgttctcgcttcctcttcccacgatttcacctccaactccaagaaatcagtgctcactgagttgatacaagagatagaacctctggatgttagccacatccagaaagatgttcctccaactacaacagatgccatgaaaaggactatatctggtatgctgggcttgcttccatctgatcagtttcacgttgtcattgaggccttgtgggaacccctttccaagttacttatttcttcaatgatgactgggtatacgctgcacaatgttgaatat

SEQ ID NO: 259646 - DNA, 483 bp, Glycine max
attcccgggtcgaccgacgcgtccgaaacaagagacacagagctgctgaaattttcagtaacccaaaggtccaagctgaagttccagggtatggaatagagcaagagtacaccttacttcaaacaaatgtgaaatggccattaggatggccggttggtggctatcccggtcctcagggtccttattattgcagtgctggggcagataagtcatttggacgtgacatatctgatgctcattacaaggcttgcttatatgctggaattaacatcagtggcaccaatggggaggttatacctgagcagtgggagtaccaagttggtcctaatgtaggtattgaagctggtgatcatatctgggcttcaaagtacatcctcgagagaattactgagcaagctggtgttgtgctctctcttgatccataaccaatataaggttactggaatggaacatgatgccacaccaattacagtacaaagagca

SEQ ID NO: 259647 - DNA, 292 bp, Glycine max
accggtctcggaattcccgggtggacgcacacgtacgcccacgcgtccggccattggaagtaggacatctagagaacctagagctgtagttcagacggccagtgacattggtctcctacatgacgggtatagctggagaaaataccggcagaaagtactgaatggcaatccaaatccaaggagttactacaagtgtacacacccacgatgtccatcgaggaagcatatggaacgagcttcacattacctaaaggctgtcatcacaacctatgacgggaagcacaaccattat

SEQ ID NO: 259648 - DNA, 413 bp, Glycine max
  unsure (1)..(413): unsure at all n locations
gggtcgaccgacgcgtacgcccacgcgtgcggccacgggaagncgaagagttagagaaccgagagctgtagttcagacagggagcgacattgatgtgctacatgacgggtatagctggagaaaataccggcagaaagtactgacgggcaatccaaatccaaggagctactacaagtgtacacacccacgatgtccatcgaggaagcatgctgaacgagcttcacatgacctaacggctgtcatcacaacctatgacgggaagcacaaccatgatggtcctgccgctcgttgcatctgcagccattctgttaacagaccaatgccttacaatgcttgaaaccctaccaacactgtacccactggcataagtcccttgcaagtgatccaacacagggacaattcccatcagaacc

SEQ ID NO: 259649 - DNA, 477 bp, Glycine max
ggtcgaccgacgcgtccgcccacgcgtccggaaaaagaaaaaagcgatcatagtttcacttcggccttatccagtttagggtttcggttctctgccctatctttcacgtatcgaaaccttaaatttacgatcaggtctgagcaatctggttggtagaacctttggtcttagtgagtcaagttttatgtctgaattagacgatcaaattcctactgccttcgatccttttgctgatgcaaatgctgatgactcgggtgctgggtcaaaggagtatgtgcatattcgtgtacagcagcgaaatggtaggaaaagcctgacaaccgttcagggattgaaaaaggaattcagctataacaagatacttaaagacgtcaagaaagagttctgttgcaatggaacagttgttcaggacccagaactaggacaggttattcaacttcaaagtgatcagaggaagaatgtttctaccttcctagt

SEQ ID NO: 259650 - DNA, 332 bp, Glycine max
cggaattcccgggtcgacccacgcgttcgcacgcccctgcaccttccacaacggttggctctccctttccaagaacaccaacccatcccagttactgaacctaacagtccgagccaagcctgacccgggcttggaattccggttcgacggcaaaccggagtgcagcccgcaggttttccaaataaaaggcgacgtcaagcaaccggttttaacttgcaagttaagcttcagggacaaggacaaggctaacttcccttcgctaaacgccaaccacgccgccgagcgtaaaggatggtccatcaccgttcacgacttgtccggctctccggtcg

SEQ ID NO: 259651 - DNA, 410 bp, Glycine max
  unsure (1)..(410): unsure at all n locations
cggtccggaattccagggacgacccacgcggtctactagtaatagcagaatcgcgagtgtcagcagagcagaacaccgattaatcggtgggactgctcagacccaaaaggaggcttttgcggncgaccttgagcaacaaaagatccatgatgatgagcctgtagttgaggatgatgatgaggatgacgaagatgacgacgatgaggatgacgacaatgttgaaggtgatgcatctggtaggtccaagcagaccagaagcgaaaagaagagtcgcaaggcaatgctcaaacttggaatgaaacctgtcacaggtgtcagtcgtgtgactgttaagaagagcaaaaatatcctgtttggtatatcaaaaccagatgttttcaagagcccgacttctgacacatacatttata

SEQ ID NO: 259652 - DNA, 445 bp, Glycine max
  unsure (1)..(445): unsure at all n locations
gtccgagaagagcaaggataatgactgatggattcaacagttgcagaaatgtggtttgtaattttactgaaggtgccatgtattcattccctcaaatacgcttgccgccaagagctttagaggctgctaaacaggctggaaaggttccagatgtttactactgcctcaagcttttggaagccactggcatatccactgttcctggttcaagatttggtcagaaagaaagggtgttccatttgaggacaactattttaccagctgaggaagacatgcctgatattatggataggttcaaaaagttcaatgatgaattcatggagcaatacgaagacgatagaggttattcaaggttgtaagaaaatcattgtaaagctgcattatttacccttttnnncccttttttgcgcttttgaagtcttcatcatcatcctcgagagaaaaa

SEQ ID NO: 259653 - DNA, 401 bp, Glycine max
aattcccgggtcgacccacgcgtccggctttggatgatgagagggtcaaggttgctaatcaggtgggaagtattccgcttgattggggtttgggagcttttattctgcaaacagcagctgacgcagatataaagaaccataattggatcgccaccattttcagtgatgaatcacatactctcctctcaattattggaatttttatagtgttgttaacggcatggtctatatctaggtggaggaaacctcagttgaagacaatttacgatctagaaaagggacgatatattatcacacgagttggtagataatgcttgatggtagagcagatcgtgtttcttggtttacatgtgtggaggcactgttgtgattatgatgaaaatatttagcctttcgtgatg

SEQ ID NO: 259654 - DNA, 333 bp, Glycine max
caccaatctaattcatcacaatgcttaaactcctgattcacactcatacctgatactcttattattggctaccatttactcctttgatcattaatctattatttgtaaccaatttacaaatgataataacaaatattattcaaataattcaacaactactaaagattataaaattaattccactatttcaacctaacgatgaccttttctagtttaacaaacctcgacttactctctacctcattaatttcatgctcttttataaatcttttcaactttcctacttttcaattttataaaaccccccctttttacacttcaatttcatataaa

SEQ ID NO: 259655 - DNA, 489 bp, Glycine max
aattcccgggtcgacccacgcgtccgcggttactacaaaggcgacgacgacaaagccaaagccaaggccaaggccaaggtcaaggtgacttgcgtcgccgagcaggaccaccgcaaaaaagttctccgcgaactcaactccctgatctccggctcctcctcctcctccgccgcctccgacgacgtcgacgaggaggtcaccgacaccgagtggttcttcctggtctccatgacgcagtccttcgtcaacggcggaggacttcccggacaggccttcttcaactccgctccggtgtgggtcaccgggggcgaccgtctctctgcctcggcctgcgagagggcgaggcagggacacgtgttcgggctgcaaaccctggtttgcataccgttcgcgaacggcgtcgttgagctggggtccaccgagttaattttccagaacccggatctgatgaacaaggtgaaggttctgttcaatttcagcaacaacaac

SEQ ID NO: 259656 - DNA, 480 bp, Glycine max
  unsure (1)..(480): unsure at all n locations
tcccnnnccgacccacgcgtccgcagattagtaccacaaaaatggagaaatagaataactgaatatcgtatagctcaaaataaagatttaaccaaatgcaattcatatgaaaaaagccaattaattctttacaaagaacaacaagtaaacgcattaaaaaaaaaaattagaaaacaatatagatacgatcttttatcctataattttatcaattatgcagataagaaagactcatatatttatggatatagatccctatttcaagtaaaaaaaaaaccaagtgatttcttctaattacaacacgtataaaaaagaattattggatatcatagataatctctttatcaagaattatatatcggaagatgcgattctagatatggaaaaaaatatgtatagaaagtattttgattggatgggaatcaatagagaaatactaaatcgttccatatcgaatccagaattttggntcttttcaaa

SEQ ID NO: 259657 - DNA, 399 bp, Glycine max
cacgctttctcccacactttacttccaagtatcatttaatgcttcaccctatatttctagaatccgatttaacgaaaacatcactagctcactctctgacccaattatcatactacacttttaatcccatgttaatcatcaatgaccacctttcaatgctaaatactttctgtattacctatatttaattatacctttaggaaacctttattatacaacattttaagcatataaattcttttatgtatatataatataatttttatactttgcttttcttactgctttttacatctgctttccccccttattgatcattgtccttccttcattgccaatattatattataatcatttacttgtatatcaatcttattaaactttttataaaattttttt

SEQ ID NO: 259658 - DNA, 371 bp, Glycine max
catgggaatccattgatcaacagcgcccgtttctacaactgccttgcactgcacatcaactattattcattcgataggctgtctttacctccagtaacttcaaaataatctctgtgccccatccatggctgcaccgtttttctcaacgccctttcagccttatgtttatcaaattccgcaagatgcaattataccttttcaaattttaaggtgtgaaactcaagtggttcaaataatgtttaagccacaagaaaaaatcattgcaaaacctagttccatgtgcttaatgtctggatccattgaaatggaaaatgcctaccttccataaaatgaaatatagcattatttttcagactcccctatcaaaaatt

SEQ ID NO: 259659 - DNA, 430 bp, Glycine max
gcgtgcgatcagtaccaattgctaaagacatttcactttttggtcacactactaatacagctggctgcgcattgcttcaactgtctgtcacatgcttctacttccccttctagtgatggttgcctatactggcgacttaaacaaagactctgacatcacatggagagatggccgctccaagatactaaaccatggagagttactcactctttcattggacaaagcatctgtctcatgttttcaatcaaagaatgagtatctcattgggaagattgacatgcagctcaagcttgtccctggaaactatgctgacaccgtcactgcctattatctatcttcaaaaggatcaacttgagatgaaatagactatgaatttcttggaaaaatttcccctttttttttaatgtgatcctacatccttacacaactt

SEQ ID NO: 259660 - DNA, 421 bp, Glycine max
gaccgactcgtacgatcagtaccaatcgctaaagacatttcactttttaatcacactactaatacatctggctgagcattgcttcaaacggctatcacatgcttctaattcctcttctagtgatgattaccatatctgccaacttaaacaaagactctaacatcacatgcacagatggccgttccaagatactaaaccatagagcgttactcactctatcattgcacaaaacatctgtctcatgttttcaatcaaagaatgaatatctcattcgaaagattgacatgcagctcaagctcgtccctggaaactatgctcacaccgtcactgcctattaattatattcaaaaggatcaacctgtgatataatatactattaatttcttgaaaaaaaaatttctccccctttttagtcgtcatc

SEQ ID NO: 259661 - DNA, 427 bp, Glycine max
acgcgtccgaaaatatttgggggcccgattgtcttgactttaggcccgaaaggtggctgcgtgatggggggttcgtgccagagtgtccctttaagtaccctgtttttcaggctggtgtaagggtgtgtttggggaaggacttggctttgatggagatgaagtccgttgtggttgcgttggttcgcaggtttgatattcgggtcgcccaaccggatcaggagccccggttcgcgcccggtctaaccgctactttgagaggggggtttccggttcgggtttgtgaaaggaaatgaatagataaaggagttcacaacatgaatgtgaatggaatcatgaaatgaatgagtgaatgaaggaacagttttcgtgtaaataatataatgttgcagttaaaatcgaacgtttttctttttttttctactctttt

SEQ ID NO: 259662 - DNA, 460 bp, Glycine max
cgggtcgacccacgcgtccgcccacgcgtccgcccacgccgtccgggcgaaacaacaaagaatggctgaccctaaattgccaggggccagtaacccaaagccatactaggttacgccttgaccccaatagcattgggcaccgtgaaatccctgtggaataaccagggccaacttgcaagggctaaatactctgggtgaaccatagtggaagtaatccctgagggaagggttaataaaagacatttttagccgtgggagtggttgatgtatatatagtaaaatttgatactttggtgtgctgactgcttttacatctgctttccccccttattgttcagtgtcctgcctccattgtcaatggtagtggataatcattgactgggatatcaagcttattaagttttttaaaaattttttttatgaaagctcacaggaaatattgagtgactcacttgtgact

SEQ ID NO: 259663 - DNA, 390 bp, Glycine max
  unsure (1)..(390): unsure at all n locations
gaattcccgggtcgacccacgcgtccgcccacgcgtccgtcatcttcggtcattttattttggataataaaagaaagataataaagaggataagtgatattaaatattaaatagaaaaaatgggccgatcatttatcaaaggccaatcttcggtagaagagaaagttcctttggaacacttatttctatttcagtataccgggtctctttctttcatttcaaaaaatttatagaatttcgattttgaaatgaaagaaaagtgtggggattaatattaatgacatanagatattggaacataatcttggaagagatgatggaagcaggagttcattttggccacngtactagaaaatggaatcctaaaatgtcaccttatatatctgcaaa

SEQ ID NO: 259664 - DNA, 468 bp, Glycine max
ctgaattcccgggtcgacccacgcgtccggttggaggggcttgcgcataaggtgcttcagtggtacttatgcagaatggagggctggtttgctgcagattctgatactatttcactgaaaggatgggaccaggaggtgctgctccctggtggtcatggtcttatggtccgtggttacttgcctgttataaataccctagccaagggacttgatattctcttggggcacagggtcacaaaagtagttaggcgatataatggagtaaaggtaacagtggaaagtgggaaaacgttttttgctgatgctgctgttattgctgtcccacttggggtgctcaaggcaaagaaaatattgtttaagccaaagctttcagactggaaggaaagctgcaattgcgatcttgggattggacttgagaaataaatcattttacactttgaaaatgtgttttggcctaatgtggaattc

SEQ ID NO: 259665 - DNA, 418 bp, Glycine max
ccacgcgtccgggataaggctaattcatcattgtttggtgctcagaaaaaaaaaaaaaacatttgtcaatggttttctctttctttaactcctctctcttgggaatcccagatctccaaaccagtgttcaagccccaccttcatatggttctagatggcaaaaccaagttcagctgatggtaggactagaagttctgtgcagatctttatagtagttggtctgtgctgtttcttctatattttaggtgcgtggcagagaagtggtttcggaaagggagatagcatagcattggagattactaagactaacacagaatgtaatatagttccaaatttaagttttgattcccaccatggtggagaagttaacgaatttgatgaagctgattcaaaagcctaagtatttgagccatgtgct

SEQ ID NO: 259666 - DNA, 377 bp, Glycine max
  unsure (1)..(377): unsure at all n locations
aattcccgggtcgacccacgcgtccgtaaaagagaagcttcctggttatcaactccaagtacaagaaggaagggaaaaagggaaaagggaaaaagggagaagtgggtgcctcaattggatatttaaagattgagaacagggttttttgttggttggagatgcatgattgtggtgtgctttggtttcatttcatcatatgacagccttgtgggtttctttggtgtttcttgatgcatacttaatttactntattattgtgtatttatctcttccatttacaaaaaaaaaagtttgtgtaggtttccctctttgaagtaaaagaaattaaatatgtactgaaaaatggaataatagtgtgttttatttgtgttttataa

SEQ ID NO: 259667 - DNA, 449 bp, Glycine max
  unsure (1)..(449): unsure at all n locations
gacccacgcgtccgttactccttctctcgttgattcggatctagtgtcttttttcactcttcagttctcgttgagattctgcgctttcctgaaactagggttttcaatttcgattcattcgttaataattaaagatgtttgggagggcaccgaagaagagcgataatacgaggtactacgaaatcctcggcgtctcgaagaacgcttcgcaggatgatctgaagaaggcttacaagaaagccgccatcaagaatcaccctgacaagggcggtgatcccgagaagtttaaagagcttgcacaagcatatgangttctgagtgaccctgagaagcgtgagatatatgatcagtatggtgaagatgcgcttaangagggaatgggtggtggccggtggggnccccccccaaaatttttgatccgtttgaatctttcatctttctttgagtgg

SEQ ID NO: 259668 - DNA, 462 bp, Glycine max
attccgggtcgacccacgcgtccggcccggcatgattgtcaccggcatggaggtggcagaaattgatggctccccaaggatgggggcgacgtttggggcgatgatgatatcagggcagaaggcggctcatttggcgttgaaggcgttggggaggaacaatgcaattgatggaacgtgtggagttggaagggaagaaccccagcttattttcgcttctgcagacactgaggaaattgttgatgcttaaacttactttcaaattagctagatatatagcttttcttttcttttctttctgtttggtccctacttaattatgattttaattttggaataaatgaacaacatgtgaattatgaaggagacaatacttgttgttacattgtatttggacagcatcgttttggtccccccccccccacgtatagcggaggaaaccatatatataaggatggagagata

SEQ ID NO: 259669 - DNA, 413 bp, Glycine max
ccacgcgtccgcccacgcgtccggctggattttcatctgaatcagatgcaaagtctgagtggataacaagggttcgagcaacatggaagggggcagttttgaaccatctttgggaatcaaatttcacacctcagaaacttgtcaggggtttaggtccttggggtcccaacatagtccgcaagtatacaagtgctaggtttggtacacattcaactggggaaatactgactgaagaggaatcaacattgctgacagactatgtttaccacacattggcggccaaagctagtggagagctgtgcttaaaatatattttttcatttggagcatttgctaggatgccccttcttctcagtgcctcagagtggaaggtgcccaccactttcatgtatggtttccaagactggatgaat

SEQ ID NO: 259670 - DNA, 447 bp, Glycine max
cccacgcgtccgcggacgcgtgggcgccgaagaaggtattgacgtcgatgatgaaaatgaaattggtgaaaacattactgcttctcctttgtgtgaaactcttctgttatgcagtgattggtgctcctcaaacttgtcctgctaacaatgaggataaatgcggcgattcagatgaatggaaaggggagtttttccctgacattcccaaaattaaatatgagggtccgtcaagtaagaatgtgctttcatttaaatggtataatgcagaggaggaaattcttgggaagaagatgaaggattggttaagatttagtgttgcattttggcatacattccgtggaacaggtgctgacccatttggtgcacctaccaaatactggctatgggaagatggtaccaattcattaaacatggcttaaagacgaatgagagctactttgagttcat

SEQ ID NO: 259671 - DNA, 395 bp, Glycine max
attaccgggccgaccgacgcgtccgcggacgcgtgggaaaggattctacctgccgttttatgggaattgcgcttcaaggggtctcagatggcttatcacggtgacgagggtcaccaacggcacgtgcctttggggggcctaggccccctactgctggtcggcaaacggactgctggcgcacgcgtcgcttctagcccggattctgacttataggctttcagtcataatttaacgcactgtaacttttcgccactgactctttaaccaatcgcgctgaccaactgttcgaatcaacttttcctctcttactagggtgaattactattgctacactgttatcacttgtttaaaactatcctggcttacgacggtttaatctcagcttactttcccta

SEQ ID NO: 259672 - DNA, 445 bp, Glycine max
gcgtacgctttcgtccacgcgtccgtccacacttgcgtttacacgtccgcccaaatcccgaaacacttgctcagattccctttcccagtttcacaccctacctcatggaaggctctgtcaacgaacgtcttcattttgggaagattggatatggatgcaatcattacacgagaagatgcatgattcctgctcgcctgctgcaacgagatctactcatgccgtcactgtcataacgaggccgcgagcttgttgaagaatccctttgatcgccacgagctcgttcgccaagatgttaaacacgttatttgttcagcatgtgacactgagcaacctgttgctcaagtttgcacaaactgtggcgtcaaaatggcagaatatttctgcaacatctgcaaatacttcgatgatgatgttgataaagaacatgttcactgtgatgattgtg

SEQ ID NO: 259673 - DNA, 389 bp, Glycine max
ccacgcgtccgcaaacacgtaactactatttcgaactccgccatggctgccaccaccgccaccgccacgtgatactgttttggcacccgcctcaacaacccgacaaccttaaacaacggaagattccacgcgctcctcaacttcggcaaaaagaaggcggcggcgccgccaccgaagaaaaaggaagtgaaagtgaaaccctccggcgaccggctggtgtggtttcctaatgcggagccgccggagtggctcgacggaagcatgatcggcgaccgcgggttcgacccgttcggtttcgcgaagcccgcggagtacctgcagttcgacctggactcgctggaccagaacctcgcgaagaacgtcgccggcgatgtgatcggaaccagggt

SEQ ID NO: 259674 - DNA, 386 bp, Glycine max
  unsure (1)..(386): unsure at all n locations
cgggtcgacccacgcgtccggctaccccttttaatgattccttgtggagaacttgggttcctgatgatgggtttttcagacgcaatgttgggtcggaaaagctttactttggtgggagaatcaattaccatgttggaggggctagtcgtgaggttgggcctgataatgtgtataatagtgctaggttgattatgagtaagaatgattctgttcctaacgttaatatgacttgngtgtttccggttgttggagggtataagtacttggttcggttgcatttctgtgatattgctagcatttcggntggtttgctctacttcaatgtttatgtcaatggaaatttggcttatgaagatttggatctcttatacgttacgaattcgctg

SEQ ID NO: 259675 - DNA, 458 bp, Glycine max
  unsure (1)..(458): unsure at all n locations
cgggtcgacccacgcgtccggtcaaccatcaaaagtaaattgcagatacaacatttcacttgatatacaacatctgcaagaggtggataacaaccgtcatttagctggtggtatattgacttgtaagaaggaaaagggtcctgttgaaaaaggccaacctgctgtacctctgagtagcnntgncnnnannatcatnactgacanaccttatggaattaatggtggcatggctttgagggatggaactgatgcatctggcaggaaaggaaagggaaagggtgtttaccagtttgtagacaaatacggtgctaatgtcgatggttacagttctatctacgacaccaaggactggtctccaaccggtgatgtctacgctggcggtacgactggcttggcttattccttaagggcggggtggaactgtgactctactnggctttagctggtggtgcactttt

SEQ ID NO: 259676 - DNA, 392 bp, Glycine max
  unsure (1)..(392): unsure at all n locations
cgcgtgcgctacatctgatatctggtcctgtggagtcattctctttgtgcttatggctgagtgcgttgcgctttgatgagccaaatcatgcgacactgtaccaaaaaattggcagggcccaattcacatgtccatcatggttttctcccgaggcaaagaaactattgaagcgtattcttgatccaaaccctctaacaaggataaaaattcctgaactcttagaagatgaatggttcaaaaaaggatacaagccaacaacttttgtagaggaagaggatgtcaatgtagatgatgttgctgctgctttcaatgattctaaggaaaatcttgtgacagagagaaaagagaaaccagtgtcaatgaatgnctttgagctcatatctaggtcaacc

SEQ ID NO: 259677 - DNA, 429 bp, Glycine max
aattcccgggtcgacccacgcgtccgcggacgcgtgggctaaaaccaacttcagggaggttgctatcaaaggattttgggacatgtgtgatcccgagggatactctctctggttttgtgattacaaatacaacgacgagaatactgtttcttttgtgacattgaacaaggttggtggatttcttcagcggatggatttggctcgcaagtatgcatttggaaagatgcttgtgattggatcagttccaccatttaaggtgaaggggctgtggcttttccgtgggcaagaaatcccaaaatttgtgattgatgaatgctatgacatggagctctacgaatggactaaggttgacatctctgatgaagctcaaaaggagcgtgtcaatcagatgattgaagattatgaaccttttgaaggcgaggctctttt

SEQ ID NO: 259678 - DNA, 392 bp, Glycine max
acgcgtccgcacaaaccaggatttatctggtagctggagaagcatatggtagaggaagtatgaaatatggtgaggatgctttccccaacattttctctcattcctctctgtcttctgaagaagagttgaatcctttcaagaatcaccagaacatgttagctggcatagactatattgttgcacttcagagtgatgtatttctctatacttatgatggaaatatggcaaaggcagtacaaggccataggcacttcgaaaacttcaagaagactatcaatccagacaaggtaaattttgttaaactcgttgataagttggatgaaggaaaaatttcttggaagaagttcagctccaaggtaaaaaagctgcatgaagatcgaatcggtgctccg

SEQ ID NO: 259679 - DNA, 405 bp, Glycine max
attcccgggtcgacccacgcgtccgcttggtccaaactttatctctctctctctctctctcaactcaactagttcttaacttgttgcggaaagttctctctttttatgttctttctgcctccaaattaccactctcttcctatgctatgatacagatacaggaagaggatcaaaataccccaccataagacaaacccaaaggaatagcaacgtcaattatggtgggaggtttcaatggagaaggtgttgtgagagaaaaagaggaagaagaagaaaacaacaagtggccttcatggctgcagccacttctcaagacacgtttctttgttcaatgcaaagtccacgcggatttccacaagaatgaatgcaatatgtattgcttggactgtgtgaatggaccccttt

SEQ ID NO: 259680 - DNA, 481 bp, Glycine max
  unsure (1)..(481): unsure at all n locations
gaatttccgggtcgacccacgcgtccgctttcctaaaccctgctctccattttcccttgtctcttcctttctctctctacaaagagtgtgtgtgagagagagaaggatttggaattttggataactagagcgaaagcgtgacaccaccaaaaaccgaactgttcccagatctctctctctctctctctcttccaacaatccaaatccaaatccaaaaccctaccaacaccacactcaatcgatcgatggggcagaagtctctgatctacgcgttcgtgtcgcggngaactgtgattctcgcggagtacacggaattcagcggaaacttcaactccatcgccttccagtgccttcagaagctccctgccaccaacaacaagttcacctacaactgcgacgcacacaccttcaattacctcgtcgacaatggctacacatattgtngttgtgcagatgaatcaattggaagacagttacccat

SEQ ID NO: 259681 - DNA, 415 bp, Glycine max
  unsure (1)..(415): unsure at all n locations
ataaccgggtcgaccgacgcgtccgcttggtccaaactttatttctctctctctttctctcaactcaactaagtcttaacttgttgcaaaaagttctctcnttttatgttctttctgcctccaaattaccactctctttctatgctatgatacatatacacgaagaggatcaaaataccccaccataagacaaaccccaaggaatagccacggtcattatggtgggaggttttaaatggaaaaggtgttgtgagagaaaaagaggaagaagaagaaaacaacaagtggccttcatggctgcagccacttctcaagacacgtttctttgttcaatgcaaagtccacgcggattcccacaagagtgaatgcaatatgtattgcttggactgtgtgaatggagccctttgctctgcat

SEQ ID NO: 259682 - DNA, 482 bp, Glycine max
aattcccgggccgacccacgcgtccggagaagaggttctaatttgggaaggtgctaagaatatggagaaaacatcttgggcgtgcggcgttatcacccaggtgtgtctctgctttgctctatacatagctctcaacttgggtcaacctcagacttctgatctttacttcatcagtgtcaaaggaggtttcagaccctttacccaacaattgcatcttctcaagcagatggataaggtggcaaaagcttacaacgcaagttttgttgtgagcagcagtgagctgggggaatatgattcactcatgcagaatgctactcaacattttccgtctctgagactaccctggtacaccacatacactactactacatcttcaaaaacaaaaggacaagaagtggggtgcttttcaaagaagatcacgacatctaacaggataacctcaggtgtcatcggtgtggatactgaattattgaaagattatg

SEQ ID NO: 259683 - DNA, 485 bp, Glycine max
gaattcccgggtcgacccacgcgtccgtgcattcttcccgtatttgacgaagataaacagcctacctattgcaaaagcttatgccacaaggacaatcctgttcttgaaagacgatggatctttaaagccacttgctatcgaattaagcaagcctgcaacagtgagtaaagtggtgttgcctgcaacagaaggtgttgagagtacaatttggttgttggccaaggctcatgtcattgtgaatgactctggttatcatcagctcataagccattggttaaatactcatgcagtgatggagccatttgccatagcaacaaacaggcatctcagtgtgcttcaccccatttataaacttctttatcctcactacaaggacacaataaatatcaatggccttgctaggcagtccctgattaacgcaggtggcattattgagcaaacatttttgcctggaaagtactccattgaaatgtcatcagttggtt

SEQ ID NO: 259684 - DNA, 477 bp, Glycine max
gaattcccgggtcgacccacgcgtccgccttgatgagaagaccattttccacttgaacccttcaggccgttttgtcattggtggcccgcatggcgatgctggtctcaccggccgcaagatcattatcgatacttatggaggatggggtgctcatggtggtggtgctttctccgggaaggaccctaccaaggttgataggagtggtgcttacattgtgagacaggctgctaagagcattgtggcaagtggacttgccagaaggtgcattgtgcaagtgtcttatgccattggtgtgcctgagcctttgtctgtgtttgttgacacctatggcactgggaagatccatgataaggagattctcaacattgtgaaggaaaactttgatttcaggcctggtatgatctccatcaaccttgatctcaagaggggtggaaataacaggtttttgaagactgctgcctatggacactttggaag

SEQ ID NO: 259685 - DNA, 447 bp, Glycine max
caaagttccaagttttttggtttggcgatatatagagttatacgcgtcacattttcataagaataaggtaatatctacagcggcggcagccacagtgctactcccacctaggattccgaccaccaccaacgttacccgctgctctgctttgccttctctccctcctcgcgtctccaacaccaaaaccactttgttctcaccttccctcaacaacttttcagtgtcccgaaaatcttctctgcttcagaccagagcttcttcagaggaatcatcctcagtagatgccaatgaggtgttcacagatttgaaggaaaagtggaatgctcttgaaaacaattccacagtacttctttaaggtggatggtctatagttgctatttgtctatccacaattcttgagaacgcccataactcaattccttgcttccaaagaattatgaatttggt

SEQ ID NO: 259686 - DNA, 487 bp, Glycine max
  unsure (1)..(487): unsure at all n locations
gaattcccgggtcgacccacgcgtccgcaactattctacttaccttttctcttaatccaaatatcatcatctgaaacgatggctgccgtggcaaccacaaccctctcttcaaacccgaaactctcatttttccacggaaagcccgttacatattcttcccgcgtcgcacccaccaccaagttattctcatccaaacaaggcacaatctccatgtccctaacccaacccccatacgacctccaatccttcaaattccaacccatcaaagaatccatcgtctcacgcgaaatgacgcgccgctacatgaccgacatgataacctacgccgacaccgacgtcgtaatcgtcggagccggctcggcggngctctcctgtgcgtacgagatcagcaagaaccccgccgtgagcgtcgccataatcgagcagtccgtgagnccccgcggcggcgcgtggctcggcggacaactcttctnncgcatggtggttc

SEQ ID NO: 259687 - DNA, 488 bp, Glycine max
accggtccggaattcgcgcgacgcgtccgcaatgctccaaattttttggtttggggatagatagagtgatacgcgtcacattttcataggaataaaaaaatggcagcggcggcggcagtgacggtgctactcccacctaggattccgaccaccaccaacgttacccgctgctctgctttgccttctctccctcctcgcgtctccaacaccaaaaccactttgttctcaccttccctcaacaacttttcagtgtcccgaaaatcttctctgcttcagaccagagcttcttcagaggaatcatcctcagtagatgccaatgaggtgttcacagatttgaaggaaaagtgggatgctcttgaaaacaagtccacagtacttctttatggtggaggggctatagttgctatttggctatcgtcaattcttgtgagcgccatcaactcagttcccttgcttccaaagattatggaagtggtagggcttggata

SEQ ID NO: 259688 - DNA, 420 bp, Glycine max
cgggtcgacccacgcgtccgcccaacccaacccaaaactcaagctaaattctcactctcacaacttcaatctctctctctgtctctctctctctctctctctaccaaaaaaatggctttggaaactctcaactcaccaacaacaaccgtcccatctttccccttcgacgacccaactattccatgggccaaaagaaaacgttcaaagcgttgttcacgcgaccacccttcggaggaagagtacctcgctctctgcctcatcatgctcgctcgcggcggcaccacccgccgcgtcagcactccaccgtcgcatccgacttcagatccttccaccaagctcagatacaaatgctccgtttgcaacaaaagctatcgctcttaccaagcgctcggtggacacaaggccagtcaccggaaactc

SEQ ID NO: 259689 - DNA, 451 bp, Glycine max
ccgctcctgaattcccgggtcgacccacgcgtccgcccacgcgtccggaacattgaactcagatgaaccaagagaccttaagctgccattgaaagagaggttcttccttcaaccattgtctccaactgatgctgcacaaagggcaaaggaatcagccaaggaaattgttggcgttaagaagttgattgaaaagaaggcttggccatatgttcagaatgatctgcgtctcagggccgagtatctgcgctttgatctcaacactgtcattgctgcaaagcctaaggatgagaagaaatcactcaaggaactcactggcaagctcttccaggatatcagcaatctggatcatgcagcaaaaattaagagcagcccggaagcagagaagtactatgctgctactgtatcttctctgaacgatgtccttgccaaacttggttaatgtgattaattt

SEQ ID NO: 259690 - DNA, 435 bp, Glycine max
  unsure (1)..(435): unsure at all n locations
cggaattctcgggtcgacccacgcgtccgcgcatgcgattgtcgcagcgatctttcgctcgttgttgtacgaggcatgcggtcggatagtgaacccgatttacgggtctgtcgggctattatggtccgggagctggcagctgtgtcaagccgccgtggaaaacgtcttgaaaggcgcgccgattacgccgatcacgtctgaagccgcggctagcgggcggtgcccaccgctcaaggcttacgacatacgccacgtgttcaaagacgagaactccgccgncgcgtccaacgaaactcagcaccaacgagtcaagacccgctctcgagtgaagcgacccctcgccaagcccaaatccaccgncaaccaaaacaacaacattaacactaagaatacgggaacccgattccgatcggatgaaccgggtttgggtgcatg

SEQ ID NO: 259691 - DNA, 311 bp, Glycine max
cccacacaacctactacattacaaacaccatcactctatattacatatccactcacactatcatgcacaacgtaaaatttttcaacacatcaaattccaatacatactacatcaacaccatccaaacttaaacccttaaaccttaatcaaccattcaacaacatacccaactacaaacacaacttcacaaaaaactataaaaacaacttaacctacacacatactaaatctcaacataccattacacattcttaaccaaaataaatctcatcattaatataaccaataatatactatatatccaaatcaac

SEQ ID NO: 259692 - DNA, 383 bp, Glycine max
cgggtcgacccacgcgtccgaaacaaagttacaagtaaagtaaattaagaagatcattaatggcttctcttgcaaccttagctgctgttcaaccagctgcgctcaatggccttgctggaagttccctctctggaactaagctctctttcaagccctctcgccacactgtcaaatccaagaacttcaggagtggtgccgtggtagcaaagtatggtgacaagagtgtgtactttgatttggaggatctgggcaacactacggggcagtgggacttgtatggctcagatgcaccttcaccctacaaccctcttcagagcaagttcttcgagacatttgctgctccattcacaaagaggggattgttactcaagtttctgatattg

SEQ ID NO: 259693 - DNA, 436 bp, Glycine max
cgggtcgacccacgcgtccgtccactttcactggaatcacaatcctgaaacaaaaacatcttagcatttaacatactactagacaacatgaccaccacattggaaagaggtttctcggaagagcaagaagctctggtggtgaagtcatggaatgtcatgaagaagaattctggagagttgggtctcaagtttttcttgaaaatatttgagattgctccatcagctcagaaattgttctcattcttgagagattcaacggttcctttggagcaaaatcccaagctcaagccccatgccgtgtctgtctttgtaatgacctgtgattcagcagttcagctgcggaaggccgggaaagtcactgtcagagaatcaaacttgaaaaaaataggtgctacccattttagaaccggcgtagcaaacgagcatttcgaggtga

SEQ ID NO: 259694 - DNA, 476 bp, Glycine max
cgggtcgacccacgcgtccggtggaactaacaacaacacaaggccatcatcatggcagctgcttctcctatggcaagccaactcaagtccaccttcactaaaactcttgtagctcccaagggcctctctgcctcttcaccactccacctcctgccttctaagaggcaatttagcttcactgttagggccatccaatcagaaaagccaacctatcaagtgattcaaccaatcaacggtgatcccttcattggaagccttgaaaccccagttacatccagccccttgattgcatggtacttatcgaacctccccgcatacaggaccgcagtgagcccactactaagagggatcgaggtgggcctggcccatggctaccttctggtgggcccattcgtgaaggccgggcctctgaggaacaccgagatcgccgggcaagcaggctctctcgccgcttgtgggcttgtggtgatcctcac

SEQ ID NO: 259695 - DNA, 316 bp, Glycine max
gaatacccggaccgacccacgcgtccgcccacgcgtcctataaatctcattttaattttaagtcttcactgacgaatacaggcatacgtttctttaacctggccgactacatctactattcacatagcgtcatgaatcacttccaattcataatcaactgcatttactatgttgcatacaatgttatccatgaacctcccgctttttattaactcttcaacataacatatcacgtattttcccagcatatctaattcacgacctattccaatctttcaaacttgaatacctacctattgaatccaacatattgacc

SEQ ID NO: 259696 - DNA, 194 bp, Glycine max
tccattcaacattatattttttatatactctcacctaaattcaatacagtcacctttatactacaactatatcactcacaaaaccctacacattcccaacttaatcatccttcatcacatccccctatcatcatctaccataatatccaacactcccttaccaatcatccttccctacactttcacaacctcaa

SEQ ID NO: 259697 - DNA, 488 bp, Glycine max
ggaatttccgggtcgacccacgcgtccgcccacgcgtccgcccacgcgtccgcccacgcgtccgcccacgcgtccgggtgagttgaccgaattaagcaactgttctgtgaagaagaccttctcctctatgatgttaatcatgcatgagctgcaaagtcatgccttgcaaacaagggagagcctgtgtggtgaaaacttgcaaggtgtcatgaccaagctagagagagagatggatgcttcatttgtttggctcttccagcaggttttctggaagaccccagctctcatggtctatgtgatggtcctcttagctaactttttagtgttctctatgaatgataacactgtcaaagtaatcactccttcttccatgatcacaaaggctctaaccttgaccagcaatgagagtaaagtacagcattcgcatgttgatgttgatcaaggtgagtatgtgaatagggagttgacagaagaggagcacatgttgt

SEQ ID NO: 259698 - DNA, 458 bp, Glycine max
gaattcccgggtcgacccacgcgtccgccataatctggtacgacgtgtgcatggtacgctactccaaccaaaactacctcaacaacagagtacgcgcagtggacatgtctgactccaaaagcgtggctggcgctgatcttgaccggttcaacgaggtgctggcgggattgttgaacgctctggcaacgaaagctgcgaattccgaggatgagaagttcgaaacaggggaagtgaacttgacgagttcagtaaccctttatgggttagtgcagtgcacaccagagttgtccttgttcgattgcaacatgtgtttcagaagcgccattgcatctgttccaaattgctgtgatgggaaacaaggggcaagggtgttgcttcccggatgcaatatcagatatcaagtgtatccattttacaatagcactaaaatattggccacaccggttgtgaagtctcgt

SEQ ID NO: 259699 - DNA, 483 bp, Glycine max
  unsure (1)..(483): unsure at all n locations
gaatttccgggtcgacccacgcgtccgcccacgcgtccggagaaaaccaaccagacctattactcttgaggaaacaaaaatctaagaggagccgccatccttctgtcaaatgggctcagacgtctgatgtactctacttaacagttgagctgcctgatgctcaggatgttaagctcaaactggagccagaaggaaaattttacttctctgcaactgctggtgcagagaaaattccttatgaggttgacattgatctgtttgacaagattgatgtaaataatagcaaagctagtgttggttcaagaaacatctgctacttggtgaaaaaggctgagaacaagtggtgggacagattgttgaagcagggagggaaatctcctgtctttctgaaagttgattgggataaatgggtggatgaagatgaggagcaagataataaacctgcagcatctgatatggactttggtgacatnngattttcta

SEQ ID NO: 259700 - DNA, 401 bp, Glycine max
  unsure (1)..(401): unsure at all n locations
gggtcgacccacgcgtccgattgaactgcaatcaccacttcaaacaccgtctcaattctgcaactttttctcatttgggttgaactctctgtctcaatgaggctcttcttccactcttcactctgctcttaaactggttaatcaaaagatggagcgcgcgaggctaaacatgagaggccattgctctggttcgactccctcagaagaatctgctctggatcttgaaagaaactgttgtagtcattctaatctgccctcacttagtccaccaacgcttcaaccctttgcttcagctggacagcattgtgagagcagtgccgcttacttctcatggccaagccgcttgaatgatgctgccgaagagagagcaaactantttttaaatctacaaaaagggggtg

SEQ ID NO: 259701 - DNA, 457 bp, Glycine max
  unsure (1)..(457): unsure at all n locations
gggtcgacccacgcgtccgaagaacaagtagttgagaactaagaaggagaagcaaatggcttcctcaatgatctcttccccagctgttaccactgtcaaccgtgccggtgccggcatggttgctccattcactggcctcaagtccatggctggcttccccaccaggaagaccaacaatgacattacctccattgctagcaacggtggaagagtgcaatgcatgcaggtgtggccaccagttggcaagaagaagtttgagactctttcctacctgccagaccttgatgatgcacaattggcaaaggaagtagaataccttcttaggaagggatggattccttgcttggaattcgagttggagcacggtttcgtgtaccgtgagcacatacaggtcaccagatactacgatggacgctactggaccatgtgnaagctgcctatgtttgttgcactgatg

SEQ ID NO: 259702 - DNA, 489 bp, Glycine max
cggaatttccgggtcgacccacgcgtccgctcttattgttttcttcatatcttccttgtcactgcccgtgtgtcgccgccatggccaccgtcacgacccaagcctccgccgcaattttccggccatgtacctcgaaatcgaggtttttgaccggctcttccggtaaacttaaccgggaagtgactatgcggccaatggggtgccctccttctgcctctttcaaggttgaagccaagaagggagagtggttacctggcttggcctccccaacttacctcaatggcactcttcctggtgacaatggatttgaccctctggggctagctgaggacccagagaacttgaggtggtacgttcaagccgagcttgtgaatggacgttgggccatgttgggtgttgcaggaatgttgcttcctgaggttttcaccaagtttggaatcatcaatgcccctcaatggtatgatgctgggaaatcagagtactttgcat

SEQ ID NO: 259703 - DNA, 488 bp, Glycine max
ggaattcccgggtcgacccacgcgtccgcccacgcgtccgtcaacaacctaatcgccttacaaggaattccgacggggcgattctccgggcgtcggccggcgagactaggaaatcggcgtcgccggagaaggaggaccggtactacacgacgcggggttcggcggaggagaacggcaaggtcaccggcgacggcaacaacggcgaggaacgtgccctagtttggcccaagctctacatcactctctcaagcaaggagaaagaggaagactttctcgccatgaagggttgtaagcttcctcagcgacccaaaaagagagccaaaatcatccaaagaagcttacttttggtgagtcctggggcgtggttgtctgatatgtgccaagaaagatatgaagttagggagaagaaaagtaacaagaagagaccaagagggttgaaggctatgggaagcatggtaaggcgatctgaatgatgatgatgatgatga

SEQ ID NO: 259704 - DNA, 480 bp, Glycine max
aattctcgggtcgacccacgcgtccgtactttcttcagtgagtcacccgaatttagttcgcctcttaggttgctgcatagagaagggagagcgtatccttgtttatgagtttatgcaaaatggaacactttctcagcacttgcaaagagagaggagtaaaggactaccgtggacaataagacttaccattgctaccgaaactgctaatgctatagcatatctccattctgcaattcatcccccaatttaccacagagacataaaatctactaatatactcttggattatggcttcaaatctaaaatagccgattttgggctttctaggcttgcattgacagaaacatctcatatctcaaccgtcccacacgggactccaggttatgtcgatccccaataccaccagaactttcagctttctgataaaagtgatgtctacagttttggaatggttttggtagagataataactgccatgaa

SEQ ID NO: 259705 - DNA, 240 bp, Glycine max
ctataaccaacttcagggtttatgttatcaaaagattttgatacatgtggtatggctaaatatactctctgtggttctctgattacaaatacaacgactagaatactgtttcttttgtgacattgaacaaagttgttggatttcttcaacgtattgattttactctcaagtatgcatttcgaaagaaaccttgtgatatgatcagttccactatttattgttaatgggctgaagctttta

SEQ ID NO: 259706 - DNA, 409 bp, Glycine max
cggtctgtaattcccgggtcgaccgcacgcgtccgcaatgttttcattgtagtccacatggttggagcatatcaggtgatggctcaaccactatttggggtaattgagatgggtgctaacatggcgtggccgcgttcagatttcattaacaagagctatcccatcaaaatgggctccttaacatgtaacatcaacttgtttaggataatttgtaggtcaatgtatgtggcagtggccacagttattgccatggctatgccatttttcaatgagtttcttgccttgcttggagcaatagggttttggcctctcattgtcttcttccctgtacaaatgcacattgcacagaaacgggtaaaaagactatcattgaagtggtgttgtcttcaaatattgagcttcgcgtgct

SEQ ID NO: 259707 - DNA, 398 bp, Glycine max
gaattcccgggtcgaccgcacgcgttcgccggaccatccaaatcccgagaaaacagattttgaaacaaaagccatttgcatgagataaatagatagaacgaaaccgaatcgatgatggggtgggtggcgaatcggtggacgggcgtcgccgccgccatatggatccagtggagctgcggcgcatcgtacaccttcagcatctactcctccgtgctcaagtccacgcagggctacgaccaatccacgctcgacaccgtctctgtcttcaaggacatcggcgccaacttcggcgttctctccggcctcctctactccgccgtcgacccctacacaacccaccgcgcctgccccttcaagtccatatggacctcgctcagcgggccctgggtcgtcgtcgc

SEQ ID NO: 259708 - DNA, 428 bp, Glycine max
aattcccgggtcgacgcacgcgtccggttgtcttcatatcttccttgtcactgcctttgtgtcgccgccatggccaccgtcaccacgcaggccttcgccgcaattttgcggccatgtacctcgaaatcgaggtttttgaccggctcttccggtaaacttaaccgggaagtgactatgcggccaatggggtgccctccttctgcctctttcaaggttgaagccaagaagggagagtggttacctggcttggcctccccaacttacctcaatggcactcttcctggtgacaatggatttgaccctctggggctagctgaggacccagagaacttgaggtggtacgttcaagccgagcttgtgaatggacgttgggccatgttgggtgttgcaggaatgttgcttcctgaggttttcaccaaagttggaat

SEQ ID NO: 259709 - DNA, 426 bp, Glycine max
cggtctggaattcccgggtcgaccgacgcgtccgctattctcctcaagcaaaacctatagctctttcacactcctgcagtacttgaataaaaggtgaataaatattaaagcctttgcttcatcaaggtactgtttgatctttgaatttcagtcctcaaagattggaacaacaggaacatgtgtactctcacaactgttcctgtgctcccttctaagcttaacaagccttcgctttctccgcaccacaattctctttttccctactgtggaagacgggtcgggaagaagaacaaagcaatggttcctgttgcaaggttgttcgggccagccatatttgaagcctcaaaactgaaggttttgttcttaagagtggacgaaaattaacacccaggaaatctcccaaagacttatacgctaacccatagt

SEQ ID NO: 259710 - DNA, 370 bp, Glycine max
ctctaccggaccgcacgcgtccgattgccttcacaccatgctcacacagcaacttgcaaactctgagaaagaaagcctgccagcacatggatcattggggctatctcatccttcccatctgtccaatctatctacaaatccatatttgccacacgtaaatccactttctagctctggtgtcaccaatgcctcttatgctcactatcctatgactgctgactggatgccatgccagcctagacctacttaccttgatggttcaacgcctgaagactttaaaatctaccctggtcaacttggtgaaataccagagaatcttgagaggttcaaagagtcagaactcattcactgcaaattggccatgctttct

SEQ ID NO: 259711 - DNA, 251 bp, Glycine max
taatccacaggggccggtcaaaactagctgaagccattatataagattctagacccacaatatcaagaggaatcaaaattccatattctatcaaactcctgaattccttgcagagtgaacttcaatcaaagatctctttaacccataccgcattcttattggatgcaaggaaaccccatatggccaaaaagctattcaaacattgaaagatgtttatgctcaatgagtccccgaagaaaaaatactgacca

SEQ ID NO: 259712 - DNA, 459 bp, Glycine max
ggtctggaattcccgggtcgaccgcacgcgtccgcttggaagtgggaaggagtcaaatccggttattcatggtgctggacatgttgatcctaaggaggcacttaaccctgggttggtttatgatttggactctaatgactatttggcgttcttgtgttctgttgggtatgatgctaatcagattgcggttttcactagagagcctgctgttgaaagtgtttgtgaagggaaagtggggaggactgggaagttggctagtcccggtgacttgaattacccttctttcgcggtgaagttgggtggggaaggtgatttggttaagtatagacgggttgttacgaatgtgggaagcgaagttgatgttgtttacactgttaaagtgaatgctccacctggtgttggtgttggtgtttcttccagcacgcttgggttcaatggcgaaaacaagacgcaggcctt

SEQ ID NO: 259713 - DNA, 172 bp, Glycine max
tcttttctataaaacaacttacagatatcccaactctttcccattacaacattcaaaaacagttcttccttcacctgatgcttcatcttcatcatatcattcaaatctttttcaaaacccttactcaaaaaaccattaccctttacgtataaaactcttacactatttacaa

SEQ ID NO: 259714 - DNA, 248 bp, Glycine max
  unsure (1)..(248): unsure at all n locations
gccccgccgcnnccgcnncccaccgcncnnncaacaccaacgccangcgccagnangacaaccgcgccgacgaccacagcaccgacatcgancgncactccgaacgctctnnccctagcacngcgcgccgcgacgatatcttctcaagtagttgtagtcgctctctccctaacctcgcactaaccgatatctttaattcttctattttttatgtagtttagttgattcaatcgtggttttaaattgcg

SEQ ID NO: 259715 - DNA, 479 bp, Glycine max
aattcccgggtcgacccacgcgtccgcccacgcgtccgcccacgcgtccgccagaatcaaaaaaaaataaaagatgcatgtctccgggtagcttgtattttctggcaattgctgattttaccttggaggtttctgtttgcatttgttcctccatgccaaattgctcatggatggatctccttcatttgctctctgcttttcatctctgggatagcttacgttgtgactaagatcacagatgttataagttgtgtcacagggataaatgcttacgtgatagcatttacagccctagccagtggaacctcatggcctgatctagtggcaagcaaaattgctgcagaacgtcaaaaaactgctgattctgcaattgcaaacatcacttgcagcaattcagtgaatatatatgttggtattggtgttccatggcttattgatactttgtacaacttcatagcatatagagaacctctccgaat

SEQ ID NO: 259716 - DNA, 258 bp, Glycine max
actcataacctctccacacttgatggtccacataccactgttactacagcttgccaggtctccaataacatattgcacaacttcaccccgaattccacagaccctgccatctacactctattcttaaccaaaatacactcactatgtcctaataaccgaaaccacccaaaactactgccattatgatcggtttaccaaaccaaatttgatatatcatactatacaaatttgaggaattctacacaaattctacacatc

SEQ ID NO: 259717 - DNA, 429 bp, Glycine max
ccggtctttaattcccgggtcgagcgacgcgtccgcaattggctttcaatgctttcttctcctactttctcaactcactcaagttcacaccttacagaatcaactctctagtccgtgtgaccatttcttcaaccctccttgtgtttcaaaatgagtcatcatcagatgatgacgatgattcagattccacaaaaatctccaagaaaaagtatgtgattggattcatatgcacagttggtgcatctgcagggtatggactatggctttccatcacacagcttgtgttcaagaaggtcataaaaagagaaactttcaaagtgatcttggatatgatattatacccttcccttgtagctacccttgttaccttagtaggactttttgctagtggagaatggagtggtttgaaggatgaaatgaaggggtatg

SEQ ID NO: 259718 - DNA, 426 bp, Glycine max
cggtccgtaattcccgggtcgacgcacgcgtccgcccacgcgtccggacaaaagcaaaaggaaagaatatcaacaaggtaaagtagattccttagtagacatggcgttgaaggacacattctacatatctcatggatcaccaactttgtccatagatgaatccattcaggccaggaagttccttcagtcatggaagaaggacgtgtttcctcaaagaccctcttcaattcttgtcatctctggtcattgggaaaccgcagttcccacggtcaacgtcgttgactccatcaacgacaccatctacgatttctatggcttccccaaacaaatgtaccagcttaaatatcctgcacctggagctccacaattggcaaggagggtgaaagaactactcaagaaatctggtttcagccatgttgatgaaga

SEQ ID NO: 259719 - DNA, 187 bp, Glycine max
cagacaaagcttattggaaaaccattgcagagctcattcctcgtgaggttcccaacattgaaaagaaaagacgcaaaaaggatcaggacaagaagccatcaattacggtcatccaaagcccaaaacctggcaaacccacggatctgtctaagatgcagcaaatactgataaagataataaatacacc

SEQ ID NO: 259720 - DNA, 303 bp, Glycine max
  unsure (1)..(303): unsure at all n locations
ttaaacggctagtatacacaaannctgctcggtaaattgtgcagggagtcctctcaaatttcttatntaacctgaaaccaacatcttatctaacaataactgcacctatttgtaaagaaatgcttatcccaaattattctaatgccaccatcatcatgtttccaaccttaactcctattgccccatttcattcatttttataaaaaatattcttcttcaaacactaatattacaatttcacttatttatcataactcttttttgatgtacctacaaccaccttattactatataatgaaaaat

SEQ ID NO: 259721 - DNA, 329 bp, Glycine max
gaattaccggtgcgccgacgcgtacgtccagcatccgatacttctccttttgccgtgaacgggatttgtcacaaaacagggtcgggaaattgtgctgggaagcttctcaaatttcttgtgtgacctgacaccagcagctgatgtaacaattactggacctgttcggaaagaaatgcttattccaaaagattctaatgcccccattattatttttcgaaccctaacctggatttccccatttcgctcatttttataaaaaattttctttctgaaacaccaagattacaacttcaatggtttggcatagctctttttggatgttcctacaa

SEQ ID NO: 259722 - DNA, 486 bp, Glycine max
cggaatacccgggtcgaccgacgcgtccgctcatacaaggtcgttttcttggtgagttgactaagcaagtgttttcagatcttgctgccagtgaatatcagatggctgaatatagaatatcaatatatggtaggaagcaaagtgagtgggaccaactagccagttggatagtgaataatgatttgtacagtgagaatgttgtatggttgattcagcttccacggttgtacaatgtgtacaaagaaatgggaattgtgacatcattccagaacatgcttgacaatatttttattccactttttgaggtcactgtcaacccagattcacatcctcagctgcatgttttcctgaaacaggttgttgggttggatttggtggatgatgaaagcaaacctgaaagacggccaacaaaacacatgcctacaccggagcaatggactaatgtattcaatccagcattttcatactatgtctattactggtatg

SEQ ID NO: 259723 - DNA, 455 bp, Glycine max
attcccgtctcgatcccacgcgtcgagggagccttgacatagaccatatcaacataacttctacaaatgcctgggataaactctaataatgcaattctggaaattgaatcagtaaacaatttaattggattggtcgaatggtatcaaaaaaatggagtactaactcccatttcttatttattattgaattaaccgatcaacttgctattgaatcgaacatttctttatgatttcaaaaattttccccaaaaaacttgaatctatttttatatgcgaatcaatcctactacttctggtcctgaagtttctgcgcttgaaaaaaaaaatctgggacgtatcgcccaaataattggtccggtactagatgtagcttttcccccaggtaagaatcctaatatttacaacgctctgatagttaagggtcgagatactgttggtcaacaaattaatgtgac

SEQ ID NO: 259724 - DNA, 408 bp, Glycine max
actcggtcttgaattcccgggtcgaccgacgcgtacgaaagattttatccaattgaaattttaaaaatgactgggataaacttaagaattcaattatggaaattgaataagtaaacaatttaattggattggtcgaatggtatcaaaaaaatggagtactaactcccatttcttatttattattgaattaaccgatcaacttgctttgttatcgaacatttctttttgatttcaaaaattttccggaaaaaatttgaatctatttttatatgccaatcaatcctactacttctggtcctgaagtttctgcgcttgaaaaaaaaaatcttggaactattggccaaataattggtccggtactaaaattaacttttcccccaggttaaaagcctaatatttacaacgctt

SEQ ID NO: 259725 - DNA, 450 bp, Glycine max
gcgtcgaccgacgcgtccgattctctctgtgtatttccctacctctcccttcaagatgcagatcttcgtggagaccctcggcggcaagaccatcacccttgaggtggaaagctctgacaccatcgacaacgtcaaggccaagatccaggacaaggaaggaatccccccggaccatcaacgtctcattttcgccggaaagcaacttgaggactgccgtacccttgctgactacaacattcagaaggagagtactcttcacctcttcctccgtctccgtggtggcatgcatatcttcgttaagacactcaccggcaagaccataaccctagaggttgaaagctccgacaccatcgataacgtcaaaggcaatattcatgacaagggagggtattcccccggaccagcaacgtattatcttttcccgaaagcatttttaggacggcttaccct

SEQ ID NO: 259726 - DNA, 385 bp, Glycine max
  unsure (1)..(385): unsure at all n locations
gaanaccgggtcgaccgacgcgtccgctcacttccacaaattcctccaaattctaaccaaacccttcactactccaaattccaaaactgcttcacactccttgttttccctcttctgttgcccgatcttctgcctccaagattttggtatttgggattgatcacctggagttggaaatggttaaaagttatggagtgttctgatttgcaaaagatatcatgttgcggtgcttagagggacttaagcctttatttgcttccatattacgatgttgtgacctggatatatataaccagccaagaggccttgaagatcctgaacttcttgctagagagactgtgttcagtgtaagcgaaataaaagcactttacgagctctttaaaaa

SEQ ID NO: 259727 - DNA, 448 bp, Glycine max
ttcccggtcgaccgacgcgtcgcgccacgcgtccgaactcgttcttcttcttttgttgttctgtgtttgtgtttgttttttctgggacctgaagaggtcttgctgcggtggtgactgtggttgcagaagctcctgcaagtgcggcaacggctgctgaggctgcaagatgtacccagacttgagctacactgagtcaaccaccaccgagaccttggtcatgggagtggcacctgttaaggctcaattcgagggtgctgaaatgggtgtgcccgctgagaacgatggctgcaaatgtggaccaaactgctcctgcaacccctgcacttgcaagtgaggtgttgggagagcaagcttcaagcagaaatagcccttaattaggaataatgataaactattaatgtgtagctaaaaacttatgtattatgtctgggatggtttttgggcactc

SEQ ID NO: 259728 - DNA, 410 bp, Glycine max
aattcccggtcgactcgacgcgtgcgagaatgttgaggaaggaggagtggaggggaacggatctgctgggtgggactagataaagtggagcaagctggcaagactaagggaagattggatggtggaaatggaatcggcagctgaaaaccctaattacccggcggtggactacaagcgaccttccatcttgtcatttcctcggaggcccgccctcagagttacatccgagttcgatagtgaaagcgcagtcttcttccataagatttcctgcaagttgttggacagccttgccaagttcaagttttcgttcaaccacagcggtaagggcggcgacatctccgaacctcaattcagctttgtctccaagcaccttagcctacactacgacctcgaagaccataatgctctcg

SEQ ID NO: 259729 - DNA, 363 bp, Glycine max
  unsure (1)..(363): unsure at all n locations
cggaanacccgggtcgacccacgcgtccggtgattgttgtgactcgttcttcttcgtcgatatcttcttcttttgttgtttgtgagtttgtggtttgtctcacctgaaaatgtcttgctgcggcggtaactatggttgcggaagctcctgcaagtgcggcaacggctgctgaggctgcaagatgtacccagacttgagctacaccgagtcaaccaccaccgagaccttggtcatgggagtggcaccagttaaggctcaattcgagagtgctgaaatgggtgttcccgctgagaacgatggctgcaaatgtggagctaactgcacctgcaactcctgcacttgcaagtgaagtgttggagagct

SEQ ID NO: 259730 - DNA, 335 bp, Glycine max
  unsure (1)..(335): unsure at all n locations
cggaatncccgggtcgaccgacgcgtccgctttgtatggcggaaaatatgaaggaggtggaagttgaagatggatatgtcttgaaagaagagatccggctcacggtgctaaaaacctctctgttcttcgcgggcgatggcttcagcgtctacgattgcaaaggtcaactcgtgttcagagttgactcttatggacccgacactcgcgacatagacgaactcgttctcatggatcctaacggacgttgcctcctcaccgttcgtcgaaagcggccgagtttgcatcaacggtgggaaggtttcaaaggggagagaatggacggtgataaacccatc

SEQ ID NO: 259731 - DNA, 471 bp, Glycine max
ccggacttgaatacccgggtcgaccggcgcgtccgcttcttcgtctcaaatctcttcgatccttcgattcgttccatttcttccaaaatgggggaaggcccaattcgcgttctcgtcactggagctgcaaggcaaattgggtatgctcttgtccctatgattgctaggggagtgatgttgggtcctgaccagcccgtgatcctccacatgcttgacattcctccggcagcagagtcattgaatggggttaaaatggaattggtggatgctgcattccctcttcttaaaggtgttgttgccacaactgatgtggttgatgcatgcactgaggtcaatattgccgtgatggatggtggattcccaagaaaagaaggtatggagaggaaggatgtgatgactaaaaacgtctccatttacaagtcccaggcttctgcccttgaaaagcatgctgctgacaactgcaaggttctt

SEQ ID NO: 259732 - DNA, 382 bp, Glycine max
cttcgctgctcactgtagcgtagccatggctttcagagttggacgatcgggatgactaaagtcctcttctaacatgggggttgctgaccatagcgtaagcacgttcctggaattgcacaggaagaaagctcatcgctatgtgatttttaaaattgacgataaaaagaaagaggttgttgttgaaaaaactggaagccctgctgagagctatgatgatttcactgcatccttacctgaaaatgattgccgatatgctatctatgactttgattttgtgacatctgaaaactgccaaaagagcaaaatcttttttattgcatggtctccttcaatagcccacattcgccctaaaatgctatatgcaacatccaaagacaagttc

SEQ ID NO: 259733 - DNA, 378 bp, Glycine max
cggaattcccgggtcgacccacgcgtgcgatcgaagctggttttgatggggttgagatccatggggctcatggctacctgcttgagcaattgatgaaagataaagtgaatgaccgaacagacgaatatggtggatcccttgagaaccgctgccgatttgctttggaagttgttgaaactgttgttaatgagataagggcggacagagttggaattaagctatcggcattcggaaaatattcaaaagctgggagactctaatccaaaaaattggggctttacatgatgaaggccctcaataagtatggtattctttactgtcacatggtggaaccaaaaatgaagactgttggagaaaaaactgaatgccctcatagcc

SEQ ID NO: 259734 - DNA, 374 bp, Glycine max
  unsure (1)..(374): unsure at all n locations
ttttattaaattaaaatccattggtttcatggctacctacttaaacaatggttggggtataaagtgagtgaccccacacacaaatatantggatccctttaaaacccctgcccattttcttttcaagttgttgaacctttttttaatgaaataagggcgcacataattcgaattacgctatctccattctcataatattcacactctcgacactctaattcaaaaaaatttttgctttacattataaatgccctcaataaatattgtattctttactgtcacatttttgaaccaacaattaagactgttggagaaaaaactgaatgccctcataacctgcttcctatgagaaaggccttcaattccacttttat

SEQ ID NO: 259735 - DNA, 414 bp, Glycine max
  unsure (1)..(414): unsure at all n locations
cggnccggaattaccgggtcgaccgacgcgtacgcggtttctcttgtcacaccaaatggaccgatctgccgccatattttccgacaccgtcaaccggaacggcacggtgacgcagctgtctctgctcgccgacgggaggctgtggtggccggagggcggtcaacgcaatttgagcatcgagaaagaggttctcgggttcaccggcgacggtcccgatataaggctcaaaacaatcgtggaaaccgaagatggatgctgtggcggtgcaagcagagcaaaactagtccgaaacgacgtcgtttttcggccatcgtccgaggaaacgcataagctctggtgccagaagctggggcgaatcatcgattctctcggacgacccaagggctttttggtttttgtaatccattcggggga

SEQ ID NO: 259736 - DNA, 403 bp, Glycine max
  unsure (1)..(403): unsure at all n locations
gaatacccgggctcgagccgcacgcgtcacggctatgctnncttgggttggcctggtattcccagcttgttcctgctaacatttggcgagcacttgttcagtgggtggacactccccaacagtgttgagttgaaccgtggcccgcttttggaagaagggaaaaaccagtgctttaannaaagattcgtggcacttgaccaacattgaaccttgagttccaggaattgctttgaggcccagtcgtgtggctaaagaggtcaagcatccattcaggaatcttctcaagcgcaggaaccgaccccaacttgtcatttccgttgccctacagatattccagcaattcacaggcatcaacgcaatcatgttttatgccccggtgctgttcaacacgttaggattcaag

SEQ ID NO: 259737 - DNA, 380 bp, Glycine max
  unsure (1)..(380): unsure at all n locations
cgcgtacggctatctcttttnttnnctggtatcccagcagttcttctaactttgggagccttgttcgnttggacacccccaacaggttggttgaaccttnccgcttggaagaaggaaaaacagtgcttaaaaagattcgtggcactgacaacattgaacttgagttccaggaattgcttgaggccagtcgtgtggctaaagaggtcaagcatccattcaggaatcttctcaagcgcaggaaccgaccccaacttgtcatttccgttgccctacagatattccagcaattcacaggcatcaacgcaatcatgttttatgccccggtgctgttcaacacgttatgattcaagaacgatgcatccctgtattctgctgtgata

SEQ ID NO: 259738 - DNA, 391 bp, Glycine max
gaaaacccgcggcgacccacgcgtccggttttttcttcaatttttcagctcgacctttacaactttttttttcttttacttcgttacggacttttttttctttgggttttcggaagtttgctgctagaggttgcatatttggggtttcacacgtgcgcaatttgaaggtattattggaggagagagtgtaaatgaagaaaccaacaaccgacgcaattagtatggggaaaaggagcctggagggtggagaagatgaccagcctgaacgaaagaggcctgctcttgccagtgtaattgtggaagctctgaaggtggacagtttgcaaaagctttgctcatggttagaacccattcttcgtagagttgtcaatgaagaaatggagcgtgcttt

SEQ ID NO: 259739 - DNA, 404 bp, Glycine max
aatccgcggcgcgacccacgcgtccgcccacgcgtccggtgatattcttaagaatcctgttgtcacagagattgcagagagattggggaagacaccagcacaagttgcccttcgatggggcttgcaagcaggtcatagtgtgcttcctaagagcactaatgagtccagaatcaagggaaattttgatatctttgactggtctattcctcaagatttgatgaccaagatctctgaaattaagcaggaaaggctagttaaggccagtttttttgttcacgagacctatggtgcctataggagcattgaagacttctgggatggtgaactctgagcaatatgcatctttgagacgttgaaaaatacattgctcctagagcaaatttattctgccttatacccactag

SEQ ID NO: 259740 - DNA, 385 bp, Glycine max
  unsure (1)..(385): unsure at all n locations
cggaaaacccgcgccgacccacgcgtccgagtcgcacaagtttacggtggccttgtttatatggactttagcaaggaaaacatgaatcagctggtccatggagtttatgtaccantcnatttgaatctcctccctcctctgtatctcatctatgcggaaaatcctagtgattctggcacggttcatagtaaagtaccgcagaagtggcttgatggtgatgagttcattgtgtcttccatgcttgaaattgctaatatcgcccaagaaggaaagactgcattagaagaaaacgactactccaaatttgcagctctcatgaatcgaaattttgacctgcgaaggttaatgtttggaaatgatgccctcggtgatttgaacctaaaaa

SEQ ID NO: 259741 - DNA, 444 bp, Glycine max
gcgtgcggcactcttccacccactcgtccgcccattcttccggcttcggaagaagagatccaccgtgtagggtttacatcacggctcacaaatcaaaagcctacttcaagagatatcaagtcaagttcaagagaagaagagagggaaaaaccgattaccgtgccaggattcgcttgattaatcaggacaagaacaaatataacactccgaaataccgatttgtggttcgctttaacaacaaggacattgttgcacaaataatatctgctagcattgccggcgatttagttcttgctacagcatattcacatgagctgccacgatatggtcttgaagtatgacttacaaattatgcagcagcttattgcactggtctcctgttggcccgaagagtcctcaaaacacttgaaatggatgaggagtattaaagaaatgttgaagcta

SEQ ID NO: 259742 - DNA, 415 bp, Glycine max
accggtcctgaattcccgggtcgaccgacgcgtacgcccacgcgtccgctcactcactaagctaaacaatttcatcaagcctgccatggcttcctctgatgctttctctgccattgcagctgctgccatctgcacaccaagttcccagaagaatggatcactcttgggaagcacaaaagcttcttttcttactgggaggaaactgaaggtgaacagttttacagcaccagttggagcacgatccagcactacagtgtgtgcagctgctgagcctgataggcctctgtggttcccaggcagcacccctactgcatggctagatggcaatttgccaggagattttggctttgatcccctaggtcttggatctgatcctgagagcctgacatggaatgtccaagcagagcttgtgcac

SEQ ID NO: 259743 - DNA, 442 bp, Glycine max
  unsure (1)..(442): unsure at all n locations
cggnccggaanncccgggtcgacgccacgcgtccgcccacgcgtccgaaaaagagttctttcaaatttcaaacagccttaaccttcgctgcccccagcgttgtgccattggcacccacaaagagtgtctcccatattaccatctttcctaccaaattgaaagccccgcgctcctcacctagttactctccgattagggttgcaaccgtggagcccgacacttcaactgtctactacaactctgcgttctcagtgtttcctgcaaaagcatgcgaaactgtaagaggggaagcctgcatggcggagatgtaccctgaaacgaagctacagccagaggctaagactccacgagtcgttacagagaacgttgagagagagtatcttgaatactatgatcctaacacgtaagatatataggaatcaattcagatacacttttatta

SEQ ID NO: 259744 - DNA, 271 bp, Glycine max
  unsure (1)..(271): unsure at all n locations
ggaaanaccgggtcgacccacgcgtccgcccacgcgtccaaaaaacacttctttcaaattttaaacagccttaaccttctctgcccccacgtcgtcccattggcacccacaaacagtctctaccatattaccatctttcctaccaaatagacagccccgcgctcctaacctaaatactctccgattagcgtttcaaccgtggagcccgacacttcaactgtcgactacaactctgcgttctcactgtatcctgcaaaagcatgccaaactg

SEQ ID NO: 259745 - DNA, 411 bp, Glycine max
ttcccgggtcgacccacgcgtccgccgacgcgtccgcccacgcgtccgtggagtttcaagggttaccggaaggttgcattgctaggatactctctggcactacgccagctgacgtgtgtaggttttccgtcgtatcaaagattttccgttcggccgctgaatcggacgctgtgtggaaacgttttctgccttgcgattaccattccatcatttcccagtctacttcgcctctcaactatccttccaagaacgagctctatctcgctctctcggatcgccctatcatcatcgatcagggtaaaaagagctttcaattggagaaaaagagtgcgaagaagtgttacatgcttgctgctagagctctcagcattatttggggtgacactgagcaatactggaactggacaaccg

SEQ ID NO: 259746 - DNA, 417 bp, Glycine max
attcccgggtcgacccacgcgtccggccacgcgtccggaaaagaatggaggccatttgttccaagcaccttatgacatcccttgtgataattcttgcgttctagtttgaccttatcacagggtgccaagaaaggcagtgacagtgaaaggccataccaagaagcgagcacggtgttcattagaacatcttgcagctccacgacctatccaagactctgctacagctccttagtgaagcatgcagacttgatccaaacaaaccgtgtggttctgacaggcacagccctgaatgtgacccttgcgtctgccaagtcgacctcggcaatgatgtcgacgctggcaaagaggcaaggcctgaagccaagagaggttgcagcgatgaaggactgtgtggaggagttggctgactctgttgat

SEQ ID NO: 259747 - DNA, 365 bp, Glycine max
ggtcgaccgcacgcgtccggctgtgatggtctgcactttcgtgtcttcctttgcatggtcttggggtcctcttgggtgggttatccccagtgagactttcccattgcacactcgttccgctggtcagagtgtcaccgtttgtgttaacctgctcttcaccttcgacattgcacaagccttcctctctatgctctgccacttcaagtttggcatcttcttgttcttctctggctgggtcctcgtcatgtctgtcttcgtgcttttcctgttgcccgagactaaaagtgtccccatcgtagagatgaccgagagagtgtggaaccagcattggttttggaagaagtttatcgatgatgccgcggatg

SEQ ID NO: 259748 - DNA, 406 bp, Glycine max
cggtcgaccacgcgtgcgaccctacttctacttccctttgtctaaaccttatcccttatcctcccaaaaccaaaccgtgtctacctgcgcagcttctctcgcactcccaaccctcactctccgaactcgacaacctctctgttctccccaatgcttctcctcgtccctctccctcacccctaactccaaacccatttccatttccgccgttttcctcaaaacaacgctgtcgtcgtcgtcgccgttgtcgctgtcgtctcgcttcgttccccatgtctctgtgttggagcaggaggaggacaccttcggcgacggagacggccccagcttctcccgcgaccttaagctctctgtcgggaatctccccttcagtgtcgacagtgcgcggctcgcggagctcttcgag

SEQ ID NO: 259749 - DNA, 440 bp, Glycine max
  unsure (1)..(440): unsure at all n locations
gcgtacggcggaatgnatgtggatcctagtaagagacctttgatggattatgttcagaagattcagaagtatgtttatgctaacatgcgcggtgttcttgtggattggttggtggaagttgcagaagaatacaaacttgtttcggacacgctttatttctctgttgcttatattgataggtttttgtcgttgaatattttgtcgagacagaggttgcaattgctgggggttgcttcaatgctcattgcttcgaaatacgaagagattaagccgcccgaggtggaggatttttgttacattacggataacacatactctaaagaagaggttgtgaacatggaagctgaaatattgaaagctttgaaatttgaattgggtggtcctacagtgaaaacattcttgaagagattcttcaaagttggtcaagagggtgttgatac

SEQ ID NO: 259750 - DNA, 368 bp, Glycine max
ttgatcctaataaaaaaccttttattgattattttcaaaaaaatcaaaggggaatttattctaacatgcggcgccttcttgtggattggttggtggaagttgcaaaaaaatacaaacttgtttcggacacgctttatttctctggtgcttatattgataggtttttgtcgttgaatattttgtcgagacagaggttgcaattgctgggggttgcttcaatgctcattgcttcgaaatacgaagagattaaaccgcccgaggtggaggaattttgttacattaccgataacacatactctaaggaaaaagttgtgaacattggaggcttaaatattgaaggcttttaaattttaattgggtggtcctac

SEQ ID NO: 259751 - DNA, 358 bp, Glycine max
tacccactacacattctatatcacagcttttaacattactccccttaccttgtttcaaagatggtttttaaagatagggctgcccacccctctccttcctccaattctacctctcttccaatcaatacctccctcattgccccatatagagttgtgttcaataatgcttcattgcaaaacacatatgtttctatcagtttacatatattttccatcatatctcaagtcaccactgatgcaccatccaatgttgaaaaacacttcaacaaacatcattataactttgttcctaacaattttaaacccaagaccccttacattgtatattcctactcaacacaaaaatcactttgtatta

SEQ ID NO: 259752 - DNA, 357 bp, Glycine max
  unsure (1)..(357): unsure at all n locations
ccggnccggaatacccgggtcgagcgacgcgtccgctttgaaagccatgaattaaatgaacgtgatggtaaaaggccacttctaactggagatttacgagttatcctaaaggaaggggtaggaacctttggtgatcttactttcaccgacaattctagctggataagaagcacaaaattccggctcggtgttaaggtggctcctggttattgtgaggagattcgtattcgtgaaggaaagactgaagccttcgctgttaaagatcatagaagagaattgtacaagaaacactacccacctgctttgcatgatgaaattttcagatttgatcggatagctaaagatggtgcacttcac

SEQ ID NO: 259753 - DNA, 341 bp, Glycine max
gcgtcgttgcttacccgcctgttccatgccttttcctaccaagctaagctaagacagaagcatgtatcttaacccgtgggattcaatcccaaagctgcacactgactcgagctgttcggagcaagtggtatcgcctgaattcgcgagcgaggtgcaaagcagagcccaagtggaacgagtgggagaaaagcctcgaatttccatttaattacgtggatgccactctcaacaacagcttcatggcccaattccagggcaataatcagatgctgtcgccgctgcaagacatgttcatgtactttcccaacatgtcctttttaacacatcatgatggttttaaa

SEQ ID NO: 259754 - DNA, 301 bp, Glycine max
tgattttttaaattcgctgctctcacatctcatcaaccttaacctctcatactctacttatattgttatctcaatactacatattaatccgtttatcattaatcgaccttattatcaaatcatatactctcccataccatttatctatcccttttaaaccttcccaaaatttaacttattatttttccaccacacgccaatctccttgaaaatacatttaaatttattatttacccactatcccttttcattggatccattcaataatgatcaacaaatttcttttcttatctttttatac

SEQ ID NO: 259755 - DNA, 344 bp, Glycine max
ggaattgccgggtcgacccacgcgtacgcttaagcttactacttgcattaacgactctgtctcagattcaccctcatttatgtctacagagaagccctgagagaacaagactaccactgctgtacctgcttcagcttatgatccagctaatcagctgcaaaggcacaagtggtgggctggccaccaattatgtcatttagaaagagcatcattcacaggaacagctatgaagaataggctgacaacaacccgaagaatgcttatgcgaacgtgaacctggatggtgcaccgtatatacgaaaggtggacataaagttgtacaagagctaccatgaactgacaga

SEQ ID NO: 259756 - DNA, 384 bp, Glycine max
  unsure (1)..(384): unsure at all n locations
gaaaaaccggccgaccgacgcgtacggacacgcntacaattttcatcatcttcttcttttttgacatcaatcatcaccacttccgccgctttttttgacaagatcgaattgccttttacaaaaattgaacctccaaagaaagaccctctttcccaactgactctacctccttgttaacccttttaccccaccgacaacgaacttctcgttcaacatctgtgccccaaagtcgctagccaccatttctctcttacaatcattacccaaattgacttgtacaaattcaacccaccaaatcttacaattaaaaccaatttcaatgaaaaaaaatagtacttttttagccccaaacacatgaaattccccaaccgtttttcacccaac

SEQ ID NO: 259757 - DNA, 369 bp, Glycine max
tcctgaattcccgggtcgacccacgcgtccgcggacgcgtgggacaagatgggcaaattcaatctgtcccatagagttgttttggcaccgctgaccagacagaggtcttacgacaacgtcccacaaccccatgccatcctctactactcccagagaacttccaacggaggccttctcattactgaagccactggcgtctctgacacggctcaaggctatccgcagacccctggcatatggactaaagaccatgttcaagcttggaaacccattgtcgatgccgtccacgccaaaggcggtgttttcttctgtcagatctggcacgttggaagagtttcagattcaagttatcagcccaaatgacaagca

SEQ ID NO: 259758 - DNA, 306 bp, Glycine max
attcccgggtcgacccacgcgtccgcacacgcttgctacaagatggacacattcattctgtcccataaacttgtcttgtcaccaagggccgggcatacgtcttacgacaacgtcccacaacttcatcccatcctgtaatactaccagatcacatcacaacacatgctcttctcacatactaaatccactgtcttatcttacacggatcaaagctatccttatacctctgccatatcaactaactaccatgatcaacctttcaaacccattcgcgattcctcacaagctactggctgcattaacttc

SEQ ID NO: 259759 - DNA, 468 bp, Glycine max
  unsure (1)..(468): unsure at all n locations
ggaanncccgggtcggccgacgcgtacgcccacgcctncnanaaatcccttgttgccttctgacccttaccagagagctcaggctagagggctggctgacttggtggccaataaaattttgatcttggaagaaaaatttggaccttaaagggagaaaaaaaaagaacctgccaaaaaggagttcatagaggcccttaaattattggaggaacagctgggagacaagacttattttggaggagacgatctacgttttgtggatatagcacttattccattcgacacttggttcaagacttttggcagcctcaacatagagagtgagtgccccaagtttgttgcttgggccaagaggtgcctgcagaaagacagtgttgccaagtctcttcctgatcaacacaaggtctatgagttcattatggacataaaaaagaagttcgacattgagtaggttcatgtttgatttta

SEQ ID NO: 259760 - DNA, 466 bp, Glycine max
ggccggccgacgcgtgcgaaaaagcaaataataaaaatattattttttgtatttagaactgatttgaacgaaaaaagaacggtttatttaaatagaacaaagtgtattataataaacgaaatccgtaaaaaagttcctcgatggtcatacaaatttattgacgaattgtaacaactggaaggaaaaaatgaagcagagaattatcaaattcgttctagaaaagccaaacgtgtattaattttgactaataaatctaaattttttaagaaatacgatacttataatcctacaggaaatactgataacgctgaaaaaaaaaaaaatgaattggctttaatacgttattcccaacaatcagattttcggcgagacataatcaaacgatctatacttgctcaaaggcgtaaaacagttactcggaaaatttttcaaaaaacggtgcattcccctctttttttggataaaa

SEQ ID NO: 259761 - DNA, 274 bp, Glycine max
cggaattcccgggtcgacccacgcgtccgcccacgcgtccgttactgctgaagatgtgaatgcagcattcagaaaggcagctgagggtccagtgaaaggtgtgttggacgtgtgtgatgttccacttgtgtctatcgacttccgctgctctgatgtttcctctactattggactcctccttgactatggtcatgggagatgacatggttaaggtggttgcttggtatgacaatgaatggggttacagccaaagggtggtggatttggcacacct

SEQ ID NO: 259762 - DNA, 453 bp, Glycine max
ccgggtcgacccacgcgtacgttgattctttttcttctatagagacacactgttagagtctcagagcaataaacacccttcgattgctaccactaaaggggacattgtttactattctacgtacggacatgttgagaagttagctgaagagattaaaaagggagctggttccgttgaaggtgtggaagcaaagctatggcaggtacctgaaacactttctgaagaggtccttgggaagatgggtgcacctccaaagagtgatgtaccgattattacacccaacgagctacctgaggctgatggcttattgcttggtttccccacaagatttggactgatggctgctcaattcaaagctttcatggatgcaactggaagcctgtggcgcacacaggcactagctggaaagcctgcaagaatcttttacagcactggttctcaaggaggtggaca

SEQ ID NO: 259763 - DNA, 430 bp, Glycine max
cggaattcccgggtcgacccacgcgtccgattagcaggagattcatgcctgacaaagggtcttttgaatatgatgcgttagctaagaaccgtgagaaggagtttttgaagactattactggcaagaaagagaccctcattgaccttacaattatagaaattttatcaaggcacgcatctgatgagttctaccttgggcagagagatggcggtgactactggacttctgatgccgggccattagaggcctttaagaagtttggaaagaatcttgaagagattgaaaagaagcttatagagaagaacaataatgagacattgagaaaccgctatgggccggctaaaatgccttacactttgctctatacttctagtgaggagggattgactttcaaaggaatgtccaacagtatctttatctaaggactcta

SEQ ID NO: 259764 - DNA, 397 bp, Glycine max
  unsure (1)..(397): unsure at all n locations
ggaanacccgggtcgacccacgcgtccgcccacgcgtccgggaacagcagagaaacatatttagaagtaaagaagatcatggcttgcggtggcaaccttggctgctgttcaaccagctacgatcaatggccttgctggaagttccctctctggaactaagctctctttcaagccctctcgccacagtgtcaaatccaagaacttcangagtggtgccgtggtagcaaagtatggtgacaagagtgtgtactttgatttggaggatctgggcaacactacagggcagtgggacttgtatggctcaaatgcacctttaccctacaaccctttttagagcaagttcttcgagacaatttgctgctccattcacaaagaaggggattgttactcaagtttc

SEQ ID NO: 259765 - DNA, 440 bp, Glycine max
accggtcctgaattcccgggtcggcccacgcgtccgttccaaaaccctaatccttcgtcttccaaggagatggctgattctcccctcgcaaggaactggaggtcaccttccccatggaaagctcagtcgagatcgagatctacgtcaaggtcgagatctaggtcgaggtctaggcctagacaaaggccatgatcgcgttctagaagtcgtggcaggtcaaggtcaccaattcgtggaaggtcaaggtcaccaattcatggaaggtctgaacctacaaatcctggtgacacactttatgtaactggtctatcttcgagggtcaccgaaagagacctagaggagcatttctccaaggaaggaaaggtttcttcatgttttcttgcggtggagccccgtacacggatttctcgtggttttgcttttgttacaatggaatctgc

SEQ ID NO: 259766 - DNA, 449 bp, Glycine max
tcttgaattcccgggtcgacccacgcgtccgggtgttagttcatcttcacttttcttcaacaccatctttctctttctttttatttttatatgtgtgtcaattgttcgattcttttggtgttccagggagatcgattgataccgtcccgttgattttccaattcgacgaataagggtatcacatctcttaatcaaccatgtttacccgaatttttggtaaacctaaaccggaagtcaatactctaaccgctttagacgagttaaatgacaaacttgaaatgttagagaaaaaggagaaagtactcctaaaaaaggctgcagcagaagttgaaaaagccaaagaattcactagggcaaagaataaaagggcggcaatacaatgtttgaagaagaagaggctatatgaacagcaaatagagcaaactggcaattccaagtgcgtattcatg

SEQ ID NO: 259767 - DNA, 419 bp, Glycine max
tcctgaattcccgggtcgacccacgcgtccgcccacgcgtccggaaacttaatcgatcatcacttcacttcactaatacatcatggcagacgggacggagaacaagtatgagagctctgaggttgaggtccaggatcgtggtgtttttgactttctcggtaagaaaaaggatgaagaagacaagcctcatcctcaggaggaggtcatcgacaccgagtttcaaaaagtcactgtctcagaccaaggagagaacatgcacagcctcttagaaaagcttcaccgatctgacagcagctctagctctgtaagcttcttttcctttattttctttgcattgcataaacattatatatatataacttggtcattcttgaaggaaataccttatattaaacttggcttttttttttaatatttat

SEQ ID NO: 259768 - DNA, 419 bp, Glycine max
ggaattcccgggtcgacccacgcgtccgcttttttgtttgtttgtttctttctctctccccgccaggttcagagacttttccgattcctggaagaagagaagagaaaacctaaatcacagatccatggcggaagaacaccgatgtgaacctcccgaaggtcaccgactttgcgtcaacaactgcggttttttcggagcaccgccacgatgaacctctgcttcaaatgctacagcgcgatccgtttgaaggagcaagaagaagcgtcgacgaaatccacaatcgaaaccgcgctctcttctgcctcctcggcgaaaccgtcgtcgtccacgtcacctccgccgtcggcggtcgatgtgctcatggaatctccaccgccgtctgcggcggaggttgaggttgctgtcacggtcacggtcgc

SEQ ID NO: 259769 - DNA, 475 bp, Glycine max
tcctgaattcccgggtcgacccacgcgtccgcgcgattctgagcgcgttggactccaagctggtcggattgttgggccaggtctcgtccgaagaggacttcagcggcaaacttgggcagtccacggttctaagaatcgcttccggactcggattcaagcgcgtcgccttgcttggcctcggcgcctccgcgttcaccacattcgcgttcaagtccctcggcgaggccgatgccgctgccgtcaagtccgcccaggccggccacgtcgacgtcgcgcttgcctcttccgacgcactctacaccgagtctaagcctaaaacagcgtccgcaatcacatctgggactttgctgggaacttatgaggatatacaggtcaagtcagagtcgaagaaatcagtgcttaattctgtggatattatcgggcttggaactggacctgaattggagaagaaactaagtatgcagctgacatttct

SEQ ID NO: 259770 - DNA, 402 bp, Glycine max
actttgatagtttgattagctctaataaggttaaggacgagagagagaaagagaaataagaagaaaaacacaagatgggttattggaagtctaaggttcttcccaagatcaagaaggttttcgagaagaatagcaccaagaaagctgctgctgctgaggccaccaagtcctttgatgagtcaaaggaggaatacaacaaagcctttgaagaaaagaagactgaacttcaaaccaaagttgttgaaatatatgaggcttcatcaactgaaatcaagagtttggttaaagaacccaaggaagctggtttgaagaagaactccacagaagtccagaagttcctagaagagctggttaaaattgatttccctggatcaaaggcggcatctgaagcatcttcaaagt

SEQ ID NO: 259771 - DNA, 394 bp, Glycine max
ggtgcattaaaagaatttgaaattaataacctgggttgcaaaacctttggtttaatagtgtcctgtaaccttttaaggggaggttgcaaaaaaaagttttggaccaagatcactccaatctccatttggcttctccagaaaagcctcctttcttgttaaggcagttgttaccccccttgtcaagcaaggatcagacagacctttgtggtttgcatcaaagcaaagtctttcttacttggatggcagccttccgggtgactatggatttgaccctctgggactttcagaccctgaaggaacaggagggttcattgagccgaaatggctagcatatggtgagataatcaatggtcgttatgcaatgttgggtgcagttggtgcaatagcacctgaa

SEQ ID NO: 259772 - DNA, 354 bp, Glycine max
gcccgggtcgacccgcgcgtacaaagacattgtcactaaaaggaggttactatgactttgttaacggatcttttgcggtctggtggcttcagtttggccttgcatcctctttctccgttaaagatgtggccaccattctgcattggaagctataggggccatgcttagaggtcgtgtgtatctgcaatgaagaggcctagccaccttcatcaccatatgatatttataaaaatatatatatatgaaactatgaactgcgtttatgcatgtcggaaaatcttcttttgataagagtttggaaatcctcttgtaacaaaattttcattattcaaccttgatctttatatagcccgc

SEQ ID NO: 259773 - DNA, 363 bp, Glycine max
  unsure (1)..(363): unsure at all n locations
ccggtccggaattcaccggtcgacccacgcgtccgcccacgcgttcgnggacgcgtgtttttacgcttttgccgacacgtgaattctagggggtttggctaattcatatctgtactatttttcaatngtttttttaaatgttgaattccgttgctttgttgatggacttgcttgggtcaccggcaacgatgccctcaagaaatccttttcaatctacggcgacatcgttgaatcgaaggttatcaactaccgtgagactggaaggttcataggattcagatttatgaccttcacctcaaagcaatcaatgaaagatgcgatcgcattaatgaacggtccaaaccttgacggtcctaacatcac

SEQ ID NO: 259774 - DNA, 453 bp, Glycine max
  unsure (1)..(453): unsure at all n locations
cgtccgctaataaccaacncatcgcttcggattatctagatctaaagaactagtcaaaacaaaaaaaaacgaagaaaggatatattatagcaactgaactattgttaagcataaaagaacaaaaatcttatttagttgtaaagcaataaaaatatacagataaatgaagaggtgaaagaaagagagaaaaaaaatcaatgatatacaattctaatatataaaggtctatggcttatctaataaaaggtaatgtaataaaacatcaatctaaatcaattcatatctatttatatatgaattaatttataacgtaaacaaattaagagctctgaatcaataaaaactcataatattgattcacgaaaaaacaaatcaatattcgaaaaacaaaaacattattaattttaatatattacaaaggctacattgttgaattcagacctaaccattaat

SEQ ID NO: 259775 - DNA, 406 bp, Glycine max
tccggaattcccggtcgaccacgcctccgttaaggtggccacccaacatgcttgggaccagaacccactgaccttccttcgtcaggttgtggctttgtgccaagctccattcttacttgaggatcctaatgtgggactgctattccctgttgatgcagttgcaggagctaaacactatctttaattgacctcgggcggtttaggcgcatatagtgactcccgcgagcttccaggagtgaggaaggaagtggctgacttcatactcaggcgtgatggatatccaactgatccagaactcatatatctcactgatggtgcccacaggggggagatgcagatattaaatactatcatcagaggtcaagacgatgggatttaggttctagtgccacaatacccactctac

SEQ ID NO: 259776 - DNA, 329 bp, Glycine max
  unsure (1)..(329): unsure at all n locations
acaacatatcanaatgctcaaattatctttcttgcaacaactaatcctccttcaaaacttgatgaagcaatactttcgcttcttcctcaagcctttgaaattgtaattccacaccaaaaggagaggtctgaaatatttaaaattatcttaaactattacaatattcaacacaacataaacttttgtcatatacatgttttttctgaaggttacactggttcacatctatttgatctttgcaagaaacctgcctattttcctattacacaactactggatgaagagaataaaagaaaacaatctcatccccctatacctttgtcccattt

SEQ ID NO: 259777 - DNA, 445 bp, Glycine max
gtttgtaaattgcaaatgggtttggggaatttttaaggagatcacccccaagccctttcttcgtgaacaagcattattaccatggtgcttcccatttttaattccacatttgcttttgattaaccccagaacccattattaccttgggggggcatttttttttgttgccctttctttaccaatggcttcactttcactcacaatcaccaaaatggcccgtgtgcaaagccctcgtggaagaagaaaagctggttcccttgtatgggagaagaaagtcgtcgactgatccaagatcaaaatctattccgggcgataacatcccgcatcgtccggctggtcaaaggcctgaaactgctcctccacctgaaacaaatcattttcatcaacatgggtttggatttatgggtggcttggggggatttgcgccaccgccgatggcaacaac

SEQ ID NO: 259778 - DNA, 478 bp, Glycine max
  unsure (1)..(478): unsure at all n locations
cggannggaacgcccgggtcgaccgacgcgtccgcccacgcgtccggaggattccaattcatggcttcccttgcagcatccactgctcgtgcttccgttggcatgtcagaaatgcttggaaaccccatcaacctcagtggtgccacaaggccagctccatctgcctctagccctgcctccttcaagactgtggctcttttctccaaaaagaaggctgcacctccaaaaaaagctgcagctgctgctcctgccaatgatgagcttgccaagtggtatggtcctgacagaaggatcttcttgcctgagggtctcttggaccgatctgagatcccagagtacttgaccggagaagtccccggagactatggttatgacccatttggtcttagcaagaagccagaagatttttccaaatatcaggcatttgaattgattcacgccagatgggcaatgcttggtgctgctggattcatcattc

SEQ ID NO: 259779 - DNA, 469 bp, Glycine max
ggaacggccgggtcgaccgacgcgtccgcaaaattccgacacacgtggcacttcaccaaccgctgatctcagcaggaacaacggcagcgagggcagaagctacagcgaggcaagcctgcttccgcggcttgccacgtggtacaaatccaaggacgtagcgcagaggatccttctctcagttgaatgccaaatgaggaggtgttcctacacgctgggtttgggtgagccgaacctagcgggcaaaccgagcctgctctacgacctcgtgtgtaagccgaacgagatccacgcgctgaagacgacgccgtacgatgagcgcgtagagaatcacgagaaccacgcgttgcacgcgacgcaccagatcgccgagtcgtggatccacgcgtcgcggaaggttctagagaggatcgcagacgcggtgctctccagaaccttcgagaaggcggctgaggactgctacgccgtggaa

SEQ ID NO: 259780 - DNA, 218 bp, Glycine max
tccccaattggtatttccccaccggccagaaacctatggggcttaaggggatccacctgagaaccaggcaccaaggtgcactgtccactcatttcaacacattattgaccatggttggccatggccccgacctgagttggagggttggctggaaaaaactccagccgaagtaaatgcttattggtctaacccaagggaatatactaatgcaaggaaaa

SEQ ID NO: 259781 - DNA, 279 bp, Glycine max
  unsure (1)..(279): unsure at all n locations
tggggtgctattctagctaacttgtacgctaggaaggcggacatcatcttaagaggatactctggttggaattcaaggcgggctttggaggttttggatgaaattttccccaaggatgcttatgtgcaaccatcattggtaattgtgtattttggtggcaatgattctattgatcctcacccatctggccttggtcctcatgtaccccttgaagaatatgttgaaaacatgaggaaaatngctaatcatcttaagagcctctcggaccatattcgcatt

SEQ ID NO: 259782 - DNA, 423 bp, Glycine max
  unsure (1)..(423): unsure at all n locations
tttcttaacaaatgttttttggttttcacanaccgaaatacttcgcgccggcccgcacaattcaaacgcgctcataactcaactanattaaaatctccacataagcatcttgcaaccaattctgcacgtaattctgcaccaacaactgatggtgtgaacaatccttatctatatctccctgtaacttttgctcttcttgagattattaaataccacaagagcactgatctcctaatcaccaatcttcctttccacacgtttcttcctcaaattgcccaaaattttaagactgatcttcttttccaaatccatgctatactttcattgcaatacgcttcttaagcatatcttgttttcctcttttatgacactaactttgtttccattcaccccaaacgttttactattattcccaatgatatt

SEQ ID NO: 259783 - DNA, 471 bp, Glycine max
  unsure (1)..(471): unsure at all n locations
gaagacccgggccgaccgcgcgtncgnaaagatagnatttgagaaaaccactgngaagacagctgggaatnngncacaggggccaccagcggaggtgcctcggattcccgatgcattgaggcctccatctaatacgggaagcggtgaatttgaagttacatatcttgactcggatactcgcatcacaagaggagacagaggcgagctaagggtctttgtgattgcttgagttcctggtgaatgcaactatgcactatgcattttctctgttggacttaaaaaaaaaaggtttcaacaccttgtgccatcattttgtttagttttttcctcctgatggtatttgttctaagttcttcaatattgtaaacatgatggaattaaactctactatatagttccaaggaagcagggtactttttgtttaagtgtaacatatttcttttttaaggaataattgcttacagatcatta

SEQ ID NO: 259784 - DNA, 299 bp, Glycine max
catgccactagtgtcacttatgtagccaccaaaagtgttggtggctacaatgatgacgctaataagcaacatgatattactggtgtctatcccgagaaagacaccggtagacatcattttggtcgtggttacgacggtgacactaacaagcaacatgatgctactggtgtttatcccggaatagacattggtagagatcatgggactaccggtgtttatggcctaaacaccgacagacatcatggaacttctggggtgaatcccgggatagacacccataaccaacaacatgggactac

SEQ ID NO: 259785 - DNA, 459 bp, Glycine max
  unsure (1)..(459): unsure at all n locations
ccgggncgacccacccgtccgccaacccttccgcccacccgtccgacaggtggttgagacctaaaaaggaaaagcaaatggctggctaaaggatcttttccccagttgttaccactgtcaaccgtgccggggccggcatggttgttccattaactggcctcaagtccatggttggtttccccaccagaaagaccaacaatgacattaccctccattgctagcaacggtggaaagagtgcaatgcatgcaggtgtggccaccagttggcaagaagaagtttgagactctttcctacctgccagaccttgatgatgcacaattggcaaaagaagtagaataccttcttaggaaaggatggattccttgcttggaattcgagttggagcacggtttcgtgtaccgtgagcacaacaggtcaccaggatactacgatggacgctactggaccatgtggaagct

SEQ ID NO: 259786 - DNA, 349 bp, Glycine max
cctgaatgggtctggacctggggtttcagctcccagttcatccttctttgggagcagcttgaagaaggttattggctcaagggtccccaacacaaagatttcctctggaagcttcaagattgttgctgtagaagagaagaaagagattgaagagacccagcagaccgacaaggacagatggaagggtcttgcctatgatatctcagacgaccaacaggacatcacaagaggaaagggtttggttgactcccttttccaagctccacaggatgctggaactcactatgctgtcatgagctcctacgagtaccttagcactggacttcgccagtacttggacaacaacatg

SEQ ID NO: 259787 - DNA, 416 bp, Glycine max
  unsure (1)..(416): unsure at all n locations
tcctagggnnnnnnnnaaaaattatgggcattgaatcgacggggagtaaatgggtttngggggtggctgcagtgtggatacaagcaatctccggcaacaactaaactttntngaattactcggacgctctgaaatccctcatgagcctaacccaaatcgagcttaacaatctgtccgtggccaaggatgttggcaaggcttttgggcttctggctgggctggcctcagacaaattcccgacttgggccattctcctcattgggtccctccaaggccttatcggctatggcgtccagtggctcgtcgtcagccagagaatccaacccctcccatactggcagatgtgcgtattcctctgcattggtggcaacagcactacctggatgaacaccgccgttctagtcacatgcatccgc

SEQ ID NO: 259788 - DNA, 425 bp, Glycine max
ccgggacgacccacgcgtccggaaaaaatggcgggcaggaccatgctccgttcttcgattttggtggaacccttccaatggcaggctcttcattttagtaacagacccgttagggcttgtccgtttcgccgtggcaaggagtgaccctccgttgctccagcaatgagacgccgtcgtttcaggacgatcaaggtccacctcaagaagccgtgttgaaggccatttccgaggtatctaaagcagaaaggagggttggccaaactacgaacatggttattggaggcaccgtgtcggatgattctactaatgaatggctcactttggaccagaaggtgaactcatacccaactgttcggggattcactgcaataggaactggaggggaggacttcgttcaagccatggttgttgctgggaatccgtaa

SEQ ID NO: 259789 - DNA, 483 bp, Glycine max
  unsure (1)..(483): unsure at all n locations
ccggcccggaagacccgggtcgacccacgcgtccgtatattgttagcatttatggtttctgaattgaataaagttcattggttttcaaacattcatataatgcttagtttagttaccaaggggcaagggtttatttcaatttcatcaattgctctcttgagtctctccgttcaaacaaactaaattgatttatgttttagatccactggccagtgcgcatgaaaagcggatcagttggattcaagaaggaatatctcgatcaaccggacattcccagcacatggaaagcaatggaggcactctatgactcangcaaggcaagagccataggagttagcaatttctcttcaaaaaagcttcaagatctcatgaatatagcaagagtgcctcctgctgttaaccaagtggaattgcacccaggatggcagcagccaaagctgcatgcattctgtgaatctaaaggagttcatctgtctgtaagta

SEQ ID NO: 259790 - DNA, 473 bp, Glycine max
aattcccgggtcgacccacgcgtccgaatttgaaagccccacgctcttcacctcgttactctccgatcagggttgcaatcgtggagcctgacacttcaactgtggactacaactctgcgttctcagtgtttccagcggaagcatgcgaaactgttggaggggaagcctgcatggcagaaatgtaccctgaagtgaagctacagccagaagctaagacaccacgagttgttacagagaacgttgagagagagtatcttgaatacgatgatcctaaaacggtatttagaggagaggcttgtgatgatcttggaggaactttttgtgagaccgagtatcagaagggtgtctactagagaaaaaagaaaaccctttttattgccatggctactgcgtttttaatgtctaccagtaatgattgtagtggtgaatgtacataggtataggctatggatctcagtttatattgagtttca

SEQ ID NO: 259791 - DNA, 411 bp, Glycine max
  unsure (1)..(411): unsure at all n locations
cgtgcggtacaagcctctactatactgcttcaccttcttctctagataattcantgctgaaacatggggtcanctagtctctctgtaaccaaaccagcccttcaagcaaatgggaaaggcttctctgaattctctggcctccgaagctcatcaggcttccttcccttttctagaaaatcttcacaggatttccattctgtcattgccttccagacctatgcagttggaagcagtggaggatacaagaagggtgtgacagaagcaaaactgaaggttgccataaacgggtttggaaggattggaaggaacttcttgaggtgctggcacggtcgcaaagactcccctcttgatgtcattgccatcaacgacaccggcggcgtgaaacaagcctctcaccttcttaaatacgat

SEQ ID NO: 259792 - DNA, 388 bp, Glycine max
  unsure (1)..(388): unsure at all n locations
gaattccgggtcggcccacgccttccgccaccccttccggggaaagccattaaattcaaagagaggggttcctggtccggattttttggattggagaattcaatcctcaatttttttttattttttcccccattcccaaaagggcaaattcttatccttcacgtattggggtcctctctttttccttttcggtctccatccatccaattcttttcccatggctacgatcggacacaacaatctcaatgccaaattggttcttctcggggacatgggtgctgggaaatccagcctcgttttgcgctttgtcaagggtcaatttctcgaatttcaggaatcaacaataggggcagcgttcttttcacagancgctgcagtaaatgatgcg

SEQ ID NO: 259793 - DNA, 377 bp, Glycine max
aaacactcataacacaaagcacaaagcaaagctcatccttgagttaaaaaatggcagcagcttgttccatggctctctcatccccatccttggctggcaaggccgtgaagctgggcccatcagccccagaagtgggaagggtgagcatgaggaagaccgtcaccaagcatgtctcctcatgaagcccatggtacggcccagaccgagtcaagtacttgggcccattctctggcgagcccccgtcctacctaaccggtgagttcccaggcgactactgctgggacactgctgggctttccgcatacccataaaccttcgccaagaaccgtgaactcgaagtgatccactccaggtgggccatgctcggagccttgggc

SEQ ID NO: 259794 - DNA, 249 bp, Glycine max
ttccattttcagcttatcgccaatgcttcctacattggcactcctggaaagggtattcttgctgctgatgagtcaacagggacaattggcaagcgtttggccatcatcagtgtaaagaacattgaatccaacaggctatctcttagggagctgcttttcactgctcctggtgtacttcaatatctaagtggtgtcattctttttgaggaaaccctttaccataacacaggtgcaggcaatccctttgtg

SEQ ID NO: 259795 - DNA, 432 bp, Glycine max
ctgaattcccgggtcgacccacgcgtccgcaacctctaacctacctctttttcttctctctcaacaacttcaccttcttcctcctcgatcatgtctcacttcaagggcaagtaccatgatgagcttatcgccaatgctgcgtacattggcactcctggaaagggtattcttgctgctgatgagtcaacagggacaattggcaagcgtttggccagcatcagtgtagagaacattgaatccaacaggcgagctcttagggagctgcttttcactgctcctggtgttcttcaatatctcagtggtgtcatcctctttgaggaaaccctctaccagagcacagctgcaggcaagccctttgtgaatgtcttgaaagaagctggtgtgcttcctggcatcaaggttgacaagggcacagtcgaacttgctggaact

SEQ ID NO: 259796 - DNA, 426 bp, Glycine max
tcgagggacgacccacgcgtccgctgtaaacaagttatcaagatcaatgatgatcacaagagcacgcttatgaaccgtgtggttgcatcaatgttcaacacagtctcaaacaaaaagattgctattctgggatttgccttcaagaaagacactggtgacactagggagacccctgccattgatgtatgccaggggctacttggtgataaggccaacctgagcatatacgatccacaagtaactgaggaccaaattcagagggatctatcaatgaacaagtttgattgggatcatcctatccacttgcagcccacaagtcctactactgtgaaaaaagtcagtgttgtttgggatgcctatgaagcaacaaaggatgcacatggcctttgcattctaaccgagtgggatgagttcaagactctcgac

SEQ ID NO: 259797 - DNA, 415 bp, Glycine max
ctggcatatcccccaccctatgatggcgtctctctgacatgctcctccatggaaatcaaggccgttttgcgttgatagtacttcaattaggctaggtttattgttgatgttccctagtgttttggtgaataaagaaagggaatggtgttagatgtttatgagttatatcgtgtgttggtgtgctgtttttttttttatgatttatgatttttaattgttttttttttatttttttttatttattttattttattttatttattttatttttttgttaattatatattttagttttttttttttattttttatatttattatgtgttatatttatattttttaattttattttttattttatattagttgaaattttatattttttttttttttaattttttttttttattatttt

SEQ ID NO: 259798 - DNA, 385 bp, Glycine max
agattcccgggtcgacccacgcgtccgcccacgcgtccggcaccactctctctttgttctttctcggttcagtgtctctctttgacggtggtgctgtcagcattgacctcagcttgagcagtaaaacatcatcagcactactacggtaccatggctgtgctgcaatctttcgtttcggtccacccagattctcacttccccatacagaacctcccttacggagtcttcaagccccaatccgcttcgcctcctcgtcccggcgtcgccatcggcgacttcgtcctcgacctctccgaaatatcttccgctggtctcttcgacggtcctctcctcaaaaactccgatgcttttctccagcctaatctaaataaagttggatcacttg

SEQ ID NO: 259799 - DNA, 403 bp, Glycine max
  unsure (1)..(403): unsure at all n locations
cgctccggaattcccgggtcgacccacgcgntccgtttncctttgcctcaataatatctctctatcttgaccccttttggggacctcaactngttacgtaattactctactctcccctttctagcttctgtgttcttcttcttcggttctctcttcatggggtgctgcttaagtgccaggatcaaagctgtgagccctccacgcaatggtttgagttcaaaggatggttacaaggaagaagatggcttaagcagcaaggcctcaacttcctctgtttcttcaactccgcggacggagggagagatcttgaagtcctcaaacatgaagagcttcaacttcagtgagctaaaaactgctacaagaaactttcgtccagatagtgtggtgggtgaaggccggtttg

SEQ ID NO: 259800 - DNA, 301 bp, Glycine max
  unsure (1)..(301): unsure at all n locations
accgccccggaattcccgggtcgacccacgcgtccgcccacgcgtncggtggtaaatgagtggttcttgagcagaagcagttaaaagagaaagggatgcagcgaagatgacatcggttggtgtggcaccaacttcgggtttgagagaagccagcgggcatggagcagcaggtgttgatagattgccagaggagatgaacgatatgaaaattagggttgatagataaatggaaggcacagttgttgatggcaatggaacggagacaggacatatcattgtgactaccattgggggtagaaat

SEQ ID NO: 259801 - DNA, 429 bp, Glycine max
  unsure (1)..(429): unsure at all n locations
acggaccgccccacgcgtgcganaaatctcgcttcacctcgcctctctcggctctcgactcgtcctcaactacaccgtccaactgggcccatgccgactcagtcgcggcacatatcaacgccggttccgccaccacgacaccgtgcgccgttgtggtccaagccgacgtgtccgatccggctcaggtgaagtcgctcttcgactcggccgagcgcgccttcgactcgccgatccacatccttgtcaactcggcgggcgtgatcgacggcacgtatccctccgtcgccgacaccaccgtggagtccttcgaccgcactttcgcggtgaacgcgcgtggcgccttcgcgtgcgccatggaggccgcgaaccgcctcaagcgcggcggcggagggcggatcattctactgacgacatcgcatgtggtggcgc

SEQ ID NO: 259802 - DNA, 460 bp, Glycine max
  unsure (1)..(460): unsure at all n locations
ggaattnctgggtcgacccacgcgtccgcggacgcgtgggcgctgatcatggaacacagaaccctataactcaacctggcttcagcaaaggatctcgaagacttgaatatattctcaaagatggatgtatatgctgtgctttcactctccggcgatcaaaagaccaagactcccgtccacagaaacggcggcaccaacccaacatggaattttccggtcaagttcacttttgatgaatcggtggcgcggcagaaccgtttggccctcgaaatcaagatccgctccgagcgcgccctcgccaccgataaggacatcggccaggtccacgttcctctcatggaactcctcaagcaacctggcgacggtaaatccttccagcacgttagttaccaagtcagaaaaccctccggcaaacccaagggagccctcaatttctcctacaaatttggcgatgaattcg

SEQ ID NO: 259803 - DNA, 443 bp, Glycine max
  unsure (1)..(443): unsure at all n locations
gacccacgcgtncgcggacgcgtgggcgctgatcatggaacacagttccctagtactcaacctggcttcagcaaaggatctcagagacttgaatatattctcaaagatggatgtatatgctgtgctttcactctccggcgatcaaaagaccaagactcccgtccacagaaacggcggcaccaacccaacatggaattttccggtcaagttcacttttgatgaatcggtggcgcggcagaaccgtttggccctcgaaatcaagatccgctccgagcgcgccctcgccaccgataaagacatcggccaagtccacgttcctctcatggaactcctcaagcaacctggcgacggtaaatccttccagcacgttagttaccaggtcagaaaaccctccggcaaacccaagggagccctcaatttctcctacaaatttggcgatgaat

SEQ ID NO: 259804 - DNA, 138 bp, Glycine max
cgggtcgacccacgcgtccgcaagatattaccatcactggtgctagcaccttgccttcagatgaggtggagagaatggtaaacgaagctgggaaattttcgaaggaagacaaagagaagagggatgctattgacacaa

SEQ ID NO: 259805 - DNA, 287 bp, Glycine max
gtatgagagctctgaggttgaggtccaagatcgtggtgtttttgactttctcggtaagaaaaaggatgaagaagacaagcctcatcctcaggaggaggtcatcgccaccgagtttcaaaaagtcactgtctcagaccaaggagagaacaagcacagcctcttagaaaagcttcaccgatctgacagcagctctagctcttcaagtgaggaggaaggagaagatggagagaaaaggaagaagaagaagaaggaaaagaaagggctgaaagagaagatcgaggagaaaa

SEQ ID NO: 259806 - DNA, 434 bp, Glycine max
  unsure (1)..(434): unsure at all n locations
aaaatttccattccaatcataattttctcaatttcccnncanaaaatttctcctcgtgatgttgtaatattcaacagcaacagctccatcttcttctttaacaatcattactttgacctcatggtctacttccaatgtttaataatttgctataacaagacctatctttctctttttccaactatatatatacaattacattaattttttttctcatctttttataacatcttaaaagtctctattcaaagccatttcccttactattcataccccatatactactactcatataatcttatatcaacaacatattcacatttcctccatttttcacatttaataacttttaaaaattccaccttttaaatatagacaaatcttatcactcttgacttccttcatatatatcttttcaaatagatcgtacttta

SEQ ID NO: 259807 - DNA, 218 bp, Glycine max
tcttcttcttttggtggggtgtgtgtgttttttctctcacctgaaaatgtcttgctgcggtggtaactgtggttgcggaagcgccttcaagtgcggcaacagctgcggaggctgcaagatgtacccagacttgagctacaccgagtcaaccaccaccgagaccttggtcatgggagtggcaccagttaaagctcaattcgagagtgctgaaatgggtg

SEQ ID NO: 259808 - DNA, 268 bp, Glycine max
ctcgtccttcttttttctatcttcttatttacttgtgggtgtggttgatttttatctcacctgaaacatactaactgctgtgttaactgtatttgcagaaactcctgcaacttctgcaacgactgcggatgctgccatatgtacccatacttgaactacaccgaatcaaccaccaccgataccttgttcatgggagttgcaccagttaaagctcaattctaaagtgctaaaatgggtgttccctcttacaactataactgcaaatgtg

SEQ ID NO: 259809 - DNA, 370 bp, Glycine max
ccacgcgttcggccacgcgttcggtttgaaacagagctggatatgaattcaagtttattaggaagattggtgatgatgtgttcgacaagattaataaagctgaagcaagtatatatgttgcggatcacccgggtggattacacttagaagtggaaaaaataaggaaacttttggaggctggatctagtgatgctatctccatgatagggatccacggaatgggcggggtaggaaaatcaacacttgctcgagcagtttataatttgcatactgatcattttgatgattcgtgtttcctacaaaacgtgagagaagaatcaaacagacacgggttaaaacgcctacaaagcattcttctttcacaaatact

SEQ ID NO: 259810 - DNA, 311 bp, Glycine max
  unsure (1)..(311): unsure at all n locations
aattnccgggtcgacccacgcgtccgcccacgcgtncgggtgttagtcttggtgtagtgtagctagggagggatatatatctgagtaagagggcatcaaagcttgaattgcccccaagcttcaaatttcatccaacggacgaagagctggtgttgcactatctctgccgcaaatgcgcgtcgcagccaatcgccgttcccatcatcgccgaaatcgacctctacaaatacgacccctgggacttacccggattggctacttatggagagaaagaagtggtacttcttttcaccacgggaccggaaataccc

SEQ ID NO: 259811 - DNA, 447 bp, Glycine max
tccaatcaacggctattccttgtatgattcactgctcacacacacgctgaaagggggaaagaagaggggctagattcacaacatgaggagagagacaactaacaacgcatctgcttgtgctgatagagcaactaatgacatgctcattggtcctgactgggcaatcaacataaagatgtgtgatatcattaatatggaccctgggcaagcaaaagatgctttgaaaatactcaagaagcgtttggccagtaaaaatccaaaaatacagcttctggctctttttgtattggagactcttaataagaattgtggtgaaagtgtatttcaacaaatcattgagcgggatatcttacatgaaatggtttagatagtgaaaaaaaatccggatttaaatgtgagggaaaagatactgatattaattgatacatggcaagaaacttttggggg

SEQ ID NO: 259812 - DNA, 406 bp, Glycine max
cgtccgcttcaggtctctcatttctcttcttcactgagaaaaatccttcttcttgcatgctcctcgtttgtatctaaacgcgcgaaagagtagattataagggggtaagtgagaaagagagtaaaaacaaaattaaaacatgactatggaagagggcagggtcgagaacgaggactacacacaagatggtactgtcaacattaaagggaaacctattcttagatccaaaagtggtggttggaaagcttgctcctttgttgttgtatatgaagtattcgaaagaatggcttattatgggatatcatcaaatttgatcctttatcttacaacaaagcttcaccaaggcacagtatcctctgcaaacaatgtcaccaattgggttggcaccatttggatgacacccata

SEQ ID NO: 259813 - DNA, 252 bp, Glycine max
  unsure (1)..(252): unsure at all n locations
cacgcgtncgattgaatcttcgctatccttctttttttctacttgcactcgaatattcactgtggcagatggggggggttttctaaaaatctgtgccaggccatttgggatgatggtcaggattgcacttgctgaaaagggtatcaaatatgattccaaagaagaggacttgcataacaagacccctgtgctcctcaaaatgaaccctgttcacaagaaaatacctgctctcatccacaatggacaacccat

SEQ ID NO: 259814 - DNA, 452 bp, Glycine max
  unsure (1)..(452): unsure at all n locations
cacgcgtacgctctccccaacatggccgacganggcgtccttttgctgcaaggatctttcaacgaacacattggtgcttttagaaggttaggggtgcaaggcgtggagattcgaaagccagagcagcttaacacaattagttccctcattatccctggtggagaaagcaccaccatggctaagctcgccgagtatcacaacctgtttcctgctttgcgagagtttggacaaatgggaaagcctgtttggggaacctgtgcagggcttatattcttggcaaataaagctttatgacaaaagacttggggtcaatatttgggtggcggacttgattgtacaatgcatagaaattttctttggcagtcagatttaaagctttgaagcaaaactttcaatgcctgagctttgttttcaacgaaatgaggtcctgaaacattttgtggaattttatt

SEQ ID NO: 259815 - DNA, 453 bp, Glycine max
  unsure (1)..(453): unsure at all n locations
gacaattacggaacctgtattgatgtctggtcagtacggtgcatttttgctgagattcttggtagaaagccaggcttccctgggactgagtgtctcaaccagctgaaactaattataaacgttcttggaagccagcatgaatctcatcttgagtttattgataatgcaaaagcaaggaggtttatcaaatcactgccctatactaggggcagacacttctctcagctatacccacaagcagatccattagccataaatttgttgcaaaaaatgcttgtgttcgatccaaccaagaaaattactgtcttgtaagctctccaacacccgtatatggctagcctatatgatccaaagtgcgaccctnctgctcangttcccatcagtctcgacatagatgaacattggggagaaccgatgattatggaaatgttttggaatgagatgctacattat

SEQ ID NO: 259816 - DNA, 368 bp, Glycine max
  unsure (1)..(368): unsure at all n locations
cgggncgacccacgcgtccgcagacctctgatcctctcgccgccgcctgcctaatgccgccgtcgccgccgccgagcatggacacttgtcgcgagtgcaacatcgcaagatgcctgggatgcaactttttcccggaggagaaaaagaagcagaagagggccaagaagaagtacagaagcgtgaggcagaggccctggggaaagtgggccgcggagattcgtgaccctcgtcgtgctgcccgggtctggctcggcacgttcggaaccgccgaagatgccgcccgggcctacgacaaggccgcgattgagttccgcggcccacgggccaagctcaatttccccttggtggacgagtcgctcactttgcag

SEQ ID NO: 259817 - DNA, 467 bp, Glycine max
  unsure (1)..(467): unsure at all n locations
agctctaccgggcttgaattaccgggtcgacccacgcgtccgcccacgcgtccgattctccatacacacaacaaattagacactaccttgttcggacattccacggacacaaaataactattagcaatttggcatcatcaagaatgagttcaacaagccgtgcttggacttggaccgtggcagcaagtgttggagtggtggaggccttgaaggatcagggtatctgcaggtggaacagcgtgatgagatcagcacaacaacatgctaaacataatatgaggtctttgtctcagaccaagaagctttcttctcaaccatctgctatggcttcagccaaattgaaagatgagaaagctaagaagtcagaagagtctttgagaaccgntatgtatttgagttgctggggtcccaactaaacaaagatgcatagatatgcaattctcgaattctttttcttcttcttggaa

SEQ ID NO: 259818 - DNA, 351 bp, Glycine max
cggaattcccgggtcgacccacgcgtccgcccacgcgtccggaatatcaaattggtctcttgtcttcctcctcatctctacactactccacggagagcccagcctgtcaagcccaagcccaagcccaagcccaagcccgttcataaaatcctgctgcagcagcacccagtacccagccctatgcgtctgatccctatccgtctacgcctgcagcattcaacaggaccctcaccaactggttcagacagcagtctccctctgcctgaactgaacccaagcaaccaaaaccttggggggtaacggcaccaaatttttgggccggaaacccgaaaagccggttggactaaagga

SEQ ID NO: 259819 - DNA, 458 bp, Glycine max
cgtacgggcagatttcgtcagtgaagaacagattggttagatttaagaagcctttggcttgtttgcggatagggtgatgggtgcattactgtggaagaattggccactgttattcggtcattggatcagaaccccacagaagaagagctccaagacatgataaacgaggtcgatacagatggcaatggaaccattgaatttgttgagtttttgaacttaatggccaagaaaatgaaggaaactgatgcagaggaagatctcaaagaggctttcaaggtgtttgacaaggatcaaaatggctacatttcagcaagtgagttgaggcacattatgatcaatctgggtgaaaaactaactgatgaagaggtggagcagatgattaaagacgctgttttggatggtgatggtcaagttggctattatgagtttgtcaagatgatgatgatttttggatgaaa

SEQ ID NO: 259820 - DNA, 322 bp, Glycine max
ggaattcccgggtcgacccacgcgtccgggaaaaatggcacctttcgtttccctctctttgttgcttctctttctcaaccaccccctcctggcccgctcaaccaaccctgaagctagcaagcagacttaagcttggccttaatagttttgatttgatccaaataatttgcgtagggaacgctctgcatgctttgagaagcaggctttctgatcccaacaatatgttgcagagttgggacccaacactggttaatccctgtacttggtttcatgttacctgtgactccaacaatcatgtgattcgcttagacttgggcaactc

SEQ ID NO: 259821 - DNA, 187 bp, Glycine max
cctacgcgcacatgtcctgagtgaagaacagattgcttatatttaagaagcctttggcttgtttgacaaggatgtagatttttgcattactgtggaagaattggccactgttattcggtcattggatcataaccccacagaagaagagctccaagacatgattaacgaggtccatacacatggcaat

SEQ ID NO: 259822 - DNA, 289 bp, Glycine max
  unsure (1)..(289): unsure at all n locations
ccggaattcccgggtcgacccacgcgtccgtttctgagtttcttctatcctctctccgccatggttctctccaaaaccggcttcgaatccgacgtctctgtncactcaaccttcgcttctcgctatgtcagaacttcgcttccaggttcaagatggcggaggagtcgataccgaagaggcagcataccagatcatanacgacgagttgatgttggatgggaacccaaggttgaatttggcatcatttgtgacgactnggatggagccagagtgtgataaactcatcatg

SEQ ID NO: 259823 - DNA, 324 bp, Glycine max
  unsure (1)..(324): unsure at all n locations
aaccctatccacttctccgcatcacgattcaaatcttcgtgaagaccctttcaaataaaacgatcacatttgaaattgaatcttcggacaccatctacaactttaaagccaaaatccaagacaaagaaagcatccctcccgaccaacaactcctcatcttctccgggaaacaactttaagactgcctcaccctctcctactacaacatccaaaaagagtccacgcttcaccttgtcctccgncttcgtttcggctccaataatctcaagaaaaaaacctacaccaaacccaataaaatcaaacacaaacacaaaaaagtcaaac

SEQ ID NO: 259824 - DNA, 326 bp, Glycine max
  unsure (1)..(326): unsure at all n locations
cggtcctgaattcccgggtcgacccacgcgtnncgccacgccgtccgattttcccctttccctaagtcaaggggatccatggttcttcttcccaggtgttctaaaaaagcaaaatggggaacatttgatgcattggtgctggatatgtggggggtcctactatggcagtcattgcacttaagtgcccattcattgaagtcgctgctggtgatatctctaaatcccgcattgtagcctgtaacagcgaccagcttcctatctatgaacctggccttgatggtgttgtgaagcaatgccggggaaagacctcttcttcagcactgatg

SEQ ID NO: 259825 - DNA, 414 bp, Glycine max
  unsure (1)..(414): unsure at all n locations
cggtcctgaattcccgggtcgacccacgccgtccgtccagggtctaactttactgtttaacctcctgttttaaaaaatccagggttgttccatgctgtggcttcctctctctgaacccaaacaggcccttcaggcaaatggaaaaggcttctctgaattctctggcctncgcagctcatcaggcttccttcccttttctagaaaatcttcagaggatttccattctgtcattgccttccagacctatgcagttggaagcagtggaagatacaagaagggtgtgacagaagcaaaactgaaggttgccataaacggatttggaaagattggaaagaacttcttgaggtgctggcacggtcgcaaagactcccctcttgatgtcattgccatcaacgacaccggtggcgtgaaaca

SEQ ID NO: 259826 - DNA, 356 bp, Glycine max
gtcgcccagcgtcgttttgtctggtggcaggcttgaggtggaacctccctcaatttggatgccctggaccaagtgtcgaacccgtggcacgtgtcattctcggatgccagagccctccaaaacactgccttgaagacatggggaggccggccagagaacgtgaaagcagcacaagatgcactcgcattccgtgccaagtacaactcactcgctcagctttggaagtacactggttagggtggatccgagaagcaagaagaattgtcgtcaaagctactcctactaagatgtatgcagtgaatatgatacttgtaggcagcacaccagcagtacagtagtgttgacggacgatgaat

SEQ ID NO: 259827 - DNA, 438 bp, Glycine max
  unsure (1)..(438): unsure at all n locations
cggtctggaattcccgggtcgacccacgcgtgggccaggcgtccggaaaaatgatgggcatggatttgacggggagtaaatggcttgggttggggggggcggtttggatacaagcaatctccggcaacaactacactttctcgaattactcggacgctctgaaatccctcatgagcctaacccaaatcgagctcaacaatctgtccgtggccaatgatgttggcaagggctttgggcttctggctgggctggcctcagacaaattcccgacttgggccattctcctaattgggtccctncagggncttatcggctatggcgtncagtggctcgtcgtcagccagagaatccaaccccttccatactggcagatgtgcgtattcctctgcattggtggcaacagcactacctggatgaacaccgnncgtctagtcacat

SEQ ID NO: 259828 - DNA, 422 bp, Glycine max
ccggaattcccgggtcgacccacgcgtccgcccacgcgtccgagattccgcaacagagagtagaaaagatggcgcggttgatcacagtggtgtggtgcgcggtggcggtgctactgtgcgccgaggcgggcgcgtcgtgggtggaggaggcggcgaacccgatacgaatggtggcgttggtggaggccgaggtggctcgggtgatatggcagtgtcggagcgcgctgaagtttgctaggttcatgagcaggttcgggaagagttaccgaagcgaggaagagatgaaggagaggtacgagatattctcgcaaaacctgaggttcatccgctcccacaacaagaaccgtttgccctacactctgtctgataatcattttgctgattggacttgggaggagttcacaagacacagactaggcgct

SEQ ID NO: 259829 - DNA, 445 bp, Glycine max
aattcccgggtggacccacgcgtccgctagattcagccacagttggaaaaaaaaattaaaaagttgttcgagatggcacgtgctaggcaaactgctcgtaagtccacaggaggaaaggcacctaggaagcagctcgcaaccaaggctgcacgtaagtctgcaccaactactggtggtgtgaaaaagccacatcgttatcgtcctggtaccgttgctcttcgtgagattaggaaataccagaagagtaccgagcttttgatcaggaagctccccttccagaggctggttcgtgaaattgctcaggacttcaagactgatctgcgtttccagagccatgctgtgcttgcattgcaagaagctgctgaagcataccttgttggactctttgaggatactaatctgtgtgccattcacgctaagcgtgtaactattatgcccaaagata

SEQ ID NO: 259830 - DNA, 310 bp, Glycine max
  unsure (1)..(310): unsure at all n locations
ctgctctaccggtccggaattcccgggttttcatactacatgatgatatgctcgagctttattcttaaccattcccaaacggctggcgagtggacaatttatgcttggattcacagcaattgcaattcattatcagacagtgatcaacttcgtcctgtttcaataccagatatgcatccagccagtgcaggaattactgaaggtttttccatgtgtggaggtgactntgttgaagtttacagtgattcaagccaagttggtgcatgggatgcagttgtaactnggttctttatcgatacagctcataata

SEQ ID NO: 259831 - DNA, 355 bp, Glycine max
cgggtcgacccaggcgtacgcgcacgttagcacaaactatcatgggcacggcaactgcagctgccacctcgcccttcatggcggggcgtctcctggaggctcactccggagcggcgcgagtgcaccccccattcggcttcggcaagaaaaaggctgccgccccaatgaaagcctccaggggatcgggccgagacaccgacagacccctttggtatccggacgccaaaccgcccgaatacctcaacgggagtctcgcccgagactacggattcgatccgatcgggctatggaaaccccaggagtacctgcacttctagctggactccctagaccagaaccttgcgaaaaacgtggc

SEQ ID NO: 259832 - DNA, 454 bp, Glycine max
ccggaattcccgggtcgacccacgcgtccggtcccatagagttgttttggcaccgctgaccagacagaggtcttacgacaacgtcccacggccccatgccatcctctactactcccagagaacttccaacggaggccttctcattactgaagccactggcgtctctgacacggctcaaggctatccgcaaacccctggcatatggactaaagaccatgttcaagcttggaaacccattgtcgatgccgtccacgccaaaggcggtgttttcttctgtcagatttggcacgttggaagagtttcagattcagtttatcagccaaatggacaagcacccatatcttctacggacaagccactcacaccccaaattcgaaggaatggcattgatcaagtacaatttaccccttcaaggggattaaagaccgatgaaattccgcatattggaaatgac

SEQ ID NO: 259833 - DNA, 401 bp, Glycine max
  unsure (1)..(401): unsure at all n locations
aattcccgggtcgaccacgcgtccgctaattgcttaaacctaattctcatatctttatcgntcgattcttctcctcctaaagatgcagatcttcgtgaaaactttgaccggtaagaccatcacccttgaggtggagtcctcctacaccatcgatctctatgaaagctaatagtcaatgactggctagtatatcatcctattagtagagactgatctcctgggctatacagtttgacgttggttacactcaaggcgtctacttcttacagcgctttctcaccttcaaggtctctctcagatttaaacgtggaacgcatcacattgccatgcacacccatgactcgcaaggtacagtgacagctgctgtgacccctgttgaaaatggcacttctgacaagcag

SEQ ID NO: 259834 - DNA, 409 bp, Glycine max
aatacccgggtcgacccacgcgtccggtgatgggacatggccttcacagcctacaagtcttaattgctatgcgaggtttatggctacgtaaaattggtggaagaatggtgtactcaacatgctcaatgaatcctatttagaatgaagctgtggatgctgaagttttgcggaggtgtcgagggtctgtcaaacttggcgatgtttctagtgagctttcacaacttattcgtcagccaggtctcaagagatggaagatatatgacaagggcacttggttggtctcttataaagatgttcctaagtatcgtacaagtgtaattctttccagtatgtttccttctggcagaggtcatcatgatcttggtgatagtagttgtagtgttgacccaaaaggcattactaatggtat

SEQ ID NO: 259835 - DNA, 384 bp, Glycine max
aattcccgggtcgacccacgcgtccgggccatataattttttagtatttgaaataattttcgggatcatccacaagattgaggagacgctccatgtgggatggcacaagaaagaggagcacaatggagaacaccatggttagcactaaggtgaacacaaaggagaacaccatggtgagcacaaaggtgaacacaaaggacaacaacaccatggggagcacaatgagggacttttggataagatcaaggacaagatccatggtgatggccatgacaagggtgagaaaatgaagaagaaggacaagaagaagaatgagcatggacatgaccatcatgggcatagcagcagcagtgaaagtgattagatcttatatgataagcaagt

SEQ ID NO: 259836 - DNA, 371 bp, Glycine max
ctgaattcccgggtcgacccacgcgtccgaccaacacaagatgtttctccacattgtgttcctccttttccttctctcatccacttcccatgccactgtccaagacttctgtgtggcagacctcaaaggtgcagacacccctgcaggctacccctgcaagccacctgctaatgtcacttcagatgactttgtgtacactggcttagctgaagctgcaaatgtcacaaacataatcaatgctgctgtgaccccagcttttgttgctcaattcccaggtctcaatggccttgaactatctgcagcaaggttggaccttggtcctagtggtgttatcccactccacactcatccaggtgccaatgaactactca

SEQ ID NO: 259837 - DNA, 402 bp, Glycine max
aatccccgggccgaccgacgcgtgcgggttgataacacactgtggttggatctctactatagaagcaatatgtgctgcggtgccaatgcttacgacttctgtgtgggcagctctaataggtgcatgacacccctgcaggcgtatctccgcaagcgcacctgctaatgtcactgcagatgactcagtgtacactggcttagctgaagctgctgatgtcacagacataatcaatgctgctgtgaccccagcttctgatgctcaatttccaactctcaatggccttgaactatctgcaacaaggatagaccttggtcctaggggtgtcatcccactccacaatgatccaggatgcctatgaactactcattgtgctataaggtcacatacttgctggattcatat

SEQ ID NO: 259838 - DNA, 386 bp, Glycine max
  unsure (1)..(386): unsure at all n locations
cggaattcccgggtcgacccacgcgtccgcggacgcgtgggttgcaacaaaggagtatcgctctgttgttttcaaagaacctcgttttgttgaatatgtcagatgtgcaactcctgagttggagtatggaagaatgaacattggcagtcgtccatcaaagcgaaagccaagtggaggaattgaatcactacgtgctattccttggatttttgcatggacacaaacgaggtttcatttgccagtgtggcttggttttgggtcagcatttaagcatgtagttgagaaagatccgaagaatctccaaatgcttcaggacatgtacaatcaatggcctntcttcagggtcaccctggacttggttgagatggtgtttgctaagggagacc

SEQ ID NO: 259839 - DNA, 379 bp, Glycine max
attccggggtcgaccgacgcgtccgggttcataacacactgtggttggaactctactatagaagcaatatgtgctggggtgccaatgcttacatggccactatttgcagatcagtttttgaatgaaagtctagtggtgcatgtactaaaagttggattgaaggttggggtggaaattccacttacatggggtaaggaagtggaaattgctgtgcaagtgaagaagaaagatgttgaaagggcaatagcaaagttgatggatgagacaagcgaaagtgaagaaagaagaataagggtgagagagcttgctgagatggctaacagagccgtaaagaaaggggcttcatcatattctaatgtgaccttgcttatccaggata

SEQ ID NO: 259840 - DNA, 285 bp, Glycine max
ctacgcgtacgcgtgggttgcaacaaaggactatattctagtttttttagaaagaatcacatgttgaggaatgggttatatgtggcaactgccgagctggagtatcgaaacaagaacattggcagacattcatgaaagcgaaagccaagttgaggaattgaatcactacgtgctattccttggatttttgcatggacacaaaccaagattcatttgccagtgtggcttggctttgggtcaacatttaagcatgtagttgagaaagatcccaaaaaattcctaaat

SEQ ID NO: 259841 - DNA, 472 bp, Glycine max
  unsure (1)..(472): unsure at all n locations
cggaattcccgggtcgacccacgcgtccgcccacgcgtccggaaacaatggccaatgtttcaattccactcccacgaaacggtttctccaagcccaggtactcgacaaaacgcccatgtttcaccccttcagcttcaacactcagaatttcttgctctggagtggctgagtttgatggatctcatcagaaaaaaggaggtttgtttaatttcaatggaatcaagggcgtggcttgtggtattcttgcagcttgtgctgntacttctgctgcatttcctgttactgctgctactcagaggcttcccccattgtcaactgagcccaatcgctgtgagcgtgcatttgttggcaacacaattggtcaagcaaatggtgtatatgataaaccattagatctccggcaatgtgatttcacaaatgagaaaaccaaccttaaagggaagtccctgtctgctgcactcatgtcagatgc

SEQ ID NO: 259842 - DNA, 435 bp, Glycine max
  unsure (1)..(435): unsure at all n locations
gaattcccgggtcgacccacgcgtccggcacgaatatcttgttgtttggagcgatccgagaaaaactctgtaaacatgttggtttaccgggacctccttacaggtgatgagcttctctctgactccttccgttacaagggaattgagaatggaatgctgtgggaagtttaagggaaatgggttgttaaaagagcagttgatgtagacattggtgcaaacccttctgctgagggtggaagagaagatgaaggagttgatgatgcagctgttaaggttgttgacattgttgacacattcagacttcangagcaacccgcattcgataagaagcagtttgttaccttcatgaagaggtttatcaagaatttgacttccaagctcgatgcagagcaacaggagtttgttaggaagcacatcgagggagcaactaaatac

SEQ ID NO: 259843 - DNA, 323 bp, Glycine max
gaattctccgggtcgacccacgcgtccgagattgtaaagaaatataactaatattccttttaataatcaaaaagaatattaaattcaaatgaattgtagatagagaaaagacttaaaaaggaggatttgaaatgcgagatctaaaaacatatgtttacgtggcaccagtagtaagtactctatggttcggggctctggcaggactcttgatagagatcaatcgtgcttgtccagatgcattgatatgtccctatttttcattctagagattgacaccgaaaggggtgaagaagattatagatccaattaagtgttaaatatat

SEQ ID NO: 259844 - DNA, 377 bp, Glycine max
ccggaattcccgggtcgacccacgcgtccgcttgtttgcaaggcacagaagcaagaggatattgatgtcagcccaatctctcgccggttagctctaaccgtgctcattggtgctgctgctgttggctccaaagtccaacctgctgatgcagcttatggggaagctgccaatgtgtttggaaagccaaagacagacacagatttcctgccatacaatggagatggattcaaactatcgattccctcaaagtggaacccaagcaaagaggttgagtacacaggtcaggttgttagatatgaggataactttgattcaaccaccaacgtggttgtcaccatcactccgactgataagaagtctatcactgactatggttc

SEQ ID NO: 259845 - DNA, 354 bp, Glycine max
  unsure (1)..(354): unsure at all n locations
ccggtttggaattcccgggtcgaccgacgcgtccgcccacgcgtccggaagaaaccctagccactctcccggcgtcacgatgcagatcttcgtgagaccctaacgggtaaaacgatcacgttggaggtggagtcttcggacaccatcgacaacgtgaaggccaagatccaggacaaggaaggcatccctccggaccagcagcgcctcatcttcgccgggaagcagctggaggacggccgcaccctcgccgactacaacatccagaaggagtccacgcttcacctcgtcctccgncttcgtggcggcgccaagaagcgcaagaagaagacctacaccaagcccaagaagatcaag

SEQ ID NO: 259846 - DNA, 293 bp, Glycine max
cgcacaacccccgtttgacgtgtaagcagcgctttcatatctgcatcggcgcctcgcgtgaagggcatggtctccacaccagcgcgaatgagactatcattcaccgcgacgtgaaaactaccaacattttgttggatgataagtgggtggccaatgtttctgacttcgggctttcgagaatcgggcccacgggcaactccaaagcccacgtcagcaccttttttaaaggcagcattgggtatttggacccggagtattataaacgacagcgtttaacttagaaatcttacgtg

SEQ ID NO: 259847 - DNA, 397 bp, Glycine max
  unsure (1)..(397): unsure at all n locations
cggtctctggaattcccgtggtcgactccacgcctngtccgctttaatagttacccatagttttgtcatctgttgttaccttaactctacatatggggctgcttcaacgaatgacgtctcgtcttcatcagtcatctggcttggcgcaagctatcgaagcttgccgccctccaccccatgagcttggtgttggaagggttagcatgaggaaaacagcctccaagactgtttcctcaggaagcccatggtacggcccagaccgtgtcaagtacttgggcccattctctggtgagcccccatcctatctcactggtgaattcccaggtgactatggttgggacactgctgggctttctgctgacccataaacttttgccaaaaaccgtgaactgaaagt

SEQ ID NO: 259848 - DNA, 402 bp, Glycine max
  unsure (1)..(402): unsure at all n locations
cggaattctccgggtcgacccacgcgtccggacaacccccctttgacgtggaagcagcgcttgcagatctgcatcggcgccgcgcgtggactgcatgacctccacaccggcgcgaagcacacgatcatccaccgcgacgtgaaaactaccaacattttgttggatgataagtgggtggccaaggtttcggacttcgggctttcgagaatcgggcccacgggcaacgccaaggcccacgtcagcaccgttgtgaaaggcagcattgngtatttggacccggagtattataaacgacagcgtttaactgagatatctgacgtgtattcctttggagtgngtgctgttgagttactctgcgctcgttcgnctctgatcagaactgcggagaagaacaggtgtcgc

SEQ ID NO: 259849 - DNA, 364 bp, Glycine max
ggaattcccgggtcgacccacgcgtccggcaaaacaatgaaagtacaattcaccaagcgtccctatgcacaaccttatggtgtatatacatggttaacggatattaaagacacctctaaagaaggatatagttttgaagagatatgcatcaagaaagaagcgtttgagggagaagagaagttttgtgcaaaatccttgggaacagtaattggttttgccatttcaaagctgggaaagaacattcaagtactttcaagttcctttgtcaataagcaagagcaatacactgtggaaggagtgcagaatcttggagacaaagcagtgatgtgtcatgggctaaatttcagaactgcagtattttact

SEQ ID NO: 259850 - DNA, 431 bp, Glycine max
  unsure (1)..(431): unsure at all n locations
cggaattcccgggtcgacccacgcgtccgtttacttgtcaggcggagcgggaattgcagccctggattgccaaggatgatgattcaggtcagaagatgtggagaatcaatcagcggattgtaaaattgattgtggaacttatgaggaatcatgagactgcagaatcattggtaattgtggcaagttcatcagatttactactgcgagccacagatgggatgctggttgatggagaagcttgcactttaccacagctggagctattggaagcaacagctagagcagttcagccagtgctcgagtttggagaatctggattggctgtggcagatggcctttcaaaccttttaaagtgtcgcctctcagctacaattagatgtctttctcatccaagtgcacatgtncgagctctgagtatatcagttcttcgt

SEQ ID NO: 259851 - DNA, 336 bp, Glycine max
atacccgggtcgaccgacgcgtccgcccacgcgtactgattagtaccacttatatttataaatagaataactgaatatcgggtagcgcaaaataaagatttaaccaaatgcaattcatatgaaaaaagccaattaattctttacaaagaacaacaagtaaacgcattataaaaaaaaattagaaaacaatatagatacgatcttttatcctataattttatcaattatgcagataagaaagactcatatatttatggatatagatccctatttcaaggtaaataaaaccaagtgatttcttctaattacaacacgtataaaaaagaattattggat

SEQ ID NO: 259852 - DNA, 360 bp, Glycine max
acttaacagaacgtgcactcaatgtctcaagaagtcctgcaattcgtgcattacgtgctcagaccgataaaagggactatgccattcaaatgaaaagtgtactagaaagcactccaaacctttctattcgagaggctatggtcacagatattttactagggaagaatgataacgtggaaggtgtttgtacattctttggaatgaaattctatgctccgtctgttattctcaccacaaggacttttatgagtggtaaaatttgggtcggtagaacttctatgcctgcaagaaaagcttgccagtctgcttcacttggattaacagaaaacttacaacgactttggtttgaaaacttatcgt

SEQ ID NO: 259853 - DNA, 432 bp, Glycine max
gacccacgcgtgcgctttggaccagcataacgagcccatttcgcttttaggcaagcaactcaagcacagggtcaagcatttatccaaaattggaggtataggaactgttccaacatgacatgttcataccggtatctagaagcctggaatgctcgtgacttttgcaccaactggactgacaactgaagtcaagactgtggagatgcaccatgaatctcttacagaggcacatcctggtgacaatgtgggattcaatgttaagaatgttgctgttaaggatttgaagcgttgttatgttgcctcaaactcaaatgatgaccctgcataggaggctgctaactttacagcccaagtcatcatcatgaaccaccctgttcacatcggaaatgcttatacccctgtcctctactgcaacacttctaacattgattt

SEQ ID NO: 259854 - DNA, 388 bp, Glycine max
  unsure (1)..(388): unsure at all n locations
aatttccgggtcgacccacgcgtccgcccacgcgtccggtttcctacaattgctctcttcccaaatcgccaccaaaacaaaataaaagcaatagtaataaagaaaattacttatagatttttgtgatacgcctgcagttgttgttctcagtctaagatcaccgtcgaggtcttccccattcaatcaaagcacaaaaatggaggtgactgttttcactcctgcactggaaggaattaagcttgtaaaatcagagcaaggagaaattttgacccagcctttcttggatgcttgcaagcatatacttcctgttatagataagtttggagctgctatggcccttgttaaatctgacattggtggtaacatatcgagnatggaatctaagtac

SEQ ID NO: 259855 - DNA, 499 bp, Glycine max
cggtccggaattcccgggtcgagccaacgcgtccgcactgataacacaaagcacaaagcaaagctcatccttgagttaaaaaatggcagcagcttcgtccatggctctctcatccccatccttggctggcaaggccgtgaagctgggcccatcagccccagaagtgggaagggtgagcatgaggaagaccgtcaccaagcaggtctcctcaggaagcccatggtacggcccagaccgagtcaagtacttgggcccattctctggcgagcccccgtcctacctaaccggtgagttcccaggcgactacggctgggacactgctgggctttccgcagacccagaaaccttcgccaagaaccgtgaactcgaagtgatccactccaagtgggccatgctcggagccttgggctgcgtcttcccggagttgctgtcccgcaacggggtgaagttcggagaagccgtgtggttcaaggccgggtcccagatcttcagcgagggt

SEQ ID NO: 259856 - DNA, 417 bp, Glycine max
gaattcccgggtcgacccacgcgtccgctcacgcgttccgtgagcgctgaagttaaatttcatatcaaacaaaacaaccacaacgctagtgtaacaaactatcaaacgtataattaaacaaacgttagagtaccataaacataatcataccaacaaaacgcataccatccaattatacactttcaaatactttcaaatttatattggcaaaccccacccccctacgacctccagtccttcaaattccagcccatcaaagaatccatcgtgtcacgggaaatgacacgccgctacatgaccgacatgataacctacgccgacaccgacgtcgtaatcgtcagagccggttcggccgggctctcctgcgcgtacgagctcatcaagaaccccgtcttgagcgtggccatagtctagcag

SEQ ID NO: 259857 - DNA, 382 bp, Glycine max
aatttccgggtcgacccacgcgtccggttcgatttaagagtgaggttgtggcttgtggagttgtatatgctgctgctcgcaggttcgaagtacgccttcctgagaacccaccatggtggaaggcatttgatggggagaagtctgggattgatgaagtatgcagggttctggctcacctttatagccttccaaaggcacaatatataccagtctgcaaggatggggactttacattctccaacaaatcatcggaatcaaagtctcaatcaacacccaaagatgttccgcaaaatagtcccccagctgatactgacaactcagtgccaaagggaactcaaggagaagctaatattgaatccaatggtagcaagggtgcaattgt

SEQ ID NO: 259858 - DNA, 436 bp, Glycine max
  unsure (1)..(436): unsure at all n locations
ctgaatttccgggtcgacccacgcgtccgcaagattttgaaggttgcagtgtaccctggaaatgtcttggccttgcacatgtctaaaccacaaggatttaagtactctagtggacagtatatttttgttaattgcccagatgtctctccttttcaatggcatcctttctctattacatcagccccaggagatgattatgtaagcgttcacattaggactttgggtgattggacatcacaactgaaagctgtttttgctaaggcatgtcaaccagcaagtggtgaccagagtggtcttctacgagctgatatgttacaaggcaacaacataccaaggatgccaaagctcgtgatcgatggtccttattgagctncagcacaagactacagaaactacgaagtaatccttctcgtgggactaggaattggtgccaccc

SEQ ID NO: 259859 - DNA, 411 bp, Glycine max
  unsure (1)..(411): unsure at all n locations
aattcccgggtcgacccacgcgtccgcccacgcgtccgggagcgtggaacctctctctctctctctctctctctgcggaaaccggaagatctcanttctctgatcagatccatccgacgtcgtttcagtgataatggctccgttcagcggcgatgagacggcaccgtttttcggcttccttggagccgcagcttgcctcggcttctcctgtatgggagctgcctatggcacagcgaagagtggcgttggcgtggcttcgatgggtgtgattagaccagagctggtgatgaagtctattgtccctgttgatatggctggagttttgggtatttatggccttattattgctggtattatcaggacttgcattaattccaaggccaaatcttattacctctttgatgggtatgc

SEQ ID NO: 259860 - DNA, 196 bp, Glycine max
  unsure (1)..(196): unsure at all n locations
cgggtcagcctgtntgtttcacttatgaggtcaccttttaggaaaagtgccttcaagtggccatggaaatgggatgctaacttgaagatggagggagctaaagtgcattggttttcaatccttaattcgctaatggggatcacttttcttgctggcattgttcttgtgatcttcctaaggactgtttggagggatc

SEQ ID NO: 259861 - DNA, 453 bp, Glycine max
accggtctggaatacccggcccgacccacgcgtccgcccacgcgtccgggaaaaagttccatttttagagttcttagaggactatggccaattgcgagtggaagactctctagaccatctgaagttgtggatgaagaggatggatctggttgtggcatcttctatgttcctcaacggccatatacatgtttgggaaccctaagggatcaaattatatatcccctttcctgtgaggaagcagaggttaaagtactgaagatgtatggaaaaggtaaatatcttgggtgggagaaataaggcaggccttagaaatgcgtaaaaatgaagtttctgatcataaattaacataagcaagttggtaaatccacttagattctctattgaccaataattttggattattaccatggttaaagtgagtaatttgaagtctagatgcaatgaactactctt

SEQ ID NO: 259862 - DNA, 384 bp, Glycine max
  unsure (1)..(384): unsure at all n locations
accggnctggaaaacccggctcgacccacgcgtccgcccacgcgtccggcaagatggatttggtttcagagaaagagcatgaagctgcatttgcgggggcctcactctccctctctctccccaccattttccccttcgtccaacccaagaatatcccatcaaccacccttcaaccaaccaagctcaaagtcccaacccaagcctcatccctcacacacctttctctctccaccaccactcctcctccttccaaaacctccttcaaatccaccgtcttcgccaaccccctccacgcccctctctccctcgctccccaccgcccccgcgaccctttcaacgccgccgcccttcgccgcgccgccgtcgtttggttccgcaacgacc

SEQ ID NO: 259863 - DNA, 239 bp, Glycine max
  unsure (1)..(239): unsure at all n locations
cggtcgacccacgcgtccgcaacgttttttatttcaatataataaatnctatcttgcatcaaaaggatctttcttattcgtngaatatatcaacaaaaagattgatctctaaaaaaattacttcatcttattaaaaaatcgttattgtatacacattttattatcaaaaacatatataaaacttcttcttttaaaataataaaaaacgaaattattcaatttaaacatacaaactctac

SEQ ID NO: 259864 - DNA, 418 bp, Glycine max
ccggccgaattcccgggtcgacccacgcgtccggtcccattggaagagtcggaagcggaggggttgggagaggaagaaggaacatgtcacgcggtagagatgggcgttgttgttgttggtgtgcccacccatccccaatccaaacactcttctcttagtaccctaatctacttattattatcacaacccttccatcttcttcttcttcaatccatgccggtcaacgccagctggtgctgagggtcaatcgaggtcttcctttctcaatggggagcgggagcagaagctactcggccaaccccgccgactacaagcttctagaagaagtcggttacggcgccagcgccaccgtgtaccgtgcaatctacctcccttacaacgaagaggtcgccgtgaagtgcctggatctggatcgctg

SEQ ID NO: 259865 - DNA, 453 bp, Glycine max
accggttcggaattcccgggccgacccacgcgtccgaaagattttatccaattgaaattttaaaaatgactgggataaacttaagaattcaatggtggaaattgaataagtaaacaatttaattggattggtcgaatggtatcaaaaaaatggagtactaactcccatttcttatttattattgaattaaccgatcaacttgctttgttatcgaacatttctttttgatttcaaaaattttccggaaaaaatttgaatctatttttatatgcgaatcaatcctactacttctcgtcctgaggactctgcgcttgaaaaaaaaaaatctgggacgaatcgcccacataattggaccggtactaaatgtagcttattccccaagtaagatgcctaatatttacaacgctctgatagttaagggtcgagatactgttggtcaacaaattaatgtga

SEQ ID NO: 259866 - DNA, 403 bp, Glycine max
  unsure (1)..(403): unsure at all n locations
ccggctcgaattcccgggtcgccnacgcgtccggcgatggcaatggcgcttcgcaggctttcatcttcaattgacaagcctctgcgccctctcgtcaatgccggttccctctactacaagtcgtctttgcctgatgaagctgtttacgacaaggagcgacccggagttacatggccgaagcagttgaatgctccacttgaggtcgtggatcctgagattgctgatattattgagcttgagaaagctaggcaatggaaggggctagaattgataccgtcagagaatttcacctctgtgtctgtgatgcaagcggttggatcggttatgaccaacaaatacagtgaggggtaccctggtgcaagatattatggtggaaatgagtatattgacatggctgaaacac

SEQ ID NO: 259867 - DNA, 242 bp, Glycine max
  unsure (1)..(242): unsure at all n locations
gacccacgcgaccgacgaaacaaaccaaggctgaaaacaacaatgtttacaacgcgaagcatnactaccctcggtcgattttcaaacgaataccgcccacccaatcctacaacttggaatctaaccatctccaaaacaatctcaagggactacacctcaactctgttagcctcacgtaaaacaacaccatgaacaatccctatctcacgatgcactctgacaaaacctaaaacaatgcctat

SEQ ID NO: 259868 - DNA, 419 bp, Glycine max
ccggttcggaatacccggcgcgacccacgcgtccgcccacgcgtccggcaagcgcttctcctctttgtgttctggctatgcttcttggcaagagtgagatcggacgaggattgcgtgtacacggtgtacgttcggacgggttcgatcatcaagggaggcaccgattcagtaattggtctgaagctatacgacaagtccggctacggcatatacatcaccaacctcgaggcatggggcgggttaatggatccgggtcacaactactacgagcggggcaacctctacatattcagtggtagaggcccttgcttggaagcacccgtttgcgaggccaacctaacttctgacgggtcggtgccccatcacggctggtacgttaattacgtcgaggtcaccaccactggggtccacgcgccttg

SEQ ID NO: 259869 - DNA, 416 bp, Glycine max
  unsure (1)..(416): unsure at all n locations
ccggncctgaancccgggtcgacccacgcgtccggttcatttcttataacaactctcatattaatccactgttgaatgaaaaccttgggaataggagaaggccttgcaaacattctaagaagaaacatgatctctttgaatgtctccctgacgatctccttgtccttattctttctaagctcagctccaccgcttcttctccttctgatttcatcaacatcatcttaacatgcaagaggttaaaccggttaggcctgcaccgtcttgtgttatccaaagctgcctctaaactattcgccataaaaccgaaaaattggtcggaatatgctcactcttttctcaaacactgcgctaacgccggtaacgtggatgcctgttacactctcggaatgatccgattttactgtttgaaaaat

SEQ ID NO: 259870 - DNA, 461 bp, Glycine max
ccggctggaattcccgggtcgacccacgcgtccgctttggtcgaaaaatctggctcggacattgcagtttaaggcactcctacaagcaaaagaggatttaaaggaagtggataaagaaattacaggtggtgaactagctgatgcaacaaacatgagtattattcaagtaaggaaagctatagaggttggtcgagctgcgagaaacaaactcataaagcacaatctccggcttgtattgttcgtgatcaacaaatattttcaagattttgcaagtggcccgaggtttcaagatctttgtcaggcaggagttaagggacttatcacagcaattgatcgttttgagccaaaaagaagacttcagctatctacatacagtttattttggataagacattctatcgttcgttccataaccctctcaagcttcacacgtgttccttttggacttgaaagggttagag

SEQ ID NO: 259871 - DNA, 418 bp, Glycine max
  unsure (1)..(418): unsure at all n locations
ccggntcggaaaacccgggccgacccacgcgtccgaaaaaaatactactaaagagatgagtttttcaggttttctttctcttcaatcaatgtcggctacctgcggcttcttcttcttctccttcacccttctcttctccttcttctccttcctcgtcttcatctccaggatgaagccctggtgtaactgcgatctttgcaagagctacttgacggtgagttggctgaaaaagttccccaatctctgcgactggtacactcatctcttgcgtaaatccccaaccggcaccatccacgttcacgtgctggggaacaccatcacctcgaatccccacaacgtggagcacattctcaagacgaatttccaaaactaccccaagggaaaacccttctccaccatcctcggcgatcttttggga

SEQ ID NO: 259872 - DNA, 418 bp, Glycine max
  unsure (1)..(418): unsure at all n locations
ccggnctggaanncccgggtcgacccacgcgtccgcacagagcacatttcaagatgagaagcatgtggaatttgactgttgcatgaaaccagaggagacacaagcatgtgctatgtacaaaatttgcagttgcaagtgttgtggagagaaggcagatgacacagactgtttggtttgtgattcatgtgaagagatataccatgtgtcctgtattgagcctgcagtgaaagaaataatacctcacaaaagctggtattgagccaattgtactgctaatgtgattgaatctctccatgagaattgtgtgctatgtgaaaggttaaatgatgcaaagaccctggatgatgtaattggtgatggaagctttcctacaattgaagaaacacaaaatgaatttgaagagaattcaaattgcacc

SEQ ID NO: 259873 - DNA, 377 bp, Glycine max
  unsure (1)..(377): unsure at all n locations
ccggnccggaatacccgggtcgacccacgcgtccgcttctccattggttcttcatctgcatgcacacacttgcatagttttggaaaccaagaatgtttgaagggtagcatcaacaagaagttctggaaatggagatcaccaatgtcagcgagtatgaagctattgcaaagcagaagttgccaaagatggtgtttgactactacgcatctggtgcagaggaccagtggactctgcaggagaacagaaatgccttttccagaattttgtttcggccacgtattcttattgatgtgagcaagatagacatcacaactactgtcctgggcttcaaaatatccatgccaatcatgcttgccccaacagccatgcagaaaatg

SEQ ID NO: 259874 - DNA, 440 bp, Glycine max
cgggtcgacccacgcgtccgcagaattctcattgcttctatcatggaggagtacaataaggctgcatgggaggagcttatggatagagttgagcaaactggagttgatgcatttgaaataaatttctcatgtcctcacggtatgccagaacgcaaaatgggtgctgctgatgggcaagattgtgctcttctggaagaggtttgtggatggataaacgctaaagccacaattcctgtttgggctaagatgactcccaacataactgatatttcacagccagcaaggattgctctaagttcaggatgtgagggagtatctgccataaatacaatcatgagcgtcatgggaatcaacctcaatacattacgtcccgagccttgcgttgaggggtacttaacttctgggggttattctgcaaaggcagttcattccataacact

SEQ ID NO: 259875 - DNA, 417 bp, Glycine max
  unsure (1)..(417): unsure at all n locations
ccggccggaancccggtcgacccacgcgtccgcnacgcgtccgattggtggtaatggcagcgtcactacaagcagcagctactttcatgcggcccaccaagttgagcaggagcaacactttgcagcaaaagtctactcagtccatttccaaggcttttggtttggaacctgttggagctaaaaaggtcacatgctcccttcaggctgatcttaaggacttggctcacaagtgtgttgatgctaccaaaattgcaggattcgcccttgccacctctgccctcgttgtctctggggcaagtgctgaaggtgttccaaagaggctaaccttcgacgaaatccagagcaagacctacttggaagtgaaggggacaggaacagcaaaccagtgcccaacaattgatggtggattggactcat

SEQ ID NO: 259876 - DNA, 374 bp, Glycine max
ccgggtcgacccacgcgtccgaagaagtccaagcgccaactcaaacgcgaacgtcgtctggaacaaaagtcagcacgaaacggtgtgtcccgaaattgccaaaacaggggatgttagttcatgtccttataaagacaagtgtcgtttcagccatgatttggaagccttcaaggcacagaaacctgctgatctagaggggcaatgtcctttctttaaatctggaggcgcttgcccatatggtttagggtgtagattttcgagtacgcatgaagatggtgtgccttctgccaatctgaatggtcttaaaaataattccgaggtgaatgggttgagcaaacatgttcaaaagcttttgtggaaaaataagatgagct

SEQ ID NO: 259877 - DNA, 459 bp, Glycine max
  unsure (1)..(459): unsure at all n locations
ccggncttgaatacccgggtcgacccacgcgtccggggagtgacgccaaaccaccatgttgctgccattgtggctgctgcattttatgcaatttggaatctcttctcaggatttatcgtcgtaagacctaaaatgcccgtgtggtggagatggtactattgggcatgtcctgtggcttggaccttgtatggattgattgcatctcagtttggagatataactgaaagaatgccgggtgaagataacaagatggtgaaagaattcatagaagactattttggtttcaaacatgacttcgttggaatttgtgctgttgtggttgctggcatcgccgttgcctttgcattaatctttggtgctgcaatcaagacctttaacttccaaaagagatagatggatagattgaactctttctccaacgtcaaagattctttatattttctccctttttcttttttt

SEQ ID NO: 259878 - DNA, 402 bp, Glycine max
gtttggaaaacccgggccgacccacgcgtccgggctgactgaatccctctcaaacttgcatttaacatttatttgctcttatacaaaagcgtgcaagtgagtagttcactgcaagctcaacatattgaatccagttccagggaagaactccatacaattattctttaatagaaaaattgactgtgacttatctatggactacacgattcttaaattctacgatgatctcaaaccgtcacagaggaccttcaacttttcttttcttcaacctgtcaaatatcatccgtctcaacgccttttcgacaacacagccatcgatttcgagttccaatccacccatgacgccggcacggtgcctcccaaaccgacggctcctgtcagaactaccgcggtccatttact

SEQ ID NO: 259879 - DNA, 368 bp, Glycine max
cggtctggaattcccgggccgaccgacgcgtacgtggtttttgagcagaagcagttaaaagagattgggattcagcgaagatgacatcggttggtgtggcaccaacttcggggttgagagaagccactgggcatggagcagcatgtgttgatagattgccagacgagatgaacgatatgaaaattacggatgatagagaaatggaagccacagttgttgatggcaatggaacggagacaggacatatcattgtgactaccattgggggtagaaatggtcagcccacgctgactataaactacatggcacagcgcgttgtacggcatggatcatttttagttgtcttccagtctatgtgcatgtaatct

SEQ ID NO: 259880 - DNA, 463 bp, Glycine max
gaattcccgggtcgacccacgcgtccgaaccaaactcgccaaaactagggttttgcattgatggcactgtgcaaccgcgtcagatcgggaatctctctcttcaccaaatccacgttccttacttcccagcgatccagtctccaacgatccctcgttgcccctttcatttccctcgcctccagaaattacgccaacgtgccggggcaaaaggaaaccaaagttaaggtccctctggctttgtttggaggttcaggaaactatgcctctgctttgtatattgcatctgtgaaagccaatgcagtggaaaaggttgagactgagcttctgcaatttgttgaggcagtaaagaatagtcccatattttcacagtttataagggacttgtctgtggctaaggatgttagagtgaaagttatccaggatatttgtggggaagccaagttttcggatgttacaaagaact

SEQ ID NO: 259881 - DNA, 462 bp, Glycine max
aattcccgggccgaccgacgcgtccgacgcccttagcagaatggagactaatccccgtacgatccgcagcctagtctcgaagctgaggtccgtttccgaagccggccgcgtcgacgccctctcccaactccgcctcatgtccaaacagtcccccgaaacccgccccctcatcgccgacgccggcgcaatccccttcgtcgcagaaaccctctattgctcttcgcaccccccccaagaaaacgccgctgccacactcctgaacctcagcatcacccaaaaggagcccctcatgtcgacacgtggcgtcctcgacgccatcgctcacgtgatctctcaccacaacaccaccttctcccccgcggcggtccagtccgacgtcgccaccatccacagcctcctctactacgtggactcctaccgccccgtctgccggtccaagcgcgagactggctactcccttat

SEQ ID NO: 259882 - DNA, 482 bp, Glycine max
ttcccgggtcgacccacgcgtccgcccacgcgtccgcccacgcgtccgcccacgcgtccgcccacgcgtccgcggacgcgtgggttcacctcacaacttcatcaaaccaaaaaacacaacaaaagaaagaaagaaagaaacaaagagttccttgctttgtagtaagatatatcatcaaaaatggttttgtcttggactagaagaaacgttttccgccgtgcaaagaaggagaaggaacaaagtcaactattagaagttgaggttgtgattcccaaccactttcgctgtccggtgagtttggagctgatgacagatccggtgactttatcaaccggcattacctacgaccgtgtgagcatcgagaagtggatcgagggagaaaacagaacctgccccgtcaccaaccaggtgctgacaaccttcgacctcatccccaaccatgccattcgcatgatgattcaggattggtgcgtccaaaacag

SEQ ID NO: 259883 - DNA, 486 bp, Glycine max
gaattcccgggtcgacccacgcgtccggctagcaccacattcacctgaggcttccaaagcaatggcttcccttgcagcatccactgctgctgcttcccttggcatgtcagaaatgcttggaaaccccatcaacttcagtggtgccacaaggccagctccatctgcttctagtcctgcctccttcaagactgtggctcttttctccaaaaagaaggctacaccaacacctccaaaaaaagctgctgctgctgctcctgccaatgatgagcttgccaagtggtatggtcctgacagaaggatcttcttgcctgagggtctcttggaccgatccgaaatcccagagtacttgaccggagaagtccctggagactatggttatgacccatttggtcttagcaagaagccagaagactttgccaaatatcaggcatttgagttgattcatgccagatgggcaatgcttggtgctgctggattcatcattcc

SEQ ID NO: 259884 - DNA, 480 bp, Glycine max
gaattcccgggtcgacccacgcgtccgacttggcaaccatccctatcaccggcactggtatcaaccctgctcgtagtcttggtgctgctatcatcttcaacaaggaccttggttgggatgatcactggatcttctgggtgggacctttcattggtgctgcacttgcagcactctaccaccaggtcgtaatcagggccattcccttcaagtccaagtgattcaatcaaaccgttcatgcttaatcaagttgggaacaacaaaaaaaatcaaaacaatgtttctgggtttcggtttcatttcatcaagatgatctgtttatctttttttttttaattttaatttaaagtctttgtattttgtatgtaaagatgtaaaattatgattattaggtggtgcatgtgttgcgtcatgggccaatgttatcctctgcttttaagttggaagaggcccagctcacgtgtgatgtacggctgtgattgt

SEQ ID NO: 259885 - DNA, 480 bp, Glycine max
gaattcccgggtcgacccacgcgtccgcccacgcgtccgcacaacgtcaagccaccaaggacgctggtgtcatttctgggctcaacgtgatgcgaattatcaacgagcctaccgcggctgccattgcttatgggctcgacaaaaaggccactagctctggggagaagaatgttctcatttttgatctcggtggtgggacttttgatgtctctcttctcaccatcgaggagggtattttcgaggtgaaggccactgctggtgatactcacttgggaggtgaagattttgataacagaatggtgaaccattttgttcaggaattcaagaggaagaacaagaaggatattagtggaaatgccagagctctgaggaggttgagaacagcatgtgagcgggcaaagaggactctctcttccactgctcaaaccaccatagagattgattccttgtacgagggtattgacttctacacaaccatta

SEQ ID NO: 259886 - DNA, 410 bp, Glycine max
gacccacgcgtccgaccaggcgtccgcacaccgtaaagccaccatttacgctggtgccatttgtggtctaaacgaggatcctaatcatcagcgagcctaccgcatgctgacatagctaatggactcgacaaaacggccactagctctggggagaacaatgctctgacttttgatctccgtggaggaactgtcgaagtctctctctctcaccatccaggagggtaaatactaggtcaaggccactgctcatgatactcactcgcgaagcgactattttgacaacagaatggataaccattatgatcatgaattcatgaggaaaaacatgatcgaaattagtggaaatgccagagctccgatgaggttgagaacagcatgtgagccgccaaagaagactctttctttcactg

SEQ ID NO: 259887 - DNA, 264 bp, Glycine max
gaattcccgggtcgacccacgcgttcgctgagtccgactcgacagtgatcgttcttcctttattccacgtgcacggtttgatcgcggggctcctgagttcgctcggcaccgtatctgatggtggcgctgccggcggctgctagattctccgcctcgtcattctggaacgacatgataaaatacagcgccacttggtacacactggttcctacaatacaccagatcatactggaccgtcactcgaacagccccgaaccggtttac

SEQ ID NO: 259888 - DNA, 174 bp, Glycine max
cgtacgtaagcggtgagatttgcggatctgtgaaatggcggattcttttcgggaggagaacgtttggattctggaattttcggagcatgccgtgcgttactaggagatggttgtgttcatggagaatgttgcaaagactgtggatgttgaggagttgacagttgtcgagaggaa

SEQ ID NO: 259889 - DNA, 470 bp, Glycine max
  unsure (1)..(470): unsure at all n locations
gaattcccgggtcgacccacgcgtccggngtttgttcaggctgcaagttttggaggatccaatattgatccaacggcttgngaggacaagaagtgccctggtgaatctcgtttccctgctcaggtatatatcatctcatctccaatcaaattaattttattatatctatgcacaaattatgctaatattaattttataaatttaattaaaatgtactgatgctgtaaaagtaaagttttatattgtccttcaaagtaaagttttatattgtccttcagtcaattgatatatcacatatcaattgaatgatttctgattaaatggcaatattgacggtacatgatgattaaactctaattgtattattacttgattatgttataaacttatgaattttgcatacatgatggttacaggttcaagtgattactaggaaagtttgtgagccactagaagaagattcctttaga

SEQ ID NO: 259890 - DNA, 271 bp, Glycine max
aattcccgggtcgacccacgcgtccgctcacgcgtccgcacgacgggaagccaccaacgacgctggtgtcatacgggggctcaacgtgatgcgaataatcaacgagcctaacggggctgacatagcatatgcgctcgacgcaagggccactagctcaggggagacgaatgttctaacttgtgatctccatggagggactccagaagtgtatgtactgaccatgcatgagagtatattcgaagtcaatgccactgctggtgacactcacttg

SEQ ID NO: 259891 - DNA, 399 bp, Glycine max
ccgggccggcggacgcgcacgctcagagccaccgcggacgctgcaggcaaacttaccctcaatgcggggcgaactatctgcgagcctaccgcggctgccatggcttatgagctcgacacaaaggccactgcctctggggcgacgaatgctctcattttggatctccgtggaggcacttttgatgtctctgttctcaccatagaggagggtatttgcgaagtgaacgccactgctggagatactcactaggcaggcgaagatttctgacaacaggaatggcgaaccattttgatcacgaattcaagatgaagaacagcaaggatatcagaggcaatgccagatctttgaggacgtcgagaacagcatgagagcgatccaatacgactttgtcttccactg

SEQ ID NO: 259892 - DNA, 405 bp, Glycine max
ggcccggaattcccgggtcgacccacgcgtccgcatcaatctacaccgcaaaagaagtgacattcaagagggtcatgagtgttgtccctaaggtgtggaaaaggttaatgttgacctttctatgtgcctttgctgcttttttcatttacaatatcgtgaccatgttggttatgttcttgtcaatagtcacaatagggataagtagtggtggggttgtggttttggttttgataacggttttgtacttcattgggtttgtgtacctcaccgtggtgtggcagctagcaagtgttgtgaccgtgttggaggactcgtgggggattcgagccatggccaagagcaaggagttgataaaggggaagatggttttatccatattcgtctttttcacccttgtggcttctt

SEQ ID NO: 259893 - DNA, 358 bp, Glycine max
gaattcccgggtcgacccacgcgtccgcttctttgagtttgtatttgaatttcgtcttaccaacatgaactctagttgtaattagaaaagtaacacttatgaaactgcatgtaaattttgttgcttcatctcattttgcatttgaaagttgtcaactttctgacgggctttgcagaagcgggatcaatcggaataaactatggaagaattgcgaacgacctacctacaccggcgaaagtggtggagcttcttaagagtcaagggctgaaccgtgtgaagctctacgacaccgacgccaccgtcttaaccgcgtttgccaactcaagaatgaaagtggtggttgccatgccaaacgagc

SEQ ID NO: 259894 - DNA, 402 bp, Glycine max
ggtcgacccacgcgtccgctcactcccaagaccaatggatcaactcctgtgaggggagagacagtggccaagttgaaagtggcaatcaatggtttcggacgcattggtagaaacttccttcgctgctggcacggccgaaaagactcaccccttgaagtcgttgttgtcaacgacagtggtggtgtcaagaatgcttcgcacctgctgaaatatgattctatgctgggaacctttaaggcagatgtgaaaatactagacaatgaaaccatcactgttgatggtaagtccatcaaggttgtttcaagcagggaccctcttaagcttccatgggctgagcttggaattgacattgttattgaaggaacgggagtgtttgtggatggccctggggctggcaaacac

SEQ ID NO: 259895 - DNA, 406 bp, Glycine max
ttcccgggtcgacccacgcgtccgctaatttctcgaaaggtagggttttgcagagcctcgtcctcctctcacggtttcttcttttggtcttctcacctttggtcttccactgctctaatctaagatgggcaagtcaagcaagaaatcagctctcaaggtcgacgctgttccagctgtggttccgccatccaagtctgccaagaagggaggcaagagacaagctcaagatgaaattgagaagcaattgagtgccaaaaaacagaagataaatgaggttgctcagaaacaaaaggaggcaaaggtgcaaaagaaggaaagtagttcagatgattcttcttcagaatctgaagatgagaaacctgtacccaaatctgctgttctttcaaaatgataccttttagaatgg

SEQ ID NO: 259896 - DNA, 441 bp, Glycine max
tgctcgtactcggatccgaagcgtccggctcgaccatgtcattgcccatcgtgctggctattgatgatgcccagaagcatacgatcggggataacaaaagggttgctcttttcgattccaagggagaccctgttgcaattctcaatgatgttgagatttataagcatcctaaagaagaaagaatagcccgaacttggggaaccactgcccctggcctaccctatgttgaacaaactataaccaatgctggaaattggttgattgggggtgacctagaggtcattgaaccacatccagtacaatgatggacttgatcattttcggctgtctacagcagaactccgtgcagagttcacaaggcgcaatgcagatgctgtgtttgccttccagctccggaatcctgttcacaatggccacgctttgctaatgactgacacccgt

SEQ ID NO: 259897 - DNA, 211 bp, Glycine max
tcgactaatatggcaatgttgataggcattctgacgaatatggcaacccggatcataccggtatcttacttatgtagacaccaaaattgttgcaaactacaatcatgaccctaataatcaacataatattactgttatctatcccgagaaagacacctatagacatcattatggtcgtgaatactacggtcacactcacaatcaacatgat

SEQ ID NO: 259898 - DNA, 289 bp, Glycine max
aatttccgggtcgagccacgcgtacgatcaagactggtctgccctatatctatcacatttaggtcttcaacccatttttgaactctaggaagaggtcaaaagcatgttctcccacgaagacattatcccgttcttccatagcattgttctttctaaagaagctaccactgttcataagtgctacattgagcttgccaagcatgtcaacgaaaagctttccaaggtacatccttactttgacaagttgtcagatgccatggtcacttggattgaagctagtgatgagctt

SEQ ID NO: 259899 - DNA, 449 bp, Glycine max
  unsure (1)..(449): unsure at all n locations
attcccgggtcgacccacgcgtccggtttaagaggtggcatgcagattttcttcaagactttgacgggaaagaccatcaccgtgtaggtggagagttcagataccatagacaatgtgaaagccaagattcaagataaggagggtatccccccagaccagcacaggcttatctttgctggtaaacagcttgaagatggacgaacccttgcagattataacatccagaangaatctaccctgcacttggttttgaggcttcgtggtggcatgcaaatctttgttaagactttgaccggacaaacaataactttagaagttgaaagttctgataccatcgataacgtgaaggcaaagatacaggacaaagaggggattccaccagaccagcagaggcttatctttgctgggaagcatctggaagatggtcgtactcttgctgattataatat

SEQ ID NO: 259900 - DNA, 413 bp, Glycine max
gcgtacgcccacgcgtccgcccacgcgtccgatttggctttatcaatcaaattctttgagttgggcacgggtgccaatattacttctcttggcttagggacttggcaagctgaacctggtgttgtagctgaagctctcaccacagccattcaggttggatacaggcatattgactgtgctagtgcgtataagaatcaagcagagattggttctgctcttaagaagctttttgatgatggtgtggtgaagcgtgaggacttatggatcacttccaaactctggtgttcagatcatgcaccataagatgtgccaaaagcattggataaaacattacaggaattgcaacttgactatcttgacctctatctgatccactggccaatccgcattaaaagtggaacatttggacttaa

SEQ ID NO: 259901 - DNA, 454 bp, Glycine max
tcctgaattcccgggtcgacccacgcgtacggaaacaatggccaatgtttcaattccactcccacgaaacggtttctccaaacccaatgactggacaaaacgcccatgtttcaccccttcagcttcaacactcagaatttcttgctctggagtggctgagtttgatggatctcatcagaaaaaaggaggtttgtttaatttcaatggaatcaagggcgtggcttgtggtattcttgcagcttgtgctgttacttctgctgcatttcctgttactgctgctactcagaggcttcccccattgtcaactgagcccaatcgctgtgagcgtgcatttgttggcaacacaattggtcaggcaaatggtgtatatgataaaccattagatctccggcaatgtgatttcacaaatgaaaaaacccaccttaaggcggaagtccctgtcttctgcactcat

SEQ ID NO: 259902 - DNA, 463 bp, Glycine max
cggaattcccgggtcgacccacgcgtccgggcgaatcgtggaagttccagcgcaagatggcgagtctcgaactcggcagcgtggcgattcggacgtacgcgatggaattagtcaacgaggagatccacgcgcgactgatcccgatcatggaatcaaccgcgcgtggcgaattaaactccgtctgcgttttggatttgcaagatatactacgaagattctcgttcgacaacatatgcaaattctcgttcgggctcgacccgggttgtctcctaccgaatctcccagtctcggacctcgccgtcgcgtttgacctggcctcaaagctctgcgacgaacgcgccatgaacgcgtcgcccgttatttggaaactaaaacgacttcttaacataagatccgagaagaaactgagagaaacaattaacgtcgtaaacgacgtcgcaaaagagatgattcagccgagaag

SEQ ID NO: 259903 - DNA, 398 bp, Glycine max
gggctacgacctacgcgtgcgtcgaggaagtcagaccgcctgatggcgagtctcgaactgggcagcgtggcgattgggacgtgcgccatggaattggtcaacgaggagatccacgcgcgactgagcccgatcatggtatcaaccgcgcgtggtgaattaaactgcggctgcgttcaggctttgcacgatgtactacgaagattctcgttctgcagcatatgctgattctagttcgggctcggccagcgttgtctcctaccggatctcccaatcgcggacctcgacgtcgcgtttgacactggactcatagctgtgcgacgtacgcgccatgaacgcgtcgtcgcttattcggaagctgaaacgactcctcaacataggatccgagaggaaactgagag

SEQ ID NO: 259904 - DNA, 369 bp, Glycine max
cgtacgctccatcactcttactcgctcctatattcgctcctccaccatcgctctctacatcaaggacgggcatatacaaatcacatggcacacacagcatctggaatggcagtccatgatgactgctacttgaggattttggagctgaatgcaacaaggacacaccttttcatagtttttaacattgacgatcagcataagcacgacattgcggagaatctagcagcacctgcccagggctatgtagatttcactgccagacttcctgctgacgagtgccaatatgctgctcatgatcttcaatctctttctgaacgcaatgtacctacaagcataattcatttcattgcggggtcccctgacacatca

SEQ ID NO: 259905 - DNA, 490 bp, Glycine max
attccggggtagacccacgcgtacgagagcgagagcgtgatagagagataatgcgttcttatggcttaaccgtaccgataggcgacgaccgcttctgcgtgcccaccgtatctcaggtgttctttaggcccaacaggcccattaaccgaatcgcgtttcccaaggccaccctcaagaacgacggcttcgtggtggacctgagcttctacgaccttctgggaataccggaatccggttcggtaaccgagatcaagaacgcctacaagcaactcgaccgaaagtaccacccggacatgttgccttcgggtccggtcgaggagttcacaaagaggtttattcaggtgcaggaggcctacgaaaccctgtctgatcctttcagaagagctatgtaccacaaggacattgccaagggcattaacttggccttcaacgcctcgaaacgctataattaccacgatcaggtagttgaacaaaaaattgaatggaaagc

SEQ ID NO: 259906 - DNA, 361 bp, Glycine max
attcccgggtcgacccacgcgtccggccacgcgtacggccgaaacaacccacccaaccctaattcaactgttccgatctgatcactgggagtaagaattctaaatgagccgggcacaagatgcaaaccgatcattcttcccttttggaaatccttttacgatgatatcaccgcaaggcccaaaaatttcttcacagctgatgttaatattacatgcttttgaagcaactttggaagagaggctgaaaaagcttattcccaagagcaaggatgagatcctcagcttgtcttggatgactttggccatgcaagcactatgtgagagtcataatgccattaaaaccctgataacagacctggac

SEQ ID NO: 259907 - DNA, 391 bp, Glycine max
cggaatcgcagggtcgacccacgcgtacgcccacgcgtacggattatcctaagtctttgggaatagtgctgcaatggcttcaagtcaggaggaggtgacccttttgggagctactggaagcccatttgtgtgcagggttcatattgccctcaagttgaagggagttcaatacaaatatgtcgaagaaaatttgaggaacaagagtgaactgcttctcaaatccaacccagttcacaagaaggttccagtgtttattcacaatgagaagcccatagcagagtctcttgtgattgttgaatacattgatgagacatggaagaacaaccccatcttgccttctgatccttaccaaagagccttggctcgtttctggtccaaattcattgatgat

SEQ ID NO: 259908 - DNA, 365 bp, Glycine max
tacccgggtcgaccgacgcgtacggccttgttgtaaaatgtccctttcaactggttgcctggtatgtcttgacctctgtacacggcagtgtggttcttttgacgggtaacatgaaaaacgcgggggttgaaattgatgctctatccatatgtctcaacatcaatggatgggaaatgatgatatcccttggtttcatggctgcagcaagtgttcgagtagcaaatgaacttggaagaggaagtgccaaagcttcaaaagttctctattattgtgtcagtgctcacatcattggccatcggattccttctggttatattcttcttattttttagagaaagacttgcatatatatttacctcaaataa

SEQ ID NO: 259909 - DNA, 334 bp, Glycine max
gagtgccgtggagacgctatgcggacaagcattcggagctcaaaagtacgggatgttaggagtctacatgcagcggtcaacgattcttctctcactagccggcgtagtgttgaccgtgatatacgtattcagcgaaccgatgctaatattcctcggggaatcaccgagaatcgcgtcggcggcagcactctttgtgtacgggttgatcccacagatattcgcatacgcggcgaacttcccgatccagaagtttctccaagcgcagagcatagtggcaccgagcgcgtacatatcagcggcgacgctggtggtccacctggggatgagttgggtg

SEQ ID NO: 259910 - DNA, 382 bp, Glycine max
  unsure (1)..(382): unsure at all n locations
ttatcctaantcttgtgtttattttgctgcaatggcttcaaatcaggcgccggggaccatttagggagctactgcaaacccatttgtgtgcaaggttcatattgccctcaaattgaaaggagttcaatacaaatatgtcgaagaaaatttgaagaacaagagtgaactgcttctcaaatccaacccagttcacaagaaggttccagtgtttattcacaatgagaagcccataacagagtctcttgtgattgtttaatacattgatgagacatggaagaacaaccccatctttccttcttatccttaccaaaaaaccttggcttctttcttgtccaaattcattgattataaagtttttggtgctgcattgaaattcgtttta

SEQ ID NO: 259911 - DNA, 374 bp, Glycine max
  unsure (1)..(374): unsure at all n locations
ttaattaaataattaaaatgggtttttaatttaaagagaaaaaaaaaataaaaaaanntcgtaagtggtttaaattaaaaaatatatttaaaaaaaaaataaaatataaaaaaataaatataaaatatataaatataaaaattaattattaaaattataataatatattaaataaaaatttttttttttaattaaaataaaaaaaaaaataaaattattatatattttttatataatataaaaaaaaataataataaatataaaataataataaaaaaaatataaaatataaaaatatttatattattatattaaaataaaaaattttttataataaaataataataaaaaataaataaatatataaaataaaa

SEQ ID NO: 259912 - DNA, 485 bp, Glycine max
  unsure (1)..(485): unsure at all n locations
ccggnccggaatacccgggtcgacccacgcgtccgcgctgttcctacaatcattccaaatgtgcccttccggtcgcaccctcctcccttgctccggctccgatttccgaccggcattcgacgtcctcgatgccgaccgcgacggcaaaatcagccgcgacgacctccgcgccttctacgccggagtcggcggcggaggagatgacgtgatcggggcaatgatgacagtggctgacaccaataaggacgggttcgtggagtacgaggagttcgagcgcgtggtctcggcggagagaaagcccgtggggtactgtggggccatggaggacgtgttcagggtcatggacaaggacggcgacggcaagctcagccaccatgatctgaagacttacatggcctgcgctggttttccggccaccgacaacgacatcaacgccatgatccgattcggcggcggcgaccaaaacggcggcgttacgttcgatg

SEQ ID NO: 259913 - DNA, 310 bp, Glycine max
accggacttggcattacattgaaaaaaaaaacctttttacttttcaattatcaaaatggctgcggggggtgtcacaggagcggggctaaccctaaggatagggttggcaatacctctttcctttccaaccccctttggaaccgttacaatggccgtatccttcgaccccaagaacggcaacaaactcactcttaccaaaaccgaggaagcttttcttgctgccaaggagctgatgcttggaagggtcaactccccaatttaggccttcaaaaccgtgggtggacaaccaattgtgattgattcaatcaaa

SEQ ID NO: 259914 - DNA, 457 bp, Glycine max
ccggaccggaattcccgggggcgccgacgcgtccgacgcgtttggatctccgttaaacaaaaccattaaaatgtagcgagagaaaaacagggccgcggaagaaaatcagttaatttactaattttatttttttatggctttccacgaccatctccagcacgaaatagcgttccagcgtttcacggaggagcaagagttgaccgagaacagagacatgcagcagaggctcccaccttcgacatggctcaacaacgttaacgcgcgtcaacagaatttcctcgacaccgagaagagcgtggatcggaacaaccgaagcgagagcaattgcgaatccgaggatttgagggaatacaaagcggacattctaggtcaccctctctacgatcaactgttgtcggcgcacgtctcgtgcctcagaatcgccacgcccgtggaccagctttctaagatcgatgcg

SEQ ID NO: 259915 - DNA, 458 bp, Glycine max
cgaattcccgggtcgacccacgcgtccgcaaaagattgaatatttggccctggaccaaccattttggaagtcaagggccttccaccaaatgattgggaaggtcaaaccccacccactattggctaacttcaaggggtttcaactaaaatgggcccaccagccacactttgatgcgagcccttgagggtggaacaatattgatcaattgctttgatggttttgatgcttcaattccctttggaaggtacaaaatgagcggcattggcagggagaaaggtatctacaggctaacaattaccttgaagtgaaacttgggtttcaccagtgaagaacctgcatggtgtgattgtgaatgctcaactgtataccgaatctacgtgctatcattttttcgtgagcatggctgcataatatgtgtgtctaaataaactgatagtactgacatatacagtgattat

SEQ ID NO: 259916 - DNA, 354 bp, Glycine max
  unsure (1)..(354): unsure at all n locations
acagaaattctctggngcttagatcccacttcatggtgtcacaatatgcgtaacagtgctaggagaaatcttcctttttttgatcttggtagcttcccaactcactcccaagaccaatggatcaactcctgtgaggggagagacagtggccaagttgaaggtggcaatcaatggtttcggacgcattggtagaaacttccttcgctgctggcacggccgaaaagactcaccccttgaagtcgttgttgtcaacgacagtggtggtgtcaagaaatgcttcgcacctgcttgaaatatgattctattgctgggaaccctttaaaggcagatggtgaaaatactaagacaaatgaa

SEQ ID NO: 259917 - DNA, 450 bp, Glycine max
agccacgcttaatatcaccctaaaaagttctcttttcacacaacacaacacaaaccctgtgtgtgtttatataaatcatcatcgcatcaacaacatcttggtttgtgttgtcacttaattttacaccctccaccacaaactcaaaggttgtcatgttcaacacaaaaaacaacacttctatgctttttgtaatgtcttcatattaaccttcttcgtgatcacccatcaccgtcacatccctatcttaatcttaaacttaaccaaaatcaccacctatttgccccaaaataagtgctaaagttaaaattcttaataatgaattttactcgtacaaatccacttttttcaatttttgcttttttatcaagacccaaaacactctcttcccttttttggttctattcacaaaatcaatctattccaatttattaaccaacaacttttcttttt

SEQ ID NO: 259918 - DNA, 435 bp, Glycine max
cggaattcccgggtcgacccacgcgtccgcccacgcgtccgaatttcgcctctttctttctcaactcccttagattctctccatcgggtggtcaaaaatgcggatgagctgcaatggatgtcgagttctcagaaaaggttgcagtgaaaattgcagcatcagaccctgtttacaatggatcaaaagcccagaatctcaagccaatgctactgtgtttcttgccaagttctacggccgtgctggtctaatgaacctggttaacgcaggccccgaacatcttcgtccagcgatctttcgttcgttgttgtacgaggcatgcggtcggatattgaacccgatttacgggtctgtcgggttgttatggtccgggagctggcagctatgtcaagccgccgtggaaacgtcttgaaggcgcaccgatacgccgatcacgtc

SEQ ID NO: 259919 - DNA, 416 bp, Glycine max
  unsure (1)..(416): unsure at all n locations
ccggccgaattcccggtcgacccacgcgtacgcccacgcgtccgaaaaaaagcatcaagaaggaagcttggtggaccatatcccatatcacagggggggataaacagcagattcaagctgtgattgaagctaatctaattgctcctttggtcaatctgcttcaaaatgctgagtttgatatcaagaaagaagctgcttgggctatctcaaatgctacatccggtggttctcatgaacaaatcaagttcctagtaagccaagggtgtattaagcccttgtgtgatcttctcatctgtcctgatcctagaattgttacagtttgtctggaaggccttgaaaacatcttgaaggtgggagaagctgataaaaacatangaaatactggtgatgtgaatctatatgcccaaatgattgat

SEQ ID NO: 259920 - DNA, 295 bp, Glycine max
cttcctttttttctaacaaaagcttcaataaacggggacgggaccctatcactagctactcccaaaccattttttttcataatacatatttccctcaatttatatagaactcaatacaaatatttccaagaaaatttaatgtacaatattcaacttcttcttaaatccaacccaattcacaacaaatctccattgtttattcacaatgaaaagcccatatcacagtctattctgactgtagaatacattcatcaaacatttaataacaaccccatctttccttctgattcttacc

SEQ ID NO: 259921 - DNA, 399 bp, Glycine max
gaattcccgggtcgacccacgcgtccgcggacgcgtgggaaacactaggcgcattgcgcaccctctccgctcccataatatctgacgaagcaccgccaaaaggtgtgttaagtgtgaatccctttccctctctactcttcactttccatttccatttttttctggttttctttctccatggcctccgccgccgccgtcgccgccgaagacgacgctgtcaacggcttcactcggtcggagatgtactcggaaaaccttgccggcactgtcgacgcctacgaccgacacgtgttcctatgctacaagagctacgtgtcctggccggcacgcatcgaggcatccgacgccgatcccttccccaagcgcgtcgtcgtcaacttcaaagcccgcaagaacgac

SEQ ID NO: 259922 - DNA, 220 bp, Glycine max
acgcgtacgattacgcttaccatcactgacattttacattctttcggtgacagacacgagctgctgcagggggagctttacaacggtatcgtcaaacagacgcgtgtcctgctcgacgatcacttctggcacatccactacatacgattccaaaacaacgatccagatcttcacatcgcgttcgaacccgtgcacagaggtgactgacctatagttcctg

SEQ ID NO: 259923 - DNA, 390 bp, Glycine max
  unsure (1)..(390): unsure at all n locations
attcccgggtcgacccacgcgtccggtttaagaggtggcatgcagattttcgtcaagactttgacgggaaagaccatcaccttggaggtggagagttcagataccatagacaatgtgaaagccaagattcaagataaggagggtatccccccagaccagcagaggcttatctttgctggtaaacagcttgaagatggacgaacccttgcagattataacatccagaaggaatctaccctgcacttggttttgaggcttcgtggtggcatgcaaatctttgttaagactttgaccggaaaaacaataactttagaagttgaaagttctgataccatcgataacgtgaaggcaaagatacaggacanagaggggattccaccagaccagcag

SEQ ID NO: 259924 - DNA, 431 bp, Glycine max
accggtccggacgacccgggcctacgctcttgcggctagggttttagcgcagcttcttctagatttaaggaagatgggtaaggaaaaggttcacatcagtattgtggtcattggccatgtcgactctgggaaatccactaccactggtcacctgatttacaagcttggaggcattgacaagcgtgttattgagaggtttgagaaggaagctgctgagatgaacaagaggtctttcaagtatgcctgggtgctggacaaacttaaggctgagcgtgaaagaggaatcaccattgatattgctttgtggaagtttgaaacaacaaagtattattgcacagttattgatgcgcctggacatacggatatcattaagaatatgattactgggacatcccaagctgactgtgctgatcttatcattgattcgacca

SEQ ID NO: 259925 - DNA, 365 bp, Glycine max
accggtcctgaatggccgggtcgaccgacgcgtccgcccacgcgtccgccgcctttggcattgcaagcgctctctttctttgcttttccgtccccctgtcaatttcttcaacgctgcaactatccatggcaaaccgctggctcagacccgaggtgtatccactgttcgctgcggttggtgccgctgttgggatctgtggattccaattggttcgtaatatctgcatcaaccctgaagtcagggtgaacaatgtcggaagaaaggcatgagtgttgtagaactttgctgaggtaatagaatttgctgagcatttcctgagtaattatatgctcaacataactattgagattatgccctccatcaac

SEQ ID NO: 259926 - DNA, 359 bp, Glycine max
gaattcccgggtcgacccacgcgtacgcacacgcgtgcgatccatagacatggccaccgtcacttctgcagccgttgctattccctcatgtactgggctcaaggcaagcgcatgcaaagtgagtgccgcagttaaagtctcagctccccaagccacaaggttgggcatcaaagctttgctgaaagacgttggagtcgctgttgtggccactgtcgcgagtgcagtgctggctagcaacgccatggccattgaagagttgctgggtggagatgaccgttctctggctttcgatcccaacaatttctccgtggcctctggggagaagatcgtgttcaagaacaacgcaggtttcccccaca

SEQ ID NO: 259927 - DNA, 471 bp, Glycine max
gtccggaattcccgggtcgagccgcgcgtacggcctattgagatgtggcaaaagatggtggaggaattgtcacaaggtcattctatacttgatggtaatattgaattacttgcatgcttccaaaagctcttgcatgttttggaagataatcccaacaacaaggagtgcttcatggacttggggttatttcctgaagaccaaagaattcctcttcctgttcttattgatatatgggcagtgttatatggatttgatgatgacggcatagaagcaatggacatcataaataaattagactccatgaatctggttaatgtcttagtagcaaggaaaaattcaagtgactcagacaattactactacaataaccactacgtcatgctccatgatcttctaagagagcttgcgatctatcaaaacaacctggaaccaattggaaagagaaaaagactgattaatgacataaatgaa

SEQ ID NO: 259928 - DNA, 369 bp, Glycine max
tcttgaattcccgggtcgacccacgcgtccgattcacctgagctttttgtgaggattccaaagcatggcttcccttgcagcatccactgctgctgcttaccttggcatgtcagaaatgcttggaaaccccatcaacctcagtggtgccacaaggccagctccatctgcctctagccctgcctccttcaagactgtggctcttttctccaaaaagaaggctgcacctccaaaaaaagctgcagctgctgctcctgccaatgattagcttgccaagtggtatagtcctgacagaatgatcttcttgcctgaaggtctcttggaccgatctgagatcccatagtacttgaccggagaagttcccggagacta

SEQ ID NO: 259929 - DNA, 424 bp, Glycine max
  unsure (1)..(424): unsure at all n locations
ccgggtcgacccacgcgtccgcttggtggttgcattgaatcggagagggtaggtaggtgggaagacgtgtcttgttttgtagctttccccttcgctctctctctctttcccggcgcatgtgccggattagacgccaactgcttccataattcacctcctccaaccaaccaacacaagatttccctctggattggatggaagaagcatgtgaatttcgaagttgggctgaattgattcctgatgcgctcggggtaatcttcaccaatctttctcttcaggagagggtaacagtgatccccagggtgtgcaaatcatgggctaatgcagtaactggaccttactgctggcaagagatagacatcaaggattggagcaaccgatgccagcccgaccaactcgatcggctacttgagatngctatcac

SEQ ID NO: 259930 - DNA, 173 bp, Glycine max
gtaattcaattattatatgtatgtaccatgccattgtatttttgtatgcttactactactactactaccactacaaacacttgttgcttcatttttcattctaaaacttgtactgagaaacagaaccttcaattttctctgccttctcattgtgcaataaatttcttaccttg

SEQ ID NO: 259931 - DNA, 319 bp, Glycine max
  unsure (1)..(319): unsure at all n locations
cattgttgacacatttanacttaaggatgaacccgcgttggatatatagctgtttgttaccttcatgaataggtttatgaagaatttgacttccaagttcgatgcagagcaacaggagttatttaagtagcacatttagggagcaactatatacttgctctctaatattgaagatttccaattttttgtttgtgtgagcatgggtgatgatgcatgcttgatctttgcctactacaaggacggcgctgctgatctgacattcctgtacttttcatatgccttaaaggaggtcaagtgctgagtgacttaatgtaacccc

SEQ ID NO: 259932 - DNA, 365 bp, Glycine max
attcccgggtcgacccacgcgtcctaactaagattttttagaataatcaaaaagaatattaaattcaaataaattttagatagaaaaaagacttaaaaaggaggatttgaaatgcgagatctaaaaacatatctttccgtggcaccagtagtaagtactctatggttcgggtctttggcgggtctcttgatagagatcaatcgtttttttccagattcattgatattccctttttttttcattctagttattgacacggaaaggggtgaagaagattatagatccaattaagtattaaatatatgtaattaatatgtaattaatctcctcttctttatttcgtcttttatttcttctttttttta

SEQ ID NO: 259933 - DNA, 291 bp, Glycine max
  unsure (1)..(291): unsure at all n locations
aagatggagggcgcagaagcagcaaagttcattccacaagagaatcggaagggtccaaaacgacgcgcagcgattcggtctccatggagtcaaaggncgcatcgttgaggctcaccctcttaaatctagactccaatcaacagggagaatggatgaagcgatagagaggcaatgcaaagttaacctgtacggaagtgcttttcccaggaaggaggagcttgacaggcaaatcctgtccaggttagagcggccaaactggaccaattccttctgcaatgctgggttttggaa

SEQ ID NO: 259934 - DNA, 373 bp, Glycine max
tacctttcctgaattcccgggtcgaccgacgcgtccggtcaaacatacggactcacattcacttactttttatatgatcacactttacaaaagggctggcatcattttgatagcatgcgagactctgcattatatatgacattacatgatgactgctaattcaagattttggatctgaactcaaaaaggacacaccgtttcatagttattaagactcacttccatatctagcacatcttaatgtatacatttgatgatacttcccaatactattaatatatcactgtcagccttcctactaacgattgcacatatactgattatcattttcaatatcttactaaacgtaatgtccctaaaagcataatttttt

SEQ ID NO: 259935 - DNA, 368 bp, Glycine max
  unsure (1)..(368): unsure at all n locations
ggaattcccgggtcgacccacgcgttcgtgtgttagtaagctcatcctagagttttaaaaatgtcagcagcctccttcatggctctctgttccccatccttggctggcaaggccgtgatagctgggcccatcagcccccgaagtcgggagggtcagcatgaggaagaccgttaccaagcaggccttttccggaagcccatggtacggcccagaccgtgttaagtacttgggcccattctctggcgagcccccgtcctacctcactggcgagagcccaggtgactacggctgggacactgctgggctttcggccgacccagattccttcgccggaaaccgtgagctcgaattgatccactnccaggtgg

SEQ ID NO: 259936 - DNA, 511 bp, Glycine max
  unsure (1)..(511): unsure at all n locations
gcacgtactcggtctcgtgaattcctcgtggtcgaccccactgcgtctcgctacagtcttgcctgctacgcctctccctctcgtctcaaaagatcgtatctcttcggattttagggttggtgttttagctgctgcgcttcgttcccccccttctcataaacaaccgcgttttctcttctgcttcgtatctattctttgcttttggttttggttgattcaaggccttcacagcattcgttgcggcattttaatcgatttatccaagcaggactgaatgaactaatggagtctaaaggtgggaaaaagaagtctagtagtagtagtcgtaaatcattgatctacgaagctcccctcagatacagcattgaagacgttagaccaaacggtggaatcaagaaattcagatctgctgcttactccaactgcgctcgcaaaccttcctgatatccatgcagattgatagttcattgcatgcaaccataagtttattaggtttnttcttcttggtttc

SEQ ID NO: 259937 - DNA, 370 bp, Glycine max
  unsure (1)..(370): unsure at all n locations
tccggaattcccgggtcgacccaagtgtgcgttaatgtgtccggccatataattntttttatttgatataatgtccgggtatcatccacaagattgaggagaccctccatgtgggagggctacaagaaagaggagcacaaaggagaacactgtggtgagcacaaaggtgaacacagaggagtaacaccatggtgagcacaaaggtgaacactaaggagaacaagaccatggggagcacaaggaggtacttgtggataagatcaaggacaagatccatggtgatggccatgacaagggtgagaaaaagaagatgaaggacaagaagaatgaggagcatggacatgaccatcatggttatagcagcagcagt

SEQ ID NO: 259938 - DNA, 388 bp, Glycine max
ttcccggtcgacccaccgcctgttaatttttttaaaatggatggtaggctagaggacactgatgagcaatctaaatggatatttgttcttagcaccacaagggccttgtaagtggggagaaaacaaaagggtacgtttcaacactcaagctttctttctggcggtgcaaccacagcagctggcagattagtgtcccattgaggtgcccttaaggctatttggtcatatagtggatactaccaccccacagaagagaacttcaaaatatttataagctttcttgaggagcacaatgtagatctcaccaatgtaaagtatatgtgctttagatgatgataatccaatacttattgggacctaaattttttttcctaaaaatttttttttt

SEQ ID NO: 259939 - DNA, 366 bp, Glycine max
aattcccgggtcgacccacgcgtacgatttgttggagtttcagcctgtggaggaattttaccgtttaagaggaaaattattggagtttaacctgcctggatgaatcccggagtcttgtcctaagttgctacatgctcttaatcttgatgattatgaggacaaacgatctgctgcagcataacgatataataatgtatcataacagtaagtatttcattctttgcgtgcatatattgcatgcttggcaattttgcaggacagagagccaaagaaagggaacttccctgctagtattattttggaccaataatgatatttgtaagtgttgtaatctgataagaggataagactggtagtgttgcgttt

SEQ ID NO: 259940 - DNA, 370 bp, Glycine max
gaattcccgggtcgacccacgcgtccgtccacccattcgttatttcccactcttatcaatttcatttattccgacccagttttttttgtcttcttttcagttcctgaaattgggtcaattaggatttcggagaggcccattggaggcgccgttaatttcaatttatctcaaagacggagcttggtaaagcccgttaacgccgaacctccacgcaaggattccattgttcctctcgcagcaacaaccatcgttgcttctgcttctgagacgaaagaggaagattttgaacagatagccagtgatctcgacaatgcttcacctcttgaaatcatggatagagccctcgacaaattcagcaacgacatagcta

SEQ ID NO: 259941 - DNA, 366 bp, Glycine max
  unsure (1)..(366): unsure at all n locations
aattcccgggtcgacccacgcgtncggacacaccttcagcagcagcagccatggttctcaaaaccgaactatgccgattcagcggtgccaagatctacccagggaaaggcatcagatttgttcgtggtgattctcaggttttcctgtttgctaactcgaaatgtaagaggtattttcacaacaggttgaagccatcaaagctcacctggactgcaatgtacagaaagcaacacaagaaggacattgctcaagaagctgtgaagaaaagaagacgtgctgccaaaaagccttactccaggtccattgtcggtgccactttggaagttatccagaaaaagagagctgagaagccagaagttcgagatg

SEQ ID NO: 259942 - DNA, 359 bp, Glycine max
  unsure (1)..(359): unsure at all n locations
gacccacgcgtccgcggccgcgtgggcctgtnnnnncaaanngnnnnnagctgtgtaaaaaaaaaaaaaaaaaaagggaaaaaaaaaaaaaaaaaaaaaaaaaaaaaaaaaaaaaaaaaaaaaaaaaaaaaaaaaaaaaaaaaaaaaaaaaaaaaaaaaaaaaaaaaaaaaaaaaaaaaaaaaaaaaaaaaggggggggccgttttaaaggaccaaagtttacttccccgtgcttgcaaagtaatagtttttttttggggccccctaaattaaattcctgggccggggtttaaaaacggggggacgggaaaaaccttggggttaccaaattaaatcgctttgaaaaaaatccccttttc

SEQ ID NO: 259943 - DNA, 275 bp, Glycine max
ataaaaaaaaaaaaaaaaaaaatggggaacggggaaaattataaaaaactaaaccacaaaacaaattactcaataaacaaatctaataaataaatagaaaccttcaacttgttcaacaaggacgagtgatgattacatcatagcgccggcccttttaaaatatcaaactttcattgccccaaaacccaactgaatgctttttttatggacaccctaaatgaaatttattctgctgggaattataccattgacttccctgaaatcctaaatttcac

SEQ ID NO: 259944 - DNA, 405 bp, Glycine max
  unsure (1)..(405): unsure at all n locations
aaacctatagctgatgatgtagatgttaaagcaattgctcgtggtaccccagggtttaatggagcagatcttgcgaatttggtaaatgttgctgccattaaagctgcagttgaaggtgcagagaaagtaacagctgcacaattggagtttgcaaaagacagaatagttatgggtactgagcggaaaacaatgtttatatctgaagagtcaaagaagcttactgcttatcatgagagcggtcatgcaattgttgcccttaacaccgatggtgcgtatccaattcacaaggcaacaatcatgccacgtggatctgctttaggaatggtcactcagcttccctcaagtgacgagacatcaatangcaagaaacagttgttagctcgccttgatgtttgtatgggagga

SEQ ID NO: 259945 - DNA, 376 bp, Glycine max
  unsure (1)..(376): unsure at all n locations
tctctctncccnnngccnttaaacgaaaaaaaaaagaagagcaattttccctcaccaaagaagaagaagcaaacaatggccgatcaacttaccgatgaacagatctccgagttcaaggaagccttcagcttgttcgacaaggacggcgatggttgcatcacaaccaaggagcttggaactgttatgcgttcattggggcaaaacccaactgaggcagagctccaggacatgatcaatgaagtggatgctgatgggaatggtaccattgacttccctgagttcctaaatctcatggccaggaagatgaaggacactgattctgaggaggagctgaaagaggcattccgggttttcgacaaggaccagaatgggttca

SEQ ID NO: 259946 - DNA, 404 bp, Glycine max
ttcggctgtggctccgccattgcttcttcctccgtcgctactgagtgggtgaagggaaggcaaatggaggaagttctgactataaaaaatactgaaattgcaaagcatctttcacttccaccagttaagctccactgcagcatgcttgctgaagatgctatcaaagcggccgttaaagactatgaagctaagcgtgctaaggcaactgctagcggagaggcagcaacagaagagaagcctgccactgcatgatttctttcatatatagaaagaatgatgacgaaaacaaccgtgtgtttgtttgtttattcttaatcagattcttatcgaagagcaccttcacttgagactttgggttggacttagctggagagtattcacattctgtgaactaaatatttgaa

SEQ ID NO: 259947 - DNA, 428 bp, Glycine max
ggggactttgctctgtattgatggtacatttgcgacaccattgaaccagaaggcccttgcccttggcgctgatctgattctgcactccttaacaaaatacatgggtggacatcatgatgcccttggtggttgcataagtggttcaactaaggtggtttcgcaaattcggactttgcaccatgttttgggtggtacacttaacccgaatgctgcatacctattcatcagaggcatgaaaacgctgcatctccgtgtacagcagcagaattcaacaggaatgaggatggccgaacttttagaggcacatcccaaggtgaagcgggtctactatccaagcttgccgagtcatcctgaacatgagcttgccaagaggcagatgactggtttcggtggtgttgtcagttttgagattgatggagatctacata

SEQ ID NO: 259948 - DNA, 432 bp, Glycine max
  unsure (1)..(432): unsure at all n locations
agcatatgttgatgacacaccacgtgaacaaatgcaaaaagagagaatggatggcatagattctaaatgcagaaataatagtgtagaggagaatctaaaattgtggaaggaaatgattgcaggaacagagaggggcttgcagtgttgtgtccgtggcaagttggatatgcaggacccaaacaaatcacttagagatcctgtttattatcgttgcaatccaatgccccatcatagaattggatccaagtataaagtgtatccaacttatgattttgcttgtccatatgttgattctatagaaggaatcacgcatgcccttcgatctagtgaataccatgatcgcaatgcccagtattactggattcaagaggacatgggtcttagaaaagttcttatctacgaatttagccggntgaatatggtctacactct

SEQ ID NO: 259949 - DNA, 388 bp, Glycine max
  unsure (1)..(388): unsure at all n locations
ttgcactcgctgtttcagcttcatcacccttcttttgcatcatttatatctcttgagaaatggcacaagaaacctttctattcacatctgaatctgtaaacgagggtcaccccgacaagctgtgcgaccagatctctgatgcagtacttgatgcgtgccttgaacaggaccctgacagcaaggttgcctgtgagacatgcaccaagaccaacatggtcatggtcttcggagagatcacaaccaaggccaacgtagactatgaaaagattgtccgcgacacatgccgcgaaattggattcatctctgatgatgttggtcttgatgctgacaaatgcaaggtgttggtcaacattgagcaacagagcccggatatcngcccaggtgtgca

SEQ ID NO: 259950 - DNA, 295 bp, Glycine max
cttgctgtttcaacttcaacgcgcttcggggggatcattgatatctcttgaaaaacggcacaagaaacctttctattcacatctgaatctgtaaacgaggggcaccctgacacgctgtgcgaccagatctctgatgcagtacttgatgcgtgccttgaacaggaccctgacagcaaggttgcctgggagacacgcactcagaccaacatggtcatgggcttcggagagatcaacaccaacgccaacgtagaccatgaaaagaatggttcgcgacacattgcccgcgaaggtggat

SEQ ID NO: 259951 - DNA, 413 bp, Glycine max
  unsure (1)..(413): unsure at all n locations
aaaacattgttcctggtattaaagtcgacaagggtttggtgccccttgcaggttccaacgacgagtcatggtgccaaggtttggatggtctaacctctcgctcagctgcatactacgagcaaggtgcccgtttcgccaaatggcgtactgttgtgagcatccccaacggtccctctgctctggcagttaaggaagcagcctggggtctggctcgctatgctgcaattgctcaggacaatgggttggtcccaattgtggagccagagatcttgcttgatggggagcatggtattgatagaacttttgaagtagcccaaaaggtctgggcagaggttttcttctaccttgctgagaacaatgtcctttttgagggtattctccttaagcctagcatggntacacctggagccgag

SEQ ID NO: 259952 - DNA, 420 bp, Glycine max
ctcttatccgtgccgttgaatctcgccgtccggctgctgctgttagtcgacggagctctcctactattcaaaacagaagctatgaaatcgttcaatataaatggaaccactctttctgttgcactctacactgacgtaacaaattcaaaagaactcttggaaagtatgcaagccgggacattggagccagaagttgcattcctcaatgctttacttattccagatattttccctgttctagcagctgcacacaaaacacttgtagccaagtctcgagactctttgaccacacgcactcttcattcagagcttggttacaactactcagggtctaagcatattactgaatctttgaaaagatgcggcatctctgacagcacaactttgatccttgctgctcgatttgatgctagtcctgat

SEQ ID NO: 259953 - DNA, 412 bp, Glycine max
gtggtgcttacattgtgagacaggctgctaagagcattgtggcaagtggacttgccagaaggtgcattgtgcaagtgtcttatgccattggtgtgcctgagcctttgtctgtgtttgttgacacctatggcactgggaagatccatgataaggagattctcaacattgtgaaggaaaactttgatttcaggcctggtatgatctccatcaaccttgatctcaagaggggtggaaataacaggtttttgaagactgctgcctatggacactttggaagagaagaccctgacttcacatgggaagtggtcaaacccctcaagtgggagaaggcctaagtaattcattccactgctctatgctggaagttttttgagcgttgcccttataatatgtctaatatccataactttcc

SEQ ID NO: 259954 - DNA, 415 bp, Glycine max
  unsure (1)..(415): unsure at all n locations
cggaannnccgggccgacccacgcgtccgcgccaaagangctctggnatagcangccaannngaaaagcagcgtgaagaccgaggattgtccctccgatggacttgctgagttcgctctcgttggccgctccaacgtcggaaaatcctcgctcctcaactccctcgtgcgccgcaagaagctcgccttaacttcgaagaaacctggcaaaacgcaatgtataaaccattttcggattaataatagctggtacctggttgatttgcctggatatgggtatgcatctgcaccgcatgaacttaggatggattgggaaaaattcaccaaaaactattttcttaaccgctcaacgttagtttcagtattccttctaatagatgctagcattcctgctaaacaaattgatctcgactatg

SEQ ID NO: 259955 - DNA, 410 bp, Glycine max
tctcttactttctcagcctttttcgattacccatttggttatttcgccctaatggctcttgctccatccaaagtttccaccttttctggtttttctcccaaacccagtgttgggggtgctcagaaaaacccaacttgctctgtttctctgagctttttgaatgagaaacttggaagcagaaaccttagggtttgtgcctcaacggtgcctctcactggggtgatttttgaaccgtttgaggaggttaagaagagcgagcttgctgttccaactgctccccaagtctcgttggctcgtcagaactacgctgatgagtgtgaatctgcgattaacgagcagataaatgtggaatacaatgcttcctacgtgtaccactccttgtttgcatactttgacagggacaacgtggc

SEQ ID NO: 259956 - DNA, 351 bp, Glycine max
ctctttcaaactccatcgcagattcttcgctcgtttccattgattcaaaacatggctaccactcctgccagatctttcctccaagtcgccgcaacggaggaggctgcgccgcctctcagagtcgtccagattgaaggactggttatcctgaagataattaagcattgtaaggaccactcgccttctttagtcactggacaacttcttgggttggatgttggcagtgttcttgaagttaccaactgcttcccctttccaatgagggaggaggatgaggaaattgaagctgatggtgccaattatcagcttgaaatgatgagatgcctgagggaggttaatgttgacaacaac

SEQ ID NO: 259957 - DNA, 378 bp, Glycine max
cactcgcttattcttttctttccatacacatgcagacaataagttcgaacaagttcaggactggcatggacttctttcaccgcgcgaaggcggtgcgcctccgcagccaccacgacaagtacctcctcgcggaggacgacgaggattcggtgacgcaggaccgcaaaggctcctcgaaaagcgcgcggtggacggtagaatacgtggctgaatacgataacataattcgcctgaagagctgttacggcaagtacctcaccgcctccaaccaccgcttcctcttgggcatgaccggccaccaggtcctccagacgcttccttcgaggctagactcttctgttgagtgggagcccgtcaaggaaggagggcgcgtgaagc

SEQ ID NO: 259958 - DNA, 360 bp, Glycine max
ttattcttttctttccatgggcatgcggacaatatgttcgaacaagttcaggactggcatggacttctttcaccgcgcgaaggcggagcgccttcgcagccaccacgacaagtaccttctcgcggaggacgactaggattcggtgacacatgaccgcaaaggctgctcgaaaagcgcgcggtggacggtagaatacttggctgaatactataacataattcgcctgaagagctcgtacggtaagtaccttaccgtctgcaaccactcgattcttattgggcatgaaccggccaccatgtttcttctgacacttaccttcgagggctagactatttttgtttgagggggagccccgtcatg

SEQ ID NO: 259959 - DNA, 393 bp, Glycine max
  unsure (1)..(393): unsure at all n locations
ttgtgttctcccttgctctcctaaccgccgcttttcgcgaaagcgaaatccactcaccaatggttagtgccattcaatcctctcaattcaacaacaacaacacctgccctgattacaaaacagctttgaactctgctgaatggacttgcatgacatgcctaaaggcttcaccatcttgtggttattgtgctgctgatgacaagcttttacccggggcatgtttgatagccaatgttgacacaaagaagatgtgtggcaatgaccatagggcatggtacactacggngtgtcctagcaaatatggttgggctgccctaataggccttgctctatacatcatattcttctcacccggcatgggaactgttccatgggttgtgaactctgagatct

SEQ ID NO: 259960 - DNA, 423 bp, Glycine max
  unsure (1)..(423): unsure at all n locations
gaacaacatgaaacaacagaaagacatagaagaagggatggtagaaagtggagtcaagaacaagaggaaaccttttgccaccaaccgcgcctatttctactgggttactcgtgagcaaggttcctttgaatggttcaagggtgtgatggatgatgttgccgagtatgacaaggatggaataatagaacttcacaactattgcacaagtgtgtatgaagaaggagatgctcgatctgctttgatcactatgcttcaatcgctccaccatgccaaaagtggcgttgatatagtttcagggacaagggtcaagacacactttgctagaccaaattggcgcagtgttttcaaacacactgcactcaaacaccctgngaaaagaatggtgttttctactgtggggcgcacacattggttggagaactt

SEQ ID NO: 259961 - DNA, 411 bp, Glycine max
tcaatatcattttatctctcctctccctctcccacgcctccgtggtggatttctgcgtagcagactacacaggccccaatggccccgcagggtactcatgcaagagcccagcaaaggtcacggtggacgacttcgtctactccggccttggcaccgccggcaacacctcaaacatcatcaaagccgcggtgacgccggcgttcgacgcgcaattccccggcgtcaacgggcttggaatctccattgcacgcctagacctagcagccggtggagtcatccctcttcacacgcaccctggtgcctcaaagctgctggtggttgtgcagggaacaatctgcaccggcttcgttgcttcggacaacactgtgtacctcaaaaccctaaaaaagggtgatgtcatggtgtaccctc

SEQ ID NO: 259962 - DNA, 427 bp, Glycine max
tccttgccttggcaaatccgatgtagaaggcatttttgatcccccttactacgagtggtttcagttcaacaaggaatttacagagtacaccaactttgacgagtgccttcagtacattgaggaatgcatgatcaagtacggacctattgatgggcttcttggtttctcacagggatcaatattatcggctgcgctgccgggtcttcaggagaagggcgtggcactcacgaaggttccgaaagtgaaattcctaataatagtaggaggggcaaagtttaagtcaccttcagtgatggacaaagcatattcttcttccattagctgtccctccctccactttataggagagacagattttttgaacaagtatggggctgaactactagaatcctgtgttgaacccgtggtgattcaccaccccaaagga

SEQ ID NO: 259963 - DNA, 481 bp, Glycine max
  unsure (1)..(481): unsure at all n locations
cgggnccgcccacgcgnccgcgccccggccactctgcngnannnnnccacttcttctccttccttctctcggatcatcactcctcgtttcgctttcgctccaatcactcgcatctctctccgaaacggcgtccgtagcaaggcgatcgaagcagtgaagttggagaatggaaggccgagcgcgagcgagttcgtagtcagcggaagcggaaacgcaattccgagttacgtcgtggcgccaaacgcgcgtgttcaggatttggttaaccgaaacgacactcgcctccggatattctccggcactgccaatccggctcttgctcaggaaattgcatgctacctgggcctggagctaggaaaaattaagataaagcgttttgctgatggtgagatatatgtccagctgcaagagagtgtcagggggtgtgatgtgtttcttgtgcagcccacatgtcctcctgcaaatgagaatcttatggagc

SEQ ID NO: 259964 - DNA, 413 bp, Glycine max
cgttcacgctacccctttctgctcttcttctacctttcaagttttaaaagtataaagatggcagagacattcctatttacctcagagtcggtgaacgagggacaccctgacaagctctgcgaccaaatctccgatgctgtcctcgacgcttgcctcgagcaggacccagacagcaaagttgcctgcgaaacatgcaccaaaaccaacttggtcatggtcttcggagaaatcacgaccaaggccaacgttgactacgagaagatagtgcgtgacacctgcaggaacatcggcttcgtctcaaatgatgtgggactggatgccgacaactgcaaggtcctcgtcaacattgagcagcagagccctgatattgctcaaggtgtacacggccaccttaccaaaaaacctgaagaaat

SEQ ID NO: 259965 - DNA, 396 bp, Glycine max
tcacgctacccctttctgctctggttctaggtttcaagttttaaaagtataaagatggcagagacattcctatttacctcagagtcggtgaacgagggacaccctgacaagctctgcgaccaaatctccgatgctgtcctcgacgcttgccttgagcaggacccagacagcaaagttgcctgcgaaacatgcaccaaaaccaacttggtcatggtcttcggagaaatcacgaccaaggtcaacgttgactacgagaagatagtgcgtgacacctgcaggaacattggcttcgtctcaaatgatgtgggactggatgccgacaactgtcaagtccttgtcaacattgagcaccacagccctgatattgctcatggtggacacgggcaccttaccaaa

SEQ ID NO: 259966 - DNA, 426 bp, Glycine max
  unsure (1)..(426): unsure at all n locations
aaagacaagctttcttaatttggcgtcgcagactggcaagacttgaggaaaatgagaatcttgtcctaaccccgtttgagaaaaatcttgatatttggagacaactctggcgggttgttgagcgcagtgatttgctcgttatggttgttgattcccgagatccactattctatcgctgtcctgatcttgaggcatatgcacgagaggtggatgaccataaacgcacattgctcttggttaataaggcagatcttttacccgcttctgtcaggtttaaactttttgtatatggtttattgttatattccgttaaatcaacactcttggttttccatccagctaatattcttatcatttgtcttctcccctgccctttnttcttgcagagagaaatgggtagagtatttttgtgctcataatattcta

SEQ ID NO: 259967 - DNA, 350 bp, Glycine max
atgacaagctttcttaatttggcggggcagacgggcaagacttgaggaaaatgaaaatcttgtcctaaccccgtttgagaaaaatcttgatatttggagacaactctggcgggttgttgagcgcagtgatttgctcgttatggttgttgattcccgagatccactattctatcgctgtcctgatcttgaggcatatgcacgagaagtggatgaccattaacgcacattgcttttggttaataaggcaaatcttttacccgcttctgtcaggtttaaactttttgtatatggattattggtatatttccgtaaatcaacacttttggttttccattcaactaatattctta

SEQ ID NO: 259968 - DNA, 406 bp, Glycine max
  unsure (1)..(406): unsure at all n locations
tcctccggttccagcgaccaaaagctgggccgacgaagcggacgaagaaaccaacgcctccaccgccgaggcagaaacctcctccgttaacctggaagcgttaaccatcgacgacaaagaaaagaactcttcaaaactcttggacgaccccgacgattctaatattcaagcggttacttctggcgatacgccgtacacgtcggcagcgaggttcgaggacctaagcctctcgccagagcttttgaaggggctctatgtggagatgaagtttgagaagccgagcaagatccaggctatcagtttgccgatgatccttagcccgcccaatcgggacctgattgcgcaagcacacaatggctctggcaagacgactngcttcgtgcttgggatgcttagccgtgtcgat

SEQ ID NO: 259969 - DNA, 227 bp, Glycine max
ccggattgcaaccatgtcgaggagaaaggttagagagccaaaggaggaaaacgtgactctgggcccagctgttagagatggtgaacatgtttttggagtcgctcgcatctttgcctccttcaatgacaccttcattcatgtcactgatctgtctgggagggaaacacttgtccgcatcactggcgggatgaaagttaaagctgacagaaatgaatcatcttcatatg

SEQ ID NO: 259970 - DNA, 428 bp, Glycine max
agatcattgttttagagagagagagagagagagagagagagagagagaggatgtttggttcaaagaaaactcctctgagagatgctaaacctacctctgttgaccatgcccataacccctttgattctgatgaagatacaaaagataacaagtataattcttctaagaagactttgaccaacaccaacccctttgatgatgatcatgttaatgccactggccactcttcatcatcttcttatggcctttcgtctacccatcgaaataggtataagaacgatttccgcgactcaggggggttggagagtcaatctgtgcacgaattggagaactatgctgtttacaaggctgaagagacgacaaattcagtgaacagttgtttaaagatagctgaggaaatgagagaagatgctaccaagactttggtg

SEQ ID NO: 259971 - DNA, 379 bp, Glycine max
  unsure (1)..(379): unsure at all n locations
cgacccacccctccnattccacaacannnnnangganannnaaagagagagtggaaaagatggcgcggttgatcacagtggtgtggtgcgcggtggcggtgctattatgcgccgcggccggtgcgtcgtgggtggaggaggcggcgaacccgatacgaatggtgtctggcgtggaggcggaggtggttcgggtgatcggggagtgccggcgtgcgttgaagtttgctaggttcgtgagcaggttcgggaagagttaccaaagcgaggaagagatgaaggagaggtacgagatattctcgcagaatctcaagttcatccgctcccacaacaagaagcgtttgccctatactctctctgttaatcattttgctgattggac

SEQ ID NO: 259972 - DNA, 421 bp, Glycine max
aactatcctgagtggaaactgttcgttcagacaatagatcctgagcatgaagacaaatttgactttgaccctcttgatgttactaagacttggcctgaggacattatacccttgcagcctgttggtcgcttggtcctgaataaaaacatagataatttctttgctgagaatgaacaacttgcattttgccctgccattgtggttcctggtgtatactactcagatgataagatgcttcagaccaggatattctcttatgctgattcacaaaggcacagacttggaccaaactatctgcaacttcctgctaatgctcccaagtgtgctcaccacaataatcatcatgaaggtttcatgaatttcattcacagggatgaggaagtcaattacttcccttcaggtatgatcctgttcgtcatgc

SEQ ID NO: 259973 - DNA, 424 bp, Glycine max
cttacagagaagagtgagtgtgtgtgataataattgggatcaactaatcaatcaatttgaatggcatcatccaattcggctcagctagaagggaacaaacccgcaaagagaaaacccgtgttcaccaaagtggatcagctcaaacctggaaccaacggtcacacgttggtggctaaggtcttgtcctccgacaccgtcgtacacaaaccgcgaccctcttccgcccacaacctcaaacccactgtcatcgccgagtgcctcatcggcgacgacaccggcaccatcgtcttcaccgctcgcaacgaacaagttgatatgatgaaggctggagctacagtaattattcgcaatgcaaagattgacatgttcaagggatcaatgaggatggctgttgacaaatggggccgtgttgaggtaactgatc

SEQ ID NO: 259974 - DNA, 296 bp, Glycine max
  unsure (1)..(296): unsure at all n locations
gagatggaaagagtagcatcagtatctcggccactgaaaatatacttcctcccattcttctcaccggggcacctaatccctctggtccagctggctcgcttggtggcggcacgaggccagcacgtgaccatcatcaccacccccgccaacgctcaactcttcgaccagaacatcgacaaggacaccgncttcgggcaccacattcgggttcacattattaaggtccccaacgcccacgtagggctaccggaaggcattgagcaccttttcgccgccaccaacaatgaaaccgccta

SEQ ID NO: 259975 - DNA, 417 bp, Glycine max
gaagatggaggctttgaggtaataaagaaggcgatattgaatctatcgcttcgccacaaagatcacatcagtgcatatggagaaggaaatgagagaaggttgactggaaagcatgagacagcaagcatcaacacattttcttggggagtggctaaccgtggttgctcaatccgtgtgggaagagacactgagaagaatggcaaaggttacttggaagataggcgaccggcttcaaacatggatccatatgttgtgacatcattacttgcagagactacactattgtgggagccaactctggaggctgaagctcttgcagctcaaaagttagcattgaaggtctaaacctattgattgatgaagagctggaaaatactttcactttccttttagattatctatattataatgatcttg

SEQ ID NO: 259976 - DNA, 271 bp, Glycine max
ggaactaaccctgtttgccatttccttggaagcaaggccattttatgggtacccaatttatctatggacactgtctatcagactaacgttgttgtttaattagtccatgcatctgcatcttgggcaccataagattgtatataaaataaattatggtgtgttgtgtatgttgtgcaagacctggaacttcacctttctacgtacgtgtgctgttaggatgcagtgtgctttgatgatgctttgatgaatatgcagtgtgcttttttaagtc

SEQ ID NO: 259977 - DNA, 301 bp, Glycine max
cttagcagcagtagcagaaatggctaccacttctgcttcattcgctcgcttctccgtcatatcgcgaccttcttcgtcaaatccccaattcatcctcttcaacgccgctccccgaaccggaacccctcattcccgaaccggttcggcccggttcaagtgcttggccggccagaccgggttcttcacgaaactagggcggttgataaaggagaaggcgaagagcgacgtggagaagctcttctcgggattcttcaagacccgcagcaacctcgccgtcatcgacgagcttctcctctattgg

SEQ ID NO: 259978 - DNA, 420 bp, Glycine max
agaacgtttggcaacatgaggtccttcgtaagcaattcgatgggtggtctcaggggcggaagcaaccttgcttcttgggtcgtcgccggaaccctagcttacttcctctggatcaaaccctcccaagacctcaagcgtgaacagcaggagaaggccgctcttgccgccgccgagtctgatccttatcgttacgttgagactcgtaaacccattcccgatcctcaagttacgggtttgatatatggaaacaagaacaaggacaaaccaaccaaaccagaggattgattcattcattagcattcatggttcaaaatggagataattaataataaggcatatctcgtgttttcatgcacgctcttattcatctttgctaatatattactactgggttatggattcacgtttatgtgtttatac

SEQ ID NO: 259979 - DNA, 362 bp, Glycine max
aatagcatgtgaaggggaggaaagagtggaacgtgacgagcttctgaagaagtggagatcgcgttttactatggctggattcgcaccatatccactgaactcgtttattacttgttcaataaaaaatcttcagcgaagctaccgaggacattacactctagaggagagagatggggctctgtgtcttggttggatgaatcaagttcttattacctcttgtgcttggaggtgatgatccaatggcaactgggtcaattttgttatttcagacttttagttagttatgtatcatcatatcttctaccagaatcatagcaagtactctgagttgtataaataaataaaaaaaacacttattatgt

SEQ ID NO: 259980 - DNA, 432 bp, Glycine max
ttagcaacggttgctctgctctacgtaaaggacaagcaagtggaagcacgggccttggatgacgccacgcaaccctcgtgcttctttcagcttttcggtgctctgaaagagctcaagagaccgatgtggatgctgatgctggtgacagctgtgaactgggtggggtggttcccttactttttgttcgacaccgattggatggggcgcgaggtgtacggtggtcaagtgggggaggacgcgtacgccaatggagtgcgcgttgggtcgctagggctgatggtaaacgccgtcgttttgggcttcatgtcgctggcggtggagccgttggggaagatggttgggggagtgaagaggctgtgggcgattgtgaactttattctggcaattgggttcggaatgacggtggtgatcaccaaggtggcggagcaccaa

SEQ ID NO: 259981 - DNA, 418 bp, Glycine max
aaaattaagcaacgattcaagaagaaaatgggttctgaacttgaagctcccattcacgtcctcatggtgtcctatccagcacaaggacacataaaccctttgctcagactaggtaagtgccttgctgcaaagggcttatttgtaaccttcaccacctcagagaccgctggtaaaaacatgcgaaccgccaataacatcactgacaaatcagtgattcctgtcggcgatggttttctcaagttcgatttctttgaagatggcatggcagatgatgatgatggtcccaagaagataaatctcggtgatttcagtgcacagcttgagcttttcgggaagcaatacgtttcccaaatggtcaagaagcatgctgaagaaaaccacccattttctggcatcataaacaacccttttgttccat

SEQ ID NO: 259982 - DNA, 343 bp, Glycine max
aaccttgcaggccaggatgtgactgatgcattcgtagcataccatccaggctcagcatggaagtatcttgatcccttcttcacagggtaccacctaagagatttcaaggtctcagaggtgtcaaaagattacagaaagcttgtgtctgagtttgtcaaaatgggtctttttgagaagaaagagcatgttactctttacacactgtcctctgttgctgtcatgttttcaattgttggttatggtgtcatagggtgcagaaaggtgtgggctcatcttggtgctgccccttttgtgggcttgctttggatgcaaagcacttacgtgggtcatgacgctggcacta

SEQ ID NO: 259983 - DNA, 470 bp, Glycine max
aattcccggggcttgttgttgttggaaagaaaccctagcaagcggaacaatggcagacgttgaggtcgatgtggcggctgcagcagcagcagggcagccgaagaagagaacgttcaagaagttcagtttcaggggcgtggatctcgatgcgcttctggacatgtccaccgatgaactcgtgaagatgttcagtgctcgcgcacgtagaaggttccagagaggcctcaccagaaagcccatggccttgatcaagaagcttcgcaaagcgaaaagagaagctccaccaggtgagaagccagaacctgtccgcacccacctccgcaacatgattattgtgcctgagatgattggtagcattattggagtgtacaatggcaagacctttaatcaggttgaaatcaaacctgagatgattgggcattatctggcagagttttctatttcatacaaacccgttaagcacgggagac

SEQ ID NO: 259984 - DNA, 451 bp, Glycine max
ccgggtcgacccacgcgtgcggcaactgtgggcaagtttagtgtgatatgggattttcagcaggtgaagaacagtgctcatgaatgtgacaggaatcaagaagggctgaagagctgttactgttacaagataatattgaaggatgagtccattgtagaatcgcgatttatgcacgacaaatttgctgttagtgactctccagaagctccgttggtggtggcaactcctatgaaagtcagctcaatcagcatgtctggaaagcgacatggttaaacctctgtttacattttttctttaaaggtttcaaatttctagtgttaggagtgtctttgaagtttgaacaatatacttgcttgtatccaagtttgagatgctgttatttttctgtaaagcacgttttaggttgccctgtatgtattttcttcttttttgtgattagtttgggtttgct

SEQ ID NO: 259985 - DNA, 396 bp, Glycine max
ccgggccgacgcacgcgtccggcaactgggggcaagattagtgtgaggtgggattgtcagtaggagaagaacagggctcgggaatgttacaggaatcaaaaatggcttaacagctgttactggttcacgataatataggacgatgagtccattgtagaatcgcgatttatgcacgacaaatgtgctgatagagactctccagaagctccgtacggtggtggcaactcctatgaaaggcaggtcaatcagcatgtatggaaagcgacatggataaacctgtgtttacattttttctttaaaggattcaaatttctagtgttaggagtgtctctgaagcctgaacaatatacttgctcgtatccaagattgagatgctgttatttttctgtaaagcac

SEQ ID NO: 259986 - DNA, 469 bp, Glycine max
accgtccggattcccgggtcgggcacgcgtccgcacctccttagtttcgaaagcatggcttccctggcggcttccaccgcgggtgtgtcaggaatccttggaaaccccgttaacctcagatgcgcaaccaggtctgctccatcaccaactacacctgccaccttcaagaccgtcgcacttttctccaagaagaagccagctccacctccaaagaaaaagcctgccgctgtatcccccgccaatgaggaactcgccaagtggtatggtcctgacagaaggatcttcttgcctgagggtctcttggaccgatctgagatccccgagtacttgaccggagaagtgcctggagattatggttatgatccgtttggtcttagcaagaagccagaggacttcgccaagtaccaggcgtttgagttgattcatgccagatgggcaatgcttggtgctgctggattcatcattcctg

SEQ ID NO: 259987 - DNA, 379 bp, Glycine max
cggtccggaattcccgggtggaccacaccgtccgcccacccgtccgtggaggattgggatcaacagaccttggggaaggtgggggagtcaaagaaaactgagtataattagaataaaccaactgacatagtctgtaaatactttttgggtgcagtggaaaagaagcaatatggttggttttgggtctgccccaatggtggtaagaattgccattatagacatgctcttgcacctggatatgttttcgaaatctcaaatgaatgctttgttcgaggaagaaagtgaaaaaatatcaattgaagaggatgattgaaatcaggcgtgccaaagtggcaactacaactcctatgactcctgagatattctttgagtggaagaa

SEQ ID NO: 259988 - DNA, 457 bp, Glycine max
ccggaattcccgggtcgacccacgcgtgcgctctactctactgcttcaccttctgctctagaaaattcagtggtgatacatggcttcggctactctctctgtagccaaaccagcccttcaggcaaatgggaaaggcttctctgaattctctggcctccgcagctcatcaggcttccttcccttttctagaaaatcttcagaggatttccattctgtcattgccttccagacctatgcagttggaagcagtggaggatacaagaagggtgtgacagaagcaaaactgaaggttgccataaacggatttggaaggattggaaggaacttcttgaggtgctggcacggtcgcaaagactcccctcttgatgtcattgccatcaacgacaccggtggcgtgaaacaagcctctcaccttctcaagtacgattcgatcctcggaaccttcgatgctgatgtc

SEQ ID NO: 259989 - DNA, 459 bp, Glycine max
ccgggtcgacccagcgtccggttcttcttcttcttctcctttaaccaaacaacaagaaaaaaaaaatcacattccccagaacacccttctcgctccgcatggcgaaaacgaggccaggcagaaaggacgtggactcgtacaccataagaggaaccagcaagatcgtccgagctggagactgtgttctgatgcggccctcggacacgtcgaagccgccttacgtggcgcgcgtggagaagatcgagcaggacaacaggagcaacgtgaaggtgcgtgtgaggtggtactaccggccagaagagtcgattggtggtcggagacagttccacggggctaaggaactgttcctctccgaccactacgatgtgcaaagtgcacacaccattgagggcaagtgtgttgtgcactcttttaagaactacaccaagcttgagaatgtgggtgctgaggattactatt

SEQ ID NO: 259990 - DNA, 392 bp, Glycine max
accgtccggattcccgggtcgacgcacgcgtccgcccagcgtccgcttgcttccaaagattatggagttggtggggctagggtgcactggatggtttgtctaccgataccttctgtttaagtctagcaggaaggagctagctacagacattgagtcactgaagaagaaaattactggaactgaatagagtggtgttagcaggtaccaagtcaagtttatcttctgtgagcatcatttgtttttgttgtgctgtttatctcatgtataagagtcatatgtatcccttgaagtagaatagaattcctctcaacctgtaatgaacccatttcattgttaaaaataatgtagcaaattttacgtatatggctctgaatggaaaccattatcctttc

SEQ ID NO: 259991 - DNA, 259 bp, Glycine max
atttatagaaaattttccctcatcatttgattttcttaaaatatcagtcaacaaagtgtctgagaaaatgatgcacaaagcttacacaagaaagcaagaaattaatcacattaaccaagtttggcaaggacatcgttcagagaagatacagtagcagcatagtacttctctgcttctgggctgctcttaatttttgctgcatgatccagattgctgatatcctggaagagcttgccagtgagttccttgagtgatttct

SEQ ID NO: 259992 - DNA, 473 bp, Glycine max
ccggtccggaatgccggggtcgacccacgcgtccgcccacgcgtccgcccacgcgtccgaaaagttagggtttgtaactttgtctggggcttgcgaatctgaatcgaataataatcaatcaatcatcatgtcgtcggcgaagaagatcacactgaagagttcggacggcgaggctttcgaggtggacgaggcggtggcgctggagtctcagacgataaagcacatgatcgaggacgactgcgccgacagcggcatccctctgccgaacgtgacgagcaagatcctggcgaaggtgatcgagtactgcaagaagcacgtcgaggccgcgaatcccgaagacaaaccctccgaggacgatctcaaagcctgggacgccgatttcgtcaaggtcgaccaggccacgctcttcgatcttatcctggctgcgaactacttgaacatcaagagcctgctggaccttacatgccaaactg

SEQ ID NO: 259993 - DNA, 464 bp, Glycine max
ggtccggattcccgggtcgacgcacgcgtccgaaagcttgggtaggcctggtggtattgctgtgtttgattgtcacggccatcgccgaacaatgcggtcgtcaagctggcgggcagacatgtcccaacaacctatgctgcagccagtacggttggtgtggaaacaccgaagaatactgttccccttctaagaactgccagagcaactgctggggaggcggcggcggtggcggtggcggcggcggcggtgaaagtgcttctaatgtccgcgccacatatcattactatgagccagagcaacacgggtgggacttgaacgccgtgagtgcttattgctcaacttgggacgctagcaaaccttactcatggcgcagtaaatatggctggaccgctttctgtggtcccgttggtcctcgtggccgtgattcttgtggaaagtgcttgcgggtgacaaatacaggaaca

SEQ ID NO: 259994 - DNA, 427 bp, Glycine max
ccggaattcccgggtcgacgcacgcgtccgcccacgcgtccgcccacgcgtccgcccacgcgtccgactgtctgatgttgaagggttatgcgtatgatttgctggtatttataactcatctgatcctgtacttgctgtaaaggaatatttgaaggaagaaccatatacagctgaagaaattgaagcagttacaggggaaaagctgacttcatttttgaacaataatgcagcttatttagaagtgttaaaagttgcaaagcaatacaagttgcatcagagagctgctcatgtgtattcagaagccaagagggttcatgctttcaaggatgtcgtatcttcgaatctaagtgacgaggacatgctaaagaagcttggtgaccttatgaacgagagtcatcatagctgcagcgttttatatgaatgcagc

SEQ ID NO: 259995 - DNA, 476 bp, Glycine max
ggcccggaattcccgggtcgacccacgcgtccgcccacgcgtccgcccacgcgtccgcaaagtgagaaggacaagaagaaacaaatgactacagaagagaagaaggctttgaaggaagagaaaatgaaactagaggagaaatacatgtgggctattgttgatggtgttaaagagaaggttgggaattttagagttgaaccaccaggattgttccgaggccgaggagagcaccccaagatgggaaaattgaaaaaacgcattcatccaggtgatatcacaattaatattgcaaaggatgccccaattcctgaatgtcctattcctggcgaaaggtggaaggagataagacatgataatacagttacttggttagcctattggagtgaccctatcaatcccaagctattcaaatatgtgtttctggctgctagtagttccttgaaggggcagagcgacaaggaaaagtatgagaaagc

SEQ ID NO: 259996 - DNA, 462 bp, Glycine max
  unsure (1)..(462): unsure at all n locations
ccggnccggaattcccgggtcgacgcacgcgtccgcccacgcgtccggagatgatgaagagatctggaaaacatgaagcggagggaggagaagacatactcatcgacagattcctcaagcgcctctctttcgtagccatcgcagtagcctcctcctctccgccgcttcctccaacaactacaaccactcccgcgtcctctgcgtctccgccggcgccggccacgaggtcgccgcgctccgccgcctcgggatcgacgatgtcaccggagtcgagatcctcgagtccccgccgctcgtccgccgcgccgatccgcacaatctgccgttcttcgacggcgcgttcgacctcgccttcaccgcgagattcgacgaggcactgttcccggcacggttcgccgccgagatggagcgcgtcgtccggccaggtggcgcgtgctttcttctcgttgcggagtctgggga

SEQ ID NO: 259997 - DNA, 452 bp, Glycine max
aattcccgggtcgacccacgcgtgcggttttgtagatggcaagtgggtttggggaatcaacagggagatcacccccaagcccttcctacttgaacaacaataataacaatgatgctgccaattttgaatgcaacatttgctttgaattagcgcaagacccgataattactttgtgtggtcatcttttctgctggccctgtctttacaaatggcttcactttcactcacaatcacgagaatgcccggtgtgcaaggccctcgtggaggaggagaagctggttcccttgtatgggagaggaaagtcgtcgactgatccaagatcaaaatctattccgggcgataacatcccgcatcgtccggctggtcagaggcctgaaactgctcctccacctgaaacaaatcattttcatcaacatgggtttggatttatgggtggcttggggggatttgcg

SEQ ID NO: 259998 - DNA, 438 bp, Glycine max
aaaatcggggcgacgcacgcgtgcggggtgagcaaaatcaaagacggatatatcccggcttcttggatgttggaagttacaaggtcaacggaggaacttagtttgggtgttgattttactgacttgtacaagaattctgatctatataggataaacaagcagcttatacaagaactgggtcaacctgctcccggttcaaaggatctttatttccctactcaatactctcagtcattcttggtccaatgccaagcttgcttattgaaacaacgttggtcatattggcgtaatttaccatacactgctgtgaggtttttcttcactactttcatagcccctgttgttcggaacaatgttctgggacctcggaagtagacgtacaacaagaggagacctgtgtgaatgctctatgtttaatgttttcttgtgttttttttc

SEQ ID NO: 259999 - DNA, 463 bp, Glycine max
cggaatcccgggtcgacccacgcgtccgcccagcgtccgctttctctctttgaccaatcccaaacccaaaacaaaaaataaaaatggagggggatctgaagcagaagctgttgagaagaagaaaggaagaggaagaagaagaagaagaagagttatcattggccaagagggtgtggaatgagagcaaggttatgtggatagtggcggcaccagccatattcacaaggttttccacctttggaatcagtgttataagccaagcttttgttggccatattggttctaaggaattggccgcttatgctctcgttttcaccgttctcattaggttcgccaatggtgttctgttaggaatggcgagtgcgttgtcaacactttgtggacaagcatatggggcaaaagaatatggcatgatgggagtgtatcttcaaagatcatggatagttttgttcttaactgcagt

SEQ ID NO: 260000 - DNA, 436 bp, Glycine max
cggattcccgggtcgaccccgcgtccgattctctcttctctctgcatcgcttcggttcttctgaaaagatgtctcgcgtgtatgttggtaacttggattcacgagtcaccgagagagatctcgaagacgaattccgtgttttcggagttattcggagtgtttgggttgcacgtagaccacctggttatgcttttattgactttgatgaccgcagagatgcacaggatgctatccgtgaattggatggtatgtttagaagaattatgttgttggaatgtaatagaattaaaatcaaaattaaaatgtgcatatatatgtatatttgctacattcttcttatctgctaatgtgttattgtttttcccccatgttttttccggttgatatgttgaagggttttcctcaactagctagttaagtcttctttttggcctat

SEQ ID NO: 260001 - DNA, 299 bp, Glycine max
  unsure (1)..(299): unsure at all n locations
gcgtncgcccacgcgtccgnccacgcgtccgggccgccgggccaacggactcttttgggccaccggttgaaggcccaacccctccgccaatttttcattcgccgcggccaaggccattaacggcttgaaggatcaaagccaagttttaacttccccttacccaacttacgtgggggttaacaacggcaacgggggcccgaaacttcttgaattgtgaaacagcgcctctttccttatatgcacacattcgccactgagcaaagaaggttgtctgtggatgtgataaaaaaggcattcag

SEQ ID NO: 260002 - DNA, 457 bp, Glycine max
  unsure (1)..(457): unsure at all n locations
gttccggaatccccgggtcgacccacgcgtccgggcggngataagattaaagattcaacaatggcctctgcttctgctactcttctcaagtcatctcctgttcttgacaagtgcgagtgggtcaaaggccagacccttcgccaacctctcgtgagatgtaacccttcctcagcatcagctctcaccatcaaagctgcttcctatgctgacgagctcgtcaaaaccgccaaaacagtggcctcaccggggcgtggtattttggcgatggatgagtcaaatgcaacctgcgggaagcgtttggcatctattgggttagagaacacagaagctaatcggcaggcataccgtaccctacttgtgacagtacctggtcttggtgaatacatctctggtgccattctctttgaggaaactctctaccaatccactgtcgatggaaggaagatcgtcgacgtac

SEQ ID NO: 260003 - DNA, 473 bp, Glycine max
cagaatccccgggtcgacccacgcgtccgcccacgcgtccggtggatgtgaaactgggaaaatggggagagcctttgtgtatgtgattcttggaggaggcgtggctgctggctatgctgctcttgaattcgtcaagaaaggagtctctcatggtgaactctgtattatttccgatgaaccagttgctccttatgaaaggcctgcattgagcaaaggatttttgcttccagaagctgctgcccggcttccatcctttcatacctgtgttggtgcaaatgaggagaggctaactccaaaatggtataaagagcatgggattgaattagttcttggaaccggagttaaatccactgatgtgaaacgtaagacactattaacaacaactggagagaccataagttacaagattctgattgttgctactggtgctcgggctttgaagctggaagaatttggggtgaagtgatcagatg

SEQ ID NO: 260004 - DNA, 185 bp, Glycine max
  unsure (1)..(185): unsure at all n locations
gaagcaagaggatatcgatgtcagcccaatctctcgccggttagctctaaccgtgctcattggtgctgctgatgatggctccaaagtccaacctgctgatgcaacttatggggaagctgccaatgtgtttggaaagccaaatacagacacagaattccatccatacaatgganatggattcaaac

SEQ ID NO: 260005 - DNA, 415 bp, Glycine max
cgggtcgacccacgcgttcgcccacgcgtccgcatcttcctctttttctcaaccaaaaggggttcaattctagctagttggatacatcgtccgcgaccatgaacatggcgatcgtgcttctgttcatggttttcgcagtctcatcagctttagacatgtcaataatatcacatgacaacgctcatgctgatagggccacgaggcgcaccgacgactaggtgatgtcaatgttcgaggagtggctggtgaaacacgactaggtgtacaacgcgctcggtgagaatgagaagaggtttcaaatcttcaagaacaatttgcgctttatcgatgaacgaaactctttgaacccaacctacaagttgggactcatcgtgttctctgatcttacccattctgaattcagaatccttgtcct

SEQ ID NO: 260006 - DNA, 441 bp, Glycine max
  unsure (1)..(441): unsure at all n locations
ccggncttgaatncccgggccgaccgacgcgtacgaccacgcgtccgcaaaattgtttcaagcaccgacagaaccggaagcaccctttgtttcaaaggttcaaagaggggaggacgggttattcacatttcatttgatggtcagaggcgaattgaaagctaagctgtggtaattctaaggattccccccgggaaaaatagagatgtctcctacgttacccgtaccatgtggaagtagcgacgtaatttcatagagtcattcagtctgaatgctacatgaagaacataagccagatgaaggaacgggaagacctaggatgtagaatatcataacatgagtgattcggcagatttggattcctatatacccactatggcggtacttcattgtatgatctatatctatatagctatatctatatatctatctatagatatatag

SEQ ID NO: 260007 - DNA, 311 bp, Glycine max
gaatgccgggtcgacccacgcgttcgtccacgcgtccgcagacctatttctcatggttctaagctacatgcactaattggtgcctggcatagtggcactgttctagatttgccatttctttgcagaatgaacaggagtgggcaatatgtatgggaggaccatcgccctagatctggtgtatggaagggatctagtggtggagacattatctgcttcagtggatgcgatgatcattaaacttcagctgatacatctgctctatcgaagattacattgactggggcaatgacattttgcttcatccaatccat

SEQ ID NO: 260008 - DNA, 421 bp, Glycine max
aattcccggtcgacgattcatacggtacgcgtccggatggcttttcctcttcttactccttacaagatgggcgaattcaatctgggccatagagttgttttggcaccgctgaccagacagaggtcttacgacaactgcccacaaccccatgccatcctctactactcccagagaacttccaacggaggccttctcattactgaagccactggcgtctctgacacggctcaaggctatccgcaaacccctggcatatggactaaatgcattgttcaagcttggaaatccattgtcgatgccgtccacgccaaaagcggtgtttacatttgtcagatattgcacattgagatagatatatatttagtttatcagccaaatggacaagctcccatatcttctacggacaagccactctcacccc

SEQ ID NO: 260009 - DNA, 494 bp, Glycine max
cggtccggaatcgtccgaagcaggtcgctgaggaaaacaagcgtaaagctgtaatgattacagcagagaaggctgaacttgctgtttcaaatgggaaaacattttgtatatctcttgttgatgttggtctggatgtagctgcagttcgtgaggctgttacaaaagtcatggaccagaagggcttatctgtgatggtttttagcacggacgaatctacgaacaaggctgtagtgtgtgccggggtgccagagaaaggaggtaaaggtaatctggatgtggcagattggctgagtaatgctttggggcctctaaaagggagatgtggtaaaggaaaaggtggtcttgcaacgggtcagggtacagaggcatcacatgtaaacgaggctatagatctggcagaaaaatttgcgtcgatgaaattgagttaatggtgtatttgcagtatatccttcctggggtgtaagcatgatatggatctttcgtttggtggtata

SEQ ID NO: 260010 - DNA, 322 bp, Glycine max
  unsure (1)..(322): unsure at all n locations
ccggaattcccgggtcgacccacgcgtccgcccacgcgtccgaaggcataggaccagtangaaacataggctaatttccaacaccttagtaatgtcaacatgcaagatgatggtgttgctcaaatggctggacccaatggaagatcacctttgccagacatatttcaaccaaattttcaaactcaaactcctagctcaatgatcaacacttcaaggaaagaagaaactaaagcattngactttatctcggaccatatgacctctggtcgtgattcaagaggatgagattaaactttctatcttgagcctgtgtggaggatat

SEQ ID NO: 260011 - DNA, 375 bp, Glycine max
attcccgggtcgacccacgcgtccggtcgacgagtatggcaatgttgagaggcaaactgacgaatatggcaacccggttcatgccactagtgtcacttatgtagccaccaaaagtgttggtggctacaatgatgacgcttataagcaacatgatattactggtgtctatcccgagaaagacaccggtagacatcattttggtcgtggttacgacggtgacactaacaagcaacatgatgctactggtgtttatcccggaatagacattggtagagatcatgggactaccggtgtttatgggctaaacaccgacagacatcatggaacttctggggtgaatcccgggatatacacccatatccaacaacatgggac

SEQ ID NO: 260012 - DNA, 475 bp, Glycine max
aacgtactttgcaaaaaccctaaaccctctctctttctctctcggcgactctgcactcggcaatggcaacgcaatcgttagacgaagaaacaactaagaaagtcatacgacaggttgagttttatttcggcgatagcaaccttctcaccgatggtttcatgaggaatagtatcactgaaagcgaagatggcatgattagtttggcgctgatttgctcgtttaatcgaatgcgaaagcaccttaatttgggtgatgtaaagcccgaagaagtggcccaagataccgtgaatgctgttgctcaaactttgagaaattcagctacactcaaggtctccgaagatgggaaaaaagttggcaggaaaactgaacttccaaagctagaagaggttgagcaggtggagataagaacacttgctgtatcgccatttgaacatgatctgaagctttgagatgtggagaaactctttgtcaatat

SEQ ID NO: 260013 - DNA, 475 bp, Glycine max
  unsure (1)..(475): unsure at all n locations
cggagaaacttggcagttgatatttggtggctcatctgtttctggttgaagtgtttgggcancagtgccatggtaggcggaaccatgatggctgcgtatttgcgtgtatccatgcccacttccccacagtcccccaccactacgaggaggagatgcagaaatctgaaaacttcttgctccgttaacagacccaaaattccaatgccccctctcaaccctaaagacccctttctctccaagctcgctttcgtcgctgcttcttcccctgaaacgctcctcaacactcccaaaaactccgacacccttccttatctcgacatcttcgactcccccaaactcatggcaactcccgctcaagttgaaaggtctgtttcatacaacgaacaccggcccagaaggccgtcacctgacctgccttcgctgcttctccatggtagaattggttacattggcatgcctttggtgccagctgtca

SEQ ID NO: 260014 - DNA, 469 bp, Glycine max
cgcccacgcgtccgatgtaatacatgctaaaaaaagccttgacttcatagtccttacggtaatatgcctctttcctcttcttggtcttctttctttcttccgccactgccgcagagcgtagaaggaaatcaaacagcagagagagggtaaagcatacgtgggttaaatccatgcgcatgagtcggaagaatttgtgttagcggtgaggagatatattgagaattaatatttgatagtgtatatatggggaggggaagagtggagttgaagaggatcgagaacaagatcaataggcaagtgacgttctcaaagagaaggtctggtttgctgaagaaagcgcgcgagatctctgtgctgtgcgatgctgatgtggctctcatcgtcttctccaccaaaggcaagcttttggactactccaaccaaccttgtacggaaagaattcttgaacggtatgagaggtattcgtatg

SEQ ID NO: 260015 - DNA, 486 bp, Glycine max
attcccgggtcgagccacgcgtacggagagtttgaggaagaaatcatcatggcttctgcagcatctgggtttgtgctgtctcttaatgttgcagcttccaccacagactcaagggtggtcttgttcaacacaaagaacaacgcttctagacttcttgtgagggcttcagatgagcctgcagcggcggcacctgccaccgccacacccccagctgaagctgaagccaaaccaaaaccaccaccaattggtcccaagagaggtgctaaggtgaagattcttaggaaggaatcctactggtacaaaggcactggttcagtggttgctgttgatcaggaccccaacactcgctaccctgttgtggtccgattcaacaaagtcaactatgccaatgtatcaacaaacaactatgctttggatgagatcgtggaagtggaatgagtccaatttatttgtaattttgatacttgtcatgctatcgcagttact

SEQ ID NO: 260016 - DNA, 459 bp, Glycine max
  unsure (1)..(459): unsure at all n locations
gaagccgcagacatgatcaagaagggaaagatgtgtgctctcttcatcaacgatcttgatgcangagctggtcgtcttggtggaactacacaatacactgtcaacaaccagatggtgaatgccaccctcatgaacattgctgataaccccaccaatgtgcagcttcctggtatgtacaacaaggaagagaacccccgtgtgcccatcatcgtcaccggtaacgatttctcaacactgtatgctcctctcatccgtgatgggcgtatggagaagttctactgggcacctacaagggacgatcgtgttggcgtctgcaatggaattttccgcactgacaatgttcctaaggatgacattgtcaagcttgttgacaccttccccggccaatctattgatttctttggtgcactcagggctagagtatatgatgatgaggtgaggaagtggatttctgttggt

SEQ ID NO: 260017 - DNA, 358 bp, Glycine max
accttttctcttcctcaactatctcgaggcattagggtaatcgtatcttggtcctacacaatacacatgaaacaactcagcatgaacatgccaccctcattaacattgctgataaccctatcaaagtgcaccttactattctatacaactactaaaaataccccgcatttcatatcatcatcaccgataacgatttctcaacactatatgcttcactcattcattatgcacgcatgtaaaccatctactgaacacctaccatttaccatcattttggcatctataatgaaaatttcctcactaacaatgcttctaatgatgacataccctagccattttacaccttccccagacaatc

SEQ ID NO: 260018 - DNA, 430 bp, Glycine max
acgcgtccgtttctctgtgtgtcgtaatggctctcccagactcttcttcccgtcgcaactccctgatgccctccttcatctactcctcttcctccaaaacgctccctctccaccacatgctcaacaccgcctccgctgccgccgccgccgctccctccccgccgccggccaatctcgacgccggatcgcgtggcctcatgattccctctcccagcgagtcacgcaagatcgagttgtactcccccgccttctacgccgcctgcaccgccggtggaatcctcagctgtggcctcactcacatgaccgtcactcctcttgacctagtcaagtgtaatatgcagattgaccctgctaagtacaagagcatctcgtctggttttggagttttgcttaaagagcaaggattcaggggcttttttcgtggctgggt

SEQ ID NO: 260019 - DNA, 329 bp, Glycine max
ggtcatttttgacgttcatagacatattaccaggcctgattcaagagtgatacaatgaattaagcgaatgggagctcgatcgattccaaatcaaaggagaattttgtgcatgaacaagattgatctagtagagaaaaagaaagacttattgaaagttgccgaagaattcaaagatcttcctggatatgaaaggtatttcatgatatcaggactgaaggggtctggagtaaaagatctgactcagtacttgatggagcaagcagttcaacgaccctgggaagaagatccatttaccatgagtgaggaaggtatgaagatgatagcattag

SEQ ID NO: 260020 - DNA, 449 bp, Glycine max
  unsure (1)..(449): unsure at all n locations
gtccggtatgaagagagagaaaggaagagagaggaatgaagagcacagcactacacagctgcgaaataggangnggagaaattttgtatgcgttggatttcgtagatctgaataaatgacaaatgtatcattcaaagaatgttcctagtgcaagtttaattggtggtaattcattaagtcatggtcagcacatagattgtggtggcagcacaatggatcctggcagtggaggaaatggtcttagcaacaactctaatctcacctcanaacaacgtttacggtggacacatgaattgcatgagcgctttgttgatgctgtggctcaacttggtgggccagatcgtgccacacccaaaggcgtgctcagagttatgggtgtacaaggctttgaccattaccatgtcaaaagtcatttacagaaataccgactttgcaaatatttacctgac

SEQ ID NO: 260021 - DNA, 461 bp, Glycine max
ggtcagatgatgggtacaattggaggaaatatggccaaaaacaagtgaagggaagtgaggatccgagaagttattacaaatgcacataccccaactgccctacaaagaagaaggttgagaggtctttagatggacaaattactgagatcgtttataagggtactcataaccatcctaagcctcaaaatactaggagaaactcatcaaattcctcttctcttgcaatccctcattcaaatcccatcagcgctgaaatcccagatcaatcctatgccacacatggaagtggacaaatggattcagctgccaccccagaaaactcatcaatatcaattggagatgatgattttgagcagagttctcaaaagtgtaaatcaggaggggatgaatatgatgaagatgaacctgatgccaaaagatggaaaattgaaggtgaaaatgagggtatgtctgcccctgga

SEQ ID NO: 260022 - DNA, 496 bp, Glycine max
aattcccgggtcgacccacgcgtccgctcttccgcctcccttcccttcaactccacggcgcagatccgaggagtttgggaaaccctaagtcattcctctttgcttcttctatctctattcctctaacaccagtgatggcaggtttggctccagaaggatcgcagtttgatgctcggcaatatgattctaagatgaatgaattgctttccgccgatggacaagaatttttcacttcatatgacgaagtctatgatagttttgatgcaatgggccttcaagaaaatcttctgagaggcatatatgcttatggttttgagaggccttctgcaatccagcagaggggaattgttcctttctgcaagggtctggatgtgattcagcaggctcagtctggaactggaaagacagcaacgttctgttcaggaattttgcagcagcttgactatggattggttcagtgtcaggctttggttttggcaccaacaaaggagcttgc

SEQ ID NO: 260023 - DNA, 476 bp, Glycine max
cttaaaaatattcagtgaagatcaacctcaatggcatctcttggcgtgcgaccaggtgttcccgctccattaacttccatctccgacccacctcctcttttcgatggcaccaccaggttgtacatcagttattcttgcccctatgcacaacgtgtgtggatcgctaggaactacaaggggctacaagataagatcaatttggtccctattaaccttcaagacaggccagcttggtataaggagaaagtctaccctgaaaataaggtgccatccttggagcacaatggcaaggtgttgggagaaagtcttgatttgatcaaatatgtagatgcaaactttgaagggacacctttgtttcccagtgatcctgccaagaaagagttcggtgagcaattgatatcccatgttgatacattcagcaaagacctgttcgtttcattgaaaggggatgctgtacagcaagccagtcccgcttt

SEQ ID NO: 260024 - DNA, 479 bp, Glycine max
atggcttctactcaatgtttcttgcaccaccatgctcttaccacccctgccagatcccgatcacagcgcatcatggttagcaccaagcctaaccagcttgtttgcaaggcacagaagcaagaggatattgatgtcagcccaatctctcgccggttagctctaaccgtgctcattggtgctgctgctgttggctccaaagtccaacctgctgatgcagcttatggggaagctgccaatgtgtttggaaagccaaagacagacacagatttcctgccatacaatggagatggattcaaactatcgattccctcaaagtggaacccaagcaaagaggttgagtacacaggtcaggttgttagatatgaggataactttgattcaaccaccaacgtggttgtcaccatcactccgactgataagaagtctatcactgactatggttcacccgaagagttcctctctaaggtggattatttact

SEQ ID NO: 260025 - DNA, 476 bp, Glycine max
cgttcaactcatctgcttcccctagcaaccttcttcttacttctctccgcttcttatcgtccagagggctggggcggaagcacaaccgttgactagtctcaagcttaactctcatattcttcaggagtctactgctaaagagattaatgaaaatcccgaggcaggatgggaggctgctataaatcctcgtttctccaattatacagttgaacaatttaagcgccttcttggagtcaaaccaatgcctaagaaggaacttagaagtacacctgctatatctcacccaaagacgttgaaattgccaaagaattttgatgcgaggacagcttggtcgcagtgtagcactattggaagaattctagatcagggtcactgtggttcttgttgggcatttggtgctgttgaatcattgtcagatcgcttttgcattcattttgatgttaatatctctctctctggtaatgaccttcttgcat

SEQ ID NO: 260026 - DNA, 254 bp, Glycine max
cacaattatacttattaactaacataaacctacataattttctaatttcacataaaattcaatcactaatacaacactacaaactattcaaaaaactctattatacaatattcataccatttctcatatcatcctaaaatattacattacactaactaaaaaaactcattatcatttttctaccataacttctattctttattacatactaatctcttcaataagaaacttttccattttcttctaatcaattt

SEQ ID NO: 260027 - DNA, 463 bp, Glycine max
gtgatgtgcaaaacatgtctctaatagcttcactctcctccacaacttcacaactggcttccggtccttccctcccttcttcctgctctccactttctcgcaaatttcccctcactttccgggaaaaaaacagaactccaatcacacctcacaagctccctttttcagcaaggcctaccaccaccagagtggtgttggtgaagtctcaggccacagcacctgcttcttctgaggctgtggcagtgacacctgtgtcttctgagatgaaggcatgggtctatggggaatatgggggtgtggatgttctgaagctggactccaatgttactgtgcctgatgtgaaagaagatcaggttctaatcaaagttgttgctgctgctcttaaccctgttgatgccaagaggaagcaaggaaagtttaaagccactgattctccccttccgactgttccgggctacgatgt

SEQ ID NO: 260028 - DNA, 476 bp, Glycine max
aattcccgggtcgagccacgcgtccgattgaagttgctgttgttgatatctctaaatcccgcattgcagcctggaacagtgaccagctggctatctatgaacctggccttgatggtgttgtgaagcaatgccgtggcaagaacctcttcttcagcactgatgttgaaaagcatgtctttgaggctgacatagtgtttgtctctgtcaacaccccaaccaaaactcagggtcttggagctggtaaagcagcagatttgacatattgggagagcgcagctcgcatgattgctgatgtttcgaagtctgacaagatcgttgtagagaaatccacagtcccggttaaaacagctgaggcaatagagaagattctgacccacaatagcaagggaatcagattccagattttatcaaaccctgaattccttgctgagggaactgcaatcaaagatctctttaacccagaccgtgttcttatt

SEQ ID NO: 260029 - DNA, 467 bp, Glycine max
atctcgggggtggtgaaactcgacgtgtcgaagggggaggagcggagggactgcacggtggggtgcaggatgtacggcgagggttgctacggcggagaaccgttcttcgtggcgagggaagaagggggcgaggaagatgatgggtacttggtgagttacgtgcacgatgagaggaagggggagtcgaggtttttggtgatggacgcgaagtcgccggagctagatgttgtggcggcggtgaggcttccgcggcgggtgccgtacgggttccatgggctgtttgtgaaggagagtgagctgaggaaagtgtcgttgtcgtgaagctgagacatgatggttcgtgtgtggggcttgtcttccacgcttctgtccattatacatgtgtcctgtaatgtaatgtatagcaccattattgcttctcagaattaattgatgaggtgtaattagtaattacatgcaagtctatg

SEQ ID NO: 260030 - DNA, 431 bp, Glycine max
gtggtgaaactcgacgtgtctaatttttaggagcggagggactgcacgtgggtattgaggatttacggcgagggttgctactgcggagaaccgttcttcgtggcgagggaagaagggggcgaggaagatgatgggtacttggtgagttacgtgcacgatgagaggaatggggagtcgaggtttttgttaatggactcaaattcgccgaacctagatcttgttccgccggtaaggcttccgcggcgtttgccttactggttccatggtctgtttgtgaaggatagcgagctgatgaaagtgtcgttgtcgtgaagcttacacatgatggttcctgtgtggggcttgacttccactcttctgtccattatacatgtgtcctgtaatgaaatgtttaccaccattattgtttctcacaattaatttatcaatgt

SEQ ID NO: 260031 - DNA, 469 bp, Glycine max
cgcgtgggcggacgcgtgggcggacgcgtgggcggacgcgtgggagtaagcaaaggaatgggcgggttattttcttattcatcacttcccgaggaggagagtcctgacgtgaaagcattccactccgcggagagctggcagagccacttgaaagagatcaaagagtcccctaagctagttgtgatatatttcacggcgtcctggtgtggcccttgcaaattcatcactccagtgtttaaccagatagccgcagagtttgcaaacgctgacttcgtcaagatcgacgtggacgaattatctggtgtggcgaaggagtttaaggtggaggcgatgccgacgttcgtgttgtggaaggaaggaaaggaagttgagagggttgtgggagccaagaaggaagagctcgagaaaaagattaagcaactttctcaatcgtgaaagcatgtatgatagtaatcttttagctattcaa

SEQ ID NO: 260032 - DNA, 466 bp, Glycine max
acgcgtccgcaaaacttcaatttctgtttcagttcgcggagatcaatattttggctaggtgcatcgtcgatagaagatacgagaaaccaaaggcaatgtttttgtgggattggttttatgggattctagcgtcgctcgggctgtggcagaaggaggccaagatcttattcttgggcctcgataacgctggcaaaactaccttgcttcacatgctcaaagatgagagattagtccagcatcagcctacccagtatcctacatcggaggagttgagtattgggaagatcaagtttaaagcttttgatctagggggtcatcagattgctcgaagagtttggaaagattactatgcccaggtggatgcagtggtgtacttggttgatgcttatgacaaggagagatttgctgagtcaaataaagagctggatgctctactctctgatgaatctttagccagtgtcccttt

SEQ ID NO: 260033 - DNA, 385 bp, Glycine max
caaaaaatggagccattattttcttcagcagcttcaatatgtgtggtgactgtgtgggtagcggtgattcccatatgggcactgaagatgctgaactcgctgtggcttatgccaaagaggtttgaaaggcttcttagagcgcaaggttttcatggtgacccatactcactttctcatcacaacttcaaccaaacccttttgcaacaacaccagctcaattcccaaccttttcctctatccgatgatgttgctcctcgtgtatcctccttgttacatcacactatcgacaaatatggcaagaaatccttcttttgggaaagtagaacaccaaaagtgatcattacggacccaaatcaactcaaagaagtcttcaacaacattcatg

SEQ ID NO: 260034 - DNA, 444 bp, Glycine max
  unsure (1)..(444): unsure at all n locations
taaaataaaggactttggtgatagtattccgggacatggtggaattaccgacagagtggattgccagatggttatggccgtgtttgcatacatatatcatcagtcatttgttgtgccgcaaactctctcggttgaaatgattttggaccagatatcgatgaacctaacattcgatgagcaacaagctctatattggaggcttggggaaattttacaacaggggtttgctaggatgtcttagattcatggcgaggtgtatttgttctgtcaccttctattgtattccttcacatacaggggaaaaggaaaagatactatgtacatgtgtttgttttctatcttttgagtgaaacanattaaaggttcagaagctgtcaagatgtgcatagtgtatgttgaccgttagtttcattctggttttctcgctctattagttgattgatg

SEQ ID NO: 260035 - DNA, 470 bp, Glycine max
catttcacataagagaggaatgaaacttagacttatgaatggaatagcatacaatgagacgtggtttggcagttggggttacaaatttggtcgaggatgctttggtgtaactcaatccatgtaccacaaggccatacaagcaataagaagcatgtcattatacttgatcatacaccacattgccaattctagccatggcattccactaatcttctcaaggaaccagacactttcagatcaatccctagtgacccttggtgacctattttgttacatgttagaccttaaatcatgtcttcctcgtgaaacctgaattagttcctataaaacaaatgccttagttgagaccaattgtcgttggtcccctaaaaggattgagatggcaacaagggttattgttgaggccttgaaaagaacagagtttaaatgggtttcaagacaagaagttagagatgcttgtcgtgcataca

SEQ ID NO: 260036 - DNA, 470 bp, Glycine max
  unsure (1)..(470): unsure at all n locations
cgcgaatcaggagcggcggagtttatttcggccatggcggcggggtggaactcgcggctcatggtggagacgtggtcgcagggaggagttattgccaccagcgtgggattagccgtggcgaggtctcacacgtgcggacgacacgtgtgcgtagtttccgacgagcgggcgaggtcggagtacgtggagagaatgggcgaggcgggcgtaacggcggagatcgtggttggggaaccggaggatgtgatggagggtttggtcggcgtagatttcttggtggttgattctcgaaggaaggattttacgcgtgtgctgaggcttgcaaagttgagtaacaaaggtgccgtgttgctctgtaagaacgcgaattcaaactccaagggttttatatggcggagcctcgtggcgaaaggttcttcgcggcgtcttgttcgttcggcgtttcttcctgtggngaagggacttgacat

SEQ ID NO: 260037 - DNA, 466 bp, Glycine max
cgatttcgtataacatttcatttcacttcacttatggtggtgcatttgcaaccctttaatttccgcacaaaaatggaggaacgtagtttgtactcactagtgtttcttgtgcttgctttggctattgtgaacaaagtgcatgggcaagggacgcgtgtagggttctattcgagtacatgcccacgcgctgagtccattgttaagtccacagttacaacccatgttaattctgatagtactttggctgctgggttgcttcggatgcacttccatgattgctttgtgcaaggttgtgacgcttctgttctcattgccggttctggcactgagagaacagcatttgcaaaccttggtttacgaggatttgaggttattgatgatgcaaagaaacagctcgaggctgcatgccccggtgttgtgtcttgcgctgatatccttgctcttgctgctcgtgattccgttgttc

SEQ ID NO: 260038 - DNA, 502 bp, Glycine max
  unsure (1)..(502): unsure at all n locations
aattcccgggtcgacccacgcgtccgactcaagatccattattaccaaaaaaaaagaataaaggatatcaaacacccttttcatcattaggactctcagttccctctttccctatcaaaaccctttcccacaacactactcactccagtacaagaaaccctttttcaatttggtttcaacagcacacacacacacacatatatatatatatagcatgtttaccttgaatcattcttctgatttgtaccatgtttcccctgagctctcatcttccttggacacatcctcgccggcttcggagggctctcgtggcgtggcattttccgacgaggaggtgcggctggcggtgaggcacccgaagaagcgggcaggtcggaagaagttccgggagacgcgccacccggtgtaccggggggtgaggaggaggaactcggataagtgggtgtgtgaagtgagggagcccaacaagaagaccaggatttggctggngactttccccacg

SEQ ID NO: 260039 - DNA, 445 bp, Glycine max
aattcccgggtcgacccactcaggcatgtctctaatagcttcactctccttcacaacttcacaactcacttcccttccttgcctccctgtcttcctcctctccactttctcgcaaatttcccctcactttccgggaaaaaaacagaactccaatcacacctcacaagctccctttttcagcaaggcctaccaccaccagagtggtgttggtgaagtctcaggccacagcacctgcttcttctgaggctgtggcagtgacacctgtgtcttctgagatgaaggcatgggtctatggggaatatgggggtgtggatgttctgaagctggactccaatgttactgtgcctgatgtgaaggaagatcaggttctaatcaaagttgttgctgctgctcttaaccctgttgatgccaagaggaggcagggaaagtttaaggccactgattc

SEQ ID NO: 260040 - DNA, 476 bp, Glycine max
  unsure (1)..(476): unsure at all n locations
ggcggagaacggtgaaggcggcgaggagtacctgttcaagatagtgctgattggggactccgcggtggggaagtccaacctcctctcgcggttcgcgcggaacgagttcgatagcaactccaaggccaccattggggtcgagttccagacgcagctcgtcgagatcgacggcaaagagatcaaggcgcagatctgggacactgcgggacaagagaggtttcgagctgtcacctctgcttactacagaggcgctgttggtgcgctcgttgtttacgatatcagcaggaggggcaccttcgacagcatcaagcgatggctccaagaactcactactcaaaatgatagcaccgtagcaagaatgttggtgggaaataaatgtgacttggagaatattagagaggtgagcacagaagagggcaaaagtcttgcagaagaagaaggtttgntctttatggagacatctgcactcgatgcta

SEQ ID NO: 260041 - DNA, 401 bp, Glycine max
cgtccttcttcttcttcttcttcttccttcccttctctcattcaagacaggcctgtcgttgcttgccctgcccccatcatcagcccaactgtgagagaggatatggcaaaggaatacgagcaagctattgaagaactccagaaattgttgagggagaagagtgaactcaaagccacagctgctgagaaagtggagcagataacagcttctctgggaacatcatcatctgatggcatcccatcatcagaagcctcagacaggatcaaagctggtttcattcacttcaagaaggagaaatatgacaagaatccagctttgtatggtgaacttgccaaaggccagagccccaagtttatggtgtttgcttgctcagactcaagggtgtgcccatctcatgtgct

SEQ ID NO: 260042 - DNA, 244 bp, Glycine max
  unsure (1)..(244): unsure at all n locations
accaaatacaagaatacacaacaacaaacacccacaacaacaaaaagaccatttaaaaacgcagggccgcccaaaacacantaccacaacaccacnacacaccaaaacaacaaacccaaacacaataacaacaaaacataacacacacacacacaaatatcaaaataaaacaaacccaccaaacatccaacataaaaacaataccataacacccccatacacaaacctaacccaaacacaacca

SEQ ID NO: 260043 - DNA, 255 bp, Glycine max
ccaccgtccgctctgttctgtcttgttttcggctgattttccaacaagctcgggcttttttatggcaggtttactcatcatgggtaatgaaaagactcacatcaacattgtcgtcattggacatgtcgactctgggaagtcaactactcactggtcatttgatctacaagcttggaggtattgacaagcgtgtgattgagaggttcgagaaggaggctgcttagatgaacaaagaggtcattcaagtttccctgg

SEQ ID NO: 260044 - DNA, 470 bp, Glycine max
attctcgggtcgacccacgcgtccgcactgatctccattcccattccatggcttccactgaatcatcccctttcaagaaaattcagattcaaagggatgacactacatttgacgcatatgtggttggaaaagaggatgctcctggaattgttgtgattcaggagtggtggggtgtggattacgaaattaagaaccatgccgtgaagatttctcagcttggtagtgggtttaaagctcttattccagatttatacagaggaaaggttggtctggatgttgctgaagctcagcatttgatggatggtcttgattggcaaggtgctgtgaaagatattgctgcttcggttaactggcttaaagcaaatggctcaaagaaggctggtgtaactggattttgtatgggaagtgctctctctattgccagttctgtcttggttcaagaggttgacgcttctgtagcattctatgga

SEQ ID NO: 260045 - DNA, 339 bp, Glycine max
gaattctcgggtcgacccactcgtccgctctgtatctgactctttgtttgcagctgatgattccaaaccagcgagcttcttcattactggcaaagtctaagtcatcaagggttaagaaaatactcatatgatcatcgactacataggacatgatgactatgggaagtcaacttccactggtcatttgatctacaatctagaaggtattgacaagcgtgtgattgagaggttccagatagacgcatctgatatagaacatatgtcatacaaaaatgcctgaatgctctacaagctcaattctgagctcgaaagaagaatcaccatatgacatatcattaa

SEQ ID NO: 260046 - DNA, 452 bp, Glycine max
aattcccgggtcgagcgacgcgtccgcccacgcgtccgttgtttcactaaaaagaggcacaactgttataatgggggacttgtacacgggcgttcatgtaggtctaggaaagcattaacagctgccctggctcctaatcctgggaagccatatcacgtttgtgattcttgctttgtaaaattgaacaaggttgcagaattgggcaacaataatcgaaggaatgctatgcctcgtttgtcaagtgaaaacaaggacagattagagaagcctgagctaagattgaccaagacagcaaacccttctaatatggatttcataaagcaacttgatagtaaggcaactaaacacgggaagaaggctgatacattctctctggttcgcacctctcaaccacagtctttgctacagctcaaagatgttgacttgactactgctatcgatttgaagcgaac

SEQ ID NO: 260047 - DNA, 306 bp, Glycine max
acccacacccacctttccaccaacatccccttcctcacctccccatgctaccatctaaacctgcggcacgtccctcccatccttccaccccaattcccctctccacttctaaaactcctccctccaccactccaccatactcccctacattcactaattcttcataacatccattctatactccctcacccaattatcctaccaaaccctaaacccatactccaaaccctctatatttcctacttccatctaactcctacaatcatcacccatctccaacaaccaccactaccacttccacaccca

SEQ ID NO: 260048 - DNA, 478 bp, Glycine max
accggtccggaatcgccgggtcgacccacgcgtacggccacgcgtccggggattggtgagcaagaagaagatgatttcttcactgcagacgaaaatatgcagcgaaaaaaacttgatgttgagttggaggagacagacgaacatgtgaagaaacgggagaaggcagcatatagcatatatgcatgtctcttgaccggattggtatgtcatatggaatcatcaactttggaaggtcttgagaatttcctgcaggttttattacctggtggcttcttctgcctgcttcgtgcacattatgaaaattcaggtgttagctgaacgtgagcaaaaaattcaaactgaagtgcaagaaatccgaaaggtgttctattgtgatctctgcaacaagcaatacaaattggcaatggaatttgaagcacacttgagctcttatgatcacaatcacagaaagcgtttcatacaaatgaaagaaatgcat

SEQ ID NO: 260049 - DNA, 419 bp, Glycine max
ggaattcccgggtcgacccacgcgtccgggaattatctgtattttgcaatttgcaatgatatttggttttacattgtgtctatctggctaaaataataatggttggattatttttctttgtcatgaattgtttctgcaggtacttgaaaaggggtgtgaatgatcgggggagggttgctaatgatgttgagacagagcagattgtccttgatgaagaatcaggctcttgcaagggaaagatgagttcagttgtgcaaatgcgtggatcaataccacttttctggtcacaagaagcatcaagatttagccccaagcctgatataaatatgcagaggtatgatccaacatactcagcaacataattgcattttgaagacctaacttagaaatattgcaatccaattattgggctgaatttg

SEQ ID NO: 260050 - DNA, 474 bp, Glycine max
attctcgggtcgacccacgcgtccgcggacgcgtgggggctggatttcttcttcttggcttcattggtgttcttatatggtgcatgagagggcataagagaaagctgcctgtgagtggtggttatgtcatgccatccactcttgcctcatctcctgaatcagattcatccttttttaagacacactcctcagctcctcttgtacaaagtggctctggcagtgatgttgtgtacacaccatctgaccctggtggactaggcaactcaaggtcatggttttcatatgaagaactaatcaaggtcacaaatggtttctcaactcaaaatccttttggctaaggttgatttggttgggtggataaaaggtgccttcctgatgggagagacatagcattcaaacagcttaagattggtggaagtcaaggagagagagagttcaaggcccaagtggatattattggtcgcatacatcatc

SEQ ID NO: 260051 - DNA, 493 bp, Glycine max
taccgggcttgaattcccgggtcgaccgacgcgtccgcccacgcgtccggtttgacatgctacgaagacaatctcttcgcccagatcacataaaaatgtgtggtttggatgaggctgatgaaatgctttcacgtggtttcaaggaccagatctatgacatcttccagctactgccaggtcaaattcaggttggagtgttctctgctacaatgccacctgaggccctggagattacaaggaagttcatgaataagccagtgagaatcctggtaaagcgtgatgaattgacgcttgagggtatcaagcagttttatgtgaatgttgataaggaagattggaaactggagacattatgcgacctttatgagactttggctatcactcagagtgtcatctttgtgaacaccaggcgcaaggtggactggctcactgacaagatgcgaagcaatgaccatacagtctcagccacccatggagacatggaccaaaacac

SEQ ID NO: 260052 - DNA, 266 bp, Glycine max
attcccggttcgacccacgcgtacgattatgattccctcctcttccttccttctcctttcattccatacctcaacaaaacaaggttcagagacttttgcgattgctggaagaacagaatagaaaacctaaatcacagatccatggcagaagaacaccgatgtgaacctcccgaaggtcaccgactctgcgtcaacaactgcggcttcttcggtagcaccgtcacgatgaacctctgctacaaatgctacagcgcgatccgattgaa

SEQ ID NO: 260053 - DNA, 506 bp, Glycine max
  unsure (1)..(506): unsure at all n locations
tgcacgtaccggtccggaattcccggggggggacaggaattgatgtgcgcagtaaatcaagaacaatatcaaagcctgttgaacatccctgtgagctccctaaatggaactatgatggatctagcactggacaggcaccgggtgatgatagtgaagtaatcctatatcctcaagcaattttcaaagatcctttccgtggtggtaacaatattttggtcatttgcgattcttacaccccacaaggtgagcctatccctacaaacaagagacacagagctgctgaaattttcagtaacccaaaggtccaagcagaagttccatggtatggaatagaacaagagtacaccttacttcaaacaaatgtgaaatggccattaggttggcccgttggtggctatcctggtcctcaaggtccttattattgcagcgcttgggcagacaagtcatttggacgtgacatatctgatgctcattacaaggcttgcttatatgctggaantaacatc

SEQ ID NO: 260054 - DNA, 375 bp, Glycine max
  unsure (1)..(375): unsure at all n locations
ggaattcccgggtcgacccacgcgtccgaattccaacaacaccacaatgggaagaagaccggcgaggtgttaccggcagataaagaacaaaccgtacccgaaatcccgtttctgccgcggcgtgccggagccgaagatccgaatctacgacgtgggaatgaagaagaaaggcgtggacgagttcccgttctgcgtgcacctggtctcgtgggagaaggagaacgtctccagcgaggctttggaggcggcgcgcatcgcatgcaacaagtacatggccaagttcgccggaaaagatgccttccacctgcgcgtgagggtgcatcccttccacgtgctccgcatcaacaagatgctatcgtngcgccgggccgacag

SEQ ID NO: 260055 - DNA, 340 bp, Glycine max
ggaattcccgggtcgacccacgcgtccggaaaccatgagtagcgccgcctttaaggtcggtgtgttggggagtggaatttcaggagccgtgcgtgcttcaactcttgccagaaatggggtttctgttactctctttgagtcagctagaggccctggtggacgcatgtcccaaagaagagagagaactgaagatgggacggagctgcattttgaccatggtgctccatttttctcggttagcaagtctgaagttttacatctggttcaagagtgggaatcaaggggtctcgtagctgaatggaaagagaagtttgccctcgtcgattttcacacacttaaa

SEQ ID NO: 260056 - DNA, 419 bp, Glycine max
ccggtcttgaattaccgggtcgaccgacgcgtccgcgctccttcgttgtcaaagcctcctccagcgagctttcgctggttggtgacaccgcaccggagttcgaagcagaggctgtgtttgaccaggagtttatcaacgtgaaactatctgattacattgggaagaaatatgttgtgctcttcttctacccgttggacttcacctttgtctgccccacagaaatcactgctttcagtgaccgacatgcagagttcgaggcactaaatactgagatattgggtgtttcatgtgacagtgtgttctcgcaccttgcatggatccaaacagatagaaaggtcggtggcctttgtgacttgaactatcctttggattctgatgtcaccaaatccatattcaaatcttatggtggtctcatttct

SEQ ID NO: 260057 - DNA, 418 bp, Glycine max
  unsure (1)..(418): unsure at all n locations
attcccggttcgacccacgcgtgcgcccacgcttccgtattgcaccaactgcggaatttgaattcattctctctctccttcaattatgttatactggggacacctgaaagcttcctcaggatttatcaactgtaactcctacaagctttcggtttattcagttctagtcttcagaaggggttcttcatgccttgcgtctccttactaatctgaatattgatcatcaagatttaaatgtcaatttnaatcaagctatgacatacatcttgagatatataataatacaaaaactgagaacttgatgaacaaaaaaaattattcttgactatgttaaaaaaacgaaggtgaactttttttttatgcaaacaatgtttcaattgctgacacaaaaccctcaaataaagaggttcttgaatca

SEQ ID NO: 260058 - DNA, 482 bp, Glycine max
  unsure (1)..(482): unsure at all n locations
attcccgtgttcgacccacgcgtgcggtcactgctctgtttcaccgagtttgggcgtttagatcagatccaaatcgtgttctcttccgttggcaaaggtggcaactcaaatgagcaagaagagaaagtttgttgcggacggagtgttctttgccgaactgaacgaggttctgacacgtgaattggcggaggacggttactccggcgtctaagttagggttacgccgatgcgcaccgagatcatcatcagagccaccagaatccaagccgttctaggtgagaagggaaggagaattagggaacttacctcagtggttcataagaggttcaaattccccgaaaacagcgtcgatcgttatgctgagaaggtcaacaacataggcctgtgtgccattgctcaggccgagtcgcttcgctacaaactttctcggtggcctcttcgttcgcagggcttgctatggtgtnttaagatttgtgatggaa

SEQ ID NO: 260059 - DNA, 482 bp, Glycine max
tcccgggtcgacccacgcgtccggcagcattcactgaaagcactcagtagggtttgcggtttcagagtttgtgacgcacgcatccgtggccaccaggaccaacgccgccgcagccccgacgcgccagctctcccagaaggaagccgacatccagatgatgttagccgccgacgtccacctcggcaccaaaaactgcgacttccaaatggaacgttacatcttcaagcgccgcaacgacgggatttacattattaaccttgggaagacatgggagaagcttcagttagcagctatggttattgttgcaattgagaaccctcaagatatcattgctcaatccgcaaggccttatggtcaaagagcggttctgaagcttgctcagtacactggtgctcatgctattgctggaaggcacactcccggtaccttcaccaatcagcttcagacttcgttcagtgagccctcggctcttatgctcactg

SEQ ID NO: 260060 - DNA, 499 bp, Glycine max
  unsure (1)..(499): unsure at all n locations
gctcaaccgccgtgtcgtcccacgcgtgcgcccacgcgtccgcccacgcgtccgcccacgcgtccgataaaatcaactttcattccgtttcggtctttcttgccctttgccaaattttacattaattacatgacatggcataatacacatcacaccaccctctctctctatatataccgtacctctcagattcagacagaaactcaattgcttcttctttttgtttcctgtaatccaggaaatgaaattgctagcttaatattgatctgtagagaagacaagggaacttgcttgctatggcaactctgagcaattcaactaatatcttttggcaagattgtcaagtaggaaggcttgaaaggcagaagctacttaaccaaaagggatgtgttgtatggattactggactcagcggatcanganaaagcacattggcatgttccctaagcagagaactgcactcanagggaaagtaatctatgtccttgatggagataac

SEQ ID NO: 260061 - DNA, 505 bp, Glycine max
gtctgaattcccgtgtcgacccacgcgtccgcccacgcgtccggccaacctgagcatatacgacccgcaagtaaccgaggaccaaatccagagggatctatgcatgaacaagtttgattgggatcatcctatccacttgcagcccacaagtcctactactgtgaagaaggtcagtgttgtttgggatgcctatgaagcaacaaaggatgcacatggcctttgcattctaaccgagtgggatgagttcaagactcttgattaccagaagatatttgacaacatgcaaaaaccagcatttggttttgatggcagaaacattgtggatgctgataagttgcgtgagattggcttcatagtttactcaattggtaagccactggacccatggctcaaagacatgcctgctgtggcataaaatagatcattgatcaagtacaatgcaatatcagtcaaatgttgaggcaatcagtttgattccttattaatttttgtaagagttttcttt

SEQ ID NO: 260062 - DNA, 487 bp, Glycine max
  unsure (1)..(487): unsure at all n locations
cgggtcgacccacgcgtccggaaaaaaaaaaggaaaatgaggaaagaaaacgtatagaaatagcagaagcctgggatagcattgtatttgctcaggtaataagaggtattttattaataacccaatccattcttagaaaatatattctattaccttcattgataataactaaaaatattgctcgtatactattttttcaatttcccgaatggtcggaagattttagggattggaagagagaaatgtatattaaatgcacatataatggtgttcaattatccgaaagagaatttccaaaaaaatggctaacagatggtattcagataaagatcttatttccttttcgtctcaaaccttggcacaaatctaagctacgatccaatgaaaagaaaaaggatctaatgaanaaaaagaacttttgttntctaacagttntggggatggaagtcgacttgcccttttctggttctccccaaaaaatagattt

SEQ ID NO: 260063 - DNA, 352 bp, Glycine max
gcccacgcatacgaccatgtgcccatcatacttaccgataacgatttatcaacactatatcctgctattatccgggatgatcttatgcataagttctactgaccacctacaatctacgatcatatattctatctaccatgaaatattacaccctgacaattttcctaaagactacattgtcaatcttgctgacaccttacccgatcaatctatttataactttgatacacttatgacttgcacatatgatgatgaacaattgtactaaatatattttgcataatgatacttcattgataataatcttataaacttcaaataaacacctccaatcttcgatcaacccaatatt

SEQ ID NO: 260064 - DNA, 421 bp, Glycine max
accggtccggcccacgcgtccgcacttccttgcctactacacattcttcatcacttcattcaacatttctccccttagcttgtggcaccaatgggtgctgcggttagtgctgcagtctcttttccatccaccaagtctacctctcttccaagcaggacctccctcattgccccagagagagttgtgttcaagaaggcttcattgcaaaacagagatgtttctagcagtggacgggtagtttccatcagagctcaagtcaccactgaggcaccagccaaggttgaaaaagagtccaagaaacaggatgaaggtgtggttgtgaacaagtttaaacccaagaccccttacattggtagatgcctgctcaacacaaagatcactggggatgatgctccaggagaaacttggcacatggtcttca

SEQ ID NO: 260065 - DNA, 461 bp, Glycine max
aattcccgggtcgacccacgcgtgcgctggtattgtgctaggaagttacatggcactaatgacagtagtatttttctggatcatgaaggataccgagttcttctcggacaagttcggtgtgaggtctataaggaacagccccggagaaatgatggcatccctgtacctacaagtcagtatcataagtcaagcactaatttttgtcacaaggtcccgcagctggtcctatgatgaaagacctggtcttcttctactgagtgcttttatgattgcacaactggtggcaacttttctggcagtatatgctaactggggcttagcaagaattcatggaatgggatggggttgggctagggtaatctggctctacagtttagtgacatatatccctcttgatatacttcaattcgcaatccgctattttctgaatgggaaaggcctgggataatcttttggagaac

SEQ ID NO: 260066 - DNA, 502 bp, Glycine max
  unsure (1)..(502): unsure at all n locations
aattcccgtggtcgacccacgcgtccggttgaagctcacatccccaaccttctcctgtgcaatgagcaacatgcttccagccatgacttttgtgatggcagtgttttgccggatggagaagatagacataaagaaggtgagatgcatagcaaagatagtgggaacattagtcacagtggcaggggcaatgttgatgaccttatacagaggtcctatagtggagatggtgtgggccaaacattcacacaataaaaccaatgcaacaaccaccacaggatcattggacaaagattggttcttaggatgcacctttcttatcattgccacccttgcttgggcttccctatttgttttacaagccaaagctatacagacgtacaagaatcatcagctaagcttaacttcacttgtgtgctttataggcactcttcaagctattgctggtacttttgtagttgaacacaatccttctgtatggagaattggctgngatgtgagctta

SEQ ID NO: 260067 - DNA, 507 bp, Glycine max
  unsure (1)..(507): unsure at all n locations
ccggtcttgaattcccgggtcgaccgacgcgtccgcccacgcgtccgctgatgctaggatagagtacaggccgaacacagaggatgatccgcacaagggaaagcctgatataagtagggctaaggatcaacttggctgggaacccaaggttgatctgcgcaagggcctcccactaatggtttctgacttccggcaacgcatttttggtgaccagaaggaaaaggcaaccgtagcctaattcttgcgtgtcatgtatcttagagtgagaaagggatataagattataatagttcgaggataaccctggcccgccaaaggtcccattagtcatcacaggattatatgagctctactaaaangtccctttgtcgtttgttctcctgtcaatcttacatgccgggttatgtaccctctttcaagaatgactaccacccctgattccatttttcaaattcctgccatctatattctatttctttcttctattttttggatgtaattggtatg

SEQ ID NO: 260068 - DNA, 475 bp, Glycine max
  unsure (1)..(475): unsure at all n locations
tcccgggtcgacccacgcgtccgcccacgcgtccgcatttttcacaccaccaacacaagatgtttctccacattgtgttcctcctgttccttctctcatccacttcccatgccactgtccaagacttctgtgtggcagacctcaaaggtgcagacacccctgcaggctacccctgcaagccacctgctaatgtcacttcagatgactttgtgtacactggcttagctgaagctgcaaatgtcacaaacataatcaatgctgctgtgaccccagcttttgttgctcaattcccaggtctcaatggccttgaactatctgcagcaaggttggaccttggtcctagtggtgttatcccactccacactcatccaagtgccaatgaactactcattgtgcttcaaggtcacatccttgctggattcatatcttcaggtaacatagtttatcanaaggtgcttaaaaaaggagagctcat

SEQ ID NO: 260069 - DNA, 466 bp, Glycine max
cggtcgacccacgcgtccgaaagaacagaagatggcacaaacgctggcaatgcccgtggcaccttcgctcgctatcatctggaattctcgcgggtccaagacactctccgctcccgttctcaacaacccaaagtttcaagggttaagcatcaagtgcgttcgtgttggaggtgtggagattccgaacaacaagcgaatcgagtactcgctgcagtacattcatggagttggcaggaccagagcaaaacagattctgtgtgatatccaaatggataacaaaatcacgaaggaactcactgaggaggagctcatcactctcagggacgaagtctccaaatatatgattgaaggcgacctgagacggttcaatgcggttaatataaagagactgaatgacattcactgctacagaggaataaggcacattcaggggcttccttgcagaggccagctaaccaagaacaat

SEQ ID NO: 260070 - DNA, 400 bp, Glycine max
  unsure (1)..(400): unsure at all n locations
cccacgcgcgcgcacacgcgcgcggaagaaagcgcagaggcgattgaagttatccttcacaagggagaggtcgggcgtgttggcaatattggtactaacaaggacaggaaggttattgatgtcgccaaagatatatgcaggcattctaagatggacccagagactagtctaaaatttgcggagaacagaccatttattgaccatagatactttcttgatgatgaaaagctgtacatcttgcgttggtatgataggaccacatgaaaaaaaggcttgaagaaaaccatgtactgggatatcaactatcctgattggaggggtgatgtcagtggtgcatatagaacccatccaaggatgcttatnatccctgtggactggagagacatttcgatggatctga

SEQ ID NO: 260071 - DNA, 506 bp, Glycine max
cccgggtccgacccacgccgtccgcctggtcttacctgtgtggtgacctgtgctctgtctctcatctcatatcatattcattgtcaatggcgaactcaaggtcaatgtcagttacctgctaaagctggagtggccttgggaacccaacaaggcccttatccgtccaagacgttcaggttgctccgcctcaggccggcgaggtccgtgtccaattcctcttcaccgctctctgccacaccgatgcttacacttggagcggcaaggatcccgaaggtctcgtacgctgtattctcggtcacgaagctgcagggattgtggatagtgttggagaaggtgttactaatgttcagcctgtgtatcatgtcattccctgttaccaggctgagtgtggggagtgcaagacttgcaaatcggggaagacaaacctttgtggcaaggttcgttccggcactggaagttgggtcatgcttcatgatggaaagagccgggtctacattaatgggaag

SEQ ID NO: 260072 - DNA, 453 bp, Glycine max
ttcccgggtcgacccacgcgtccgcaaatgtgagtttgaaggagtctgatgcctggcctgctgagccacaagatgcatatgggctggagaagcttgcaacagaagagttatgcaagcattataacaaggattttggaattgagtgccggattgggagattccataacatatatggtccttatgggacatggaagggtggaagggagaaggctcctgctgctttttgtcgcaagacacttacttccaaagatcgatttgagatgtggggagatggattgcaaacaagatccttcaccttcattgatgagtgtgttgaaggtgtactgagattgactaaatcagacttccgggagccagtgaatattggaagtgatgaaatggtcagtatgaatgagatggcagagatggttcttagctttgaggataagaatataccaatataccatattcctg

SEQ ID NO: 260073 - DNA, 458 bp, Glycine max
aattccgggtcgacccacgcgtccggcatagcatgctacactcgcgggcctttcttgcctagtgtttcttccaagcactctccacctgccatttggccatcttttggcttgaggagtctgaaatcaagctctttatttggagaatcgctaagagtggcctccaaatcaacaataaaggtttcaaagacaaagaatacttcactcgtgaccagatgtgaaattggtgacagtctcgaagaattgctcacaaaagcaacaccagataaggggttgatcaggttgttggtgtccatgggagaagcattgagaacaatttcctttaaagtgaagacggcttcatgtggtggaacacaatgtgttaatactcttggggattaacagcttgcaatggatttgctagcttatcaggttcttttttgaggcttaaattactctcatttctgcaagtatgcttgctc

SEQ ID NO: 260074 - DNA, 486 bp, Glycine max
ggtctcgaattcccgggtcgacccacgcgtccgcccacgcgtccgctcagctataaataatcacaaaacccttccaaacccttttcctctttcagctcgccttgagcttccacaatcctatcgcacatctttctcagttctacgatggagttttggggtgccgaggttaaggttggagagtctgttaaggtagacccagccgaatttgaggcatgcatacacctttctcaggctgctcttggtgaggcaaagaaagataagcctgaaccggtggttctctacatgaaagttggtgaacagaaatttgtcttgggaaccctttccagggagaaaatccctcaaatatctctggaattggtgttggaaaaggagtttgagctttcccacagttcaaagagtgccagtgttcatttctggggatacaaggcatattacgatgccgataatagtgacgaggatgaatttactgatagcgatgaagatgat

SEQ ID NO: 260075 - DNA, 330 bp, Glycine max
aattcccggtgtcgacccacgcgtgcgcgatcatggacgccgattcacaacctcaacaactcgaagagagaacagaggagcaagaactgaagtacctggaattcgtgcaattcgcgaccatacaggctctgatgcgctgcgccatcctctactcatacgccaaggagcgcgcgggtcctctgaagcccggtgtcgacaccgtggaggaggccgtgaagaccgtcgtggctccagtctacgataggttccaccttgtccccggcgaaggcctcaaatacgcggatcggaaaggtgcccaattagacagccacgttcccttcaacgtgaaaa

SEQ ID NO: 260076 - DNA, 331 bp, Glycine max
ttcccgggtcgaccgacgcgtccgcccacgcgtccgctttgaccttgttggaaacaaccttcccgtcttctttgtacgtgatggcgtgaagtttcgagatatggttcatgctcttaaacccaatcccaagaaccacatccaggagaatcggaggatccttgactacttctctcactttgcagaaagccttcacatgttcaccttcttatttgatgatttgcgtgttccacaagattacaggcgtatggatggattaggagttaacacatacacactgatcaacaaggctgagaatgaagagtatgtgaaatttcactggaagaccactatt

SEQ ID NO: 260077 - DNA, 482 bp, Glycine max
ccggcattcccgggtcgacccacgcgtccgaaaagaagcactcactcgtgaaccccacgcagtgttcgataatcaaatcttctttcttttgcttccgcagtcccaaccttcatggattctcactcacacatcattgcttggggctctggtgaagatggtcagctaggaatcggaagcaacgaagagaaagaatgggtctgcctcgtcaaagccctccagccccaccgtattcgctccgtcgtcgccggcagcagaaactccctcgccatcgctgacgacggcaaattgttcacttggggttggaaccaaagggccacacttgggcaccctgctgagaccaagtctgagaacaagactgagaacactcccagccaggtcaaggctctttccagtggtaaaattgttcaagcggctattggggggtggcactgtttggcccgtgatgatcagggcagagcttatgctttgggtggaaatgaata

SEQ ID NO: 260078 - DNA, 492 bp, Glycine max
ccggcattcccgggtcgacccacgcgtccggttctccttttcatgggctcacttaaagaggatcttgcaactactatggaatcttttgccggtttagaggttgcttgtaaggaactaagaaacaaccggctgttcctcaagcttcttgaagccgttctcaaaactggcaaccgaatgaatgatggaactttccgtggtggtgcacaagcatttaaacttgatacacttctgaaattatctgatgtaaaaggaacagatggcaagactacactcttacattttgttgttctagagattatccgctccgagggcataaaagccatcagaaaggcaaaagagagccagaaatcgtctagtattaaattggatgaccttcacgatagtacccgagaaacagaagatcgctaccatgaaatcggtcttcaagtggtttcacgattgagcagtgaacttgagaatgtaaaaaaagcagcaattatagatgctgacagc

SEQ ID NO: 260079 - DNA, 491 bp, Glycine max
tccgtaccggtcccgggttgccgggtcgacccacgcgtccgcccacgcgtccgcccacgcgttcgcaaaaaatggcttctagttcagaatctgaatctcattcgaaaccgttccaagaccgagttgcaatcgtcaccggctcgtcccgcggaatcggccgagaaatcgcgcttcacctcgcctcactcggcgcgcgactcgtcgtcaactacacctccaactcggcccaagccgactcagtcgcggcgcagatcaacgccggttccgccaccacgacaccgcgcgccgtcgtggtccaagccgacgtgtccgatccggctcaggtgaagtcgctcttcgactcggccgagcgcgccttcgactcgccgatccacatccttgtcaactcggcgggcgtgatcgacggcacgtatcccttcgtcgccgacaccaccgtggagtccttcgaccgcactttcgcggtgaacgcgcgtggcgccttcgcgtgcgcc

SEQ ID NO: 260080 - DNA, 495 bp, Glycine max
gaccggcattcccgggtcgacccacgcgtccgattccaaactccgccatggccactgccaccgccgccgccgccacgtcatactttttcggcagccgtctaaacaacgttaacacgacaaccttaaacaacggaagattccacgcgctcttgaacttcggcaaaaagaagacggcgccgcagccgccgccgaagaaaaaggaagtgaaagtgaaaccctccggagaccggctggtgtggttcccgaatgcggagccgccggagtggctcgatggaagcatgatcggcgaccgcgggttcgacccgttcgggttcgcgaagcccgcggagtacctgcagttcgacctggactcgctggaccagaacctcgcgaagaacatcgccggcgatgtgatcggaaccagggtggaggtcgccgaggttaagccgacgccgtttcagccctactcggagggtttcgggattcagaggttccgtgagtgcgaactcattcatg

SEQ ID NO: 260081 - DNA, 209 bp, Glycine max
ccgggtcgacccacgcgtccgctcacgcgtatccgccataaccattaatccttaagcaacggttgcatcaatgggatcattggttcaaaccactgctctgatatacattttcccatcttccctaagctctgccgcgtccacacgttcaggaaatgaactgcgtgcagagaatcccaaaatggcaaaacttgcagcccgtctagcgttat

SEQ ID NO: 260082 - DNA, 448 bp, Glycine max
  unsure (1)..(448): unsure at all n locations
ccgggccgacccacgcgtccgcccacgcgnccgggggnaaaagcccgacnggtgcncggccacaggcccacnagtgcccatttgataaggaataaaactactggtttttgcttgcggattctgttttttacaacttgttgtttattcagaaggttagtttcatggatgaagctgctgctgtaactgctgcatctaattcaattgaggagtctatggagtgtttaggagcaaatgtgaaggataccagtgtggtagttgcagtaactgttgtaaatgtgttagggggctctagattattattgggtaatgttcaggccccatcaaagggtaactacaattttattggctattgtttgtgtaattcttatntgtgctgtgacagaaagacaaatttaaagctcaaagttatttaactaactcgggcttttaccaggggtgctgatttggc

SEQ ID NO: 260083 - DNA, 409 bp, Glycine max
aattcccgggtcgacccacgcgtgcgacgaaatcatgattttactatgcgggttattgattaatccccaagcaacggttgcatcaatgggtgttctgattcaaaccactgctctgatatacattttcccatcttccctaagctttgccgtttccacacgtgttggaaatgaactgggtgcggagaatcccaaaaaggcaaaacttgcagtcctcgtggggttatgttttagttacagtttgggattctcggctttgcttttcgcagtttccgtgaggcacgtgtgggcttctatgttcacaagtgacgcggagatcattgctttgacatcgatggtgttgcccatcattggactatgtgaacttggaaattgtccgcaaacaacggtttgcggcgttttgaagggaacc

SEQ ID NO: 260084 - DNA, 470 bp, Glycine max
cggaattcccgggtcgacccacgcgtccggccaaatcaatcaaattctttgagttgaacacaggggccaagattccttctcttgggttagggacttggcaagctgaacctggtgttgtagctgaagctctcaccacagccattcaggttggatacaggcatattgactgtgctagtgcgtataagaatcaagcagagattggttctgctcttaagaagctttttgatgatggtgtggtgaagcgtgaggacttatggatcacttccaaactctggtgttcagatcatgcaccagaagatgtgccaaaagcattggataaaacattacaggaattgcaacttgactatcttgacctctatctgatccactggccagtccgcatgaaaagtggaacatttggactcaataaagaatatcttgagcaaccagacattcccaatacatggagagcaatggaggcactctatgac

SEQ ID NO: 260085 - DNA, 448 bp, Glycine max
accgggtcgacccacgcgtccggtccagcgttaaggagttagttgaatctaagtgtctgagttctgttccctccaactacattggccttgaaaatcccgaagattctatattgaattatgaaacagataatattccaaccattgatttttcccaactcacctcttctaatcccagtgtacgctccaaggcaatcaaacaactaggagatgcttgccgcgattggggtttctttatgctaatcaatcacggtgtgtcggagatactaagggatgaggtgattaggacaagccagggcttttttgatctgactgagaaagaaaaaatggagcacgcaagaaggaacctatttgatccaataagatatgggacaagcttcaatgtcacggtggacaagacccttttctggagagattatctcaaatgtcatgttcaccctcactttaatgc

SEQ ID NO: 260086 - DNA, 485 bp, Glycine max
  unsure (1)..(485): unsure at all n locations
cggtcttgaattcccgggtcgaccgacgcgtccgctttctgaaacagagcatggctcctctcacattctccttcttcttcatccgtatctcttacgtttcttcatcatcagttgtcaactttctgacgggctttgcagaagcgggatcaatcggaataaactatggaagaattgcgaacgacctacctacaccggcgaaagtggtggagcttcttaagagtcaggggctgaaccgtgtgaagctctacgacaccgacgccaccgtcttaaccgcgtttgccaactcaggaatgaaggtggtggttgccatgccaaacgagcttctcgccaacgccgccgcggaacagtccttcaccgacgcgtgggtccaagccaacatctncagctactaccccgtcacgcaaatcgaagccatagccgtgggaaacgaagtgttcgtggacccgaacaacacgacaaagttcctcgtacccgccatgaagaac

SEQ ID NO: 260087 - DNA, 478 bp, Glycine max
  unsure (1)..(478): unsure at all n locations
accggtccggactacgcgggtcgattcgttttgcccctttcgttgccctaatttcaaccatgcctcgccgtagctccggtggaagatctgcccgtggtgctcctcgtgcagcacctcgtcctgctccagttcaccatgctcctcctccagcccctgctcagagcggtggcggatctatgcttggtggcattggttcaaccatagctcaaggtatggcttttggcactggaagtgcagtggcacacagggctgtggatgctgtcatgggtcctcgtaccattcaacatgaagcagtagtcacggaggctgctgctgctgcccctgcacccactgcaaatacttttggtggcgatgcatgcaatgttcatacaaaggcattccaggattgcctgaacagctatggcagtgaccttagcaagtgccagttttacatggatatgcttgcagattgcangaagaactctggagccctcgtgag

SEQ ID NO: 260088 - DNA, 490 bp, Glycine max
  unsure (1)..(490): unsure at all n locations
accggtcctgaattcccgggtgcgacccacgcgtccggataagcgaaaagaggcttttgagaaggaagaaaaatccaagaagtccgtgagcatcactgggtttctgaagcctgctgagggggaagcatactataacccagggcgtggtaggggtcgtggccgtggttcacgaggtggaggcggaggcggaggtgtttaccgtggaagttccaccaacaatgcacctgctccatccattgaagatcctgggcatttcccaaacttgggtgccaagtgaggccttgctagaacccttttgtcatatccctgtcctattttcaattttgggttctcttatttgaacttaatcaggaaaagaactatggtaattggatttcctggattggaaggttcatttaattttatgccttgaaagtgtaaacttatgttgttgttcttcatacggtcctgtacccttgaagcctgttcccccttgtgctntacttttact

SEQ ID NO: 260089 - DNA, 487 bp, Glycine max
tcccgggtcgacccacgcgtccgtgacacactaataatacacattatgtatactagagagaaaagggatggcaacgatctcgttatcacacagaagagatctctagttgaagctctgaccggttacacagcacaactgacgacacttgatgggaggaatcttacagtctccaccaattccatcatcagtccgacgtacgaagaagttattaaaggagagggtatgccaattcccaaggaaccttccaaaaagggaaacttgaggatcaagttcaatatcaagttcccctctagactcacatcagagcagaaaaccggcattaaacgattattgacatcataaacgctggtgatgcctctccttatcacataccaaatcatgtaagattggaattatttttacccagtttttgattttcaaatggaaattctttcccttttcgagatggttttcagttagaaatatttattagaaagttgatatttgg

SEQ ID NO: 260090 - DNA, 447 bp, Glycine max
  unsure (1)..(447): unsure at all n locations
ggccttcccgggtcgacccacgcgtccgccattttatccattttatcttcctgcatctgcattctctatcgctcgacagaccctagcgatgtgatgctgtgcgatgcgactcgctgagttgaaccggataaagatctgagtcgcggtgatcggttcgacgccctcatgggtgctgcggactccaagctcgagaaggctctcggcgaccaattctcccgaatgagagcgttactttggcctcgagaattttggcaatacttgttactgcaacagcgtttggcatgcactatacttctgtgctccatttggagaacaatcgctagaatattatgcagataacagaagcataacagatgcaaaggaaaatcttntgacttgcctagccgacttatttccacagagaagttcccagaagaagaaaacacgtgtcattgctcccaaacgatt

SEQ ID NO: 260091 - DNA, 428 bp, Glycine max
cccgggtcgacccacgcgtccggttggggatatcgctggtatgggatctgatctttttggttcatatgccgagtcatcctgtgcggctcttgttgttgcttccatctcttcttttggggtgaatcatgagttgactgctatgttataccctctcattatcagttctgtgggtatccttgtttgtttgctcacaaccttatttgcaactgacttctttgagatcaaggctgtaaaggagattgagcctgcattgaagaaacaactcatcatttccactgccctgatgactattgggattgcaattgctagttggattgcactcccaacttccttcactatcttcaattttggagttcagaaagatgtcaagaattggcagctattcttgtgtgttgctgttggtctttgggcaagtcttattattggat

SEQ ID NO: 260092 - DNA, 313 bp, Glycine max
cgacccagcgttcgcgaaccttctccctcttcatgacatttttaacgcccatattaagcccacttacagcattatctcttccaacaccagcttaaccttcttcgagaatcatctcttacctcttgtcaaatcctaccttccttacgtctttaacttaacccctgacagcgacatttaaaccctccgacatcacgacttttacgtaaaactcacgttcaacatgacttctcaccctaaaataaaccctaacacatcttattgcttcccacttctttactgtcccgttctaccgttcctaatctactttcgtttt

SEQ ID NO: 260093 - DNA, 375 bp, Glycine max
ggacttcccgggtcgacccacgcgtccgcccacgcgtccgggtttggtttggaaggaagaagaaaatgaaggccatagtgataacgaggccaggaggtcccgaagtgctccaacttgaggaagtggaagatcccctagtcggagacgacgagcttctcatcggagtccacgccacttcccttaacagagccgatacctttcagaggaaaggctcctaccctccccctaagggcgccagcccttacctcggtctcgaatgttccggaactgtcctttccctgggtaaaaacgtttccagctggaaaatcggtgatcaggtgtgtgctcttctcgccggaggcggatatgccgagaaagttgcagttccggtaggac

SEQ ID NO: 260094 - DNA, 484 bp, Glycine max
tccgggtcgacccacgcgtccgctgtgctctctttttcacactcttccgtttcgagctctctctcacacacattgaatttcaaggtcgcgacgcgaaatatgagctctgaataacaaacaaacagagttggtgtcgatatcaaggcatgagagatggttagagaaaatgctgtaatgggtggtgccagtgaagagcgtggtgttcgggtcactcgagcaatggctagagctgttttgggtggggtctctgcctcttctagaccgtccttcaagaagcaacacaagaacaacaagggtttcggtagggtagcactagcagatgtcactaacataagcaagaaagggtgtgctacatcaaaatctcaggcaagaggaggttacaagaagactaacacaaagggagcttccaatgtctccattcaagttttgtcaactcaagaagatgttagagcaaaattagcaaaagatttaccctcaatatcaa

SEQ ID NO: 260095 - DNA, 261 bp, Glycine max
cgggtcgacccacgcgtccggccacgcgtccgggtttggtttggaaggaagatgaaaatgaaggccatagcgataactaggcggggaggtcccgagagtgctccaacttgaggaagtggaagatcccctagtcggagacgacgagcttctcatcggagtccacgccacttaccttaacagaaccgatacctttcagaggaaaggctcctaccctcccactaagggcgccagcccttacctaggtcttcaatgttccggaac

SEQ ID NO: 260096 - DNA, 373 bp, Glycine max
taccggtctggaattcccggttcgacccacgcgtccgcaaacacaaacatcatagtatatagtatctatctaaagtaaataatcatggcacgggagaggcctcttgttattggtggtgtgattggggatgttctcaacccttttacaagctccgtttctttgactgtttcaatcaataatagggcgattagcaatggcttggaactcacgccctctcaagctgttaatcgccctacggttactgttggtggtgaagacctaaggaccttctacactctggttatggtggatgcagatgcacctatccctaacaaccctgtcttgacggaataccttcactggattgtgacagatattccagctaccacaaatg

SEQ ID NO: 260097 - DNA, 303 bp, Glycine max
  unsure (1)..(303): unsure at all n locations
taccggtccggaatacgcggtccgattgggatctcacatggacactgttgntgatgctgggatgtttgatggatcactaggaattgtctctgcaatatctgccgtgaaggctatgcatgtcaatggaaagctgcaaaagctaaagcgccccgttgaggtgattgcatttagtgatgaagagggtgtcagatttcaaactactttcttgggaagtggtgctatagctggtattttacctggtacaacattggagatatctgataagagggaggtgatgattaaagattttctcaaggagaactc

SEQ ID NO: 260098 - DNA, 478 bp, Glycine max
gaattcccgggtcgacccacgcgtccgcttgtttctttcgtttctttgtttctctttctctagctagctaagtccgttcgtgatcgaaaagagaaaaagatcatggaagaaagtctagtaaaaaaacatgaagaagatagagtagtaagatggggtgtttatagtgaagaaatgagaaggatctgtgaaatagcagggcctatggtggcagtggtttcttcccaatatttgttgcaagttgtgtcaaccatgatagttggtcatttaggtgaactctatctctctagcgcagccttagccatttccctatcaggggtcactggtttcagtcttcatatgggaatggctagtggactggaaacaatttgtggacaggcttatggagctcaacaatatcaaagaattggaatgcaaacatacactgctatattctctctcatattggtttctattcccgtgtctatcctttggatcaaca

SEQ ID NO: 260099 - DNA, 459 bp, Glycine max
cccgggtcgacccacgcgtccgaaagatcttcatcaatatacgcaatctaaaaactgtatagaggaaaagacgagaaactttagggaggaaaagaagagagtgaagcggtgacatgaaatagaactctggatgtcccaccgaatgctacctgaggacttaaagcaaagaattagacgttttgaacattacaaatggcacgaaaatagcggtgttgactaggaggcattaattcgcaaccttactaaagatctcataagggacactaagcgtcacctttgcttagctttagttagaaaggtgccaatgtttggattaatggatcagcagttgatgcgtgcaatgtgcgatagactgaagacagtactttatgattagcatagctgcattgcctgtgaaggaaatccacttgatgagacgggatgcattatgagtggtaaaggttattctgcgacaacaaa

SEQ ID NO: 260100 - DNA, 496 bp, Glycine max
cggaattcccgggccgacccacgcgttcgcaaagctttcccttagaaacggttttcaccttactctcgcatcaatcttccttgcttttgtggagagagagagagagagagagcgctgtgtctgaatcgtgttctccgattgcaccggtggttcgatttatggtcgtcggagaatcgccgatctcgctgagagtttcgaatcgcaccggtgaccggaggagatggtgaattccatggtggaacgcgccacgagcgacatgctcatagggcctgattgggccatgaacatcgagatctgcgacatgctcaatcatgaccctgggcaagcaaaggatgttgttaaaggtataaagaagcggattggaagtaaaaattcaaaagttcaacttcttgcactaactttgttggagacaatcataaagaactgtggagatattgttcacatgcatgttgcaaaaagagatgtgcttcatgagatggtgaaaatagtaaagaaa

SEQ ID NO: 260101 - DNA, 444 bp, Glycine max
cgatgagctgcaaaatcacatcattatttgtgtatttgggcgagttgggcagatgattgcacgacttctttctgagcaacttattccctttgttgcactagacgtgagaagtgatagagtggcaattgggcgttccctagatctccctgtgtactttggagatgctggtagtcgagaggtcctacacaaggttggggctgaaagggcaagtgctgctgcggtaactctagattcccctggagcaaattatagaacagtttgggctctgagcaagcacttcccaaacgtgaagacttttgtccgtgctcatgatgttgatcatggattgaatttagaaaaggctggagctaccgctgttgtcccagagaccttggaaccaagtcttcaactagcagccgccgtgcttgctcaggctaaacttcctacatcggagattgcagcgac

SEQ ID NO: 260102 - DNA, 490 bp, Glycine max
acaggggcgacccacgcgtccgcggacgcgtgggttctcgttcttgatctctttcgatttttccttccctttgcgccataaaggaggtgcttcagatttgctcataataggagggaatcgaatcgaatcgaatcgaaaggaaagtgcagaatggatgacatgccgttgccggcgctctttgagcaagcccgcaagatccacgccgcagccaccgattccggcgccgaccaggaggttgtgaagaaggggtgcgaggctctgcatagatgcgaggacatggtcaataatctaggtttgttctctcccaacgagaccaaagaagaaatcagcaccacgaatctcaaatacattctggtgccattttatcttgcggagttgacagaaaaaatagcacaggatgacaggatacagattctaaagtcttcccaggcaaaacttaaggagtttatctcattttgtgaagcaatggagctggtcccaaaagaggagt

SEQ ID NO: 260103 - DNA, 258 bp, Glycine max
ttctttttccactgctgtttcaatgtgggatgctgatttctatgtcaaggtggatgatgatgtccatgtcaatttaggtgtcctggcaacaacccttgctcgtcatctatcaaaacccagggtctacattgggtgtatgaaatctggacctgtcctttctagaaaggatgtcaaataccatgaacctgagttttggaagtttggagaagaggggaacaaatacttccgacatgcaactgggcagatatatgcgatctc

SEQ ID NO: 260104 - DNA, 383 bp, Glycine max
  unsure (1)..(383): unsure at all n locations
gaaaaaccgggncgacccacgcgtccgcccacgcgttcgcgcgaatgtttgtagaattttagacgccaccagggttcaggttttatttgactgattaagaattggtcaatcactacttgagaaggaagtgcgcggatcaaccaatctcggttcccatcatcaaataggtcgatttgtacaagatatattcatggcatcttccacaaattgactactactgctagaaagaatggtacttcttttcttctcgggatcagaaatactcgaacggttcacggcctaaaccgtgccatcttaagcggatattggtaagctcacccgcgctgataagccatcggaaataccaaagcgctagggatccaataatgctttggttttttacg

SEQ ID NO: 260105 - DNA, 499 bp, Glycine max
  unsure (1)..(499): unsure at all n locations
ccggnccggaanacccgggtcgacccacgcgtccgaagaaatttaagtgaggagctatataatgattatgaagtctgctatgtgtgcagtggtgggtgtagcacttcttcttctggcggaggtggggcccatggctgaggctgtgacatgcaccccaacagagttgagtccgtgtcttccagcaatcacttccggtgctaaaccttccaatgcttgttgcacgaagctgaagcagcaaaaaccatgcttatgtggctacctcaaaaacgctagcttgaagcagtatgttaactctcctaatgcccgaaaaaccgttgcttcttgtgggattccctttccaacttgttaattaattaagccttcttataattaaagtgtgggatatatatatatatatagataaacagtttaatttatacacactttgatcctacaaagcatcttgacacaggcattcaataggatttcaccactttatcgcaacattttaacatgatgc

SEQ ID NO: 260106 - DNA, 498 bp, Glycine max
accggtccggaataacccggtcgacccacgcgtccgtggctcgtcactccttgctcttagccctccttctcttcgccgccgtggccaccgccgcgatggcggtggccgcgtccgacgccgacgacatcctgatccgtcaggtggtgccagatgttggcgaagccgaagaggaggacaacctgctgaacgccgagcaccacttcgcgagcttcaaggccaagttcgccaagacctacgccaccaaggaggagcacgatcatcgcttcggcgtcttcaagtccaacctccgcagagccaggctgcacgccaagctcgacccctccgccgtccacggcgtcaccaaattctccgatctaactccggccgagttccgccgccagttcctcggcctcaagccgttccgtttcccggcgcacgcccagaaggcgcccatcctccccaccaagggatctccccaaggatttcgattggcgagacaaaggagccgtcactaacgtc

SEQ ID NO: 260107 - DNA, 450 bp, Glycine max
ggaagacccgggccgacccacgcgtccgtgctaagaatcatcaggccacttctgcccttttgcatagcatggtacttggcaaggcgaggatgttggacctatccctggaacaactaatattaagaacctggatcaaaacataggtgccttagcagtgaaactgtcagaaaaagacctgagagaaatttctgaggcggttcccattggtgatgtatcaggtggtagatactacaatggattggatcacttttcatggaagtatgctaacacaccttcaaaagattcaaaaatcttaacctgacgcacccaaccaacccttttgttagggaatctaccaagtcatcatgaattgagggtaacaaggcttgctaaggctaatattatgatgcttattaaatttcaataatgtaccctttcttgattgtggacttcctagattattggttggtt

SEQ ID NO: 260108 - DNA, 352 bp, Glycine max
cccgggtcgacccacgcgttcggccacgcgttcgaatagaatattctaaggctttgggaatagtgctgcaacggcttcaagtcaggaggaggggacccttttgggagctacttgaagcccaattgtgtgcaggggttatattggcctcaagttgaagggaggtcaataccaatatttcgaagaaaatttgaggaacaagagtgaactgcttcttaaattcaacccaattcacaagaaaggtccagtgtttatttacaatgagaagcccataaccgaatctattgtggttggtggatacattgatgagacattgaagaaccaccccaaattggcttttgaatcttaacaaaaa

SEQ ID NO: 260109 - DNA, 418 bp, Glycine max
  unsure (1)..(418): unsure at all n locations
ggaanacccgggccgacccacgcgtccgcaaacctgaaaccttattggatttttatttttacaatgcaggttttctcaaaagagaatcggattacgtccagaatgctatttccagagatgggttggagtggctatttaaaaggatgattgagttgggaaaaacggggcttgttttcaatccttatggagggaaaatggctgaaattccttctgatgcgacgccgtttccgcaccgtaaagggaacttgtataaaatccagtactctgtgaactgggatgatccttcacccggtgctgctctgaatttcacgaaccaggctaaaaggttgttcagttacatgaccccttttgtgtccaagaatcccagaagtgcgtttttgaataatagggatcttgatattggggttaacagctttgg

SEQ ID NO: 260110 - DNA, 287 bp, Glycine max
cgggtcgacccacgcgtgcggaagaagaaaggcgtggaccaattcccgttctgcgtgcacctggtctcgtgggagaaggaggacgtcttcagcgaggctttggaggcggcgcgcatcgcatgcaacaagtacatggccaagttcgccggaaaagatgccttccacctgcgcgtgagggtgcattccttccacgtgctccgcatcaacaagatgctatcgtgcgccggggccgacaggctccagaccggcatgaggggcgccttttggaagccgcaagggacgtgcgc

SEQ ID NO: 260111 - DNA, 344 bp, Glycine max
  unsure (1)..(344): unsure at all n locations
atgacagtgtgattgctttggcgactagatgcccccatctgaggtacctaggactgtactactgctagaacatcacagatagagcaatgtatttcttggcacacaccaaggtgaacaacaggatgtggggaactgtcgaaggacgaggaaatgatgaagatggtttaaggacttttgacattagccaatgcactgcactcaccccatctgctgttcaagctgtttgagactcattcccttctctccacacatgctcanggaggcactcactcatcatgagtggctgccttaacttgacatcagtgcattgtgcctgtgctgtccatgctcaccgtgcattcacc

SEQ ID NO: 260112 - DNA, 280 bp, Glycine max
  unsure (1)..(280): unsure at all n locations
ggccgacccacgcgtccgtcctgcttgtaaactgtgtatgtcttttttagtttaacccacntgtgtagtantaaggcatactgatccatgtggggtagcatcacgttatgatattcttgaagcctacagactagctgttaaagctgatcccgtgagtgcatttggtggaattgtagctttcaatgtggaaattgatgaggcacttgctaaagaaattcgagaatntagaagccccacagatggtgagacaaggatgttttatgaaatagtggttgcgccc

SEQ ID NO: 260113 - DNA, 426 bp, Glycine max
ggaattcccgggtcgacccacgcgtccgcaatcgtttaatcgtgaacttcggctcgatttagctcgggaaaggggtgcgtgtgccccggacagcagcaactggaacaactcatcccagaaaagtgaaagaggccactctcaaacaatatttgtaaggggtttcgatacatccgttggggaagatgagataagagggagtttgcaagaacattttggatcttgtggggacattaccagggtgtcaattactaaagattacgagtctggtgctgtaaaggggattgctaatgtggattttggtgatgctgatagcatgggcaaagctctagaactccatgaaactgaactcggaggttataccttgacagtggatgaagcctaacctagagataatcagggttctgggggtagaggtgctggtggtag

SEQ ID NO: 260114 - DNA, 382 bp, Glycine max
  unsure (1)..(382): unsure at all n locations
ccacgcgtncgccacgcgtncgcagaatcagatgtcggatttaagggttccagtcgaaagggtctgcaagaaggattaaattgttattcaataccagaaaatttatttggcaaggtctgcgtcattattgataaaaatgggaaaattcccgctgacgagataaagaaagagttgaaagctgttggtctatctcaagaagctgtccaagagctattgcaagtcctttctgtgaagtcattgaccgagttagaagaaagacttgggagcaatggggaagcagttgctgatctgaaacagctattctcccttgctgaaaaaattggttactctaaatggcttcaatttgatgcatcagatggttcgaggtcttgcttactacact

SEQ ID NO: 260115 - DNA, 430 bp, Glycine max
  unsure (1)..(430): unsure at all n locations
cggggcgacccacgcgtgcgcttacaccattctcacaaaacaactttcaaactctgagaaagaatggctgccaacacattgatgagtactgctatctcagccttcccatctctcctttcttcctcaaaatccagatttgccaccgcagttcctctttctagctttggtgtcaccaatgcctcttcttctcgcttttctatgagtgctgactggatgccaggccagcctaaacctccttaccttgatggttcagcacctggtgactttggattcgaccctcttcgtcttggtgaagtaccagagaatcttgagaggttcaaagagtcagaactcattcactgcagatgggccatgcttgctgttccagggattttggttccagaggcattgggcttangcaactgggtaaaggctcangaatgggcagcag

SEQ ID NO: 260116 - DNA, 412 bp, Glycine max
gacccacgcgtgcgcgtgtctcatggcgtctgttattcctcgatgccttcctgcttcaattccaattgcacaccgacgaaaggcgcaggtggtgaaatcgtgtcaccaaaacgagagctctgcttcagctcacacagaccactcctcaaatccaaaggaactccgagtaacagtttccaggcgtaattgtctctcatgtttgtgttctactatagttttgattaaagattgcgccatgcctatttttttaccaaaagcatccgctgctgatggaaatggaatcatggaaaaacctgtgtgcagaaattgcttgggaagcggtgctgcgctttgtgatatgtgtggtggcacaggaaaatggaaagctcttaaccggaagcgagctaaagatgtttatgaatatactgagtgt

SEQ ID NO: 260117 - DNA, 482 bp, Glycine max
  unsure (1)..(482): unsure at all n locations
caccggnctggaatacccgggccgacccacgcgtacgtgagttttggaagtttggagaataggggaataaatacttccgacatgcaactgggcagatggatgcaatctcaaaggatttggccacttacatttccatcaacaagccgattttgcataaatatgctaatgaagatgtctcgcttggtgcatggttcattggtcttgaagttgagcatattgatgaccgcaatatgtgttgtggaactcctccagactgtgagtggaaggcacaggccggtaacgtatgtgttgcatcatttgattggagctgcagtggaatttgcaagtcagtggagaagattaaatatgtccactcaaagtgtggtgaaggagatgaagctgtttggagtgctttattttagattgtttcaaagggagatggttttttctggttcggagaaggactgattatttaattgcagctgggacaaagtcaattttca

SEQ ID NO: 260118 - DNA, 427 bp, Glycine max
  unsure (1)..(427): unsure at all n locations
gacccacgcgtccgnccacgcatccatccaaaacattagagagttttataacaacaacaanaatcgggggaattgccagttatacctcacaacttgctctttgctacttccattacccagctcagttactctctccaaggttgtggcgctattcttgctcattcgtatgctcctaagccggatataattcttccaggatactctacttccaattcaacgcctactacgaacactatgcatgaaatattccctaacaacgccactgagcaaccagatttgataatcttgtactttggtggtaatgatactcttattacacattcaatcagtcttggtcaacatgtacctgtccaacaatacattgaaaatatgacaaagattggtacccatttaaacagccttttaaagaagactacgcttatatttc

SEQ ID NO: 260119 - DNA, 413 bp, Glycine max
gacccacgcgtgcgcccacgcgtccgcttaccttatctcttaatccatatacgatggcagacatggcaaccacagggctatcggaaaccccaaactctcattcttgaacggaaagcccgtcacatattctttccgcgtggcgcccaccaccaaattatcctcatacaaacaaggcacaatttccatgtccctaacctcaccctgctacgaccttcaaagcttcaaattccagcccatcaaagaatccatcgtgtcacgggaaatgacgcgccgctacatgaccgacatgataacctacgccgacaccgacttcgtaatcagctgagccggttcggccgggctctcctgcgcgtacgagctcaccaagaaccccgccgtgagcgtggccatagtcgagcaggcagtgagccccg

SEQ ID NO: 260120 - DNA, 439 bp, Glycine max
gaatacccgggccgacccacgcgtccgcactgactcacacccacaattttcgtgggctttttcaaagtacctacacattgtctccttgtcttactgttctcttctcttctacatcatttttattttttccaatcaaaccaaacaaaacataagcaccgttcttttctctccgaaatccccatctcccttcacttctgacctctggaccagatcccatatctcaccatctttcacacactcttccatcagattcaccctttcgtttaacgcaaactcataacttgaaggttaatggctgctacacctgcaagggctcgtgccgattacgattatctcataaagcttctcttgatcggcgacaacggtgttgggaaaagatgcctccttctgcgtttctccgatggttctttcaccactagtttcatcacaactatatgca

SEQ ID NO: 260121 - DNA, 489 bp, Glycine max
  unsure (1)..(489): unsure at all n locations
ccggnttggaattcccgggtcgacccacgcgtccgcctccttcctttgcctctttcgcttttgctttctaggattttttttttttttgttgctctgtctctgtgtcgatggcgggaaaaggagggaaggggcttgtggccggaaaaaccacggcagcgaacaaggacaaagacaaggataagaaaaggcctgtctctcgttcatcccgtgctgggatccagtttcctgtgggtcgtatccataggcagttgaagcaaagggtgcaagcaaatggacgtgtgggggcgactgctgctgtgtacttggcctccattctggaatatctgactgctgaggtgctggagctggcggggaatgctagcaaagatctgaaggtgaagaggatcacaccaaggcacttgcaactcgctatcaggggagacgaagagcttgacaccctcatcaaagggaccattgctggtggtggtgttatccctcacattcacaagt

SEQ ID NO: 260122 - DNA, 483 bp, Glycine max
  unsure (1)..(483): unsure at all n locations
aatacccgggccgacccacgcgtccgagccaattcccctcctcaccaatggccaaactatgtctggtgagattccatgtgccacacgtgatactcaatctgtgcgaactacttcaggtcctctgggcccatctgaaaaggttcactcacttccctatgttgatccaaggcaaccagttccagtaagaattgtggacccatcaaaggacttgaattcttatggtctgggaaatgttgactggaaagaaagggttgaaggttggaagcttaagcaggagaaaaatatggtgcaaatgactggtagatacgctgaagggaaaggtggagatgttgaagggactggttctaatggaaaagaacttcaaatggtagatgatgctcgacaacctatgagtcgtgttgtgccaattccttcatctcagctgacgccttatcgagttgntatcatccctccgctgattattcttggcttcttcttacaata

SEQ ID NO: 260123 - DNA, 387 bp, Glycine max
ttcccggtgcgaccgacgcgtgcggcttgcggtcaaattgttatatgcgcaccttaaacaaaggtgttagaccaccctgccacagcgtgttttggtactcactgcagttggaattctaccttagtatgtgaattcaatgcggtacctttcttgtgttggccttattatgctgaccaattaattgacaaagcttacatttgcaatatgaggaaagtgggtgtgggatttgattgagatgacacacggctgatatcaccctgtgagacaaagcacaaagttgaccatgtccttggagatgagaacatgaagcgaatgtctgaaaaactgaatgaaatggttctaaattacattgcggaaggtggacaatcctatgcgaattttaacaag

SEQ ID NO: 260124 - DNA, 286 bp, Glycine max
cactgtgttgtatcccatacgaatctgtgtttgtgagcgttttgacgcgatatggaggctgctgacttcaaactcgagaaagctcttggagaccaattgcacgcatgagaacgtaacttgggtctggacaatttccgctgcacttgttactgcaacagcgtcttgcgcgcactatacttctgtgttccggttcgcgaacaattactagagtattatggagatgaccaatgcatattgtacagggaaaaaaatcttttaacttgcttagcggacttattatcacaga

SEQ ID NO: 260125 - DNA, 409 bp, Glycine max
  unsure (1)..(409): unsure at all n locations
attcccgggtcgacccacgcgtgcgacctgatgaaggttctagcacgggagggaatattatatcttatcccacatcgatggaagcgtgtggacggtgcattgaattgacacaaaatggccaaaaacattctttcacatatgataaagtttttgcacctgatacatcacaagaagaagtttttattgaaatttcacagcttgtgcaaagtgctcttgatggttataaggtttgcatttttgcctatggtcagacagggtcagggaaaacttacacgatgatgggcaagcctggacattcatgagaaaagggcttgatccctcgttcactaaaacaaatatttcaaacaaaacagtctcagcaactcccaggctggaaatatgaaatgcangtgtctatgttggaaatata

SEQ ID NO: 260126 - DNA, 456 bp, Glycine max
  unsure (1)..(456): unsure at all n locations
attcccgtgtcgacccacgcgtgcggcgggctcaagtgctccccactctcatcttcttctctcttctccaaaccttctctttggacggcaacaatcgcaaaagcgcgtttcaattaccattgcgaactcaatagcaatagccaatgcgcagaacaaagagagagcgaggcttaagaaactcttcgaagaagcctacgagagatgccgcaatgctccaatggaaggtgtttccttcaccatcgaagacttcactgctgctcttgacaagtacgacttcgattctgaagttggcggcaagattaaaggcactgtgttctacacagataacaatggagcagttgttgatatcactgcaaagtcttcggcatatttgccactgcaagaggcgtgcatccacagggttaagcatgttgaagaagcangcttagttcctgggttcaagaggagtttttgatc

SEQ ID NO: 260127 - DNA, 222 bp, Glycine max
catcacatttgacttttgatgctcagagtgctgttagtatttgtaagaagttgacattgccaaaagattatcatgcaaaaacagagcatgggaaataaacaaacaaacatctgatatgcatcgatgttctttaaaaagaaatgaagacgaatccaatggctgcggatgcctgtatgtctatccataccatggctgatgatctccacatgaaactactgtacc

SEQ ID NO: 260128 - DNA, 318 bp, Glycine max
ttttgtgttttttttgttttttttccagtaatagtatttaatattataagcagagattcataattcaaattagccgaactttatacagaagcgaccaattaccaaacattaaaaaaaaaaaaaaagaagcacccttgagcttaacacacccatcacaagtccaaaacacttgaacttgctgaaaggcaaaacatgaccactttattttaaggatgtttgtttaacacaaaacaccagagtgcacgaaaaccatcacagacataatacataagtttttagctacacattaatagtttatcattattcctaattaagggc

SEQ ID NO: 260129 - DNA, 450 bp, Glycine max
  unsure (1)..(450): unsure at all n locations
gcggntacccttacattctccacacaaacgactttacctcaagccaagggaacagagagcaacaatggtacctgtggttcgaccccaccagaaacttacacacttactccatcatctggaagccccaacacatcatattcttggtggataacattcccataagggtgttcaagaatggtgagactattggcgttcctttcccaaagaagcaacccatgagaatctattctagcctgtggaacgctgatgactgggccaccagatgtggcttggtgaaaactgattggtccaaggcaccctttacagactactaccgtaatttcaaagccacagagttcttcaccaattccttctctgatgctgcatggcataacaacgaacttgatgcctatggcagaagaaaactgagatgggttcagaagtacttcatgatctataactactgcaacg

SEQ ID NO: 260130 - DNA, 474 bp, Glycine max
  unsure (1)..(474): unsure at all n locations
ggaanacccgggtcgaccgacgcgtccgcccacgcgtncggaagaaacttaatcgatcatcacttcacttcactaatacggcatggcgggcgagacccagaacaagtatgagagctctgaggttgaggtccaggatcgtggtgtttttgactttctcggtaagaaaaaggatgaagaagacaagcctcatcctcaggaggaggtcatcgccaccgagtttcaaaaagtcactgtctcagaccaaggagagaacaagcacagcctcttagaaaagcttcaccgatctgacagcagctctagctcttcaagtgaggaggaaggagaagatggagagaaaaggaagaagaagaagaaggaaaagaaagggctgaaagagaagatcgaggagaaaatagagggtgatcatcatcatcacaaggatgaggacacaagtgtccctgttgagaaagttgaggttgttgaaacagcacatgc

SEQ ID NO: 260131 - DNA, 459 bp, Glycine max
attcccgggtcgacccacgcgtgcgagttggtgttagtcttggtgtagtgtagctagggagggatatatatctgagtaagatggcgtcagagcgtgaattgcccccaggcttcagattccatccaacggacgaagagctggtgttgcactatctctgccgcaaatgcgcgtcgcagccaatcgccgttcccatcatcgccgaaatcgacctctacaaatacgacccctgggacttacccggattggctacttatggagagaaagagtggtacttcttttcaccacgggaccggaaatacccaaacggttcgaggccgaaccgggcggctggcaccggttactggaaagcaaccggggcggataagcccattggtcagcccaaaccggttgggattaaaaaagctttggtgttttactgcaggaaagctcctaaaggggacaaaagcaattggatcatgc

SEQ ID NO: 260132 - DNA, 422 bp, Glycine max
  unsure (1)..(422): unsure at all n locations
aatccgacgaattcgtcctaaccacgttcacaacgcatactacggttttcctaatcanaaaccctaatgtgtgattcgcatctttgatccagaaattcaaacactattaagggtctcttcaattctaagcctcgcactcctccacatgtaatgctctacaccagacatcttctgctctttgttgatcgcagcccctaaacccgcaaaaccaaacgtgatgagaagatatcctagctatttaaaaatatcacggagctaaagtcaatcctgtatcgaaatagtgaatctgaaccagtctcagaagcttgtgcgcaattgactcangagttctttaacgaggacacgttgccactgcttatcaaatgtcttccaaaattgaatttggaggccacaaaagatgccactcaagtttttgcaaattt

SEQ ID NO: 260133 - DNA, 343 bp, Glycine max
attcccgggtcgacccacgcgtccggaatattttaatcacaggatgggcaacacgcttgctgaatagatgaaaaaagggcacaagggggccattagtgtgttcatcggatcagttcaaaagctgatgactgcgttcgaccacgccaggataccacttcctttgacagctgacaccaccatagtctttgatactgtatccaacggactcgatttctactgcaatgctactcttgccagatttcaggctctgaacgtggatgtctacaccatatgtatcgagcccgagaaaaaatggcaagagcttgctcaaactgccaaacaagggtgggatgaccatgttctt

SEQ ID NO: 260134 - DNA, 428 bp, Glycine max
aattcccgtgtcgacccacgcgtccggttgttttccaaaaccctaatttatcgaaaggtagggttttgcagaacctgctactccggtgccagtttggtcttctttatgctctctcctttcttcttccattcctctaacctaagatgggcaagtcaagcacgaaatcagctatcaaggttgacgctgctccacctgtggttccgccatccaagtctgccaagaagggaggcaagcgacaagctcaagatgaaattgagaagcaagtgagtgccaaaaaacagaagatagaggaggttgctcagaatcaaaagaaggaggccaaggtgcaaaagaaggaggccaaggtgcaaaagaagaaggaagtagttcacatgattcttcggaatctgaagaagagaaacctgcacccaaacctgtactttcaaaaa

SEQ ID NO: 260135 - DNA, 480 bp, Glycine max
  unsure (1)..(480): unsure at all n locations
gggccgacccacgcgtccgattgaatcggtttgcatggtttaagggtcttaggctgacaaacacacatgggattccaggggagtcgctatacagtttanaaatgaggaaaagagtgaggccttccattgtgtattccaacaatggaagaagggattcgatgttcaaggaggaaacttacctaatggaactgatgtaataacttctaaaagcaaatttgatgaaaagatagagccatcttctgcaaaaatgtattttcattattacggacaacttctgcatcagcaaaatatgttgcaggactatgtgaggacaggaacctattatgctgcagttcttgagaatcgtgcagatttcgtaagtcgtgtagtaattgatgttggtgctggtagcggcattttgtcactatttgctgcccaggctggtgcaaaacatgtttatgccgtggaagcatctgaaatggcagaatatgcacgaaaact

SEQ ID NO: 260136 - DNA, 413 bp, Glycine max
  unsure (1)..(413): unsure at all n locations
cgaccgacgcgtgcgcaaacataatcaatgctgctgtgaccccagcttttgttgcttaattcccaagtctcaatggcgttgacctgtctgcagcaagattagaccttggtcctggtggtgttatcccactccacactcaccctggtgccaatgaactactcattgttctccaaggtcacatccttgctggattcatatcttcaggtaacatagtttatcagaaggtgctaaaaaagggagagctcatggttttcccacaagggttggtgcacttccaaattgctgttggtaagagaaaggcccttgcttttcctgtctttaacagagcttttgctggccttcaaatactagactntgcactctttgccagcaatttctccactcctttggtgacacagaccacttttcttgac

SEQ ID NO: 260137 - DNA, 411 bp, Glycine max
  unsure (1)..(411): unsure at all n locations
cttcaaaacggtttttagattttcaacaaaaaaaacaatgggctttctgtaatttcctacgcaacanaatcaagcaagntcagaaaagaagaagggaaaaaccgattaccgtgccaggattcggttgattaatcaggacaagaacaaatataacactcctaaataccgatttgtggttcgctttagcaacaaggacattgttgcacaaataatatctgctagcattgccggcgatttagttcttgctacagcatattcacatgagctgccactatatggtcttgaagtaggacttacaaattatgcaacagcttattgcactggtctcctgttggcccgaagagtcctcaaaacacttgaaatggatgatgagtattaaagaaatgttgacgctactggagaggattattc

SEQ ID NO: 260138 - DNA, 349 bp, Glycine max
gaattcccgggtcgacccacgcgtccggattatttgtcaccatcagacatcatggggaaatattcacatttagttgttataggaacaggactgactttcggatatcttgtggggaggatgattttggcacacttatgtgatgaacctaagggtctgaaaactgggatgtgcatgtccctcatgtttctcccattgggcattgccaatgtacttgcattcaggctaaatgatggggttcctttagtagatgagagactaggtcttcttgggtactgggcattttcagtgacactatacttgcattttgccacattagtcattcatgaaattaccaatgccctgggaatat

SEQ ID NO: 260139 - DNA, 455 bp, Glycine max
  unsure (1)..(455): unsure at all n locations
ggaattcccgggtcgacccacgcgtccgcttaggtttaggagaggcgaatctcgcgggtaagaagatattcctttacgacgccgtttgcgggccgagcgagattcactcgttggagacgacgccgtttgattacgtggggaactgcgagaacaagacgctgcacgcgacgcagcagatcgcggagtgttggacgcgcgcggtgaggaagctgctggagagagtggtggagtcggtggagagaaaaacgttggagaaggcggcgagggagtgtcacgcggtggagcggatctggaagttgttaacggaggttgaggacgtgcacgtgatgatggatccggaggatttcttgaggttgaagaaggagttggggatgatgagaaattgcggngaaatggtggcgttttgcttcaggtcgagggagctcgtggaggtggcgaggatgtgtagggatctg

SEQ ID NO: 260140 - DNA, 477 bp, Glycine max
ccgggccgacccacgcgtccgtggatctgctagtttgggggagattgctattttagctggcgggtgcgatttggacggtcatatccttgactctgctgaactgtacaattctgagaatcaaacctgggaactactccctagcatgaacaagccgtggaagatgtgctctggggtatttatggatggaaagttttatgttattggtggaattggtggaaaagattctaagcttcttacatgtggtgaggagtacaatatacaaactagaacatggacagaaattcctaacatgtcccctggacgcagtgccaggggagctgaaatgcctgcaacagctgaagcgccacctctggttgccgttgctaatgatgaattatatgctgctgattatgctgacatggaggtaaaaaaatacgacaaggagcgaagagtgggggttaccattgggagactacctgagcgagcagtgtcgatgaa

SEQ ID NO: 260141 - DNA, 290 bp, Glycine max
caatctcttcggggatgtatttatggtctaaaaattaaaccccgatgtcaaaaaattattcgataaattcactcacattgaatcaagaagtgaaaagtttgacatgtttatgcaccttgacattaattccgagatatatccgttaaaggttggtcataagtttgctcttgtgcttgtttcaacacttaatcctgattgaactccagacactggatattattcccagatcagtttacaattactgtccatcaattttcaatatgtcatgtattggaagctttacaggataa

SEQ ID NO: 260142 - DNA, 494 bp, Glycine max
aattcccgggtcgaccgacgcgtgcggcccagaaggcgcccatcctccccaccaagtgatctccccaaggatttcgattggcgagacgaaggagccgtcactaacgtcaaggaccaaggggcgtgtggttcgtgttggtctttcagtacgacgggagcgtttgaaggagctcattatctggccactggtgagctcgtgagccttagcgagcaacagcttgtggattgcgatcacgtgtgtgatccagaagaatatggagcgtgtgactcaggctgtaatggtgggttgatgaacaacgcatttgagtacatacttcagtctgggggagtacagaaagaaaaggactatccatacaccgggagagatggcacctgcaaatttgacaaaaccaaagttgcggctactgtatctaattacagtgtggtttcccttgatgaagaacaaattgctggaaacctagtatagaatggctctcttgcagttgctatcaatgc

SEQ ID NO: 260143 - DNA, 252 bp, Glycine max
gaattcccgggtcgacccacgcgtccgcccaggcgtgcgagcagcctccaattcgtgtcactctcttcaaaatggccgttaccttctggaaggtccacacagaatcagggctcaagtccctcgacgacttcctctctgggaaggtctacgtttctggggatcagttcacaatggacgacatcaaagtgtatggtgctgtttttgagaatccaggtgtactcttttccaatgctgccaagtggtactaggttt

SEQ ID NO: 260144 - DNA, 472 bp, Glycine max
gaattcccgggtcgacccacgcgtccggggtatcaagcaatttcatgtcaatgttgataaagaggaatggaagcttgacacactgtgtgatctttatgagacattggcaattactcagagtgtcatttttgtgaacaccagaagaaaggttgattggctgactgacaagatgcgaagtcgagaccacacagtctcagcaacccatggagacatggaccagaataccagggacattattatgcgtgaattccgttctgggtcatcccgtgttttgataactactgatcttttggcccgtggtattgatgtccagcaagtgtctttagttataaattatgatctcccaacgcagcctgagaactatctccatcgtattggacgtagtggaaggtttggtaagaaaggtgttgccattaacttcgtcacaaaggatgatgaaaaaatgctgtttgacatccagaggttttacaat

SEQ ID NO: 260145 - DNA, 463 bp, Glycine max
ggtcttgaattcccgggtcgacccacgcgtccgcaacaaatgaatattctcggacaatcattcaacgaatcaaacaacggaagctactcttgtgcgtcgccggagactggtagctcctctaacattccaaacacttttcactccgacgaggaagtgcacacactagcttctgcgcgtcctaagaaacgtgcggggcgtcgaatttttaaggagacaagacacccgttgtaccgaggagtacgaaggaggaacaacaacaagtgggtctgcgaggttcgtgttcccaacgacaagtccaccaggatttggcttggaacgtatccagtgcctgagatggcctcacgtgcgcacgacgtcgccgcgcttgcgcttcggggcaagtcggcttgcctcaacttcgccaactcggcgtggcggctgcccttgccggcgtcgacaaatgcgaaggagatacggcgagtgg

SEQ ID NO: 260146 - DNA, 209 bp, Glycine max
tttctgaaatcttggggggaggatgatttttgcacacttatgtgatgaacctaaaggtctgaaaactgtgatgtgcatgtccctcatgttttaccattggccattgccaaagtacttgcattcagactaaatgatagggatcctttagtagatgatagactaattcttcttgggtactgtgcatttttagagaccctatactttcattt

SEQ ID NO: 260147 - DNA, 432 bp, Glycine max
tacggactcccgggtcgacccacgcgtccgccacgcgtccggaagagatggccaccgttccaaggcagctcgtgtgtgagatcgtcaagagggacatttcctggttggtcaagcactttggaaggggcacccagagcgtacaattcatcagagagagcaacaatctctacaacctcaattcgatcaagtactatggtttggcatacaagaaatctgatactgtacagcctgagggctaagatcaggctgagtagttggctacaaccaagacatagaatcaatgcatgaccgctgcattgctccacaaatctgtgatgaagaaagagttcaagaggatggcaaaagctgatgaaaaccatgtggcccaaaattactacaggcccgatctcaagaaagctgcccttgcaaggttgagtgctgttcacagaagcc

SEQ ID NO: 260148 - DNA, 342 bp, Glycine max
cgggtcgacccacgcgtccgcccacgcgtccggacaagaccattgatggcagcaacaagctctggcactcttacagcaactgcgtccctagggcaaggcacgggcaccaaagccaatgctcttagagatgatgattcaatggaaacagcaacatacaccatgggcaaagatttgtgaaatggaccagactgagagaaatacttggtgacccttttcagctcagacgccttcatactagaaaggacaatgcccacgggattatcgatgggacactgctggcttatctgctgacccggaaacctttgacaagaacagggctcatgaggatatccataggagatg

SEQ ID NO: 260149 - DNA, 496 bp, Glycine max
cggacttcccgggtcgacccacgcgtccgcccacgcgtccggaagagacatggaaaaatcgtaataggccaaaacctatatacagcaaggatatcctgtccgatgaaccggctcaacaaaatggaaatttggagaaaaaaatatgaatctgatgaattatcagtttccgccatggcatccttgggcatgaagaacccacaggatatttggagtctcaaagaaaattctagaatatttcttgaagcatttagacttttttttacaaaaagggaaaaggagattggcaatctaagctttgataaagatgatcagttggctgtagaatttgttactgcagctgcaaacataagggctgcttcatttggcatccctctccaaaacctttttgaagctaaaggtattgctggtaatattgtgcatgctgatgcgactacaaatgctgtgattgctgggttgattgtcattgaagcaatcaaagtgctgaataatgacaata

SEQ ID NO: 260150 - DNA, 251 bp, Glycine max
ggacttcccgggtcgacccacgcgtccgatgggacattcagcaggtgaacaacagtgcttatgaatgtcacaggaatcatgaagggctggggagctgataatgctacaagacaatcttgaaagacgagtccattgtagaaacgcgatttatgcacgacaaagtcgctgatagacgactcttcagaagctccgctagtggtagtcaactcctactaaagtcagctcaatcagtaagagtggaaagacacatg

SEQ ID NO: 260151 - DNA, 405 bp, Glycine max
ggacttcccgggtcgacccacgcgtccgacaacacctctgtcaacacatgaatattctcggacaatcatacaacgaatcaaacaacggaagctactcttgggggtcgacggatactgatagctcctctaacattccaaacactttatactccgacgaggaagtgcacacactagcttatgcgcatcctaagaaacgtgcggtgcgtcgtatttttaaggagacaagacacccgatgtaccgaggagtacgaaggacgaacaacaacaagctggtctgacaggttcgagatgccaactactagtccaccatgattcgtcttggaacgtatacagtgcctgagatggccgtacgtgcgcacgatgtttccgcgctcgaacttcagggcaagtcggcttgactcaact

SEQ ID NO: 260152 - DNA, 496 bp, Glycine max
  unsure (1)..(496): unsure at all n locations
gtacggacttcccgggtcgacccacgcgtccggtcctgcatggcttcctccaccggtttcttcacacccctccatgatttcactcaagccagagcagccccatcaggctctttgcctttcatcaaatcctcctttgcttcctccaagtcaaccttttttcaccctgccctttccctacaaacctcttccaactttcccaggctttttggaaagcctaagtatttctctgttcatgcaagggctgccacagaaaaaaccatttatgattttactgtcaaggatattgacagaaaggatgtttctcttagcaagtttaaggggaaggttctattgattgtcaatgttgcttcacgatgtggtttgacatcatcaaattactcggagctgtcacgcttgtatgaaaaatataagaatcaaggtttggagattatagctntcccctgcaatcaatttggtatgcatgaacctggatcatatgaagatattaagcaatttg

SEQ ID NO: 260153 - DNA, 481 bp, Glycine max
gaatacccgggtcgacccacgcgtccgcgaatcgcccttgcctgtttaaaacaagccttttgagcagataactatggggaaacaagaaggcaaacaagagggaaaatcagaaatagaaccggaaaaggaacaggataagaagaaacagaagaaacgtggttcagtgaagagagtttctagcgcagggcttcgtgttgattctgtgttgcaaagagagaccgataatttcaaggagttcttcactcttgggagaaaacttggacagggtcagttcgggacaacgttcttgtgcgtggaaaaggcaacagggctggagtgcgcctgcaaatctattgcaaagaggaagctcgccaccgatgatgatgtcgagcatgtgagaagagaaattcagataatgcaccacttggtcgggcatcctaatgttatatccatcaaaggtgcatatgaagatgccgtggctgttcatgttgtgatggaatta

SEQ ID NO: 260154 - DNA, 479 bp, Glycine max
ccgggtcgacccacgcgtccgctctgacatcatttgccactcccgcgtttactttatcatattcttattccgccatgtcccaggtgaacggagcctactatggcccctgcatcccgccgccgtaaacctcctaccaccgcccagggcgcggcagaagctgctgctgcggctgcctattcagcctcatcttcaagctcatcttaaccgtgataatcatcgttggcatagccgggttcgtgttctggctcatagtccgtccgaacgtggtgaaattccacgtgaccgacgccaccctgacgcagttcaactacaccgtcaacaacacttttcactacgacctcgccctaaacatgacggtccgaaaccccaacaagaggctcggaatctactacgaccgcattgaagcgcgtgcaatgatgcacgacgcaaggttcgattcacagtttccggagccgttctactcaggccacaagagcacg

SEQ ID NO: 260155 - DNA, 485 bp, Glycine max
ggtcgacccacgcgtccggtttggtgccttctgttctggagctagcaaatcaacccatcatcgaagttccagaacgatatgttcatgccaagcaagatccacatattctttccaacacaatttctttaccacaagttcccatcatagacttgcatcaattgttgtctgaagatccaagtgaactagagaagctggaccatgcgtgcaaagaatggggtttctttcagcttataaaccatggagtggaccctccagtggtggaaaatatgaagataggtgttcaagaattcttcaaccttccaatggaagagaagcagaaattttggcaaacaccagaggatatgcaggggtttggccagttatttgttgtattagaggaacaaaagctagaatgggcagacatgttctatgctcacacatttccattacattcaaggaatcctcatcttattcctaagattccccaaccattcagagaaaatcta

SEQ ID NO: 260156 - DNA, 488 bp, Glycine max
tcccgggtcgacccacgcgtccgctctgacatcatttgccactcccgcgtttactttatcatattcttattccgccatgtcccaggtgaacggagcctactatggcccctgcatcccgccgacgtaaaccttctaccaccgcccagggcgcggcggaggctgctgctgcggctgcctcttcagcctcatcttcaagctcatcttaaccgtgataatcatcgttggcatagccgggttcgcgttctggctcatagtccgtccgaacgtggtgaaattccacgtgaccgacgccaccctgacgcagttcaactacaccgtcaacaacactctccactacgacctagccctaaacatgacggtccgaaaccccaacaagaggctcggaatctactacgaccgcatcgaggcgcgtgcaatgttgcacgacgcaaggttcgattcacagttcccggagccgctctaccagggccacaagagcacgaatgtgc

SEQ ID NO: 260157 - DNA, 311 bp, Glycine max
  unsure (1)..(311): unsure at all n locations
gggccaagtataggggcatgaagattatgtttgtcggtgactccttgtgctgaaccagttcaactctctggcttgtatgattcactcttgggtgcccaacactagaaccagtttcataaagcangatgctctctccaaaatcacattttaggactatggccttcagttatttctataccgcacagcatacttggtagaccttgaccgtgagaacgttggaagggttctgaagattgattcaataaanagtggtgatgcttgtagaggcatggacctcctaaattttaacacgtggcactggttgacccaca

SEQ ID NO: 260158 - DNA, 433 bp, Glycine max
ccgtccgggtttttttaagggtgggccgactccggagcatgctctttttgctttggggccttggggtgaggcagatgatctgctgctgtaacaagatggatgccactaccccgaagtactctaaggctaggtatgatgaaattgtgaaggaagtctcttcctacttgaagaaggttggttacaacccagacaagattccatttgtgcccatctctggtttcgagggtgacaacatgattgagaggtccaccaaccttgactggtacaagggaccaactctccttgaggctcttgaccaaatcaatgagcccaagaggccctcagacaagccactcaggcttccattgcaggatgtctacaaaattggtggtattggtaccgtgccagtgggacgtgttgagactggtgtcgtgaagcccggtatggtggtgac

SEQ ID NO: 260159 - DNA, 471 bp, Glycine max
ccgggccggaattcccgggtcgacgcacgcgtccgtgagaagatttgtcctccacactgcattttaacatcaaacacatcaactattgaccggggggttattgggggggcgaccagctctcaaaatcgcattgcgggtgctcattttttcagtcctgcccacattatgcctcttttggagattataccaaccgataaaacatctgcacaagtgattcttgatctgataacagctggtaaaatcataaagaagacacctgttgtggtgggtaattgtactggctttgcagtgaataaaacattcttcccatattcacaaggtgcccatttgttggtcaacttgcgcgtggatgttttcagaattgacacattgatacgcaactttggctttccgattggtcctttccagcttcaacactttgctggctatggaactgccgtttctaccttaaaaaatatttgcttgatgctt

SEQ ID NO: 260160 - DNA, 270 bp, Glycine max
  unsure (1)..(270): unsure at all n locations
tatcatgcgtcgactcttccgctgtcgctcagaacgtgggctgaaagattttcttcacttggatgattttgataaggatactattttgaagatgttggaccgggcccttgaggtcaaggcattgctgaagtcaggggacaggtcatttcggccttttgcggggaagacaatggcaatgatatgtacaaagccgtgcatgagaacacgtgtatcgttcgagactggctntacattgttaggtggccatgctatatatataggacccgatga

SEQ ID NO: 260161 - DNA, 363 bp, Glycine max
  unsure (1)..(363): unsure at all n locations
cggaaataccgggncggcccgcggcgtccgcaaagtttcacttcagccttatccggtttagggtttcggtttttgacccaacctttgacgtggcgaaaccttaagtggcggatcaggtctgancaatctggttggtagaacctttggtcttagagagtcaagttttatgtctgaattagacgatcaaattcctactgccttcgatccttttgctgatgcaaatgctgatgactcgggtgctgggtcaaaagagtatgtgcatattcgcgtacagcagcgaaatggaaggaaaagcctgacaaccgttcagggattgaaaaaagaattcagctattacaagatacttaaagatgtttaaaaaga

SEQ ID NO: 260162 - DNA, 468 bp, Glycine max
ggaaaacccgggtcgacgcacgcgtccgcatcaccgcaagtccacaacatggctgccactgccgctgcaggcataacttccttgttggcttcttctattagcggcgtcaaatgtcttcgttcctccaagaactgctccattatagacccccttataaccacagtgccctcaaaccgtggcatgtttgtgtcacacttggtggaacctttgtccattgggggtgccattaattctcacaagttgtgggggcctacaatttctgctgctgttgcacaagaagaggctgttgttgtggctgatgatgaagtagatgatggtgctggtttagttgaagaagagaaagtggacgagaatgaacgagaaataattgcagaacaagactctgattcctctgccaccaagctttattttgggaatttgccttatagtgttgatagtgccaaacttgcagggctaattcacgatttt

SEQ ID NO: 260163 - DNA, 477 bp, Glycine max
ccggaccggaaaacccgggtcgacgcacgcgtccgctttcagctccggcaacctctcttccggcgccgccgctatctcggccgcgcaccaatcgggaatttgattgctggggtcaacgatttctgtcattctcaatcatggcaactagacttcagtttgaaaataattgtgaagttggagtcttctctaaacttaccaatgcctactgtttggttgccattggtggttctgaaagcttctacagtgtatttgaagccgagttagcaggtgttatccctgtggtcaagacatccattggcggtactcgtattattggtcgtctttgtgctggtaacaagaatgggcttctcttgccccataccaccacagaccaagaacttcaacatttgagaaacagtctacctgatcaagttgttgttcagcgaatagacgaaaggttatctgctctgggaaattgtatagcatgtaatgaccatg

SEQ ID NO: 260164 - DNA, 329 bp, Glycine max
cggaattcccgggtcgacgcacgcgtccggggctttgcagtccaagctgccgccactggcaagggcccgctcaacaactgggccaccgacttgagtgacccggtccacacaaccatcattgacaccttctcatcctcctcttaagaagaagcaaaagaagaagaatagtctttcttgtgcctggtcattctagttatattgaaaaagtcttttcttcttctttcgctttggggtggaaataaaaaatttcttacatacttggataagaagaactgggaaaaaactggaaacgggaaatggagaaggttaagcaaaattgtttttgttgg

SEQ ID NO: 260165 - DNA, 452 bp, Glycine max
cgcaaaaattctcacgtaccaagcttctgaggatgtggtttacaaaggctacagatcaactgtggggtctacaagcacggaggattcattgatgggttttgctgtctgggagccacctcatggtcgatacaaaatgcttagatatccatggcaaaattatgtgaaagtaagtggagcactaaggcattgtgcgtttatggtcatggctatgcatggatgtatactttctgaaatacaggctccacctgagaagaggcaagtgtttagtagggaggttcaaaagctaggttctgaagcagccaaaattctacgagaacttgggaacaaagtaaaaaagatggagaaactaggcgaggaagacattctttatgaagttcacgaagcagcagaagaattgcaacagaagattgacaaaaaatccttcctccttgtaaattcaaaaagctgggaaa

SEQ ID NO: 260166 - DNA, 272 bp, Glycine max
ccggaccggaattcccgggtcgaccgcacgcgtccgctggattcctgagaaagtttcttctggtgattgtgacaagatggtcatggctgcttgtgggtggcggcatacagtttctggttcatatttgggtggcttatacacatatgggtggagcaaatatggccagttaggacatggaaattatggagattcttttgtgccttaaaaactttaagcctttgatgataaagtaatcagtcaagtataggctgtgttgaggcatattatggtac

SEQ ID NO: 260167 - DNA, 368 bp, Glycine max
  unsure (1)..(368): unsure at all n locations
ccggaccggaattcccgggtcgacgcacgcgtccgcacccacatacgtgtattgtcgtaccttgcaaccaaatgcttacaatagctcaaaatgggcgcacatcctggggttcctgatatacttcaacctttctaactgccgtttaatccacggccagacctgaccacaacctcatgaactgaaacattttattacgccagaggaaaacaaagcaaaagctatttccgtattatcgtccaacgaaatgtgagcaacctaaaccgtgaaaaccactttgcgccaaacctatacaaatctagtgcttttatgctaatcaacaaacaatgctgcatcctanatggcgagagtgcaataaccaaatgcatcac

SEQ ID NO: 260168 - DNA, 446 bp, Glycine max
tccgaaatgttcaaactttatctggttcccctgctaattttgcagtatacactgcagttcttaaaccacatgatcggataatgggtttggacttgcctcacggaggacatttgtctcatggattcatgacacccaaaaaacgtgtatcagccacatcaatttattttgaatctatgccttatcgacttgatgaatcaacaggtcttattgattatgatatgctggagaaaactgctactctgtttcgtccaaaactcattgttgctggtgctagtgcttatcctcgggacattgactaccctcgtatgagaaaaattgcagatgaagtaggtgcttttcttatgatggatatggctcatataagtgggcttgttgctgcatctgtactttctaatccctttgagtattgtgatattgtgaccaccacaacccacaagtctttacga

SEQ ID NO: 260169 - DNA, 267 bp, Glycine max
  unsure (1)..(267): unsure at all n locations
gaccggaccggaattcacgggtcgaccgcacgcgtccgcgcctcgtgtttccgtttccgtttcaatttcctctcacaggctttaaccttaccaactggaggggggacatgggcgggggcgaaggcccatgcantccggaagaggacgaggctctgcagaagctggtggagaaacacgggcccacgaactggtctctgatcagcaagtacatccctggcccatccggcaagtcctgcacgctcctatggtacaaccagctttcccccc

SEQ ID NO: 260170 - DNA, 466 bp, Glycine max
aaaaaaaaaacgcgccgccgcgtccaaaacaatccaattaatcaaaacacacagcttatatcgtatgaatacaatttttcacttcgcgacaaatataatgtgtttctttattctaatctcttattctatacttgttaatcaacaacttgttcttattaactctttttttctataatttatatataatttaatttacacaataaaagctttttctattcttctattaacttatttatgtataggattccattcaacccattttttttaactagttatttttttcttctataaacatttatcattttctcacaattatcaaattatatctgctcttgaatccacttattcagtcattttatatacatttttaaaatatttcatttttctttattttaatctcctatctccattacttttcatcatttatcatttatataataattcacttaccaaaatattcacttat

SEQ ID NO: 260171 - DNA, 407 bp, Glycine max
  unsure (1)..(407): unsure at all n locations
cggaanacccgggtcgacccacgcgtccggaaaaggttcacttctatcagttctgagacaatttgctcgattgaaacgtgataagcaggcaggatctgttggattggttggatacccaaatgttgggaagtcatccgtaatcaacacattgcgtacaaagaatgtctgcaaggttgctccaattcctgcggaaacaaaagtatggcagtatataaccctaacaaagaggatctttctgattgatttgccaggtgtggtctaccacaacaatgatttttaaacagatgttgcattgaacggtgtggtgcgtggaactaatttgaaaaattcttgagaccatataggtgagggtttgaaacctgtgaaaaaagagcatttggagagagcattttaaataaaaagagtgg

SEQ ID NO: 260172 - DNA, 309 bp, Glycine max
attcccggggcgacccactcgtacggcaggtgtcccatttttctcaatctcatgttctgagtttgtagagatgtttgttggtgttagtgcttctcgaatccgggatttattcatgaaggccaaagagaatgccccatgcattgtttttgttgatgaaattgatgctgttggaatgcaaagaggtactggaattggtggagggaatgatgaaagagaacagaccctcaatcaacttttgacagaaatggatggatttgaaggtaataccggtatcattgtcattgcagctactaacaaggtttacattct

SEQ ID NO: 260173 - DNA, 174 bp, Glycine max
atcatcatactcattaccatctattatcattatcatcattctcccattcacacacacacacctaatctcatatactccacacccaccatcttcattatcataatcatcatcatcatcatttacataaccatactcactaaacatcatttcattcaaataatctttattatatat

SEQ ID NO: 260174 - DNA, 312 bp, Glycine max
ccatttttctcaattcttaacttttcagtttatagacatatttatttggataaggtcttctctaaaccgggatttattcattaattccaaacacaataccccattcattctttttattcatcaaattcatactattatatatcaaatatatacattaatttttttattcaattatcaaatataacataccctcaatcaactttttacataaatttatctattctatttctaataccactatcattatcattactactactaacatctttaacattcttcattctccattatttactccattactattttata

SEQ ID NO: 260175 - DNA, 497 bp, Glycine max
  unsure (1)..(497): unsure at all n locations
gtccggaattcccgggtcggacccacgccgtccgcactttttactgggttgcaattttaagacatancttttctncccgtcatccacanggaaggggtttggccgcaatcgagatttgattgggtagaaaatggagattccatcgtgcaactttcctggtggcactggaggtgtgaagaccattggaaactatgctgcagttctgaaggcacagtctgaagcaaaagctaaaggctactctgatgttttataccttgactgtgtgcacaaaagatatttggaggaggtttcttcatgcaacatttttgttgttaagggtaacattatttcaactccagctattaaagggacaatcctacctggcattactcgcaaaagtataattgatgtggctcgaagcgaagggtttcaggttgaggagcgattagtttcagtggatgaattgctagatgctgatgaggttttctgcacgggaacagctgtggttgtatcacctg

SEQ ID NO: 260176 - DNA, 473 bp, Glycine max
tccggaattcccgggtcgaccgacgcgtccgctctctctttcttgtcagatctcaaacttggccactacatgaaaattcctccacggtgcatgtacgccgctcagctggtgggaactctagttgctggtgtagtgaacctggcagtggcttggtggatgttggatagcattaaggacatctgcatggatgataaagtgcaccatgacagtccttggacatgccctaagtacagagtgacatttgatgcatcagttatatggggtctgattggaccaaagaggctatttggacctggtgggctgtacaggaaccttgtgtggttattcctgattggagcagtgcttccagttcctatttgggtgttgagcaaaatcttccctgagaagaaatggataccactgatcaacataccagttataacctatggctttgctggaatgccgccagcaactcctgccaatattgcaagctg

SEQ ID NO: 260177 - DNA, 394 bp, Glycine max
ctctctctttctttcaaatctcaaacttgtccactacatgaaaattcctccactgttcatgtacagctctcatctaatatgaactctactttcttatatactcaacctttcattatcttaatttatattctatatcattaactacatctgcatcgatcataaattacaccattacactccttttacataccctaattacatacttacattttatgcatcatttatatttcctctcattttaccaaataatctatttttacctcatattcctttacattaaccttttatttttattccttatttaaacatttcttccacttcctattttattttttatcaaaatcttcccttataataaatttataccacttatcaacataccatttataaccta

SEQ ID NO: 260178 - DNA, 389 bp, Glycine max
ttcttgtcatatctcaaactgtttcactacatgaaaattcctccatctttcagatacagcttttcacgtgatatgaactctacttactactttattaaacctttcattcactttttctatcttttatatcattaattacatctgcatatattataaatttcaccataacattccttttacataccctaattacatatttacatttcatacatcaattatatatattctcattttaccaaatattctatttttaccttttttactttacattaaccttatatttttattcctcattttaacattactttcagattcctattttactacttatcaaaatctttcctcataaaaaaatttataccactgatcaacataccatttataaccta

SEQ ID NO: 260179 - DNA, 477 bp, Glycine max
tccggaattcccgggtcgaccggcgcgtccggcctcgagcaggacccagacagcaaagttgcctgcgaaacatgcaccaaaaccaacttggtgatgggcttcggagaaatcacgaccaaggccaacgttgactacgagaagatagtgcgtgacacctgcaggaacatcggcttcgtctcaaatgatgtgggactggatgccgacaactgcaaggtcctcgtcaacattgagcagcagagccctgatattgctcagggtgtacacggccaccttaccaaaaaacctgaagaaattggtgctggtgaccagggtcacatgtttggctatgccactgatgaaacccctgaattgatgccattgagccatgttcttgcaacaaaactcggtgctcgtctcaccgaggttcgcaagaacggtacctgcccttggctgaggcctgatgggaagacccaagtgaccgttgagtattacaatgac

SEQ ID NO: 260180 - DNA, 337 bp, Glycine max
gacccagacagcaaagttgcctgctttacatgcaccaaaaccaactttggcttagcttttttaaataacgaccaaggccaacgtttactactataatataattctttacaacttcatgaacattatctttctcttaaatgatttgttacttgattcccacaacttcaaagtccttcataacatttatcatcataacccttatattgctcaggtttacactttcaccttaccaaaaaacctgaataaatttgttcttgttaccaaattcacatttttttctattccacttattaaaccccttaatttataccatttaaccattttttttcaacaaaat

SEQ ID NO: 260181 - DNA, 268 bp, Glycine max
atcccataccaacttttcatagcttctttaaatcacgaccaacccaacatttactactataacatatttcataacaccttcattaacattcacttcttctcaaatcattttatactttatccctacaacttcaaattcctcttcaacattcatcatcaaatccctaatattcctcatattttacacttccaccttaccaaaaaacctcattaaattattcctattaaccatattcacatttttcccttttccactaattaaacccctt

SEQ ID NO: 260182 - DNA, 475 bp, Glycine max
  unsure (1)..(475): unsure at all n locations
ccggnccggaatggccgggtcgacccacgcgtccgctgtgttccgtttcgcgaacaattactagagtattatggaaataacaaaggcatattggacggggaagaaaatcttttaacttgcttagcggacttattttcacagataagttcccagaagaaaaaaactggtgtcattgctcccaaacgatttgtacagaggttgaaaaaacagaatgaactcttccgtagctatatgcaccaggatgcccatgagttcttgaactttttgctgaatgaacttgttgacattctggagaaagaggctcaggctgcaaaaactgatcaggagacatctccaccttctgaaaaggctgttaatgggcccaagaatggtcaagctaatggtgttcacaaagagcctttagttacttgggtacacaaaaattttcagggaatactcaccaatgagacaaggtgcttgcaatgtgaaacagtga

SEQ ID NO: 260183 - DNA, 475 bp, Glycine max
  unsure (1)..(475): unsure at all n locations
ccggnccgaattcccgggtcgacccacgcgtccgcccacgcgtccgaatttcgcctctttctttctcaactcccttagattctctccatcgggtgtgtcaaaaatgcggatgagctgcaatggatgtcgagttctcagaaaaggttgcagtgaaaattgcagcatcagaccctgtttacaatggatcaaaagcccagaatctcaagccaatgctactgtgtttcttgccaagttctacggccgtgctggtctaatgaacctggttaacgcaggccccgaacatcttcgtccagcgatctttcgttcgttgttgtacgaggcatgcggtcggatattgaacccgatttacgggtctgtcgggttgttatggtccgggagctggcagctatgtcaagccgccgtggaaaacgtcttgaaaggcgcaccgattacgccgatcacgtncgaagccgcggctagcgggcggggcccaccg

SEQ ID NO: 260184 - DNA, 446 bp, Glycine max
  unsure (1)..(446): unsure at all n locations
ccggccggaattcccgggtcgaccgacgcgtccgaaaantatgtacacataaatctagctccaattcctaatcacctggttaatttcttcacatagagctatcaagatccaacgttaacatgaagaatgttttagtaaggtcagctgcgcgagctctgcttggcggcggtgggcggagctactaccgccagctctcaacggcggcgatcgtggaacagagacaccagcacggtggcggcgcgtttggaagcttccacttgcggaggatgtccactcttccagaggtaaaggatcagcactcagaggagaaaaagaacgaggtcaacgacaccagtaacgccgtcgttacgagttactggggaatcacaaggcccaaggttcgtagggaggacgggacagagtggccgtggaactgcttcatgccatgggatagttaccactctgat

SEQ ID NO: 260185 - DNA, 448 bp, Glycine max
cggaattcccgggtcgacccacgcgtccggcttcggagacgactgcagtttcgagaacggcgttgagtactacaatctgttcctcgaatacgccgccggcgggagccttgccgatgaattgaagaatcacgatggccagatttccgagcatgaggctcgggaatacacgagggccatcgtggagggtctgagccacgtgcacaaaagcgggtttgttcactgcgacataaagctgcagaacatcctcgtattcggggacggaggtatcaaaattgcggatttcgggcttgcgagggaggcagggcagaaacaggagaagagtgaatgcagggggactccgatgtttatgtcgccggagcaagcgaccggcggcgagtgcgaatcgccggccgatatatgggctttgggatgtacaattgtgggagatggtgaccggggaaaccgcgtg

SEQ ID NO: 260186 - DNA, 464 bp, Glycine max
gtccggaattcccgggtgcgaccgcacgcgtccgctgacgcgtgggcgaaaagtggaatatgaattgggctttggaggaggagtggatgagaaagatgatgtgattgtagggggaggagggcacccctggtgccaagccgctcttgcctctgcacgtttgggagcaaggactcttcttcttactctcaacattgaccgaattgcgtggcagccttgcaatccagctgttggtgggcccgcaaagtcccaacttgttcatgaagtggatgcacttggtggtcaaatacggaagattgctgatagatgttacttacagaagcgtgtactcaatgtctcaagaggtcctgcagttcgtgcattacgtgctcagaccgataaaagggactatgccattcaaatgaaaagtgtagtagaaagcactccaaacctttctattcgaaaggctatggtcacagatattttac

SEQ ID NO: 260187 - DNA, 388 bp, Glycine max
  unsure (1)..(388): unsure at all n locations
catcccaacccttggtgaatttctgagcagtgagcagcatgttgtcattgttccgtaacttgttcctcttgctatcactgttaattggtctatgcaattgcagggtgcaaaccctaaacactaacccaactcacttcaacccacaggtcccacccctccgaaccctctcgtcctcgaagcgcttcgaggggtcctcggagttcgtcaagctgaaataccacatggggccggtgctttcatctccgatcaatatctacctcatctggtacggcaagtggccccaatcccagaagctcctcatcaaggacttcctcaactcaatctccgaccaccgcgccgnccnctcccccttcgtctccgactggtggcgcaccgtctccctctacac

SEQ ID NO: 260188 - DNA, 319 bp, Glycine max
  unsure (1)..(319): unsure at all n locations
aattncaggntcgacccagacgtacgcttatctaccatcaaattatttaccattaactaaacactccttcttgataaaaaccaatgggcatagccaccttactggctgggaaccattatccacttcttcccaanccactcttacccatatcgtgaagcaacataaccattgacattctatcgaatttataacctctcacttccgacactctcataaagaaaacactcttatagtttacatcctatattaaaacttgctctagattatactaggattcttttcacaccacaccatcacttgcatttactcttttcataca

SEQ ID NO: 260189 - DNA, 380 bp, Glycine max
  unsure (1)..(380): unsure at all n locations
ccaccagactacaaacaaaatgaaccttgttattaatgatagggatgaactcattcaaacttaggatgaacagatacacaaaatacaattaanttccagggatcacttccaaaggatttttactgaccatgaaaagctcaaattgcaactggaatctcacaaaaatgagcttgagttgccgaaagttgaattgtaaaaacgcgaagcacataacgaaagtgaaaagaaaaagttggcagaggaaattgaggagaatgcatcgaaaaatagctctcttcagatggctgctttagagcaaatgaaagctgatgaaaatgttatgaaactggctgaagatcaaaagacgcaaaaagaacaactccatgctaaaatcattcaac

SEQ ID NO: 260190 - DNA, 408 bp, Glycine max
ctataacttgccactatactttctgccactttgtggctcttgatattttcaaacgagaaggggaccctaaagtgggtggattttcatttgcactatttctacacgagatgattgcatgctgccctcctttattacgcaaaacatgacaatgaagttcctacctgatatgctgcaacagaccatacacctttcacagctccagcctaccattactcctatagaattcgagaatttattcaagagtgctggactgaaaacacaaccaaaaggccaacatttatgcatacaataacaacgctggagtccatctacaacacaattagtcacaaaagacatttgaaggttaggccattgaaatgctttcaaaatctggaggccttatttgatagagatcattcaaatggaaat

SEQ ID NO: 260191 - DNA, 293 bp, Glycine max
gcgtacgcccacgcgttcgcaaacctcttctttcaggtccaattcactcgcttattcttttctttcagggacatgcagggagtaagttcgaataagttcaagactggcatggacttttttcaccgcgcgaaggcggtgcgcctccgcagccaccacgacaagtacctcctctcggaggacgacgaggattcggtgacgcatgaccgcaaaggctcctcgtaaagcgcgcggtggacggagaaatacgtggctgaatacgaaaacataattcgcctgaagagctgttacgggaa

SEQ ID NO: 260192 - DNA, 457 bp, Glycine max
cggaattaccgggtcgacccacagcgtccgctgcgaaggcaggatcaatcctaggattcctcggacccagtcctgccgtcagacctcggcggcgatgcacgaaccttgcttccacacgagcaacagcctcatatacaaaagcattggcgcgactgttcccagcacctgtccgccgacgaggacttctgcgatctcgatcagtcgcaattcctccgcctccaatgctgcgacaaaaactccaatcgcattctgcgcatcagatgcacgtactttcccgcatccgttgtgagtgcagagcggctgaagaggtatgtgttccacaaaatctgcagagagctgccagaggggccattctgtattgggcacatgcacagcaccgttcagaaagaggacaattcccctggcatcaccatcttgagctggatctatgaagaactttctgctgatttcaaggaca

SEQ ID NO: 260193 - DNA, 370 bp, Glycine max
ccgggtcgaccgacgcgtccgcccacgcgtccgcccacgcgtccgcattaacgggtggtgcctctcttccatctccccagcggtaacctctcggaagaaggccacattaggcccttctttcttcgcaaccgttagcactccttcttctccttcttcttcttcttcttcttccttcccttctctcattcaatacaggcctgtctttgctgcccctgcccctatcatcaccccaactgtgagagaggatatggcaaaggaatacgagcaagctattgaagaacttctgaatttgttgagggagatgagtgaactcaaagccacatcttcttagatagtggatcagataacagcttttttgggaacatcatca

SEQ ID NO: 260194 - DNA, 292 bp, Glycine max
gggggggaccgaagcgtacgcccactcgtccattccctaaccccttccccctaccacctccactccttcaaattccggcccgattaacaatccatcgtgtcacactaaattacactcctctacattacctacattataacctactcctacaccaacatcttaatcgtcaataccacttctgccttgctctacttctcgtacgatctcatcaagaaccctcccgtaatcatgaccataatcaaacattcatttatccccaacaacaaaacataactcggccggcagctcttct

SEQ ID NO: 260195 - DNA, 210 bp, Glycine max
aggcttatgtggatacctatgcaccgatagactatgaatgtcttaataagcgacgaagggcttctgtgggggggatatttatcttagatcctttgtttccctatattagtcaaccaatcaaactgctgcttaatccacgggcaggcaatgagacaaccttgggaactgtaacatcttagaagccagaggaaatgaaagctaaatcttttc

SEQ ID NO: 260196 - DNA, 457 bp, Glycine max
cccgggtcgacccacgcgtccggcacattcttcatcacttcattcaacatttctctctcccttagctagtttttaccaatggctgctgcggttagtgctgcagtctcttttccatccaccaagtctacctctctcccaagcaggacctccatcattaccccagagagagttgtattcaagaaggcttcattgcaatacagagatgtttgtagcagtggaagggtagtttccatcagagctcaagtcaccactgaggctccagccaaggttgaaaaagagtccaagaaacaggatgaaggtgtggttgtgaacaagttcaaacccaagaccccttacagtggtagatgcctgctcaacacaaagatcactggggatgaagctccaagagaaacttggcacatggtcttcagcaccgagggagagaatccttacagagaaagacaatcaattgggggaa

SEQ ID NO: 260197 - DNA, 447 bp, Glycine max
cggaattaccggttcgacccacgcgtccctgcacgcgtggggttagagccataagagtgatcaactcatctcaagacatgtttgttgacgagtggggtgtacacaacaacatcactgctgttaaccaatttgaattgcactcaggatggacactatctatgttgcactcttttaatgaatctgaaagaatgcacctattattctttctgtgagtagaggcacttatggcattgtttagtgatattcttaagaatcctgtcgtcacagagattgcatagagattgtggaagacaccatcacaagctgcccttatatggggcttgcattcacgtcatattgtgctttctatgagcactattgagcccataatcaagggaatatttgatatctctgacttgcctagaaggaaaacattaatgatgtgtaccttgtttctgagttaatgga

SEQ ID NO: 260198 - DNA, 428 bp, Glycine max
ggaattcccgggtcgacccacgcgtccgcggagtcactgcagagctgcgcgttgatctataaaaatggcgaggataaaggtgtacgaggggaggaataaaacaaaggcggagctactgaaccagctcaaggatctcaaggcggagctagccctgctccgcgtcgccaaggttaccggcggcgccccaaacaagctctccaaaattaaggtggcgaggctatcgatagcgcacgttttgacggttatttcccaaaagcagaaagcggcgctgagagaggcttacaagaagaagaagtatttgccccttgacctccgtcccaagaagacccgcgccattcgcagacgccttaccaaacaccaggtgtctttgaagacggaacgtgagaagaaaaaggagctgtactttccactaagaaagtatgcgatca

SEQ ID NO: 260199 - DNA, 409 bp, Glycine max
  unsure (1)..(409): unsure at all n locations
ggaannnccgggnggaccgacgcgtccggtgaagttggaacgcattgtgctagatcaattggatcatccaggcattgtccggttatatgtcacatttcaagactgagtttctctatacatggctcttgaatcctgtgaaggtggagaactttttgatcaaataaccaggaaaggtcgtctatcagaggatgaggcacgattctatgcagctgaagttgttgatgctctcgaatacatacataatttgggagtcatacatcgtgatattaagccagagaacttattacttacagctgaaggacatattaaaatatccgattttgggagtgtgaaacctatgcaggatagccaaataactgtccttccaaatgcagcatcagatgacaaagcctgcacttttgtgggaaca

SEQ ID NO: 260200 - DNA, 420 bp, Glycine max
  unsure (1)..(420): unsure at all n locations
gaattcccggnccgaccgacgcgtacggtgaggtttgaacgcattgtgctagatcaattggatcatccaggcattgtgcggttataggtcacatttcaagactcattttctctatacatggctcttgaatcctgtgaaggtggagaactttttgatcaaataaccacgaaaggtcgtctatcacaggatgaggcacgattctatgcaactgaagttgttgatgctctcgaatacatacataatttgggagtcatacatcgtgatattaagccagagaacttattacttacagctgaacgacatattaaaatatccgattttgggagtgtgaagcctatgcaggatagccaaataactgtccttccaaatgcagcatcatatgacaaagcctgcacttttgtgggaacagctgcttatgtt

SEQ ID NO: 260201 - DNA, 413 bp, Glycine max
acccgggtcgaccgacgcgtccgcccacgcgtccgcccacgcgtccggatgtttgcgaagaatgaaatgaggattctgatggtaggtgtctatgctggtggttagacaaccatcttgtacaagctcaagcttggagaaatcgtcaccactatccccaccatcagatttaatgttgagactgtggagtacaagaacatcagcttcactgagtaggatgttggtggtcaggacaagatccgtccactgtggaggcattatttccagaacactcagggtctcatttttgtggttgatatcaatgatagagatcgagtgggttaggcaagggatgagctgctcacaaaggttgaatgaggataaactttagagatgctgttttgcttgtttttgccaacaagcaagatctttctaat

SEQ ID NO: 260202 - DNA, 461 bp, Glycine max
aattaccggtcgagcgggcgtccgttagatcattctattgagttcagcaggtctcgattttctgagattggggaatcctgcatgggggatgatgatggcaagatgagacccttggttctgaaaaacaagcctccaagatggcatgaacagttacaatgttggtgccttaatttccgtggacgagtaacagttgcgtctgttaaaaactttcagttgattgctgccaccgagccagctgctggtgcacctacaccatctcaaccagctccaccggagcacgataagatcattcttcagtttggcaaagttgggaatgacatgttcaccatggattatcggtaccctttatctgcattccaagcttttgcaatatgcttgagcagctttgacaccaaattggcttgtgaataagatgaatcatgaatcagaatggttataagttagctaatgaaacaatgatg

SEQ ID NO: 260203 - DNA, 321 bp, Glycine max
tcatgttatcatgcctgtcattcctcaaaagtacctggatgagaggaccatcttccacgttagcccttctggccgttttgtcattggtggccctcatggtgatgctgaactcactggaagaaagatcatcattgatacctatggtgggtggggtgctcatggtggaggtgcctttttaatgttttaccctaccaatgttgacagaaatggtgcctatatcgtgaggcatgctgcaaagagtgatttagcaaattgccttgccagaatgtgcattgttcaagtgttctatgccattggtttccctgagcccttatcagtgtt

SEQ ID NO: 260204 - DNA, 473 bp, Glycine max
ccggtcctgaattcccgggtcgaccgacgcgtacggcaggtgtcccatttttctcaatctcaggttctgagtttgtagagatgtttgttggggttgtggcttctggagtccgggatttattcaggaaggccaaagagaatgccccatgcattgtttttgttgatgaaattgatgctgttggaaggcaaagaggtactgtaattggtggagggaatgatgaaagagaacagaccctcaatcaacttttgacagaaatggatggatttgagggtaataccggtatcattgtcattgcagctactaacagggttgacattcttgattctgcattgttaaggccgggacgatttgataggcaagtcacggttgatgttccagatatacgaggaaggactgaaattttaaaggttcatggtagcaataaaaagtttgaagctgatgtttcacttgaagtaattgctatgagaacacct

SEQ ID NO: 260205 - DNA, 464 bp, Glycine max
aattcccgggtcggccgacgcgtacggcaggtgtcccatttttctcaatctcaggttctgagtttgtagagatgtttgttggtgttggtgcttctcaagtccgggatttattcacgaaggccaaatagaatgccccatgcattgtttttgttgatgaaattgatgctgttgtaaggcaaagaggtactggaatttgtggagggaatgatgaaagagaacagaccctcaatcaacttttgacagaaatggatggatttgagggtaataccggtatcattgtcattgcatctactaacagggttgacattcttgattctgcattgttaatgccgggacgatttgataggcaagtcacggttgatgttccagatatactaggaaggactgaaattctaaaggttcatggttatcaataaaaagtttgaagctgatgtttcacttgatgtaattgctatgagaacacc

SEQ ID NO: 260206 - DNA, 475 bp, Glycine max
tactcggtcttgaattcccgggtcggccgacgcgtacgcttagaaacaatggaattgatatgccattgttcgagctttcttctatccccgtagaatccggacactacgtgttcgcggtctctaaagtacgctctcgttgttctcaaccaaagcctaccgagatttactcctctgctctgggaccacgctcaaatacaactttacgcttattgatgtaccaatatggtgtatgatgaaatgcctcttttcttccctcatcaacaacctatccatgttcgcaccatttacaagcctgatgtaattaaaggatacatggattcaatcaagacagaattactctacttctatgcaaatctgggaactaatataattgatgagtctcattatcaggacaccacatatttacacaaatgtctggcatacatacgtgaccttaccccaaatgtttatggatcagaactatgcattcttgttg

SEQ ID NO: 260207 - DNA, 348 bp, Glycine max
caaggaaggtcctcactgttattacatctttctttcctctgtgcaggagatataaagacgtgctaaaaaacaacaaagtcttttcttccaatgcaaaatcaccttgatgtaccaaaccaacctaactggtatgttttgtgtcttcatattttcaccttctgatactgatttgggtctaagctcctaatgatttaatatccaatgcatctggtattctatcttgactcatataccctttttcttaatgctatatttctactttctttatctcccccattttccaatcactcataccgttatcactattttatattatattgacttccattataatgcttaaaattaaaa

SEQ ID NO: 260208 - DNA, 413 bp, Glycine max
attcccgtggcgaccgactcgtacgtcagtgctaatagaaagaaatagattaagctcttatggaactcatactgaatcacgtgatgactcatagcgagtgagggtgttcctacctgatatctgatggtatcttccttttacgcctcacctatgatcgcaagtcttttctgaagaaccatccccattattttatttcgaatcctgatactctgcccgatttaacctttaactttaatttttgtcattacactattccctttaagactgtcacttattcgtatgttttctacttccctcttactctacactttatttaatactacccattcatatcttcaaattataaattcccacatcgtttctttccaccctaatttttatccttcttttactttttgctatcctatacttaa

SEQ ID NO: 260209 - DNA, 456 bp, Glycine max
taccggtcttgaattcccggggcgaccgcacgcgtacgttctggttctttaaagaagaaacctttctctttgcgcgtgtcccgttctcttctcgaatcgtcctccatccccactgggtgatctgatcctaaaccttatagccatgactaccatggagattaagctatggaatgacaagcgcgaaagagaaatgtatgacaactttggggagctttatgccattatcaaagccactgagaggcttgagaaggcctatgttagagatataatttcaccgcaggaatatgagttggagtgccagaagctcatagctcatttcaaaaccttagcttccacccttaaagacactgtgcctagcattgagcgatttgcagatacttacaagatggagtgccctgcagcgattaaccgtctcgtggtttctggtgtgcctgccaccgtggagcatcgtgcaac

SEQ ID NO: 260210 - DNA, 459 bp, Glycine max
aattcccggtgggccgacgcgtccgttctggttctttaaagaataaacctttctctttgcgcgtgtcccgttctcttctccggtcggcctccatgcccactgtgtgatctgatcctaaaccttatagccatgactaccatggagattaagctatggaatgacaagcgcgaaagagaaatgtatgacaactttggggagctttatgccattatcaaagccactgagaggcttgagaaggcctatgttagagatataatttcaccgcaggaatatgagttggagtgccagaagctcatagctcatttcaaaaccttagcttccacccttaaagacactgtgcctagcattgagcgatttgcagatacttacaagatggagtgccctgcagcgattaaccgtctcgtggtttctggtgtgcctgccaccgtggagcatcgtgcaactgcggctgcctttgct

SEQ ID NO: 260211 - DNA, 409 bp, Glycine max
gacccactcttacattacaattcaacaccttaccactatctctactcataatcactcttaaaaataatactcacagaacttatataaataacggaacaacataacacttctcactcttataatttcttatcacaatcacttcaacataactcttcaaaatatcataaatatatttacttactttccaaacactgataaaagaaataaaaaagcccacacattcaacaattatatattaatcaacaaaatatttctacgattaaactctatcatcattgctcttacaaaccccaaatcatatactatcatcaacttataattactaaataacttctataaattatccttttcattatatcttgaattcttcataaaccaatatatatacaattcttccttcataatatat

SEQ ID NO: 260212 - DNA, 243 bp, Glycine max
cggcttgaattcccgggtcgaccgacgcgtacggaggagttcaacaccgaaccactatctgtactcatgatgagtgttaataataatactcaagtactgataaattgtgggaacaacacaaagcttctgtgtcatgtaagggcttttgacaggcactgtaacatggttcttgaaaatgtcaggtagatgtggactgacgtgccaaacactgttataggaaagaaaaaggcccagccattcaac

SEQ ID NO: 260213 - DNA, 414 bp, Glycine max
tccggaattcccgggccgacccacgcgtccggctgcgagaagacgacagaagggtatatatattattaaactatgcataattcggaccatcgagctgacctataaaatcatgactactacttcaaaataatcatatttcatgttacaattttataatatttattatggtatgttggatgaggtatattaatgtgtgctttaatgttatatgcttataataaatataactaatttatactatcaactattatatcaaatatttaacataatagtttataatataatgttagcataatactatcgtaattttattataaatttcataatccaatatttataatgtatacgttatctgttacataaattaagattccaatacatattagctggtaaccgatcatgatgatatgcata

SEQ ID NO: 260214 - DNA, 492 bp, Glycine max
  unsure (1)..(492): unsure at all n locations
taccggtccggaattacccggtcgaccgcacgcgtccgcccacgcgtccgatcaattcaaagttcaaacgataggagaagaatggaggggcgactaacgcaaactgcgtcatatcgactcgttgttcatcgattggattgaagggagagagagatctggtagcggtagcattatatggataagggtaagatcgaanaggtgatctagaagcaagtgctgacggtagcgcaagccgtggaggacaagatcgacgactagatcgccgacctggagcgtctggacgccgatgacgtataggtccttggggagcgccgcctccagcagatgaagaagatggcggagaagcgctcccgctggatctccctcggccactccgaatattccgagattccctccgagaaagacttcttccccgtcgtcaaggccagcgaacgcgtcgtctagcacttctaccgcgaaaactggccttgcaaggttatggacaaacactta

SEQ ID NO: 260215 - DNA, 409 bp, Glycine max
accggttcgacccacgcgtacggccgcgcctccactgatgggtccattgttctgagatctcttgtataggaatataaggttgtgctcaaacacgtggataattatgacggggacaggatttcctgggcttcgttcgcctattactagtatttaatttacttatgattattaatagattattgatactactaattcctactttgtgttatattagtaccttgtttactgataaagattctatgactaatacctgatttagtggtacaatgttaacattatatatgttattattatttaaatttgactcctttttattcccatttttctttctccaacaataaattttcaccgttgccatttatttcatgctcactgaaaattgtaaacaagaacgccaccttgtttcaac

SEQ ID NO: 260216 - DNA, 500 bp, Glycine max
  unsure (1)..(500): unsure at all n locations
accggtccggaattacccgttcgaccgacgcgtccgcaactacaagaaagaacttccttataaccaaaaccaacaacagactatggcgagttatcagaggcactacnatgatgaggggcgcaaggtctacgagtatggcaatgttgagaggcaaactgacttatatatctactatgaatcatgcaactagtatcacttatgtagcctccaaaagatttggtggctacaatgatgacgctaataagcaacatgatattactggtgtctatcccgagaaagacaccggttatcatgattatgatcaaggatacgacggtgacactaacaagcaacatgatgctactggtgtttatcccggaatagacattgctagagatcatgggactaccggtgtttatggcctaaacaccgacagacatcatggaacttctggagtgaatcccgttatagacacccataaccaacaacatgttactaccgttggttatgctgatgacact

SEQ ID NO: 260217 - DNA, 442 bp, Glycine max
accggtccggaattcccgggtcgaccgacgcgaacgcaaagaggttataatttcattctttattctgatggaacagggcaaagctacaagacaggagcttgatcaatggggtgaggaactaatcaaagaagagtttgatgaagaatgtaattttgatgtggatgatgctgttgagaaattagagaaattaggaattgttactcgggtgagattccttaaactatccccattctaatcttcggtgattatatctatgtatataatactacctctctttaaaggaaaacttttttattattatttcaatttcttcttacaacaacaacgccttatcccactaggtggggtcggctacatggatcaacttccgccataatgttctatcaagtaccatacttctatccaaatcattaagttcgagatcctttttgataatctctct

SEQ ID NO: 260218 - DNA, 363 bp, Glycine max
  unsure (1)..(363): unsure at all n locations
tcccgggtcgaccgacgcgtccgcccgcgcgtccgcggactcgtggggtttctgtaaccatggcatccaccactctatcccctgcaccccttctgagctatgctcangaaaaagtgggattttcagttcctcacaggcacttcttgtgaagccagtagtagaagcanattgatggtggaagagcaattgaattgagaattgcatgccaagccaccagcatttccgctgatagaagccctgacatgggcaaaagacagctcatgaatcttcttcttcttggggccatttcacttcccactactgggatgcttattccctacacctacctctttggcccttcaaggtcaaggtcttcaacttgcc

SEQ ID NO: 260219 - DNA, 494 bp, Glycine max
accggtcctgaattcccgggtcgaccgactcatacgcccacgcgtccgcccacgcgtccgcccacgcgtccggtcgaagtccgggagggtgaccgaggcgaggaagttgctgcgtgtgatggctgagaaaggctattttcctgatgaggtgacctatactatactgatgaatgatatgtgtatgattgtgtacactctatgggccctggccttgttggtggagatggaggccaaggggtgtagtccgaatgcgtgcacgtataacacgctgctgcacgggttgtataatgcgaggcttttatataaggctgtcaagttctaccaggtgatcagggctggcggtctgaagcttgatacagcttcttatgggacttttgtcagggcgctgtgtagggacgggagaattgcagaggcgtatgaggtttttgattatgctgtttatagcaagagcttgacggatgttgctgcttactcgacattggagaacacgctta

SEQ ID NO: 260220 - DNA, 476 bp, Glycine max
tgcccgtaccggtccggaattcgccggctcgacgcacgcgtccgcttcacaaaactcagttgtccaattcaccaaactcacaatggttgatctaggttggcaaacaaagatggttcacgccaacatcatgcctccaatgtcccccaaactctctctcccggatcataacattccaatcccaactttgcaactcccccttcgccaaaacgacatcaccgcagcgtcgtctcctatctgcgctgcatacgacaactaccttcgtctccctgagctcagagccctctgggcctccaaggacttccccaattgggccaacgagcccatcttaaagcccgccttacacgccctcgaaatcaccttccgcttactcgcaaccgttttctccgacccgagaccgtacatcaacaaacgcgagtggacccgacgcgtcgagtctctcgccacggcccaaatccagatcatagccatgttatgcg

SEQ ID NO: 260221 - DNA, 106 bp, Glycine max
atccaattttacttacgctttcattctacgtcatatctgttctatagtgggacctatattcaggtgactggccgtcaatttacaacgtcttgactggtaaaacctt

SEQ ID NO: 260222 - DNA, 461 bp, Glycine max
caatataaaggataaaaaatgatgtgaatccgactgtccaaagtcatgatcttctgttggccttcccgttactgctagtcactttccaactttgttccactgaaaaacacacttacaaatatattgctaactttatctctctcactcactcacctttctgctaagatttggatcttaaaagtttgagagggtactgccatccaattaatgggttctaaaactaatgcatcgggctatagagcacgaataccactgtcaatattaactatgcttggtctgtgctgtttcttttatcttttgggagcatggcaaagaagtggatctgggaaggcagataaacttgcattgaaagttaataacctgatgacaggctgcactgttttacccaatttgaagtttgaatcccatcacagtgatgtagaaattgtcagacctgatgtgctaaaagctaaagcattcaa

SEQ ID NO: 260223 - DNA, 451 bp, Glycine max
taccggtccggaattgccgggtcgacgcacgcgtccggacttttccgattcctggaagaagagaagagaaaacctaaatcacagatcgatggcggaggaacaccgatgtgaacctcccgaaggtcaccgactctgcgtcaacaactgcggcttcttcggtagcaccgccacgatgaacctctgctccaaatgctacagcgcgatccgtttgaaggagcaagaagaagcgtcgacgaaatccacaatcgaaaccgcgctctcttctgcctcctcggcgaaaccgtcgtcgtccacgtcacctccgccgtcggcggtcgatgtgctcatggaatctccaccgccgtctgcggcggaggttgaagttgctgtcacggtcacggtcgcggtggcgtcgagttctatttccataaactcaggttcggttgcgcaaccgaaccggtgtgccacgtgt

SEQ ID NO: 260224 - DNA, 398 bp, Glycine max
cagtatgatgaaaatgaaggtccttgttttcttggttgctacaattgtggtagcgtggcaatgccgtgcttacgatatggtcggtctccgaatgaacactggctatggtgcccgtactccttaagttaatgtctcatgttgattgctttgttaggaaacacactaacatatttggctttgagaccattcctgaagagtgcgttgaagcaacaaaagaatacatccatggcgaacaatatagatcagactttataacagttaaccatcaagcttacttttatgccagagacctcgaaatccatcccaaagacacatttgtgttcaatatagatggcaccgtactctctaatattccatactacaaaaaacatggatatggggtggagaaaattaactcg

SEQ ID NO: 260225 - DNA, 501 bp, Glycine max
  unsure (1)..(501): unsure at all n locations
gtccggaattcccgggtcgaccgacgcgtccgtagaaacagtgtgatgaaaatgaaggtccttgttttcttcgttgctacaattttggtagcagggcaatgccatgcgtacgatatgttccctctccgaatgaacactggctatggtgcccgtactccggaggtgaaatgcgcaagttggaggcttgctgtggaagcacacaacatctttggctttgagaccattcctgaagagtgcgttgaagcaacaaaggaatacatccatggcgaacaatatagatcagactccaaaacagttaaccaacaagcttacttttatgccagagacctcgaagtccatcccaaggacacatttgtgttcagtatagatggcaccgtactctctaatattccatactacaaaaaacatggatatggngtggagaaatttaactcgaccttgtatgatgaatgggttaacaagggcaatgcaccggcactggccgagactctaaagaaatac

SEQ ID NO: 260226 - DNA, 273 bp, Glycine max
ttcccggctcgaccgacgcgtccgtagaaacatacttacacacatgcctccggtcaacctattcggtactacaattgtactagcggtccaattccgtgcgtacgatatggtcgctctccgaatgaacacttgctatagtgcccatactccgtagtttattttctcaataattatgatttctttttaatcacacatcatattttactattataccattccttaaaaatgccttgaaacaacaaaagaatacatccatggctaacaatatagatc

SEQ ID NO: 260227 - DNA, 309 bp, Glycine max
accggtctcgaatgtcccgttcgaccgacccgtgcgatcacacttactgtccttcttctcttcgacgctacaatcttgataacagtggaatgccaggcgtacgatatgttccctgtcctaatgaacactggctatggcgcccgtactcctgaggttaaatgctcaattttgaagctttctatagaaactcacatcatcttttgctttaagaccattccttaaaagtgctttgaaacatcataagaatacatccatggcgaacaatatagatcagacttccattcagttaaccatcttgcttacttttat

SEQ ID NO: 260228 - DNA, 237 bp, Glycine max
tttatctagtttctatcaattaataattctatactccataaacttttgtcattcatcctttggatcttaataactttttttattattattttttattttatttttattaaggtttcaagattaccatctttgttatcagcatatcattttattcatatacttatattacattccatagttcatcttatctagtcaaatgtgtcacagattttaaatctgctcttcatacaatttttt

SEQ ID NO: 260229 - DNA, 475 bp, Glycine max
  unsure (1)..(475): unsure at all n locations
accggtccggaatgcccgggtcgaccgcacgcgtccgaaaattcccccttaattttaggaaatagtaaccacagaaggttctgaatgtgttctaactgtatttttatatttgactctgcaggtagaggaggtttacaacttctctcaagatgacctgttgccggaggatatccttatacttgacacacatgtagaagtgtttatttggattggtcattctgtggacccaaaggaaaagcaaaatgcttttgatatcggccagaaatacatagatttggctgcatctctggaggaactatctccacatgtaccactatataaagtaacagaagggaatgaaccttgctttttcacaacatacttttcatgggatcatgcaaaagctatggttctggggaactcatttcagaaaaaagtgtcactactctntggatttggccatgctgtggaggaaaagtcgaatgggtcaagtcta

SEQ ID NO: 260230 - DNA, 434 bp, Glycine max
taccggtccggaagtcccggatcgacgcacgcgtccgttcttccatggcctccaagcggattctgaaggagcttaaggacctccagagggaccctccgacctcttgcagcggcgggcctgtagcggaagatatgtttcattggcaagcgactataatgggtccccctgatagcccttatgctgggggtgtgtatctagttactattcattttcctacggattatccattcaagccacccaaggttgcatttaggactaaagttttccacccaaatatcaacagcaatggttagatttgtcttgatatcttaaaggagcattggagccccgtcttgacaatatctaaggttttgctctccatttgctccctattgacggatccaaacccagatgatcccttggtgcctgaaattgctcatatgtacaagacagac

SEQ ID NO: 260231 - DNA, 420 bp, Glycine max
  unsure (1)..(420): unsure at all n locations
taccggtccggaattgccgggtcgacgcacgcgtccgaaatcttctctcaaaatatttgtgattccatgcccaacgccctaccctgagaatatggtggccgagagagaggttaacggtaacggcgtcggagagggaagaacaacgctaatattcacctacggaaccctgaagcgaggcttctccaaccacccccttctccaagacctcattcgctccggcgacgcctccttcgtcggaacctaccgcaccgncgccaaatatcctctggtctgtgggccctacaaggtccccttcctcctcaacattcccgggtcgggtcatggggtccatggggagctttactcggtctccacgcgcgggcttgagcgcatggacgaagctcaaggaacctcacgcgcccactacgagcgtcttccgat

SEQ ID NO: 260232 - DNA, 321 bp, Glycine max
taagtcaatctccgtgaacttcttatataaatagcgcggtatcttgacgagggggtaccattgatagacaatttcaccaacaagaaaggaatgaccaaccactgctataagattgcatataggtctatggaacgttcactcactgatgaggaaatcaacgatctgcagtggaaagtaagagaacaggtgcacagcaaattgaatgttgacttaagatgagctatctatgttgaaaatctacagcttagatgacatcaatcgacttgttctgaataaatacatgagtgctctagatattcacgcatgggaatatattcctct

SEQ ID NO: 260233 - DNA, 290 bp, Glycine max
ccggtcttgaattcccgggtcggcccacgcgtccgggatgagaagaccatctttcaccttaacccttttggccgttttgtcattggtgcccctcatggggattcttttctgactggaggaaatatcatcattgatacctattgtggttggtgtgctcatggtggaggtgccttttcagggaaggaccctaccaaggttgatagaattggtgcctatatcgtgaggcatgctgcatagagtgttttggcaaatggccttgccataatgtgcattgtccaaattttctattc

SEQ ID NO: 260234 - DNA, 465 bp, Glycine max
cccgggtcgacccacgcgtccggttgattttatatttaggttacaaggaaattttcatgaatccaattatttctgctgcttctggtattgctggtggggtggccgcaaggcttgcttctatttgacctcgagttggtcaaggcactgctgcaaggcaagctgtataatggattgcacgacaaccggaggcagagggaaaaatacgaggtactttattgctctaattggcttttatggaagctctaacaatttatggactgtgtgtagcattagcactcttatttgctaatccttttgtttaatcctaaaaaaatagaaatacatatcctttttttcgtggacttgctttaccggtcttgctttttcgaattctatttatattaatatttcactcctataattctttatccgttcggacaagaacacatgggtaggactaattgaaaggtgaagaattcacatact

SEQ ID NO: 260235 - DNA, 139 bp, Glycine max
gaaaaactgcccctgtctgtaaatttttgtgagatagaaggaatctgattccttcatcacttgtgtatgtttaagttatttatttagagccgctaaatgtactctttatcctcattaataaaccatgtttgtgtaatgg

SEQ ID NO: 260236 - DNA, 470 bp, Glycine max
  unsure (1)..(470): unsure at all n locations
cggnncgaccaacccttccgacccgccctcccgggaggaccacctttgcaaggcggccaaaaaaggtgacacggaaaaagggaggtctttcatgaactccggcgctgacgtgagccacttcaacggcaaggccctaaatcctctgatgcacgccgcaaagcacggccatgcacccgtnctcaccctcctnctctccgacggcgctccctggaacgctctttccccctccaacctctccgtccgcgactacgccatgcaagaaggccacaacgaagccttcgagcttctcgtcaacgccgggattcaagccgaactgatcctgggaacaattgcgaggaaggaaaacaagaacggcgattccggtcacgattacttggaagacagggtgagttttagcgaagacaagcttatggactctgaaagcaaagctgtgatgatggcgtgggagaatccgttgatggaggctcatg

SEQ ID NO: 260237 - DNA, 472 bp, Glycine max
  unsure (1)..(472): unsure at all n locations
ggtcgacccacgcgtncgcgcatgtgtgatcacccaaagcatcttctttattcccaccgctcttctctacgctttctcacgaaatttaaaaggccatacggagcgaattctctgctgctgtttcctaaagccacggcagctcccggggccaagaagacagaatagccgcacgagagagtccagcgagtccacagcgtggaggagttcgagtcggcgctcgaatccgccaaagacaggcttgtggtggtggaatacgctgccagcgacagcgaggagagcagccagatataccctctcatggcggagctgagccgcagctgcaacgacgtggagttcatcctggtgatgggcgacgagtcggagaagacgaaggagctcctgaagcgggagaaggtggagaatgtgcctcacttcagcttctacaagagcaaggagatgatacacgaggaggaagggattggtcccgacatgc

SEQ ID NO: 260238 - DNA, 436 bp, Glycine max
  unsure (1)..(436): unsure at all n locations
atattcatgaaactcgatagtggatcctactcagcgcttctntaccgtttgggactgtgcctaggtatcaagcacttnaaaaagttaatgggatcgctgaggatcttaactgggaggttttcagggacaccctgattgaacaagctgagcagggtgtatattacttcaccatccatgcaggagttcttctgagatatgttccattaacggcaaggcgcatgacaggaatagtatccaggggagggtctattcatgcaaagtggtgcttagcttaccacaaagagaattttgcttatgagcactgggatgagatacttgacatctgcaaccagtatgatgtggctctatccattggtgatgggctaagacctggatccatctatgatgcaaatgacacagcacaatttggttagctcttgacacaaggagaacttga

SEQ ID NO: 260239 - DNA, 258 bp, Glycine max
cagggtgtatattactcaccatccattcacgacttcttctgatatatgttccattatccgctaggcgcatcacaggaatagtattcacgatatgctctattcatgcaaagtggagcttaacttaccacaaaaagaattttgctcatgagcactgcgatgagatacttgacatctgcaaccagtatgatgtggctctatccattaatgatgggctatgacctggatcatctctgatgcaaattacacaacacaatttgc

SEQ ID NO: 260240 - DNA, 493 bp, Glycine max
aatccccgggtcgacccacgcgtccggaagtcgctgagcaagctcgccatgactacgcttcgcagattcatccctcacatctcaccattgatccctccctggagcttcctcaaatgacacctgtcgtcctaaagttgtgcaaggatatgttcaaggcgtggtcgaatttggatgattcttgctttgttgttgagaaaatttccgggggcataacaaatttgttactcaaggtttcagttaaacaagaaaactgcattgaggaaactataactgtcagattgtatggacccaacactgagtacattattgatcggcagagggaattgcaggctaccaaatacatcacagctgcaggatttggtgctaagtggctttggcatattggggaatggcatggtgcaatcttttataaatcacacactctatctcctcagatatgcgagagccaaagctggctgctaaaatagctaagcaacttcaaagatttcatcat

SEQ ID NO: 260241 - DNA, 418 bp, Glycine max
  unsure (1)..(418): unsure at all n locations
gagattatataattgtgttttggaaaaatnnaaagtgcatataaagacccgtggtgccaattntttttacctcctggttttcggttttaccccacctacgaggagcttctctttcagtatctgtgccgcaaggtcactggccaccatttatctcttccaatcattgccgaaattgacttgtacaagttcgacccatgggttcttccaagtaaagcgattttcggtgaaaaagagtggtactttttcagccccatagacaggaaataccctaacggttctcgacccaacagagtagctgggtcggtttattggaaagccaccggaaccgacaagatcatcaccaccgaatgtaaaaaagttgtcatataaaaagccctcgttttctacgttggcaaagcccccaagggcaccaaaacca

SEQ ID NO: 260242 - DNA, 367 bp, Glycine max
  unsure (1)..(367): unsure at all n locations
accggtccggaattcccggttcgacccacacatctntaaacggaaattcaaagtgttttggcctacattgaactaccacaacccacgcgactcccgagtgtacgacccacgctagcttcgaaagttttccttattcccagccctaatcccctgagttcggtagcacaccttctcttactctacgtcaccatcctcaccgtcatcggctacaaccaccagacagccaccaccgccgagccctgcaacgacgtcggcgtacatcgcataggttggacctttggaagcatgatttttgaactcttctattgcaccgccggcatatcacggggacacataaacccggcggtgacgttcgggttgcttttgg

SEQ ID NO: 260243 - DNA, 463 bp, Glycine max
  unsure (1)..(463): unsure at all n locations
ccgggtcgacccacgcgtnacgccacgcgtncgcccacgcgtnctgccacgcgtncgttctttcttcaacgtttccatcatacgcagatcccaatgctctgtgaagccctaatttcccctcatttccatggccacagaagagcccactgtcgcggtggaacccgctcccgaacctgcctccgccgatcctcccccggaggagaaggaggagaccaaacctgaagccaaggctaagaaaaccaaggagcccaaacctaaaaaggtttccagacctcgcaaccctcccactcatccttcctacgaagagatggttaaagatgcaattacctcgctgaaggagaaaaccggttcgagccaatacgcgattgcgaagttcatcgaggagaagcacaagcagcttccaccgaacttcaagaagcttcttctctaccatttgaagaagctcgtcgccgccggaaaactc

SEQ ID NO: 260244 - DNA, 360 bp, Glycine max
gaattcccgagtcgacccacgcgtccgctcacccggattacaaggatgtcggtattgctcggtttacaactaaatattttaacgtcagaggctgcgtgcctaatgtgaagggtgatatgcttttgtcagcatggaatccttcatctgaatggggaaaaaaagtgatgcttggagtggatgcacgacagggagctccaaaggatggaaattctccccttgaactttttgaggtagagattgatcctcttaagattcattgaacagaaatgatgcacagaatgatgtgggaatatttcttcccagaagaagaacaagattcccaacgtcgtcaggaggttcggaaggtttcaaccactgctg

SEQ ID NO: 260245 - DNA, 425 bp, Glycine max
  unsure (1)..(425): unsure at all n locations
gcgtccggnttcaccgcacgaatatcttgttgtttggagcgatccgagaaaaactctgtaaacatgttgggttacgaggaccttcttacaggtgatgagcttctctctgactccttccgttacaaggaaattgagaatggaatgctgtgggaagttgaggggaagtgggttgttaaaggagcagttgatgtagacattggtgcaaacccttctgctgagggtggaggagaagatgagggagttgatgatgcagctgttaaggttgttgacattgttgacacattcagacttcaggagcaacccgcattcgataagaagcagtttgttaccttcatgaagaggtttatcaagaatttgactcccaagctcgatgcagagcaacaggagttgtttaagaagcacatcgagggagcaactaaatacct

SEQ ID NO: 260246 - DNA, 386 bp, Glycine max
  unsure (1)..(386): unsure at all n locations
atttataactatttccctctcttaacacacttaacaaagatatatcatatcatctgcgctccaaatgatggggggtatctcnttgattcttcttgtgatggtggctacttttgtggtggcagccacacctggtagcttttaccaagactttcaaataacatggcgtggtgagcgtgccaaaatctatgaaaatggaaatcttctcaccctctccctaaacagagcctctggctctgtctttcgttccaaaaaagaatacttcttcggaaaaattgacatgcaactcaagctcttgcctggtaactctgctggaacagtcactgcctattatttatcttctctggcgcctactcatcacaaaatagacttcaagttttttgctaact

SEQ ID NO: 260247 - DNA, 330 bp, Glycine max
  unsure (1)..(330): unsure at all n locations
ttaataatnncatcaacaatcaatgatgatcnacgtcaaaatctatatgcacaacacgacacacaggtttgcagaagagcctttgtggtcatcctcttttctttggtataacaatgggactgctttctgagatcataaattctaggctcttcacatctgtcagagattctctggggttaacatatgacgtgtcatttgaattaaacttgtttgataggcttaaactaggatggtatgtgatctctgtgacatcaactccaagcaaggtccacaaagctgttgatgcatgcaagaatgttcttagaggcctgcataccaataaaattactg

SEQ ID NO: 260248 - DNA, 471 bp, Glycine max
  unsure (1)..(471): unsure at all n locations
ggcccggaanacccgggccgacccacgcgtccggccacgcgtacgaccacgcgtccgattatatattcggaccagcgccaaaccgttgnggttttaccattgggggagtagacttgttcgggtgaattaataatgcatcaacaatcaatgatgatcagtcaaaatctaatgcacaacagacacaaggtttgcagaagagcctttgtggtcatcctcttttctttggtataacaatgggactgctttctgagatcataaattctaggctcttcacatctgtcagagattctctggggttaacatatgacgtgtcatttgaattaaacttgtttgataggcttaaactaggatggtatgtgatctctgtgacatcaactccaagcaaggtccacaaagctgttgatgcatgcaagaatgttcttagaggcctgcataacaataaaattactgagagggaattggacagggcta

SEQ ID NO: 260249 - DNA, 336 bp, Glycine max
  unsure (1)..(336): unsure at all n locations
ttatttttcgattttatttcaaccttcaccacctataaacttttgccctataacaccttttgttttgttacttttttaaccaccattttttcattgaataaagtttccttaaaccaaaagttattaaatcctccaaaaancnngacagngattttcaaaatcccatatctttcacagtttttgaactccttatatgatttccaatacaagtcttttttctcagcatttgcttgcctgaccgaacaaattaagtttgaccgctatcttcatccacacttccgttattacatgagggaggtcacaacacttttttattcccaattttttgaatcttac

SEQ ID NO: 260250 - DNA, 304 bp, Glycine max
ccgggtcgacccacgcgtccgcccacacatcctaaccctcaaccacaccgttttgatcattatcaacatataactaacgagttttatttttgctttcatcccaagccgtggcgcctataatcctccataactcaaaaaccaacacaaattcttaccaaacactcatttctttcgattatgctcccctacaattttacttttccccaaattttgacatgggtgtatacaataaaactcctaaatttctaaagatctatcctattgactaggttcctttattgcaaacacatgattctccaatatt

SEQ ID NO: 260251 - DNA, 406 bp, Glycine max
accggaccggaatacccgggtcggcccacgcgtccgatcaagaatgctgacaagttatttttggattttatttcaaccttcaccacctatgaactttggccctatgacaccttggtgtttggtactgttttgaccaacattatatcattggatagagtttccctaacgcaaaaggtcgtacatgctccacagatctcgacagagattggcaaaatcccatatctttcatagtttttgaactccttatatgattgccaatacaagtcttttttctcagcatttgctggcctgacggatcaaattaagttgaaccgctatctgcatccacactttcgttattacatgagggaggtcagaactagtgtttattcccaattgttggaatcttacaacagtgtgacaattg

SEQ ID NO: 260252 - DNA, 314 bp, Glycine max
  unsure (1)..(314): unsure at all n locations
taagcatctgctaccctaacctcnncttcctctctcctcatttcanatataaccggcgaacctnnnnntnttccanatcccacccanatcnatttcaagctctttaaccgctggaacttcgaagatatttaagttactgacatttcacttgctgattacattggagtttcggcatccaaacacgccacatatgttcctcacaccgccggaaattactcctttaagcttttcatgaaagcgcaatgccccattgtttaaaagctcaccaactctctcattatgcacggtagaaacaattgcaagaaactcttttc

SEQ ID NO: 260253 - DNA, 407 bp, Glycine max
  unsure (1)..(407): unsure at all n locations
attccctgctctacccacacgtccgactataactccatcttatncactcaattttatcatccaattccctaactgcacatacccacctacacgtgatttttataaagtgagtcctctttttctattactcctattaatttttatctctatatcattcataactatcttaattaccacactctaacttatccttctcttttttaacccctcctctattaaaaacaacattaaataattacatcattatatacaacttcaataacttcatatatattaactcccatctaccatcaattctcatacttctatttttcatcttttttcatcttcattctttccaccttttcttctatttattacacaatatcctatatttttacccccattaattcccacttatcttaatt

SEQ ID NO: 260254 - DNA, 382 bp, Glycine max
tccggtccggaattcccgggtcgaccgacgcgtccgcgcacgcgtccggtcactgctctgtttcaccgagtttgggcgtttagatcagaaccaaatggtgttctcgtccattggcaaacatggcgactcaaatgagcaagaagagaaagtttgttgcggacggagtgttctttgccgaactgaacgaggttctgacacgtgaattggcggaggacggttactccggcgtcgaagttagggttacgccgatgcgcaccgagatcatcatcagagccaccagaacccaagccgttctaggtgagaagggaaggagaattagggaacttacctcagtggtgcagaaaaggttcaaattccccgaaaacagcgtcgagctttatgc

SEQ ID NO: 260255 - DNA, 258 bp, Glycine max
ccggtctcggaattcccggctcgacgcacgcgtccgaacggctagacaacaaaaggcggagcacattaaatcattattgactatcacgtgacagcggaagatatcttcgggagtgggaagcactggctcaatgaaattggccgctatgccacagataatgttaacaaacttttggttggaaacaagagtgatctgacagcaaatagagttgtctcatatgacacagctaaggaattcgcagatcaaattggcatacct

SEQ ID NO: 260256 - DNA, 472 bp, Glycine max
tcccgaattcccgggtcgaccgacgcgtccggccaaatcaatcaaattctttgagttgaacacaggggccaagattccttctcttgggttggggacttggcaagctgaacctggtgttgtagctgaagctctcaccacagccattcaggttggatacaggcatattgactgtgctagtgcgtataagaatcaagcagagattggttctgctcttaagaagctttttgatgatggtgtggtgaagcgtgaggacttatggatcacttccaaactctggtgttcagatcatgcaccagaagatgtgccaaaagcattggataaaacattacaggaattgcaacttgactatcttgacctctatctgatccactggccagtccgcatgaaaagtggaacatttggactcaataaagaatatcttgagcaaccagacattcccaatacatggagagcaatggaagcactctatgac

SEQ ID NO: 260257 - DNA, 426 bp, Glycine max
gacccactcggacgatttttatctctcccttagtcaaatgtattcatcagacttcttcccatgatatcttataaaagctaaatgcataacatttactgcggggaggctagatatcccaatgttactactatgacagtccttctacttatgatcccattcacagcattctctggcgtaaaattatctctatcacatattgatatcttgaacatcaaccaactaaactatctatgaacctctccaaaattgttttgtaaatcattacctgttcaagaacctattcttaagcacttatatttaaaagcatgtctttgaaactttccttataaccatctctttctacaccccaatcaaaactcattatctttaatctaatttaacaacatttttttcttattgaaaaaatacaactcccatcatttctta

SEQ ID NO: 260258 - DNA, 308 bp, Glycine max
cggtcccgaattcccgggtcgaccgcacgcgtgcggaagaatcttgcaagaaaccaagggaagaaatcatcaaagcaaaaatttcaagagtttatgtcaggactggagcgtcggatacgagccttattgttaaagatggataccaatggaggaaatatgggcaaaaggtgaccagagataacccttgtcctagagcatatttcaagtgctcttttgctcctagctgccctgtcaaaaagaatgtgcatagaagtgtggatgatcaatctgttctggttgctacttatgaaggggagcacaatcatcct

SEQ ID NO: 260259 - DNA, 468 bp, Glycine max
gaattcccgggtcgaccgacgcgtgcggagaacatttgggggcccgattgtctcgagttcaggcccgaaagatggctgcgtgatggagtgttcgggccagcgtgtccttttgagtaccctgtttttcaggctggggtaagggtgtgtttggggaaggacttggctttgatggagatgaagtccgttgtgcttgcgttggttcggaggtttgatattcgggtcgttcaatcgggccaggagccccggttcgagcccggtttaaccgctactttgagaggcgggttgccggttcgggttcgggtttgtgaaaggaaatgaatagcaagtatgtggttgataaagtcataaagccataaaggagttcacaactagaatgaaatcatgaaatcaatgaggggatggaagaaccgttttcgtgtaaataataatgttgcagttgaattgaaagttttctttttccccctcttt

SEQ ID NO: 260260 - DNA, 452 bp, Glycine max
  unsure (1)..(452): unsure at all n locations
cccttttcgacccactcgtgctgccactcatcccntggacctgaagttccattccaccctgtaagatatgacaagcctgagccaccaccagagggtctctaaccgggggccactaaagattctgaccatttgagagatgtgtttggcaaatctatggggcttactgaccaagatatcgttgctctatctgggggtcacactattgtatctgcacacaacgatcattctggatttgaaggtccctggacctctaatcctcttattttcgacaactcatacttcacggaattgttgaatgttgagaaagaaggtctccttcaactaccttctgacaaggctcttttgtctgaccctgtattccgccctctccattataaatatgcatcggaccaatatgccttctttgctgaatacgctaacgctcaccaaaaactttccaaacttgtcttttc

SEQ ID NO: 260261 - DNA, 375 bp, Glycine max
attcccgggtcgacccacgcgtgcgctagaatgtgaatttcgatgctcagtcatctcttttaccattctcttctctcttgctcttgcaggagagggccatgtccatgcatggctacctgaggaagattattgggaagctgtttggccaaacactcccattcccactgcactgcgagagcttctaaagcctctccctgcaggtgttgaaatcgatgaactccctaagcaaattgatgatacacagtacccaaaaacattcttctataaagaagacctttatccaggcaaaacagtgaaagcacaattcaccaagcgtccatatgcacaaccttagggtgtatacacatggttaacggatattaaagacacctttaa

SEQ ID NO: 260262 - DNA, 349 bp, Glycine max
  unsure (1)..(349): unsure at all n locations
attcccggctcgacgcactcaaccgctttctcctaaaacatctcaatgggtgcttcttctattacaacatcgcccgcaaccattgccanttctgcaagggtgctcctgttcacggtctttgccgtttcctccgccctatacatgtcgataatctcgtacgacagctcccactcggacaaggccgccacgtttcgcaccgatgaggatctgatgtccatgtaccagcagttgctcgtgaagcacggtaaggtgtacaacgcgctcggctagaaggataagcgctttcagatcttcaatgacaacctgccattcatcgacgaccacaacttctcggatgaccgaacctaca

SEQ ID NO: 260263 - DNA, 239 bp, Glycine max
taattccctacccgaccgcactcatacacccactcttccttccattctcatcctcttttttctctttctaccattgccatgtatcccgtcaatcttctaccgtgcggctccttcaattctcccttcttaactacaaattctcatactcctatttttaacaacaactcctctttaacccttttacctataattccaattcttcttaataattatcatctttttcataatcttccaaattt

SEQ ID NO: 260264 - DNA, 451 bp, Glycine max
gacgcacgcgtccggtccctttggtcttcatcttctgttctgatccaggtatggcttctaaacgcatcttgagggagctcaaggatgtgcagaaggatcctcctacctcatgcagtgcaggccctgtggctgaggacatgtttcactggcaagccacaatcatgggacctgctgatagcccatatgcaggtggtgttttcctagtttcaattcattttcctcctgactatcccttcaagccaccaaaggttgcttttcggactaaggtgttccacccaaacatcaacagcaatggcagtatatgtcttgacattctcaaggagcaatggagcccagccctaaccatttccaaggtccttttgtcaatttgctcattgttgacggatcccaaccctgatgatccactcgtaccagagattgcacacatgtacaagactgacagggccaagta

SEQ ID NO: 260265 - DNA, 446 bp, Glycine max
ggtccggaattcccgggtcgaccgcacgcgtacgattgaaatgggattgcatgttttctttggttgctacaacaatcttttccgattgatgaaggaggtttttgcggggtaagaatctacttgtaaaggatcacactcacacttttgttaacaaagggggtcaaattggagaactagattttcgcttcccaattggggcaccaatacactgtataagggcgtttttgtccacaaatcagcttaatacttatgataaggctagaaatgctgtggctcttgcactcagtccagttgttaaaacttttgttgatccagatggttcactgaagtacataaggaattttgatagtattagcttttcacactggtttttatccaaaggtggcacacccatgattattacaaaaatgtgggatcccattgcctatgtccctgggtttaatgac

SEQ ID NO: 260266 - DNA, 388 bp, Glycine max
ttccctgtcgacccacgcggccggcccaatacatatccgtcgcactctgtgttttcagcgccgtctccgatctccgacaatggcgacccaagtgagcaagaatagggagggcgtagctgatggagtgttcttcgctgaactgaacgaggttctgacaagagagttggccgaggacggttactccggcgtggaagttagggttacgccgatgcgcaccgaaatcataattagagccaccagaacccaagctgttctcggtgagaagggaaggagaataagggaacttacctctgtggttcagaagaggttcaagtttcccgagaacagtgtcgaactttatgctgaaaaggtcaacattaggggtctttgcgctattgctcaggctgag

SEQ ID NO: 260267 - DNA, 448 bp, Glycine max
  unsure (1)..(448): unsure at all n locations
ggtcgacccacgcgtccggttggtttctgcaacctaccatgcaattccttttctgaatccgttttctattgccacgggggggaagcgtaacgaagatgaatggcattngtaaactcaaatcgtcgagttctgaattggaccttcacattgaagattacctaccttctggatccagtgttcaacaagaacggcatggcaagctccgactgtgtgatttgctagacatttctcctagtctatctgaggcagcacgtgccattgtagatgatacattcacaaggtgcttcaagtcaaatcctccagaaccttggaactggaatgtttatttgtttcctttgtggtgctgtggagttgtggttcgatatttgattttgttccctattaggattctagtgttggcattaggatggattatatttttttcagccttcattccagtgcactccct

SEQ ID NO: 260268 - DNA, 458 bp, Glycine max
cccggtccggaattcccgggtcggcccaagccgtccgccaacccgtccggcaaccatggcaatggcaacccaagcctctctcttaaccccacccctctgcggtctcaaagccagcgaccgcgcctccgtgccatggaagcaaaactccagcctctccttctccagcccgaagcccctcaagttctccagaacaatcagagcagcagccgccgacgagaccacagaggcaccagcaaaagtagaggctgcaccggtcgggttcaccccaccagaacttgacccaaacaccccttccccgatcttcgggggcagcaccggcgggctcctgcgcaaggcacaggtggaggagttttatgtcattacgtgggactcacccaaagaacagatctttgaaatgcccactggcggcgccgctatcatgagggagggtcctaaccttctcaagttggccaggaagg

SEQ ID NO: 260269 - DNA, 400 bp, Glycine max
caatccaatttatcaataccacatttttatcgatgaatactatttgcactgtggtactatataatggttctttatcctacgcgttattctattcttgtaatcaacaacttgttcttattaactctttggttctagaatttatatataatttaagtgacacaataaaagctttttctattcttctattaactgatttatgtataggattccattcaacccatggttgagaactagtgattggtttcgtctataaaaattttggatttgctcaaaatgatcaaattatatcttgtcttgtttccacttttccagtcattttatatacaattttaaaatattggatttttacttatttaaatcgcgtatctccatcacttgtagtgatttatcattcaatgaa

SEQ ID NO: 260270 - DNA, 451 bp, Glycine max
  unsure (1)..(451): unsure at all n locations
taattaccgggccgacgcacgcgtccacgcatncnttttatgtattcactttctttttccaaacacacattattcattanttttgtgggcgtcacttaaactgaagatgattttatttaagttattcaatgtatctggtccttgncttgaaaccattcatctcataaatgaccctcactatcctatttttaaccttggcttagcgtttgttttgtattacaataattcatatgcttattattcccttcaaaagattgcaagttctatctttaaactgaatggcaacacccctactgtcacatgtgcatatccaaataactcaccttaccattctgcttttttacaattttaaactctatacgtcaaaaacattcccgataattttaccacttaacaatttaatgaactaattccccgtcatggacaaataacaaaaattttcattccccct

SEQ ID NO: 260271 - DNA, 260 bp, Glycine max
  unsure (1)..(260): unsure at all n locations
aacccacccgtcgcgctcttcaatnatggcatctgttgccctcaaacctgcccttttcactgtttaaaattccttagttaaaggccttccctctctctcaaggaactcttcttcattcaaaattttttccaatgtcaataatatcaatacttacaaaccttattgaattaattgtttcattgcttttaaggattgaacttattcatcttacaagaaaagaaaaggaaaaggtgtttaccaatttgtaaacaaataccgtt

SEQ ID NO: 260272 - DNA, 273 bp, Glycine max
ccaaacaaaattttactttttacaaaacaccccaaaaacccaccttaaaaaattttttcaattacccgggttaaaataaaatgcattctttcccacccctaataatcttattttgtttgacccaaaattttttccgctaaccataacttttttttttgccaaaaaaaaggaaacttttttccacccaattggccaccgatttatccctttttatttgaatcaaggcaacccttggatccattttttcctcccttaacatcataaaattttttt

SEQ ID NO: 260273 - DNA, 357 bp, Glycine max
attcccgggtcgaccgacgcgtacgcatcgctgtcctcatgaaattagctggaggttttccatctatggctgatcaactgaataaggatgcattccttgagcaagctcgctcttatgaaaaagcttcttccatcccaattggttggtatataaagaatgcacaaacaaggcaactgtcacatcctatgcctgttctactttctatcgaaattgatctatgctcaataactccaccttataaatctctttttaaactaccaattcatatcaaatcttaaaaccaaacttttaacaatgcatgcatcgaatttattgaaagtgcacaacatctcaaggatctttaagcttaaccttttc

SEQ ID NO: 260274 - DNA, 462 bp, Glycine max
ggtcgacccacgcgtgcgcccacgcgtccgcccacgcgtccggcaggcagtgtcatctctcctttgacgacaagatgagcatcccgattccccatcggcagttattcatagacggagactggaaagtccccgtcctcaagaatcggattcccatcatcaacccttccacccaacacatcatcggggatatcccagcagctactaaggaagacgttgatctcgctgtcgctgccgccaaagctgccctctcccgcaacaagggcgccgattgggcctccgcttccggctccgttcgggctcgctacctccgcgccatcgctgccaagatcaccgagaaaaagcctgaactagcaaaactcgaagctattgactgtggaaaaccgctcgatgaagccgcctgggacatcgacgatgttgctggttgctttgagttctatgctgaccttgctgaaaaattggacg

SEQ ID NO: 260275 - DNA, 453 bp, Glycine max
  unsure (1)..(453): unsure at all n locations
aattcccggtcgacccacgcgtccgcacagcttcagttcgtttttgttgatcctgtgaacttatggctgacggggtggttctgttggatacatgggccagcatgtttgggatgagggttaggattgcattagctgaaaagggtgttgagtatgaatacaaggaagaaaatctcaggaacaagagtnctttgcttttgcaaatgaacccaattcacaagaaaattccagttctgatccataatggcaaaccaatttgtgaatctgcaattatagtgcagtacattgatgaggtctggaatgataaagctccaatcttgccctctgacccttatgagagagctcaagccagattctgggtagattacattgacaaaaaggtgtatgacacttggaggaaaatgtggctttctaaaggagaggagcatgaagcaaggaagaaagagtttatctcta

SEQ ID NO: 260276 - DNA, 359 bp, Glycine max
tttttacaccctgctatcttaaatctaacgctgtaacatctcttgggtgcatctctcagcaccgaagcaatcactcatgggaatgcattaacctaaactgaattctcattatcaatacactcaacaaaatctcatcaacaatattcctaagcttctgcagattaacccaattcacatgacaatcccacctattctccataatgccataccaaattctaaatctgcaattctagagcactacattaatgagccctaaactgataaagctccaatcttaccctcttacccttatgatagaactcaagccaaattctccctagattacatttacacaaatgcgtatcacacttggaggaaaa

SEQ ID NO: 260277 - DNA, 407 bp, Glycine max
caccgtcagttcgtatttgttgatcctgtgaacttataactgacgctttagctctgttaggtacactttccaacatagaggggatgacatttaggattgcattagctgaaaatggtgtttaatatcaatacaactaataaaatctcattaacaagagtccttagcttttacaaatgaacccaattcacaagaaaattccaattctgatccataatagcaaaccaatttgcgaatctgcaattatagtgcagtacattgatgatgtcctaaatgataaagctccaatcttaccctctgacccttatgacagagctcataccagattctgcgtatataacattgacaaaaaggtgtatgacactaggaagaaaatgcatctttctaaattaaattatcattaatcattt

SEQ ID NO: 260278 - DNA, 478 bp, Glycine max
  unsure (1)..(478): unsure at all n locations
aattcccgggtcgacccacgcgtccgcccacgcgtccgttccaaagcccttgtttcactttttccaatccgatatggccgccgcgaccgccttgctccgctctctccgccgccgcgaccttccctcgtcttctctctccgcctttcgttcgttgacgagtggcacaaagacatcatatgtagggaacaagtgggcaagtttgtctcggccgttcagttcaaagcctgctggtaatgatgtcattggaattgatctgggtactaccaattcatgtgtttctgttatggagggaaagaatcccaaagttattgagaattctgaaggagctcgaacaacaccatcagtggttgccttcaaccagaaagcggagcttcttgttggtacaccagccaagcgtcaggctgtgacaaacccaacaaacactctntttggaaccaagcgtttgataggtaagcgttttgatgattctcaaactcag

SEQ ID NO: 260279 - DNA, 481 bp, Glycine max
cgggtcgagccacgcgtccgcccacgcgtccgttccaaagcccttgtttcactttttccaatccgatatggccgccgcgaccggcttgctccgctctgggcgccgccgcgaccttgcctcgtcttctctctccgcctttcgttcagtgacgagtggcacaaagacatcatatgtagggaacaagtgggcaagtttgtctcggccgttcagttcaaagcctgctggtaatgatgtcattggaattgatctgggtactaccaattcatgtgtttctgctatggagggaaagaatcccaaagttatcgagaattctgaaggaactcgaacaacaccatcagtggttgccttcaaccagaaagcggagcttcttgttggtacaccagccaagcgtcaggctgtgacaaacccaacaaacactctttttggaaccaagcgtttgataggtaggccgtttgatgattctcaaactcagaaggagatg

SEQ ID NO: 260280 - DNA, 411 bp, Glycine max
cacgcgtccattccaaagcccttatttcactttatccaatccgatatgtcacgcctctacacggctttctccaatctgggggccgtcgcaaccttgcctcgtcttctctctccgactttcgttcgttgacaaatggcacaaacacatcatatgtacggaacaagtgatcaaacttgtctcggtcattcatttcaaaacctacttataaagacgtcattgaaattgatctgagtactaccaattcatgtactttctgttatcaaatgaaagaatcccaaatatattgacaattcttaatgagctcaaacaacaccatcagtcgttgccttcaaccagaaatcagatctacttgttattacaccagccaagcgtcacaccttttacaaacccaacaaacactctttttggaac

SEQ ID NO: 260281 - DNA, 454 bp, Glycine max
ggtccgaattcccggtcgacggcgcgtccggaacgcacaacggggaaaaaggggattacggtttatgaagcagcgacaacaatggatttcggaggggataagaaggagtgagagagcatcaccgaaaatgctcatccaacaactttagattcttcttcttaattggcatcggcacttgattccagcaacaaagaaatctaataacgacaaactcgtgaactcaatgccggtctacaccctctcaagcacaagtttgtcttctggttcacgcgccgaacacctggagttcgaaatcaaacatcatacgacgacaacataaagaaaattgttgaatttagtacggatgaaggattttgggtctgctactgccatcttgctcgttccgcttatttacctagttcaacagatttgcaccttttcaaagaaggaatccatcctctatgggaggactctg

SEQ ID NO: 260282 - DNA, 417 bp, Glycine max
  unsure (1)..(417): unsure at all n locations
gtcctgaattcccgtntcgaccgactcgtacgcaacgcatatattgcaaatagggtattagcttatattaatcaacatctacaatagatttcgcagcttataatacagaagcagatatcaacacctaaaatactcatccaacaactttagattcttcttctcaattggcatctacacttgattccatcaacaaagaaatctaataactacattctcgtaaactcaaacccatacttcaccccctcaagcacaattttgtcttctggtacactctcctaacacttagagttctaaatcaatcatcatacgatgacaacatatagaaaattgttcaatttagtacggttgaatgattttggttcttctactgccatctttctcttcccgcttctttacctattccaacatattttcacc

SEQ ID NO: 260283 - DNA, 465 bp, Glycine max
tcctgaattcccggctcgaccgacgcgtcctgaactcaaatatctgaaacagctgattaatctttatcaagcaacaacaactatgtactgcagtacatatcaaaaacagtgttatagcatcaccgaatatgctcatccaacatctttatattcttctactcaattgacatcctcactttattccaccaacaaagaactctaatatcaacaatctctcttaactcatatcctgtcttcaccctactcaagcacaagtttatcttctagtacactctccaaacacctgaacttcaaaatcaaacatcatactaagacaccatacataacattcttaaatttactacggttgaattattctatctctgctacttacatcttgctcctcccgcttttttacctattccaacatatttgcaccttttcaatgaatgaatccgtcctctattgtaatactcttctaacttc

SEQ ID NO: 260284 - DNA, 439 bp, Glycine max
gaattcccgggtcgacccacgcgtccgagaagggccatcttcccgttcatcttgctatcataacgggttgtgttgagatggtaaaagaaggctttgaacctggatgcggatggcccattaatccttatgttctcctcaatcaaaagggtcaaaacattcttcacattgcggcaaagaatggaagagataatgtggtagaatacctactaggaaattgcaacactggtcatctacatataaaccagaaagactatgatgggaacactccattgcatttggcttccaaaaatttatttcagcaagttatcagcttgatcacagaggataagaggactgatctgaatctcacgaatgaagacggtttaacggctggtgatatcagtaagacctttgaacatccaatgttacgtggaaaagagattgtatccatggagttatc

SEQ ID NO: 260285 - DNA, 462 bp, Glycine max
ccgggccggaattaccgggtcgacccacgcgtccgcaaaatcccaacacatggactcgagactcttgcacttgcatatccagactctccctcctatggcgtgcgacactcaccggcctctctaccacccttttaccgactgctgcgcttctttccaccgctcttctgctgctctcccacgcttacgcttctcgccgcttctcgccgctaacaccctcaccgctaataacatctcgccaagaagtggactatacactgatggtgactttatgacaaagaaagaggatttacatgtggtgaaaccgacaacatctgtggatgaagctttagaaattcttgttgaaaacaggataactggttttcccgggattgatgataactggaaactggttggtgatgattcagattatgatttggtaacactggactctatatcaggtcaacggttaaaggattacatgtt

SEQ ID NO: 260286 - DNA, 326 bp, Glycine max
  unsure (1)..(326): unsure at all n locations
aattcccgtgtcggccgcgcgcgtccggaaattaattatctggggcagctgcgtcatctctaatcttgtgaaactgattggttactnagtagagttcgatcaacgggttttggtgtatgagtttttgaccaaatgaagtttggataatcatttaattaggagagcttcttactttcaaccactttcttggaacttccgtatgaaagttgctcttgatgctgctaatgttcttgcatatctttatatccattaatcataattgatatatctagacttcaaatcttcaaatatcttacttgattcgaattacaatgcataactttctt

SEQ ID NO: 260287 - DNA, 493 bp, Glycine max
tcctgaattcccgggtcgacccacgcgtccgcccacgcgtccgcccacgcgtccgaaggggtcacaaacacttgtgaagtctgcgaacgtaggcttcttgattctttccgcttctgttctcttggttgcaagattgttggaacatctaagaacttccagaagaggaagaaacagtcaatgttaatgtcatcagattctgaggactcatacagcagcaacagcgtccatggccttaagaaaaacttcaaagttcagagcttcacaccatccacaccacccccaacatcggttaattacagaacggccaagagaagaaagggaataccacaccgtgccccaatggttggactaatcatagaatattagatagttggtatttttaggttattggctacaatgcccttaggtataaaaataccatagtatactaaagcaagtgtttcgacgtcgtttcatcaaagtccaatactcgagctttcctagggccggtatt

SEQ ID NO: 260288 - DNA, 484 bp, Glycine max
tgccgggtcgacccacgcgtccgagctgcttccccaatggcaagccaactcaagtccaccttcactaggactcttgtagctcccagagggcctctctgcctgttgaccacttcacctcgtgccttctagaaggcaatttagcttcactgttaaggccatccaatcagagaagccaacctatcaagtgattcagccaatcaacggtgacccattcattggaagcctggaaaccccagttacatccagccctttgatcgcatggtacttgtccaacctgcccgcatacagaaccgcagtgagcccactactaagagggatcgaggtgggcctggcccacggataccttctggtgggcccattcgtgaaggccgggcctcttaggaacaccgagatcgccgggcaagcgggctctctggcccgccgtgggcttgtggtgatcctcagcctttgcctcacaatctatgggatttcatccttcaacgaa

SEQ ID NO: 260289 - DNA, 435 bp, Glycine max
aattcccggagtcgaccgactcgtccgctcttcttctcttactccttgggttttagcgcatcttcttctagatttaatgaagagtggtgattaaaaggttgacatgactattactaccattttccatgtctactctcataaatccactaccactgctcacctgatttacaagcttgcatgcattgacaatctttttattgacatttttgagaatgaatcttcttacatgaacaagatgtctatcaagtatgcctctttgctatacaaacttaatgctgaccctcaaatatgaatcaccattcatattgcttcatgcaattttgaaacatcatagtattatttcacaattattgatgctcctgcacatatgtatttcattaataatatgattactgtgacattccaatctgactttgcttttcttatcatttattt

SEQ ID NO: 260290 - DNA, 378 bp, Glycine max
  unsure (1)..(378): unsure at all n locations
gaattcccgggtcgacccacgcgtccgccaacccgacccataaagagatccgttaccgcggcgtgaggaagcggccgtggtgccgctacgccgncgagatccgcgacgcangcaagaagacacgcgtgtggctaggaacgtttgacacggcggaggaggcggcgcgtgcgtatgacacggcggcgcgtgagttccgcggcacgaaggcgaagaccaatttccccacccacgcggcggcggcgcgtagtcccagccagagcagcacgctggactcctcgtctccgccgccgctggaccttactcttgccgccccactcaccgtcgggggcgcgttggtttttccggtggcgcgtcccgtggtgttctttgacgcttttg

SEQ ID NO: 260291 - DNA, 462 bp, Glycine max
gaattcccgggtcgacccacgcgtccgctttttttggtctctggagttacaccacaggcacggagctctaggactgctcattacgtagcggcttatttagaggctaagatgagctttgctgcgccatcacttggttctgctggtggtagatctgctagaagagcattcgagtttgggagaacctatgttgtcaggcctaaaggtaaacaccaagcaactatagtctgagtgcatggcctcggggataatggctccagttggtcccagctattagagacccttcctcttccaaatattaaatggatatgtccgactgctcctactcagccaatatctatatttggtggctttccgtccactgcttgggttgatgttggagatatttcagaagatgctcctgatgatctagaaggtttggatgcttctgctgcacatgttgcaaatttgctgtctacagaacct

SEQ ID NO: 260292 - DNA, 432 bp, Glycine max
tcgacccacgcgtccgagctgcttccccaatggcaagccaactcaagtccaccttcactaggactcttgtagctcccaagggcctctatgcctgtgcaccacttcacctcgtgccttctataaggcaatttagcttcactgttaatgccatccaatcagagaagccaacctatcaagtgattcagccaatcaacggtgacccattcattgtaagcctggaaaccccagttacatccagccctttgatcgcatggtacttgtccaacctgcccgcatacagaaccgcagtgagcccactactaagagggatcgatgtgggcctggcccacggataccttctggtgggcccattcgtgaaggccgggcctcttatgaacaccgagatcgccgggcaagccggctctctggccgccggtggccttgtggtgatcc

SEQ ID NO: 260293 - DNA, 365 bp, Glycine max
aattcccgggtcgacccacgcgtccgaaatgaatcaaattctttgagtcgaacacaggggccaagatttcgtactttgggttagggacttggcaagcttaacctggagtagtagctgaagctctcaccacagacgttcatgatggatacaggcatagtgactgagctagtgcgtataagaatcaagcagagattggctatgatcttaagaagctcattgatgatcgtgtagcgaaacgtgcagacttatggatcacttgcaaactctggtgtatagatcatgcatacgaagatgtgccaaaagcattgcatagaacattacaggaattgcaacttgactatctcgacctgtatgtgatacactgg

SEQ ID NO: 260294 - DNA, 380 bp, Glycine max
  unsure (1)..(380): unsure at all n locations
ccacgcttccnatttccattntaaagttttttactttatttgtatccttctctcacattgtcctgcttataacgcctgtatattctctccatctctaaacattctcatcatatcataccataattttcttcagtttcttcaaccttttgccttgaattgttcatatcatcctattaagaatgtcaaactttttatctgtttcaactttcatcaatctttttctcctttttaagctcattcattttctctaattatttctaacactaaaatttcatcttcttattttcataatctctctccaatttttaccactaccttaacatctactattcttcaatgatttctaattcttttcctgtttattgattcttttttttctt

SEQ ID NO: 260295 - DNA, 392 bp, Glycine max
tccagacttcccgtttacacctacaatttattttcctttttttatgatcgacaaatatattatttgaactttaaaggtgtacttctaacaggggaatttctttaccatgatgcatatgtatattttctcaatttcattcactattcatttgttatacactctgcttaatattatcaatctttttgtgcttaatactacatatcctacttaacaaatccaattcaaattattcactcatttcataatcgtttaatctttcatcgttcaacattaactcaatttcttcgatgaatttttcattgatcagctttaacatttgacaatttgattaacattataaattttcacttatttactacaattttttaacattttataaaattcaaattata

SEQ ID NO: 260296 - DNA, 448 bp, Glycine max
ttcgggccggaattcccgggtcgacccacgcgtccgctaaagtgttgcagtctctcatcccaattgttgatcagtctgttgttgagagtaccatccgtccctgtctggttgagctcagtgaggatccagatgttgatgttaggtttttcgcctcacaagcactacaatctagtgatcaagtcaagatgtctagctagatcagtttgcatgtggtctttagctatttgcttttcttataagatgtccattttcttgtgtaattggcatgacgcccacttgccccatcctttgtatcacatataattgatgcgatcctgctttgctttcattctatgcgtacctatgctaccaggtactttgtagtgatgaaacattgttcaaaaatgagatgggttttgacgaccactcattatatgggttaccaatgtgaagattatgcatgaaattt

SEQ ID NO: 260297 - DNA, 236 bp, Glycine max
aaaaaaaaaaaaaaataaaaaaaaaaaaaaaatataaataaaaaaaaaaaaaaaaatatataatgaaaaagtaaaattaaattgaggagtaatattaaataatatatttttatataaaattaaatttaaatatatttatataatttttattttacatgaatctatttttttaattattatttaaaaccttcatacattaaataaattaaaaatttgtttaaattatattagtatat

SEQ ID NO: 260298 - DNA, 419 bp, Glycine max
  unsure (1)..(419): unsure at all n locations
caggtagctgcctcacgatccattcaaagcacccctttgtgccccacttctggatctgcacgtgacagagcccaaaacctgttaaagcctccatcttttgcttccaaggtgtttccttttgtagggaacaacaacaaacgctccaaactcagcctcagaggccttcagatcagtgcaaggaaatcagccccttctgaagtcatccccgtgtcacccgaagatgatccaaagattgaggagcatttgcaacatttacgtggggtgcagccatttggtgagaactctgttggtatgtggtctaagcccacgtttaggcgcaaaacgaagatagtgtgtactattggaccttctaccaatacgagggaaatgatttggaagctggctganngctgcatgaatgttgcctcgttgaatatgtc

SEQ ID NO: 260299 - DNA, 357 bp, Glycine max
ggaacttaaaagcctagatgattatgttgaaaacatgggagaaaaccaaaaggctatctttgacctagcaactgacagcttgaagagtgcaaagactgctccatttttggagaaattggttcaaaaagatattgaggttctttatttggttgaacctattgatgaggttgccattcagaacctacagacctacaaagaaaagaaatttgttgatatcagcaaggaggatttggaattaggtgatgaggatgaggtcaaagagagggaaaacaagcaagaatacaacctactctgtgattggataaaacaacaacttggtgacaaggtggccaaagttcaaatctcaaatcgcttgag

SEQ ID NO: 260300 - DNA, 305 bp, Glycine max
atcattttctctcttctctgcttcttcttggtcaaatcttaagagctgaggagaatcaatcgggagaaatatgtctggtatcgctcgtggacgccttgctgaggaacgaaagtcatggcgcaaaaaccatccacacgttcgtatcactacttccttctcttttttctctgcttttatttcatcaatttcatttccccctttcgttacaatcaatgcttggtgctctcaatttttttagggtttcgttgccaagcccgagactctacctgatggcaccgtaaatttgatggtcttgcattgcacta

SEQ ID NO: 260301 - DNA, 441 bp, Glycine max
  unsure (1)..(441): unsure at all n locations
cgcatgaaaagcggatcagttggattcaagaaggaatatctcgatcaaccggacattcccagcacatggaaagcaatggaggcactctatgactcaggcaaggcaagagccataggagttagcaatttctcttcaaaaaagcttcaagatctcatgaatatagcaagagtgcctcctgctgttaaccaagtggaattgcacccaggatggcagcagccaaagctgcatgcattctgtgaatctaaaggagttcatctgtctggatattctccactgggctcaccaggagttctcaaaagtgacattcttaagaatcctgttgtgatagagattgcagagaaattggggaagacaccggcacaagttgcccttaggtggngactgcanacaggtcatagtgtgctgcctaagagcactaatgagtccagaatcaagggaaac

SEQ ID NO: 260302 - DNA, 407 bp, Glycine max
cccacgcgtccgcccacgcgtccgcccacgcgtccgtcgcattgcacaagcactctctctttgccttggcctttttcaggtttcaacgctccaactatccatggcaaaccgctggctcagacccgaggtgtatccactgttcgctgcggttggtgctgctgttgggatctgtggattccaactggttcgtaatatctgcatcaaccctgaagtcagggtgaacaaggagggaaggaaggcaggagttttggagaactttgctgagggagagaagtatgccgagcacttcctgaggaagtatgtgcgcaacagaactccggagattatgccctgcatcaacagcttcttcgctgacacaagtcgcaactaagatgctttgaataaacaaaggttaatgtgagatatta

SEQ ID NO: 260303 - DNA, 348 bp, Glycine max
cgtgtgtctcatgaaccattacataaactctttacctttgtttattcataactactatatatgtatatagaccctccttaaacccttttcttcaacagccaacaaaaaacaagtctttttctgaaaacttaatttctctctgattttctccctcacttttatttctctctttctggattattctctctgtgtagattgtggcgtgttctcgatgatgatgatgatgagccgcagcggcgccaaccgggtagcgaacaccgcaatgtttgtggcgaagggtttaagcggcgaagttggtggtttaagagcattatatgggggtggtgtgaggagtgagagcactttggc

SEQ ID NO: 260304 - DNA, 448 bp, Glycine max
gttgaggttgctgagaaatctacattgcaaagtcagctggaggaaattgaagggaaactggcacaagctgaatctagactaaatgaagaggttgaaagtgttcaagctgctgcttctcaacgagaagcagatttaagttcaaagttggaagactatgcacaaaaattcaatgatagaaatgtattgaatgataaggttgcagaacttgagaaagagttgcaacttgcacgggatgctattgctaaccagaaaggagcagagtcccagaagttggaactagaagcagcattgaagaattctcttgaagaacttgaactaggaaaatgatatctctctttacagaaacaagtgacagatctagagcagaaattgcaagtcgctggtgataaatcctcagtcaagggcgatgagggtgttgatcagaaagaagggttggaagtaaaatcca

SEQ ID NO: 260305 - DNA, 382 bp, Glycine max
  unsure (1)..(382): unsure at all n locations
ctttgagggatggaactgatgcatctggcaggaaaggaaagggaaagggtgtttaccagttggtagacaaatacggtgctaatgtcgatggttacagtcctatctacgacaccaaggactggtctccaaccggtgatgtctacgctggcggtacgactggcttggctatctgggctgtgactctacttggtcttttagctggtggtgcacttcttgtctacaacacaagtgctttggttcaatagactttgcaaatcgatgtttaagttataacatagtccatgtaactatctaaaaatgaagaactattcgtgaagtactttgtggatatgttccttctgttctataaatgantggatgtgaaaaaaacttttttgttagt

SEQ ID NO: 260306 - DNA, 440 bp, Glycine max
gtgatctgcaacaagcaagatctgcgagaaaaacaacaaacaaaacaatggcgagtcggttcgggttatcgtcttcgtcttcctctgcgtccagcatgagagttaccaacacgcccgcgagcgacctcgccctcaccaacctcgccttctgttccccctccgatctccgcaatttcgccgtccctggccacaataacctctacctcgccgacgtcgccgattccttcgtcttatctctctctgctcatgacaccataggcagcggtcagattgcgttgaatgccgttcaacgccggtgtgccaaagtttcttccggtgattccgtacaagtgagccgatttgtgccgcctgaagatttcaacctcgcactgctaactcttgaattggaatttgttaaaaaggggagttagagtgagcagattgatgctgttctactggct

SEQ ID NO: 260307 - DNA, 398 bp, Glycine max
cccacgcgtccgcccacgcgtccgcccacgcgtccgaacaatattaggagcagagaagatgctgttgaattggtggatcctaccattgcaaagcatgtcaaagaggatgccatgaaggtgttgaaaatcgcaacactgtgcaccgggaaaattccagcttcaagaccctcaatgagaatgttggttcaaatgctggaagaggcagatccatttaccacaaccaaaatgattgtgaccattgatgcttaaataagttgctccaaagaaggacaatttttctctcaactgcagacttttgagttttccactttggtaattaagcagctcataaagtgaggctgagaaggggtgataaatactagtaaatatgaaaacatgccttgatcttgggttcaatt

SEQ ID NO: 260308 - DNA, 362 bp, Glycine max
  unsure (1)..(362): unsure at all n locations
cccacgcgtccgggagccagttttggtgtcatattatcatacactattaaactcgttcctgtgccggaaacggttaccgttttccgcgttgagaagactcttgaaacgaatgtcactgccactgaccttgttgtgcagtggcagaaagtggcgccaaatactgatgataggcttttcatgaggctgttattgcagcctgtgagttccaaggttgtgaagggaacaataactgttagagcctcggttgtggctttgttcctcggaggggctaatgaggttgtgtcgattntggctaaacaattttcgcttttagggataaaaaaggagaattgcactgaagtgagttggattaattctgttct

SEQ ID NO: 260309 - DNA, 429 bp, Glycine max
  unsure (1)..(429): unsure at all n locations
ggagttgtaaattaagagcatggctgcacaagctcttgtatcatcatcttctcttaccttctgggcggaggctgcaagacaaagtcttggaccaagatcactccaatctccatttggcttctccagaaaagcctcctttcttgttaaggcagctgctaccccccctgtcaagcaaggatcagacagacctttgtggtttgcatcaaagcaaagtctttcttacttggatggcagccttccgggtgactatggatttgaccctctgggactttcagaccctgaatgaacaggagggttcattgagccgaaatggctagcatatggtgagataatcaatggtcgttatgcaatgttgggtgcagttggtgcaatagcacctgaaattctatgcaaggctggtctgatccctcangagacagcactcccatg

SEQ ID NO: 260310 - DNA, 356 bp, Glycine max
  unsure (1)..(356): unsure at all n locations
cccacgcgtccggtccccaagacccccgagatctcatccttgctttctgctgctcctttggagggtgctgctgatcaggttcagaagaccaacaactcgcaagatgtggtggctgcacaagatgattctgcaaaaaccctttccgaagagcttgcagacattgaatcccagctcaagttctttgagaccccttcttttcttgatgaagcctgggctgatgctacattggcgtctttgctcggcggagacgcaactcatgacgccgncggaaaccctatgaacctttggagcttcgacgacctgcctttcatggcaggagtcttctgaacacccttaatttcccttttatgaaatta

SEQ ID NO: 260311 - DNA, 462 bp, Glycine max
  unsure (1)..(462): unsure at all n locations
tttgcattggagcaacaattgcacacagcaagacaagagctgagtcatgctttgtatcagcatgatgctgcttgccgagttattgcaagactaaaaaaggaacgagatgaagctaggtccttacttgcacaagcagagaggcagttccctgtttctgcaccaaatgccataacagcaaatgcccccgtcctgagcaatgggaaaagagctgctgaggatgaggatctggctcctggtgcaaagaaaattcatcctggaatatcttctagcataatttctgagctaactgattgcaatgctgctctttcccagcagagaaagaagcgacagattcctccaactttggctcctgtcgaagctctagaggcatatacccagatatctagtcatccctttcacaaaacaaacaaacaaggcattatatctctggatatcctntattctaaggacttaatngcaact

SEQ ID NO: 260312 - DNA, 402 bp, Glycine max
ccacggtatatcaacaagaagagacaaaattattgcactggtaatgattatactagccgtggttacaagtgtgcttgccatttccaccaacatatttaatgcttttagtagcaagtcataaatacaagctggttctctcttttctccccttctctctctctctctctctctctctctctctctctctctctctatatatatatatatatatatatatatatatatatatatatatatattatagaaaaatgtatttggggagagagggtgtgactggggagattctaggggcaatttggttgctgcggcgattgtgttacttgtgtaatttggatgccttgattattgtagaattcatatgtcttgcggcagcatttctatgtaaagtagcaaatactatta

SEQ ID NO: 260313 - DNA, 411 bp, Glycine max
  unsure (1)..(411): unsure at all n locations
gtgacaaccatcattggaggaggtgactccgttgccgctgtggagaaggttggacttgcagacaagatgagccacatctccactggtggtggtgccagcttagagcttcttgagggaaagcaactccctggtgtccttgctcttgatgatgcttgagcaaaaatcattcgttcctttgaagtttgtgctttatattattattatggttgggtttcagccaacagtggattaaggtacaatgagagctgcgagctcttgctcctgtagaggcttaatataggataggtttcaaaataagagggttttgtggcatccttggtgttgcattgagctttgatctaattgttcttgaacaatgttcatttccaaatgagtttactttgttggttaaaaaaaaaaannnnnnnnnna

SEQ ID NO: 260314 - DNA, 455 bp, Glycine max
  unsure (1)..(455): unsure at all n locations
cccacgcgtacgaccacgcgtccgcaacagcttgaaaaggctgccataaatcatgggcgacagattgtcaggtttactcagcggaatatactaagggtgtatccaaaaggtactcgcattgactcatcaaattataacccattaattgggtggatgcatggagctcagatggttgcatttaacatgcaggggtatgggagatctctttggttgatgcatggaatgttcagagccaatggagggtgtggttatgttaaaaaaccaaattttctattggagactggtccagatgacgaggtcttcaatcctaaagctaagttacctgtgaagactactttgaaggtgactgtatatatgggggaaggatggtactatgatttcaagcatacacactttgatcaatattcacctccagacttctacacangaatggggattgctggagtccctaatga

SEQ ID NO: 260315 - DNA, 438 bp, Glycine max
  unsure (1)..(438): unsure at all n locations
atcgttttctacataatacaaacctctctaatttttgaagcttattatacccaatctcgatatgcagatcttcgtgaaaaccctaactggcaagacgatcaccttggaggtggagtcctctgacaccatcgacaacgtgaaggccaaaatccaagacaaggagggcattcctccggatcaacagcgtttaatcttcgccgganaacagctcgaagacggcagaaccctcgccgactacaacatccaaaaggagtccaagcttcaacttggtccttcggcttcgcgggcggatgcaaatcttcgtcaaaacccttactggcaaaacaatcacgctagaggtggagtccttcgacacaatcgataacgtgaaagccaagattcaagataaggaagggattcctccggatcaacaacgtttgatcttcgccggaaaacaac

SEQ ID NO: 260316 - DNA, 437 bp, Glycine max
cttcgctagataccgtgtcttttgtactcattattgggtctgcaaacaaagacaaggagagagagaaagaattgatggaatagaaaaaggaaataaaagaatgaattggagaccacacactccaccgttctcatctaaaacttgcctctcactggttctctccatggaatagaaaaaatataaacgatacatccaaaggaagagagatagagaaaaaaaaacttgataagtgatttaataggaaagaaagagagaaagaagacattgaggagaaaatgatatggaagaaaaaataaataatgtttataagagttgaacgaaacaacaaggacaagtagttagtgtggagtgtacacttcaacttgttctaaaataaataaaattattttgttaattttgtttacacaatatgttaattattttctcaaatttttttt

SEQ ID NO: 260317 - DNA, 378 bp, Glycine max
gaatcttgttgaaattttggaaaaccagaatccaatagatgttgcgaaatacatgaattttgtcagtgccccccaagctggtgctatagctacattttcaggcacaacacgagacacctttgaaggaaaaacagtcatggagttgagatacgaagcttatgttccaatggcaatacgctgtatcaagtcaatctgctcatctgctagagcatcctggaacctacattccattgctgccgctcatcgtctaggcacagtgcctgttggtgaaacaagtgtctttgtcgctgtctcatctgtccacagggccgatgcactggaggcttgtagattttttatagatgagataaaagcacaagttcctatttggaaaaagga

SEQ ID NO: 260318 - DNA, 455 bp, Glycine max
  unsure (1)..(455): unsure at all n locations
ttcaagtttcatatatgggattccctggaacaactggggctacttacatagactacggagtgactgatgagtttgtttcaccactagggtatgcaaatatatattcagagaagattgtacatctcccccattgctactttgtaaatgattataaacagaaaaatcaagatgtgttagatcccaactgcccacacaaacgatcagattatggtctacctgaggataaatttatatttgcatgcttcaatcaactgtacaagatggatcctganatatttaatacatggtgtaatattcttaaacgtgtacccaacagtgcactctggctcctcagatttcctgcagctggggaaatgagactgagagcatatgctgctgcacaaggggtacaaccggatcaaattattttcacagatgttgccacgaagaatgaacacatcagaagaagttcttta

SEQ ID NO: 260319 - DNA, 435 bp, Glycine max
  unsure (1)..(435): unsure at all n locations
acaacaacaacgacgacgacactttgacacacctaaccctccaaattcctatctctcttcgaatggaatccgcagctctgtcgcgcataggcctggcgggcctggccgtgatgggccaaaacctagccctgaacatcgcggaaaaggggtttcctatctccgtctacaaccgcacagcctcgaaagtggacgagaccgtagatcgggcccgcaacgagggctccctccctctcacgggccaatacacccctcgcgacttcgttctctcccttcagcgccctagatccgtcatcatcctcgtcaaggccggcgcccccgtcgaccaaaccatcggcgncctctccgaccacctcgaccccggcgactgcatcatcgacggcggcaacgagtggtacgagaacaccgagcgccgcatgagcctcgtcgccgacaaag

SEQ ID NO: 260320 - DNA, 382 bp, Glycine max
  unsure (1)..(382): unsure at all n locations
cacaaagagaagcattagcactaggagcagcaacaactagtctcagctgaaatggcctcttcagtgatggcatctgtggccctcaaacctgcccctttcactgttgagaagtcctcagtgagaggccttccctctctctcaaggaactcttcttcattcagagttgtggccagtggcaagaagatcaagactgacaaaccttatggaattaatggtggcatggctttgagggatggaactgatgcatctggcaggaaaggaaagggaaagggtgtttaccagtttgtagacaaatacggtgctaatgtcgatggttacagtcctatctacgacaccaaggactggtctncaacccgtgatgtctacgctggcggtacgactg

SEQ ID NO: 260321 - DNA, 423 bp, Glycine max
atcatatatggctagtagttgtttctccatgacaacaccaatcttcaaaattcgcttcttcgtgattcttatgctttattgggataagttcatctcaattgtcctctgacttttactccacaacttgtcctaatgcgctttcaaccattaagagtgcagtggattctgctgtgagcaatgaggctcgcatgggggcttccctcctacgtcttcatttccatgattgttttgttcaaggatgtgatgcatcagtgctattgaatgatacatcaagtttcacaggtgaacagacggcagctggcaacgttaattccataaggggttttggtgtaatagacaacatcaagtctcaagttgagagcttatgtcctggtgttgtttcttgtgctgatattctcactgtaactgcaaaggaactctgtg

SEQ ID NO: 260322 - DNA, 426 bp, Glycine max
agcgagcgagcgagcagtttcaaagagaggatttgggattgggaaggcgagggattgcgctgcgtctgttcctcttctctttcgattcatccctcattcataatcttccaatccaacaacctcagcctcacactcacacatacacacatctgaacgcgtatcgtccctcccatggcttcaaagcgcatcctcaaggagctcaaggacttgcagaaagacccaccaacttcttgcagcgctggtccagtagctgaggacatgttccattggcaagcaacgattatgggtcctgctgatagtccttatgctggaggtgtattcctagtcactattcactttcctccggattatcctttcaaacctcccaaggttgcctttaggactaaggtgtttcatccgaacatcaacagcaatggtagcaattgg

SEQ ID NO: 260323 - DNA, 398 bp, Glycine max
gaaaaccctaaccattccaatgtgctatcgcaattacctctctgcactccaatgacgcgctgctgcggcattcggattccgtgatctgattggcgattgggatccaatcttcatcaatccgattttgttgaaatggagcactatgatctgcaaagacaaagaagggagatgaaaaataaaggaaggaatgttgtgtggtcaattgcgatggataagtgtctaattgaagccctggcagctcaggcaaaacgtggaaacaaaattgacaaatgtttcaatgaaaatgcatacacggctgcctgtgtagcagtaaacacttgcttcagcttgaatttgaataatcagaaagttatcaaccgtttgaaaacaattaagaagaggtatagagtaataaaaga

SEQ ID NO: 260324 - DNA, 394 bp, Glycine max
ctttccaaaggatgttgttgacttggttaagaaggatcttgaagtcaagaaggcagctgtggagatagaatcaaatgggtatcatcttttgtttgattttttacatctgcataaggtggaccttaaaactggcttgcaacaacctatagctttgattgatgaggcagggtgctgttttttccccgaaatctatgctgcttctgatgaaaaaccttataatttgagcaaacaggaatgtggaagaagtccggactcatatgcatctaacgaaataaaattacatttagaagttgaaataaatggtgtggatcaatccaggttgagtgagtgcagtggggagtccaatgctctagttaagggtattcaaattgatactaaacaaaactgctgtcaa

SEQ ID NO: 260325 - DNA, 447 bp, Glycine max
aaagaaatagtatctgggtacccaggatattgtagttgtaagatgggttatctcaattgagtggtgtcatcttcaagccaggttcatgttgcagatgatgcaattgtgagcggcgggggtctaagtcacaatggaaaattcagctacgggtatgctagctctcctggcaagagatcttcaatggaagatttttatgagacaagaattgatggtgttgaaggtgaaattgttggccttttcggagtttttgatggtcatggtggtgctcgtgctgctgagtatgtcaagaaaaacctgtttagtaatttgatcagtcacccaaaattcatttctgacaccaaatcagcaataactgatgcatacaatcatactgacactgagttgctgaaatcagaaaatagccataacagagatgcaagatcaactgctttcactgctattttaggt

SEQ ID NO: 260326 - DNA, 428 bp, Glycine max
gatgcacaaggcttgcctattgatggaaatagaaatgttctttaccagcgtgtacagaaagcaaggagaataaatcgatctcgtggtaggcccctttgggttcctcccgtggaagaggaggaagaagaggtggatgaagagctggatgcattaatttcacatataaagctggaggaaggaaatacagagttctggaaacgtcgctttttaggagaaggcttaaatggtgatcaagaaatgccaacagatgcagctgaatcagaggtccctgaagttctggatgacgttgatgctatagaagatgcttcaaaagaaggtgaagatgatgaaacggatgatgatgaggaggaagcataacaggcataagaagaagtagaaccagcagagaacctagatgtaaacaggattaaggagaacgaagttgaagc

SEQ ID NO: 260327 - DNA, 390 bp, Glycine max
  unsure (1)..(390): unsure at all n locations
catggatccagtgagcgtgtggggtaacacgcccttggcgacggtggatcccgagatccatgacctcatcgagaaggagaagcaccgccaatgccgcggcatcgagctcatcgcctccgagaacttcacctccttcgcagtcatcgaggccctcggcagcgccctcaccaacaaatactccgagggcatgcccggcaaccgctactacggcggcaacgaattcatcgaccagatcgaaaacctctgccgctcacgcgccctccaggccttccacctcgacgcccaatcctggggcgtcaatgtgcagccctactccggctcccctgccaacttcgccgnctacaccgncgtcctcanaccccacgaccgcatcatggggctggatctccc

SEQ ID NO: 260328 - DNA, 453 bp, Glycine max
aaggtatagattagattagaaatccttctcccttctctcttctttcttcttcttctcctgacccttattattattccttgcccttaccctttaggcaagggaaggaagaaagaataactatattattatctttattgtaatctatctttttattataattataattataattattgttgttattattccttaaatatggattcgccgtgtctctccaacgattcggtttctggattcaaagacaaggagtcaatggttgacccctttttggtcgaggctctccagaaccctcgtcaccgcctcaccattttgaggatggagctggagatccagaagtttttgaataatgctgatcagctgcattttgagtttcatcatttcccttcttcctatctccgactggctgcacaccgtgttgctcaacactacaacatgcaaacaatggttcaagat

SEQ ID NO: 260329 - DNA, 442 bp, Glycine max
gtgatacagaggtagtttctgaaaccacaaaggctggtggcctacgtggaaaattgaataaggtggtgttggcttacagtggtggcttagacacatcagtcattgttccatggctgagagagaattatggttgtgaagttgtttgcttcactgctgatgttggccaaggtataaaggaattggaaggtttagaacagaaagccaaagccagtggagcctgtcaattagtggtaaaagatttgaaggaggaatttgtcaaagattatatatttccttgcctgcgtgctggtgcagtttatgagaggaagtatttgcttgggacctcaatggctcgccctgtaattgcgaaggccatggttgatgttgccaaagaagttggagctgatgccgtttcccatgggtgtacagggaaaggaattgatcaggttcgattagagctcac

SEQ ID NO: 260330 - DNA, 432 bp, Glycine max
cccacgcgtccgcacaactacaagaaagaacttccttataaccaaaaccaacaacaactatggcgaagttatcagaagcactacgatgatcagggtcgcaaggtcgacgagtatggcaatgttgagaggcaaactgacgaatatggcaacccggttcatgccactagtgtcacttatgtagccaccaaaagtgttggtggctacaatgatgacgctaataagcaacatgatattactggtgtctatcccgagaaagacaccggtagacatcattttggtcgtggttacgacggtgacactaacaagcaacatgatgctactggtgtttatcccggaatagacattggtagagatcatgggactaccggtgtttatggcctaaacaccgacagacatcatggaacttctggggtgaatcccgggatagacacc

SEQ ID NO: 260331 - DNA, 346 bp, Glycine max
gcaaccttcacctatgaatcgtttatgctgacagtcctgccattcctaatagcttaggaaatgaatggtgtgtgtgtggttggtagggtttgtaaatggccaggctgtatttggtttgaaaatgtgtggtcgaattactttactattgccagcctttaatatgctagtactccctgttgttttactctataagtaaccagatccaaaatactatggttttcaaaaaaaaaaaaaaaaaaaaaaaaaaaaaaaaaaaaaaaaaaaaaataaaaaaaaaaaaaaaaaaaaaaaaaaaaaataaaaaaaaaaataaaaaaaaaaaaaaaaaataaaaaaaatttataat

SEQ ID NO: 260332 - DNA, 262 bp, Glycine max
  unsure (1)..(262): unsure at all n locations
tgaaattttaaaaatgactgggataaacttaagaattcaattattgaaattgaataagtaaacggtttaattggattggtcgaatggtatcaaaaaaatggagtactaactcccatttcttatttattattgaattaaccgatcaacttgctttgttatcgaacatttctttttgatttcaaaaattttccggaaaaaatttgaatctatttttatatgcgaatcaatcctactacttcttgtcctgangtttctgcgcttg

SEQ ID NO: 260333 - DNA, 434 bp, Glycine max
cgctaattaacccttttctccccagcattcaatttctattagtatccaaaccttgattgcgttgttggattttcttgtgggtagggggtttctcctctctttctctgcagtttgatggatcgggaaggaggatccaacgccggatcttgctactactccgttctcgggattcgtagggatgcctccttctctgatattcgcactgcctaccgcatactcgctatgaggtggcacccggacaagtgggctctgaatcccgcaaccgccggcgaagccaagcgccggtttcagcaaatccaagaagcctactcagttctctccgatcagtctaaaaggtcaatgtacgatgcggggctctacgatcctttggaggaagaagaccaagtccgtaaagttttttcctttcattttttttcaattactatttttataag

SEQ ID NO: 260334 - DNA, 412 bp, Glycine max
ggcaatttgtggggcttgctgagatgattggtcctgttgattttaacaagagtgttgagtattggcagcaagacaagtggaatggttgctttcctcttaagtggcacattgttaaggatgttcctaacaatttgttgaggcacattaccttggacaacaatgagaacaaacctgtcactaacagtagggatacacaagaggttatgttggagcctgggctgaaattaattaaaattttcaaggaatataccagcaagacatgcattttggatgattttggcttctatgaggctcgtcagaaaactattttggagaagaaagcaaagcaacaattcccaaagcaggtatgggaagggaaacctgctgatgagaagattgagataaatggggaagttaatactcaaaaatctga

SEQ ID NO: 260335 - DNA, 457 bp, Glycine max
  unsure (1)..(457): unsure at all n locations
cccacgcgtccgcccacgcgtccgtctcggggagaatcacccagaaagagttatctaaaagctgttaaaaaagtggcaaagacagagaaagatgctcaaataagacttcaactttatgagccatctgaatttcatgtggtgaacccattgaagaagacaagggtagggaaccccgttgggtacaaattggttcccggtgccacagcagctagcctgctggatccagaagatccaccacagaaaagagcagcttttaccaacaaccaattatgggtcactccttacaacaaaagtgagcaatgggctggtggcttatttgtttaccagagcanaggcgatgatactcttcaagtctggtccaacagggatcgtccaattgagaataaagacattgtgttgtggtacacaatagggttccatcatataccctgtcaagaggactaccctatcatgccta

SEQ ID NO: 260336 - DNA, 337 bp, Glycine max
  unsure (1)..(337): unsure at all n locations
cccacgcgtccgaattcccaccgcaaggtaaaaaaaaaaaaaaaaaaccagtggtgcgcgatgccaccgaagttcgatcccttgcaggtggtggacgtgttcgtccgagtcaccggcggcgaggtcggcgcggcgagttccctcgctccaaagatcggtccattgggtctctccccaaagaagatcggagaagacattgcgaaggaaaccgcgaaggactggaagggcctccgcgtgacggtgaagctgacagtacagaaccggcaggcgaaggtgacggtggtgccctccgccgccgcgcttgtcatcaaggcgctgaangagcctganagggaca

SEQ ID NO: 260337 - DNA, 445 bp, Glycine max
  unsure (1)..(445): unsure at all n locations
aaagagttctttcaaaatgcaaacagccttaaccttcgctgcccccaacgttgtgccattggcacccacaaagagtgtctcccatattaccatctttcccaccaaattgaaagccccgcgctcctcacctcgttactctccgattagggttgcaaccgtggagcccgacacttcaactgtcgactacaactctgcgttctcagtgtttcctgcagaagcatgcgaaactgtaggaggggaagcctgcatggcggagatgtaccctgaaacgaagctacagccagaggctaagactccacgagtcgttacagagaacgttgagagagagtatctngaatacgatgatcctaaaacggtatttcgaggagaggcttgtgatgatcttggaagaactntctgtgagaccgagtatcanaagggtgtctactagagaaatgtgaaaacc

SEQ ID NO: 260338 - DNA, 362 bp, Glycine max
accaaggcaccatgtaaaagctgcttgaaggatgctaacatctctatcaaggatgttgatgaggttcttcttgttggagggatgactcgagttcctaaagtccaagaggtggtttcagagatctttggaaagtctcctagcaaaggagtaaaccctgatgaggcagttgccatgggggcagcaatccaaggtggtattctacggggggatgttaaagagctactactcctagatgtaacaccactctctctcggtattgagactttgggtggtatctttacaagattgatcaaccgcaacactactattcctactaggaagagtcaggtcttttcaacggagctgacaatcaaactcaggta

SEQ ID NO: 260339 - DNA, 425 bp, Glycine max
gaaaaggtatagacatctggctgcaatttaagtatgttgctgcactaaccatccactactctgacatcccaatagccccaaaagactgcttgtttatatatatatatatatatacatatatatatatatttatttatttgaatttcacaataacatacctcataccttgtagttgggctttgtgaagggttttggttttctgtttgggaggctggcagcacagctgcctttgtatggttatcatcagtacccctggtactgtagcttctcttattaataaatatatatattttctgccttccaaaaaaaataaaaaaatctaataataaaatattttattaaatactaaatttataaaggaaaaaaaaggaaaatttccacaaaataaataataattatggtaatggtgaaaggcaaaattaata

SEQ ID NO: 260340 - DNA, 443 bp, Glycine max
gtgatatcctcatttgagcaagctgctggaataggctcagcaagaacgtacactgcgcttgcggtgcaaacaatttcgaagcaatttcggtgtttgaaggatgcaataacggggcaaatcagagctgcaaacaagagtttgggagaagaggattgttttggtgctaaaattgaaggatctaggctcaaatatgtggaccatcatctaaggcaacagagggctattcagcaactgggaatgatccatcacaatgcttggagaccccagagaggattgccagagagatcggtttctgttctgcgtgcttggctctttgaacactttcttcatccttaccccaaggactcagacaagcacatgcttgctaaacaaacagggcttaccaggagccaggtttcaaattggttcattaatgctagagttcggctttggaagccaatggt

SEQ ID NO: 260341 - DNA, 440 bp, Glycine max
ctcggaggacacaaggccagccaccggaagctcgccggagaaaaccacccgacctcctccgccgtgacgacgagttcggcgtcgaacggtggtggtaggacccacgagtgctccatctgccacaagacgttttcgacaggacaggccttgggaggacacaaacgttgtcactacgaaggcggtaacagcgccgtaaccgcctctgagggagtggggtccactcacacaggaagccaccgcgatttcgatctcaacctcccggcttttccggacttctcagcaaggttcttcgtcgatgacgaggttaccagtcctcatccatccaagaagtcccgtttcaatttgaccatacccaagattgaaatccctcaatactgatccatagatccaaaaaaattattcagtgtttttttatatatttttttaagttatttgggatt

SEQ ID NO: 260342 - DNA, 431 bp, Glycine max
  unsure (1)..(431): unsure at all n locations
cccacgcgtccgcacaaatattgcagcctatgctacaagagcttggcaaacaaaatgcccatcgaatgagattgattcgagaccatcaagctgacttccttcgcctgataaatgaacctgcagaaggtgctgaagggaacatattggggcagatggcttctgcgatgccacaagcagtaaccgtcactcctgaggagcggcaggcaattgaacgtcttgaagcaatgggttttgatcgtgcaatcgtattggaggtgtacttcgcttgtaacananatgaggaattggctgccaactaccttttggatcacatgcatgagttcgaggaacaatagatctcctttcgaatttgccaaattatttcgtgtcatcttttttctcgatgggtctttgntacatactatgtttaatgaggtaatgcttttgataat

SEQ ID NO: 260343 - DNA, 416 bp, Glycine max
cccacgcgtccggcaattttcgggatcctgagagcaatgctgattttgaggttcaggagaaggtgtctctgctggagtggtttgcaaatgaatacaaacggtttggttgcactcttgagtttgttaccaataaatcacaagaaggttcacagttttgcagaggtttcggtgggataggtgggatcttgcgttaccagcttgatatgcgatcatttgatgatttttctgatgatggaggcgtgtatgatgattctgaatagcaatcactgaaaaacttcctaccactggtgcaggaaaggggagccaagatacctgcaccaatatgggaagtggaaggtggtgcacctgctgcagctcctccttcttcatgtctgtctctggtgttgcatacagtgtttgaatgtgaatcgagatgc

SEQ ID NO: 260344 - DNA, 363 bp, Glycine max
cgagaggagaggagagaagagaggaagttttggggtttgaatctatagaatagaatcaaaccgaattgaaagaagatcgatcgatcgatcgatggctctggtcggagttgaagtgaagcatgcggcggagggcgcaccggaggagaattgctccgccaagcccaccaagcagggcgagggcctccgccactactattctcacaacatccacgagcatcagctccttctccgtcaaaagacgcataacctcaaccgtcttgaggctcagagaaacgagctcaattccagggtgaggatgctgcgcgaagaattacagcttttgcaggaaccaggctcttatgttggtgaagttgtcaaagtcat

SEQ ID NO: 260345 - DNA, 426 bp, Glycine max
gcggccaaggttgtgatgcatcagtactattggatgatacatcgagtttcacaggtgagaagacggcatgtgccaacgctgattcgattagaggctttcatgtaatagacaccataaaatccaccacggaaacctcataccctgatgttgtttcttgtgctgatatccttgctgtaacaactagagactccgacgttgctcttggtgtaactacttcgactgtacaattgcctagaagagacttctccacttgcagttcaagttgctctcactcacactctccacaaccctcttgaatgcatagggactattaaagcttccattatattgtgtatgttacaaccgagggattttgtatggctactgaatcactgatagtttcgaagtactgcttggtaagtatgaatacacatagcaatgcatatt

SEQ ID NO: 260346 - DNA, 419 bp, Glycine max
gccagatctatgacgtgtccaatggcaggaatttttatggtcccggaggaccatatgcaatggttgcaggaaaggaatgtagcagagcccttgcactcctgtcttttaaacctgatgacattaatgggaacctcgaaggtttaggtgaggaagagcttacaattttagaggactgggaatttaaattcatagaaaagtatccgaaagttggccagctcattgcagaacaaagaactcggcaaaatgagttcaaagaacaaactcaagacaatttggacaaccctaatgaatgcaaggaggaagaaaaatagtaaccattatattgtataggttacaaccgagggattttgtaaggctactgaatcactgatagtttcgaagtactgcttggtaagtatgaatacacatagcaatgcata

SEQ ID NO: 260347 - DNA, 446 bp, Glycine max
cccacgcgtccgcccacgcgtccgcgccagactgagaggaagagagagggagattctttgtttggtaccttctctcggaaaaatggttacgttcaggtttcaccagtaccaggtggttgggagggctcttcccacggaagcagatcagcaccccaagatctaccgaatgaagctctgggccaccaacgaggttcgcgccaagtccaagttctggtattttctgaggaaactgaaaaaggtgaagaagagcaatggccaagtgcttgccatcaacgagatttttgagaagaacccaaccaaaattaagaactatggtatatggttgcggtatcagagtaagactggttaccacaacatgtacaaggagtaccgtgacaccactctaaacggtgcagttgaggcaatgtacaatgaaatggcttctcgtcacagggtcaggagccctt

SEQ ID NO: 260348 - DNA, 457 bp, Glycine max
ggcctgttcagtgatggcatctgtggccctcaaacctgcccctttcactgttgagaagtcctcagttagaggccttccctccctctcaaggaactcctcttcattcagagttgtggccagtggtggcaagaagatcaagactgacaagccttatggaattaatggtggcatggctttgagggaaggagttgatgcatctggcaggaaaggaaagggaaagggcgtttaccagtttgtagacaaatacggtgctaatgtcgatggttacagtcctatctacgacaccaaggactggtctccaaccggtgatgtctacgctggcggtacgactggcttggctatctgggctgtgactctacttggtcttcttgctggtggtgcacttcttgtctacaacacaagtgctttggcgcaataaactttgcaaatcgatgttttaagctcaaacttagtccat

SEQ ID NO: 260349 - DNA, 433 bp, Glycine max
caacagtgggagggagatccaaaaagagagagtggaaaagatggcgcggttgatcacagtggtgtggtgcgcggtggcggtgctattatgcgccgcggccggtgcgtcgtgggtggaggaggcggctaacccgatacgaatggtgtatggcgtggaggcggaggtggttcaggtgatcggcgagtgccggcgtgcgttgaagttcgctaggttcgtgagcaggttcgacaagagttaccaaagcgaggcagagatgaaggacaggtactagatcttctcgcagaatctcacgtctatccgatcccacaacatgaagcgtttgccctatactctatctggtatcattttgctgattggacttgggaggacttcaaaagactcagacttggagctgtccaaaattgctctgtcactcttaacggtaaccacaggc

SEQ ID NO: 260350 - DNA, 456 bp, Glycine max
  unsure (1)..(456): unsure at all n locations
cccacgcgtccgcccacgcgtccgcttctctctttcaccaatcaacacaaactaagtgcttccgtctgttgaaagcgatagcaatggccacgaatccaatcgaagcggggaacggcgacgctgctcccaaccctaacgcgactaccaaatcctccgtgtacctgcaagactcggaggagctgaagcgagtcttcagccgcttcgacgccaacggcgacggcaagatctccgtctcggagttggacaacgtcctccgctccctcggatccggcgtcccgccggaggagctccagcgtgtcatggaagaccttgacaccgatcacgacggcttcattaacctctcggagttcgccgncttctggcggttcgacaacggggacggcggcgacaccgaagctcacgatgccttaaacctgtacgatcaggacaagaacggnctcatatccgncacggagc

SEQ ID NO: 260351 - DNA, 401 bp, Glycine max
aaacaagcccttatcacaactctatctaacaaattacataggacaggcccaaaaccaaaagaagcttctttgtctctcgtgccgattctccaccactattcccttcaccccaatcacactttccggtagttgttgctattagtgtagaagatgagtacgctggatgcaacaagggctgaacttggtcttcttgttttatatttgggcaaggctgaagcaagggacaaaatatgcagggcaatacaatatggttccaaatttttgagtaatggggaacctggtactgctcaaaatgtagaccaaacaaccagcttggcacgaaaaggcttccggctctttaagtttggcaatgacctacatgctttgataagtccaacaccacaggggacaccccttcccct

SEQ ID NO: 260352 - DNA, 408 bp, Glycine max
acgggccaaaatcgtgacatcttcatgtacagagggaacacaccattttgtagcaaagagtgcggacaggagcaaatagagattgatgaggcaaaggagaaaagttggaagctttcttccaaaaggggtgtgagacaatcagagaccaatcaaaattccacacccaataaggctgtaagaacaggcacagttgcagtggcctaatcataatcaaacaaagaataatcatgacatgatgatgatgatgaatggggaaagggtccaatttttgaagtaaaaaaaagattgaatattggaaatggaaaaattccaaaggaagaaatgcaatcatgaataatccatgaagattctgataacccgggatgaatcttcaattcgctgcctttgtaaagaaaaaaaagtttggtt

SEQ ID NO: 260353 - DNA, 387 bp, Glycine max
acgcccacgcgtacgctatctctgactacctagtgctctacgtctatgcctctctctcaaaaatggatgcggttcgattctacggttttgttttgctgctgcctacgttccccccttctcataaacaacgcgtcttctcttctgcttcgtatctattcttggctttggctttgggtggattaaaggcctcacagcattcggtgcggcattttaatccatttattccaacaaggcttaatgaacctatggagtctaaaggtgggaaaaagaaatctagtaatggtcgtactcaatcattggtctacgaaacttccctctgataccgcattgaagaccttagaccaaacggtggaatcaagaaattcagatctgctgcttacttcaact

SEQ ID NO: 260354 - DNA, 439 bp, Glycine max
gcctgattattcttatcttacgagactatttcgggacctattcatccgagaaggggatcagtttgattatgtatttgattggactatgctgaagtatcctcaaattggatccagttctagagcccgaccaagtgggaaaccagtcataaaccccggacaatcaggagacagaatagaacggccttcagggggtttctcaggtgctgttgaggcatttgcaaggaggaatggctctggacttgttctgcaaagtgagcattctaggcataggtcttcagatgatgtgccatcttccaaagacgtgcaagctgattctgagaggcctcgcagctcttctcgtaatggcagttcttcaaaaaagcctgtcttgtcaagcagccggccaagctcttctggtgagccaagtgaaagccgtactagccgactggtcttaagcagt

SEQ ID NO: 260355 - DNA, 452 bp, Glycine max
cggacgcgtgggtgtttctgtctctgtgtttgcggctgaggattccgaacgagcgacctgtgttcgtttctcgcaaagtttaagtcatcatgggtaaggaaaagactcacatcaacattgtcgccattggacatgtcgactctgggaagtcaactaccactggtcatttgatctacaagcttggaggtattgacaagcgtgtgattgagaggttcgagaaggaggctgctgacatgaacaagaggtcattcaagtatgcctgggtgcttgacaagctcaaggctgagcgctaaagaagaatcaccattgatattgctttgaggaagtttgaaaccaccaagtactactgcacagtcatcgatgcccccggacatcgtgactttatcaagaacatgattactggtacctaccaggctgattgtgctgtctttatcattgacttcaccactggt

SEQ ID NO: 260356 - DNA, 426 bp, Glycine max
cccacgcgtccgggaagaccggaatagccaaccaaacccgtcgtcgtctagttatctatctccgccaccagcgaaaaccccaaaaccctagaattcaagaatcgaaagcaatggacttcgacgagtacgattacttggagaaaacagtggaggagcaagaggaccacgacagcagcagggagaagagggagaaggagaaagagaaggagaaggagagggaaagagaaagaagggagagggaacgggaacgggaagagagagagaggtctcggaggagtaggagtcgttccgagagagaaagagaaagagaacgggatttcgacaccagagatagcaggagatttagggacaaaaaagaggcagcggagcccgaggcagatccagaaagggatcagagaactgtttttgttaccagatgcccttaag

SEQ ID NO: 260357 - DNA, 383 bp, Glycine max
acgaaaaacaaaataaataaaaaaaaactataaaaaaaaaaataaagataaaaaaaaataaaaagcggaagggaagaacagaatcaacggattagaaaaaaatagaacaaaagaaaaccggagggcctctttaaagaaaccatgctgaactcgctgccgttcacgaccctagcattaccatagagtacctgacatacatgttaatgtacgacattttacatggacactatggaaaaccatgcataccaatttaatacattgtataaatcccgatttgccaagctgtattattagacacaaggcccctgccgatagcccttgccaaaaaattggaaccctcattggcgaatgggaccccccctttatcggcgcattaaacccgg

SEQ ID NO: 260358 - DNA, 319 bp, Glycine max
ttcccgttcgaccacgcgtacgcgaaatcttaagcttgcagattttggactgacacgatcattttctaatgaccaaaatgcaggtctgagtaatcgtgtcattacgttatggtacacaccacctgagttgctgataggaacaacaaattttgtgccagctgaggatatgtaggtctgttgggtgcattttggctgagcttgttcaaggaaagcctattttaccgggaaaagacaagcagaaccaataaattaaactttttgactgattttaagagccgaaggaattgcatggccttgtgatctcaagaatccctattat

SEQ ID NO: 260359 - DNA, 351 bp, Glycine max
acgcaacttctgctacttcctactccaaccgcacttctgctccgcaattatcatggggaaggtgaagatcggaatcaacggatttggaagaattggccgtttggtagccagagtggctctgcagagagacgatgttgaactcgttgccgttaacgaccctttcatcaccaccgattacatgacatacatgtttaaatacgacagtgttcatggacactggaagcatcacgatgtcaccgttaaggacgagaagacccttctcttcggtgacaagccagtcactatttttggacacagaaaccctgaagagatcccatggtggtcaactggagctgacatcattgatgagtc

SEQ ID NO: 260360 - DNA, 452 bp, Glycine max
gtggtgtacttggttgatgcttatgacaaggagagatttgctgagtcaaaaaaagagctggatgctctactctctgatgaatctttagccagtgtcccttttcttgtccttgggaacaagatagatattccatatgctgcctcagaagaagaattgcgctaccatttgggcctgactaacttcaccacaggcaagggtaaggtaaacttggccgactcaaatgtccgtcccatggaggtattcatgtgcagtattgtgaagaaaatgggttatggggatggtttcaaatgggtttcccagtacatcaaatagtcccttagcaagagatggcttggtaactcatttctagaagtttgtttctctagttgagatttggaggtgttgttgggacaaaattgctgttaaagaaattgcagtatatttcaacttttatttatataaaatgactggga

SEQ ID NO: 260361 - DNA, 223 bp, Glycine max
acgcatccattgaataatgaaaagccagaaaaaactggactcaaattcaaaatcacgagcttgagaggtgaaaggaccaattgattatgtccctgaaatgtttgatgagctgaaggatcaagtaacagtggagcagattttgcaggttgtttttcttgatccagagcgtaactgtcctgctttggaaaaactgaagcttcagctggttgaggctgatgctgct

SEQ ID NO: 260362 - DNA, 462 bp, Glycine max
cccacgcgtccgttcaccggtaccctttggctgtaaggccattctatacaatgcgttgctgcgacaatcctgcatacagcaactcgtttgatgtctttattcgaggtgaggagataatttcaggagctcagcgtgttcatgtgccagaatttttggaacaacgtgcagcagcttgtggcatcgatgtcaaaacaatatctacatacattgattctttcagatatggggcaccaccacatggtggctttggagtaaggttggagcgtgtagtgatgctcttctggggcctgaataacattcggaaaacatcactcttttctcgggacccacttaagattgcgccatgataaaatcatattccaacaggtaattgctcaaatatttagcctttacaatttttttatggtgaatcctgaaaacattatttaaattcctagccttggagcttatacccaccgtgat

SEQ ID NO: 260363 - DNA, 460 bp, Glycine max
ccgggctacgacctcacgcgtccgtgcttgcttgagttgacaactttaagtctgtcaatttccgagctgcttggttgggtgcaatggcaagtgaacagttggctagagagtactaggtctgaatcacattggcagaggatgatggatacacgaaagatggaacagtcgattactgtggaaatacagctaatagaacggaaactggaacctggaaagcatgcccctatatcttaggaaacgaatggtgcgagagattggcttattatgggatgagcacaaacctggtgctttatttcaagaaccggctaaatcagcagtgctactgcttacaagaatgtctctaattggagtggaacttgctatatcacaccattgattggggcatattaggctgattcctaccttggcagatattggacaattgcttgtttttcaataatttatgctattggaatgacac

SEQ ID NO: 260364 - DNA, 454 bp, Glycine max
  unsure (1)..(454): unsure at all n locations
agaagtgttggatgcatttctatttctaactaattattgtgcttattattattgttgagaaagagaagaatggcaaagttaataaaattctttgagttgaacacaggggccaagattccttctgttgggttaggcacttggcaagctgagcctggtgttgtagccaaagctgtcaccacagccattctggttggatacaggcatattgattgtgctcaagcgtataacaatcaagcagagattggttctgctcttaagaagctntttgatgatggtgtggtgaagcgtgaggacttatggatcaccttcaaactctggtgttcagatcatgcttcagaagatgtgcccaaagcattggataaaacattgcacgatttgcaacttgattaccttgacctctatctgatccactggccagtgcgcatgaaaagcggatcagttggattcaagaagg

SEQ ID NO: 260365 - DNA, 439 bp, Glycine max
ttgagggtttatttgatctacggaaaatagccagggctacatcaggattcgttggtgctgatgtggcggctctggttgacaaggctggtaatcttgctatgaagagaataattgatgaaaggaaacgtgaattatctcaagatctcacgagtgagcatgctgaagactggtggagggaaccttggtcggttgaagaaataaacaagcttgccatcaaaatgtccgatttcgaggaagcagctaataaggtgcaaccttcattaagaagagaaggttctctttcattcctaaatgtaaatgggacgacgtttgaaggcttgatcctttaagaaaagaagttgaacgttacattggtagacgtattaaatatcctgaagattatgaagagcttggggtggatctcgagacaggatttttgctttatggacctcctgggtgt

SEQ ID NO: 260366 - DNA, 226 bp, Glycine max
acgattacacaaagcacgggccttgtaaattttcttgatgaacaatgggacgtacattgttcaggatagccaaatatagagaattgtgaacccttttgggatactattggatcagataacacgctgcacaagtcaggcaatttcatgtgcactatccacgaagctcgtgtaattagctattacggcttctgaagttgcatcgtgctggttgaatgctccatattaa

SEQ ID NO: 260367 - DNA, 197 bp, Glycine max
acgctttctccgacaacagggcagacaacgtgattcgctcttatcttcaaatcaacgacagaagcgacggacgataataggagtgagagaagatggcgttcgcgttcatgaagctgctcaacaggatgcttgcgaagaatgaaatgatgatcctgatggatggtctcgatgctgcaggtatgacaaccatctggtac

SEQ ID NO: 260368 - DNA, 341 bp, Glycine max
acgcgatcagaaatgttatcagaaacattggccatccctgcactactccttgtaatactcattgtgatgctatcctctgtcttgttccatcttcaagatgaaagaacaaatccaccaggtcctaaacccctcccaattattggtaaccttcacatgctggggaaactcccacatcggtcccttaaagccctttaccaaacattatgtacccataatgctcataaaagttgggacatgtcccaaccgctgtagtttacatccctgaaactgcagagctattcctcaaaacccatgacactatcgttgctagcaggccaaaaactctagcttcagaatacatg

SEQ ID NO: 260369 - DNA, 326 bp, Glycine max
tggaacaaacgatgctcccgcactacatgaggccgatattggtcttgcaatgggtgtccaaggtacagaagttgctaaagagagctctgatatcattattttggatgacaattttgcttcagttgtgaaggttgtcaaatgggggcggtctgtatatccaaatattagaaaattatccaagtttaacttaacattaattataaccacaattggtataaatggtagtggttcatttaacaacggtgaccttccactaaatacagtacaagttctttgggttaatcttattatggatactcttggagcattaaccttggcaactgaac

SEQ ID NO: 260370 - DNA, 386 bp, Glycine max
  unsure (1)..(386): unsure at all n locations
tcgcggacgcctgggcggacgcgtgggtaaacagtgacgatgaaagcaatgacagcagcgacaacgtttgatgtctctgccgcttgcttccgtgcccctccttcttgttcaccgaatccatgccacaccagttgttcagctataaactgcctgaatccttacatgggacgacggataaccgttgctggtacacctaagtttcaagcttccgagggaagcatctctgcacgggaatctggaggctgttagagtcccaacttcagtgcctgtgcgtgtagcatacgaacttcttctagctggtcatcgatatttggatgtaaggactccagacgagttcaatgctggacacgctcctggcgcaattaacatnacctatatgttcagag

SEQ ID NO: 260371 - DNA, 373 bp, Glycine max
cccacgcgttcgcgcttacgctgcaaactctgataaaatctctctagactacgcgctgttcaaggaaaaccctgtcgtggatgattcgggtaatggtttaaaatacaccaacttgttcgacgctcaaatcgacgccgtttttgctgccatgtcagcagtcaaatacgacgacgttaagattgcagtttcggaaactggttggccttctgctgaggactctaatgagattggagccagccccgacaatgcggcgtcgtataacggaaacttggttaagcgcatcttgagtgggagtgggacacccttgaagctcaatgagtcactcgacgttctcctctatgcgcttttcaatgagaaccagaaaacgggtccc

SEQ ID NO: 260372 - DNA, 441 bp, Glycine max
cggacgcgtgggagcgagtccacagcgtggaggagttcgagtcggcgctcgaatccgccaaagacaggcttgtggtggtggaatacgctgccagcgacagcgaggagagcagccagatataccctttcatggtggagctgagccgcagctgcaacgacgtggagttcatcctggtgatgggcgacgagtcggagaagacgaaggagctcctgaagcgggagaaggtggagaatgtgcctcacttcagcttctacaagagcaaggagaagatacacgaagaggaagggattggtcccgacatgctggtaggggatgggctatactacggggacaaccactctggtgtggtgcaactgcacaacgtggaggacgtgcagaagctcatagaggaccacaagctggatcacaagctcatcgtgctcgatgtgggtctcaaacatt

SEQ ID NO: 260373 - DNA, 453 bp, Glycine max
tgtcatcatccgcagctgctgttattcgcaccgcaaacaaacagtgagccatggccgtcggagagaacaagcgcatctccaaagggaaaaagggtggcaagaagaaggcagctgatccctttgccaagaaggattggtatgacattaaggccccttctctttttcaagtgaaaaatgttggcaaaaccctcgtctctcgtacgcagggtaccaagattgcttctgaaggacttaaacatagagtgtttgaggtctccttggctgatcttcaaggggatgaggatcatgcattcaagaagattacgttgagagctgaagatgtgcaagggaaagaatgtcctgaacaatttctggggaatggatttcacaactgacaagcttgagtcattggtgcgaaaatggcaaactctaattgaagcccatgtggatgtgaagacaactgattactacaca

SEQ ID NO: 260374 - DNA, 229 bp, Glycine max
acgggcgaagaaaatcacgctgaagagttcggacggcgaggctttcgaggtggaggaggccgtggcgctggagtcgcatacgataaagcacatgatcgaggacgactgcgccgacagcggcatccctctgccgaacgtgacgagcaagatcctggctaacgttatcgagtactgcatgaacaccgtcgaggcccccaatcccgaagacatgccctacgaggacgatctc

SEQ ID NO: 260375 - DNA, 413 bp, Glycine max
acgcggacgcgtgggtcagaattctctaaaagagatctttttctgctctttgaagaaagaaggggctttgcttgattttagagatgtctctgctctcagatctcatcaaccttaacctctccgataccaccgaaaaaggtatcccaaaagtccatatgatccgtggatcccgaattgaccctaagaaccaaacaaggacttttccaagaccaagtagccacccttcatagcttccccagtggaactattaagggtccaacacaagtcaagctcctggtgaatacagtgaagcgaatttatacccacaagccattttcaaggatccattcccaaggggtaacaatatcctggatatctgagaagcctacactcctgattgaaaacctattcccacttacaagaggcccgcttct

SEQ ID NO: 260376 - DNA, 427 bp, Glycine max
acgcccacgcgtacgattccattatctctgagtatttccctacctctcccttcaagatgcacatcttcgtcaagaccctcaccggcaagaccataacccttgacgcgtaaagctttgacaccatcgacaacgtcaaggccaagatccaggacaaggaaggaatccccccggaccagcaacgtctcattatcgccggaaagcaacttgaggacgggcgcactcttgctgactacaacattcagaaggagagtactcttcacctcgtcctccgtctccatagtggcatgcagatcttcgataagacactcaccggcaagaccataaccctagaggttgaaagctccgacaccatcgataacgtcaaggcccagatccaggacaaggatggtattcccccggaccagcaacgtctcatcttcgccggaaa

SEQ ID NO: 260377 - DNA, 320 bp, Glycine max
acgcgttaaagctcatagatacctggaggatgttttggcccacatacaggccatccctttccgaggcttgtgtggcggagttgggaggacagcctaggctaagagcagacactccaatggtcaaggactctggaccgtcaaatcaggtaagttcatcctagatttgctgacgaacgctgagagtaatgctgaagtaaaaggttcggatgtcgatgctatgtacatttgccatgtccaggttaatcaaccccatatgcaaaggcgtccaacctccaaagctcatggagaattcaaccctaacttgtattttcaataccaaa

SEQ ID NO: 260378 - DNA, 391 bp, Glycine max
ggagaaactgcgaaaatggcatcggagtcaggtcaaagtcccaatccttcttggtttacgggcaaaaggcttcttatgatattttgtctcattaacatgctaaactatgtggatcgaggagctatagccagtaacggtgtcaatggaagtcttgcaacttgcactgactctggaatttgtacaggtggcagtggaattcatggggaatttaacttgaacaattttcaaaatggagtcctggcatctggctttaatggtggaacctctaatggcttcccaatatttggttattttggccaaaggtaccattcatttcggcttaatggtggtggaatggctggttggaccttaacgataactggatgtgggaggtcggtccaattttgggcta

SEQ ID NO: 260379 - DNA, 462 bp, Glycine max
acggttggttctaaggttagttgtgcttgctgtggctgttgtgaacacagtgcaatggaatggagaaggcacgcgtgtagggttctattcgagcacatgtccacgtgccgagtccattgtcaggtccacagtggaatcccaccttaggtcagaccctactttagctggtccaatacttaggatgcacttccatgattgctttgtgcgaagttgtgacgcttctgttctcataaccggtgctggcactgagagaacagcggggccaaaccttagtttgagaggatttgatgtcattgacgatgctaaggctaagatcgaagctctgtgccctggtgttgtctcttgtgctgatatccttagccttgctgctcgtgattctgtagttctgagtggtggactaagttggcaagtgcccacaagacgcaaagatggaagggtttcaattggatcagaagccttaac

SEQ ID NO: 260380 - DNA, 454 bp, Glycine max
aaagcattgaattcaaaaacttaagttcattccttgtgttatgctttcttcctcaggacggagacatgtcgaacacatgcggcaactgcgactgcgctgacaagactagctgcaccaagggaaacagctatggtgttattggagagactgaaaagaagtacctcgagaactggtggcatggatgttccaacagctgagcatgaagggaagtgcaagggcggcactaactggacttgcacggactggaactggggccattaaagaatatgtatgaaaatgtaattgccatgtgtttggcaataccaatatcccaatgatgtaaacctcggatgagataaatgtgtgtgctgttattctactctaaggctgtgtagtcatgcagactgaatcatttcaaggtcctggcttagataatataacacccatggttgaggcattctatggatcattagac

SEQ ID NO: 260381 - DNA, 422 bp, Glycine max
gatgggatgaaacatcaaacataccacgtcctgagagagtttcacaatggaagatagagcctgctcttgctcctcttgctctgaatcctctaccaatgcccaggcctaaaaggcctcgatctaatgtggttccatcatccccagattcctcggttcttactcgtgaaggtatggataggttgcttttaaatatttgatatttatttgagtctcatctttgcttaacatatgtaattatgtgaagcctgatctgatatcggagattcacagcttctaaaggtagcgtagatcctttgccaacaagtgggtttcaaagggtcttgcaaggtcaagaactttcgaccttgagaggtaatcttgcttgaagccacgaatcttatacggcagataagtactgtgtgtggccacctgccacggatgat

SEQ ID NO: 260382 - DNA, 437 bp, Glycine max
  unsure (1)..(437): unsure at all n locations
cccacgcgtacgtttctctctctagaattctcagatttgcggggcgagatgatgcagcagccaggacccggcatggcacctcccaccatgggccagcagccgccgcaacagtaccagcagcctccgccgcagcagcagcaaccctacgtcatgatgccgncgcaggcccaggccccgcaggccatgtgggccccctccgcccagcctccgcctcagcagcagcccgccagcgccgacgaggtccgaaccctctggatcggngatctgcagtactggatggacgagaactatctctatacctgctntgctcacaccggcgaggttacatcggttaaaagaattcgaaacaagcaaactagtcaatctgaaggttatgggtttattgagtttaatagtcgtgctggagctgagagaattcttcaaacatataatggggc

SEQ ID NO: 260383 - DNA, 419 bp, Glycine max
aacatctttctctctccgaacagatcacactatggccacctcaagcgccaaatcagtccgtgatttgaccgttaaagatgccaagggaaatgatattaatcttggtgactacaaaggaaaggtccttatcattgtcaatgttgcctcacaatgtggcttgactaattcaaattacactgagctcaatcagttgtatgagaaatacaaacagaaaggtctggaaattctggcatttccatgcaatcagtttggggcacaagaacctggatctaatgaacagataccagaatttggttggactcgcttcaaggcttaatttcccggttttgacaaggttgatgtgaatggtgacaaagctgcttcactgtacaagtatctaaaatcaagcaaaagtggactctttggggatgggatcaaat

SEQ ID NO: 260384 - DNA, 416 bp, Glycine max
tccacgcgtccgctctgccgcatccgcgggaagatgcacaagaaggtgtggatcggcgccggagacatcatcctggttggactcagggactaccaggacgacaaggctgacgtcatcctcaagtacatgcccgacgaggccaggctcctcaaggcctacggcgagctccccgataccactcgccttaacgagggcatcggcgccagcttggacgaggaggacgacgccaccgccaacgactacatcgagttcgaggatgaggatattgataaaatctaatccctctctcgccctcaattatcattcatataatatcatcatcatatctggctctagcaatatttcgttatctgcttgtctgcaactctgcgggttggatttcggtttataattgtgcactattatttcaataaccc

SEQ ID NO: 260385 - DNA, 453 bp, Glycine max
ggatcttggccgacacttctatggcagttcacgttagcctgcatcaagatgggaaggcctgatttggcacaaaaagcagttgattcagcagagaaaaggctttcagcggatagatggcccgaatattatgatacccggaacggaaggtttattgggaagcaatcacggttgatgcagacatggaccattgctggtttcgtgacctcaaagatgcttctagagaatccagaaaaggcatccttgttgttttgggaagaggattttgaacttcttcagaactgtgtctgcaagctaagcaaaagtggtagaaggaagtgttcccgttttgctgcaaggtctcagtttattgtttaatagggaggaacagagagtcattgtttgaactcttgagtaatgtaggtgaactaatttattacaataataactgattgatgccacttttcagaattaatc

SEQ ID NO: 260386 - DNA, 451 bp, Glycine max
  unsure (1)..(451): unsure at all n locations
cccacgcgtccgcatacatatgttctagatactatagagcacctgagctcatatttggcgcagctgaatatacttcagccattgacatctggtctgttggatgtgttttagctgagctgctgcttggacagcctctgttccctggtgagagtggagttgatcaacttgttgagatcatcaaggttctgggcactccaacaagggaagagattaagtgcatgaaccctaattatacagaatttaaattcccacagattaaagcacatccatggcacaagatcttccataagcgcatgcctncaaaggcttgtgatttggtatcaagactactacaatacttccctaacttgcggtgcacaacttttgatgccttgacgcattctttcttcgacgagcttcgtgatccaaatactcgcttgccaaatggccgattcctttcaccactatttaa

SEQ ID NO: 260387 - DNA, 386 bp, Glycine max
cccacgcgtccggttttacaaaagaataaaccgagtattcttcattgatgcaattcccaagtcgccgtcaggcaaaatcttgcgcaaggatctaagagcaaagatagcggcaagtgttccaaaatgaaattaaaccaaacccatcatgttatggtgttattatacgatgcccgcataagcaagcttcaacacaaaaggaagaggcgctgttgcttgatcccgctagcttttacgtattttctcttacgtaacaaccgtgtataagttaccagtgtgattttcttacagaactatcttctgtaaagatttcaatctgtcaaggactttcaccttctataatatcaaattatattctttttttataaaattatatttaattgcaaaaa

SEQ ID NO: 260388 - DNA, 220 bp, Glycine max
acgcccacgcgtgcgaaaaggttcacatcactattgcggttattggccatgttgactctggcaagtgcagtaccactggccacctgatctacaagcttgcaggcattgacacgcgtgttattgagagatctgagaaggaagctgctgagatgaacaagatgactttcaagtatgcctggatgattgataagcttaaggcttaccgtgaaaaaggaatcac

SEQ ID NO: 260389 - DNA, 401 bp, Glycine max
acgcccacgcgtccgggagattacaaagaggggtattatattggagttgaaaaaggtgaggatggtccacattcgaagaagcctttttatggaccgaataactggcccgcaccagatgttctgcccgggtggagggagaccatggaaaagttccatcaagagacattagaagtggggaaagcagttgcaaagatgatagcccttgcacttgatctggatgctaattattttgatcggccagaaattcttggagagccaattgcaattctgcgtttgctgcactatgaaggtcaagtttcagatccctcgaaaggattatatggagctggagcttataccgactttggtttaattacactgttagcaacagatgatgtcccaagtcttcaaatatgccaaga

SEQ ID NO: 260390 - DNA, 184 bp, Glycine max
acgaaagggatgccttgcgcggcactgctgcaatcaatctcactgataggcttcaccaggttctgtcgtgggcaaccggtgcagttgaaatcttctttacgcgcaacaatgctctttgagccagctgtacattgacatatctgcagaggattgcataccttgatgttggaatctatccatgcac

SEQ ID NO: 260391 - DNA, 459 bp, Glycine max
  unsure (1)..(459): unsure at all n locations
gacggcacgcgtccggccacgcgtccgcgtgtattcatttggagttttgcttgttgaacttgtcacaggaagacgccggattgagccaaaatttgaactcagggagcgaatcacggcaagatgggctatgaagaggttcattgagggagatgctatctcagtcttggacccaagactggaccagattgctgcaaatactttagcactagaaaagatccttgagctagctttacagtgcttggctccacgtagacaaagtaggccaactatgaagagatgtgctgagatcctttggtccatccgcaaggatatcagagagcagctatccgcttcaaatttccgctcattttccacttcttcccaaagaagcacctcattgaaagagtgagaatngctaaagtgcaacactagcatcaaagaatgttaagttaggacaagccatggccttgggagagaaaa

SEQ ID NO: 260392 - DNA, 433 bp, Glycine max
aatgaataatgttggtctatagtgcgcacacatgctgatgctgtagattgacgaagaagcagtgggccaaccgcgataatctctacatattaatataatctttctcgtcacctgagagaaatagaaaatgtggagtcgcgcaagaacccttttccttcgcgtcctggaacctcctaatcacaacaacgcttcgctttcccaaacatttacccctggattctccttccacacgctctcgcacttccaggaggccctggtagtggaaaaggtacacaatgtgcaaaaattgttgaaacctttggatttaagcatctgagtgctggagatcttttgagaaaggaagatggttctgatagtgaatatggctcaatgaatatgaataccattagaggaagaaaaattggtccatcaagaatgactggcaaattgattc

SEQ ID NO: 260393 - DNA, 421 bp, Glycine max
  unsure (1)..(421): unsure at all n locations
cggcagaaaccctagtagtagttttgaaagggaaggaaagatgcagatattcgtgaaaaccctgaccgggaagacaatcacccttgaggtggagtcaagcgacaccattgacaatgtcaaagccaagattcaggacaaagaagggattcctccggatcagcagaggttgatcttcgccgggaaacagctggaggatggccgtaccctcgccgattacaacatccaaaaagagtcaacattgcatcttgttttgaggcttcgtggtggtattattgagccatctttgatggcactggcgaggaaatataaccaggataagatgatctgccgcaagtgctatgcccgtttacacccccgtgctgtgaactgcangaaaaagaagtgtggtcacagcaaccagttgaggccaaagaagaagatc

SEQ ID NO: 260394 - DNA, 357 bp, Glycine max
ctcacgcgtgcaggccagccaactttatttgttcactatccacctcttaggtggctcaaaaccaccccatgtcacgttgggccacatggcggacaaatatggtcccgtcttcaccttgcgtctgggtgctcacaaaacgttggttgtgagcaattgggaaatggccaaacagtgctttaccgtcaacgacaaagcgtttgctagccgtcctaaatcagtgtcctttgaattgttgggatacaactattccatgattgggttcatcccttacggttcttattggcgtcacgtgcgcaaaattatcacgctggagcttctctctactcactgcatagacatgctcaagcacgtgatggt

SEQ ID NO: 260395 - DNA, 424 bp, Glycine max
cccacgcgtccgcgctgctgccgaaacccttccggaaccctaaggtaagtgagtaatcagtggttgagaatggtggagaaggcgaagggtagaaaggaggaggtggttacacgtgagtacaccattaacctccacaagcgcctccatggctgcacatttaagaagaaagctcctaaagctattaaggagataaggaaatttgcccaaaaggccatggggaccaatgatgtgagggtggatgtgaagttgaacaagtttgtctggagccagggaatcaggagtgttccaaggaggattagagtaagaattgctcgcaagagaaatgatgatgaagatgccaaggaagagctgtactctcttgttaccgttgttgagatccctaaggacgagctcaaagggttaggcactaaggttatcgatgacg

SEQ ID NO: 260396 - DNA, 283 bp, Glycine max
aaggtgcaacctttccagtctcttgattttgctccatggccaaccaaggatttgatctccctttctacgaaaaaatttggttcaagcgaacatttcaaagagtgatggacaccttcattttagttctcctcctattgcttcttagttaccgaattttctcatccaacaacttcactttcccatggttccttgctttcttatgtgaatcttggttcaccttcacttggattgtgattctcaacgccaagtggagtcctgcagtaaccataacccacccagatcg

SEQ ID NO: 260397 - DNA, 434 bp, Glycine max
ccaagccttccttgaagaaccaacagaaggggtttggaaatggaaatccaagtaatggggaagagcggggttcttgtgggggggggaactgggtacatagggaggaggatagtgagggcaagcctggcactgggccatgagacctatgtggttcagaggccagagttgagcctccagatagagaagctgcagaggctcctctccttcaagaagcaaggtgctcatctcattgaggcctctttcaatgatcacaagagccttgttgatgctgtgaagcaggttgatgttgtcatcagtgccatctatggtgttcacatcaggagccacagcatcactctgcaactcaaacttgttgaggccatcaaagaagctgggaacgttaagcgtttcttgccttctgaaatttgcctagacccagcaaggatggggcatgc

SEQ ID NO: 260398 - DNA, 428 bp, Glycine max
  unsure (1)..(428): unsure at all n locations
gatttgccatggtagcctgttttagaactgtttctttaatttcagtgttgatagtatggataatagggaagaaaaggatcaatccaggtggagacactgacaaggttgaactggagtaaattcctgtcagctcttacagtggagttcatcctgaggttgacaaagaggctagcctagtggtattgttcccaaataaaacatatgaaatcaaggaccttaccatatttgaaatattaaaggccactgaaaatttcagtcaggcaaacataataggatgtgggggttttggtttggtttataaagcaacgttaccaaatggaactacagtggccatcaagaaactntcaggagatttgggtcttatggaaagggaatttaaagcagaggtggatgctttgtccacagcacagtatgaacatctggttgca

SEQ ID NO: 260399 - DNA, 455 bp, Glycine max
gggatttgctgttcgcatgaccaaggaaattagtgctcttgcacccagtaccatgaaaatcaagggggttgcacctcctgagagaaagtacagtgtctggattggtggttctatcttggcatcacttagcaccttccaacagatgtggatctccaagggtgaatatgatgaatctgggccagccatcgttcatcggaagtgcttctaaagttgggtcaagtcgagctggatggtgatcaagttcttcatgcacccagtcctgtgccatatttcagtaaagtttggttgacttatttggtatttgaagctttgggtttttaatagatatatctagtttaatgaatggatttgtaagttgagtatgttataagtttctccgttaggtcaccttggaagccagactttttatgcaattggcggatggtattggaaccttgtaggttctgcttggtttg

SEQ ID NO: 260400 - DNA, 479 bp, Glycine max
gaattcccggatttgggcatggttacctgggattcaatagtgataggggaccattgggcgccattaaagaaggcaggggtggctggggtgaccgatcattaaaagaggggcttaaaccacttaatcaggagatccatttgcttaagcagctttcacaatccaacattggtcaatactttgggagggatttgggagaagaaacactttcccgttatttggaatatgtctctggtggttctattcataaattacttcaggaatatggggccttcaaggagcctgttattcaaaattataccaggcagattgtctctggactttcctatcttcatgggagaaatacagtacataaggatatcaaaggggctaacatactagttgatcctaatggtgaaatcaagctggcagactttggaatggctaaacatataaattcttcttccttcatgcttttctttcaagggagtccatactggatg

SEQ ID NO: 260401 - DNA, 440 bp, Glycine max
  unsure (1)..(440): unsure at all n locations
ctttgtaatgacctgtgattcagcagttcagctgcggaaggccgggaaagtcactgtcagagaatcaaacttgaaaaaattaggtgctacccattttagaaccggcgtagcaaacgagcatttcgaggtgacaaagtttgcactgttggagaccataaaagaagctgtaccagaaatgtggtcaccggctatgaagaatgcatggggagaagcttatgatcagctggtcgatgccattaaatctgaaatgaaaccaccctcctcttagactccagtttaagcagntcctttccttccctctcaattctcaaattggtatattaataaaagtgagaaagtttaggcttgtgcttttattttgtgtgaatgtaatatactttgtgtacgtagacttggctattgngagttgctaggttgggaagtgtttcgcattcaacaat

SEQ ID NO: 260402 - DNA, 399 bp, Glycine max
gccacactttgtatttcactcgggactacgatcattgctacaagaatgaaagaaaggcggggggcctggcaacctatcacgtgccatatggagtgcacattcggggaagattcgatgcaaaattcgcaaaaatgcttgcaaaagatgcttcgaaatacgctgctgaactgcaacgtgagctccagaacgatatcaagcatgcattaaagcgcacattagaggccaagaaaaagtgcaatgaaaggtctattgcagggtttgatcctgccatcaatgacatcacaaagcacgtctgagtgtgtgcacctgtttcaccacctgttgctgatactaaagctgatatcaaatgccctgtcaacagaaagatggtcataaatactgtcaactatgcagttaact

SEQ ID NO: 260403 - DNA, 437 bp, Glycine max
ggccactcttcttcttcccacgctcctccttctcatacccttcgccaccctcgtctccgcccgccctcacctcgccggagactttctccgactgccctccgaaaccgataacgatgacaacgtccagggcacccgctgggccgtcctcctcgccggttccaatggctactggaattacagacatcaggctgatgtttgtcacgcctatcaaatactaaggaaaggtggcctgaaagaagaaaatattattgtttttatgtatgatgacattgcattcaatggggaaaacccaaggcctggagtcatcattaacaaaccagatggaagtgatgtttatgaaggagttccaaaggattacaccggcgaagatgttactggtggtaacttttttgctgctttacttgaaaacaagtcggcacttactggtggcagtggga

SEQ ID NO: 260404 - DNA, 449 bp, Glycine max
attttatccaattgaaattttaaaaatgactgggataaacttaagaattcaattattgaaattgaataagtaaacaatttaattggattggtcgaatggtatcaaaaaaatggagtactaactcccatttcttatttattattgaattaaccgatcaacttgctttgttatcgaacacttctttttgatttcaaaaattttccggaaaaaatttgaatctatttttatatgcgaatcaatcctactacttctggtcctgaggtttctgcgcttgaaaaaaaaaatctgggacgtatcgcccaaataattggtccggtactagatgtagcttttcccccaggtaagatgcctaatatttacaacgctctgatagttaagggtcgagatactgttggtcaacaaattaatgtgacttgtgaagtacagcaattattaggaaataatcgaat

SEQ ID NO: 260405 - DNA, 425 bp, Glycine max
cccacgcgtccgctcttctcccacctaaaaggataattccaggtgatgcatcgaggggccgtagtgatacattgctgtttgaagatgaattagagaaggcaagcaatgcacttcttgctcgagcgtggtcacccgggtggagcaatgctaacaaggcattgacaacattcataaatggtccactgattgagtactcaaaaaaccgcaggaaagcagacagtgccactacctcacttctctcaccccatttgcactttggtgagttgagtgtcaagaaggtcttccatctagtccgcatcaaacaagttttgtgggccaacgaaggaaacaaagctggtgaagagagcgtgaacttgttcctcaaatctataggtcttagagaatattcaaggtacattagtttcaaccatccctacagtcatgaa

SEQ ID NO: 260406 - DNA, 440 bp, Glycine max
aaaatggtggtttaattctatgttgtttaataggaagttagaatacaggtgtgaatgaaggaaatcaatggatagtcttggtcctattgaaaataccagtctaagggaagaccctaaaattttaaccgatatagaaaaaaaaattcacagggatttggattatttagaaatggaaggttttttttctagcgatctgaatactgtttctaagaatgatgatgatcattacatgtatgagactcaatttagttttaacaataatattactagtttcattgatagttgcattgagagtttcaatttaggtgatattgacaaatacaatgatatttatttttatagttacatttttttgaagggcagaaattgtagtgaaagcgataattctagtactagtataataactagtacgaatgatacaaatgatagtgattccacta

SEQ ID NO: 260407 - DNA, 383 bp, Glycine max
  unsure (1)..(383): unsure at all n locations
gtatttcttcatcggttgttcaagtaaatggccttcgtcaccactgctgaaatntntnatgcggaccgccagttaattttgagtggggaacttcttgcccttcagccagtttttcagatttacggtcgtcgacaggtcttctctggacctatagttaccttgaaggtgtttgaagacaatgttttggttcgtgagttccttgaagagaaaggcaatggaagagtgcttgttgttgatggaagcgcgagtttacgctgtgctatattgggtggcaaccctgtggtacaagctcaaaacaatggattggcaggtattgttgtgaatgggtgtattaaaaatgtggaataaatcaatggttggtgatattggaattgagaggccct

SEQ ID NO: 260408 - DNA, 279 bp, Glycine max
tgtacggcgtcgaaccggggaagaaagcctttttcgatctacagccacatcgttgaatcgaaggttatcaacgaccgtgagactggaaggtccagaggattccgatttgtgaccttcgcctcagagcagtcaatgaaagatgcgatcgcacgaatgaacggccaggaccttgacggtcgtaacatcactgtcaacgaagctcatacccgcgccagccgtggtggtggtggaggctgtggtttcagaagtagtggtggatacaaccgcggtagcggtgga

SEQ ID NO: 260409 - DNA, 232 bp, Glycine max
tccggttgatgctttcttgaaaccctatttcttggaggcttatcgtcctttcaaaaaaagaaatctattttttgtcccgggaggggttaaaaatgtaaaattcaaaggcatttaaacccatcctggggaggattgggttggtgctccaaacacttaaattttctgtgaaggggagcctttggaaaaaaaagatgaaaaaagactggaccaaatttggtattattatttgggt

SEQ ID NO: 260410 - DNA, 462 bp, Glycine max
tcggccacgcgttcggttggctggaagctttattaagtcgcaagcattttttaatcaatggtgggccttgattggttaccttaacatgggggttattaccatcaatggtattggctgaaaagaaatctggtgagaaagaaggagaagataaaggggttattggggccatcaaatccttatttgatcctaatgagaaaacaaagtctggaaaggtgttgccaaaagcttacttaaagtcagcaagagaagtagtgaaaacaatgcgtgaatctttaaacgaagtcactgatgataatgctaaatttagacggactgcagactcagcaaaggagtcaattcgggagtatttgggcagttggaggggaaatcagactgttgctcaagaagaatcatatgttattttggaaaaagtaatcagatctttggcaaacttttactcaaaggcagggccatcagctccac

SEQ ID NO: 260411 - DNA, 430 bp, Glycine max
attaccaacatcggttatttatataatcgatgttggtaattttacgttaacatcgggttggtaaaaaccgatgctaacaataatactatcaacgtcggtacttttaacatcggttcaaaaaccgatgttaaaagtcataaataatcgatgtagaaaacatattttctaatattcttgatttgattctactggttcccatggtcaccccaatcatcgatccaagtcaagactcaagcaaccctcttcaccttcatcattcagatgggtctggcctcgttctcacatctcaaccccttgatcataagaattacataacctagagcagagcaatgaaggtagtgctctttgtcaaggacaaaatagcattcattgatgacacccttctgaagcctgacgaagacgctcctacctatgctgcttggacgggtgc

SEQ ID NO: 260412 - DNA, 457 bp, Glycine max
cccacccgtccgtaataatcaaaccaggaggggggggatggtcctacatcctctagtagggggtgcggtggaggagatatacaacatggctatatctacatcagaaagaatggcatcagtctcgaaaaggattacccttaccgtggtgacgagggtaaatgtgactcaaataagaaaaatgctattgttactattgatggccacggatgggttcctacccaacttgaggaagccttgaaacagggcattgcaaatcagccagtggccgtacctattccagcagacgactatgaatttcaatattatacatcaggtgtattcaaagggaaatgcggtacagaattaaatcatgctctcctgcttgtggggtatggtacagaaaaagatggagattattggatagcaaagaattcatatagtgataaatggggagagaatggctatatcagaatacaaa

SEQ ID NO: 260413 - DNA, 447 bp, Glycine max
  unsure (1)..(447): unsure at all n locations
acggcgtcggccaacgcgtccgccaacccgtccggcaatttttttaactccacaaagttatttctgaattatgctgaaaatgaaatggtcaggattaaagcagatgagagaaaagccttgtaccttgtaaaagaagttacagagtactttcatgggaatgcaacaaaggaagaagcccaccctctcagaattttcatgattgtaagagactttctgaatatcttggatctagtgtgcaaagaagtggaaaagatgcactgatagaatcgttggtggttctggcagatccttccgaatacctccaaatgcatcattacctgttctcaacagatacaatcatccaaagcaggatagaagctcagatgaggagagctcatccccctagtgttgtgaatatgaaagataccatangctntcagactaacagtgaaagtaaatgaatgaatg

SEQ ID NO: 260414 - DNA, 409 bp, Glycine max
cgtttatttcaccggattgaacctgggcctttaaaagggtaccccttatattaatcatccttatatggtctataaaggggtaaagatatcccatggggatctatttggttagttttctatcgggatgtatataggtgaataatccaacatgcctttttgtgaagtaaaaaaactaccctcgatccatgcctcaaaagggttgataataagtaaaaaaaatcaatgaattcatgataaaacccttctgcgtttttttattataaatttttttgtcaataaagggatcaaggggttgggggatcaaatggtaaagttcttttgttggtaaattggaggattagaaacatgactattgctttccaattagctcgttctgcattaattgctatttcatttattttattgatta

SEQ ID NO: 260415 - DNA, 452 bp, Glycine max
  unsure (1)..(452): unsure at all n locations
tcggccaagccttcggttgctaccaacactgaacttaacccaaccttggcaaagttgattcgggaaaggtgattgaaattggccggttcggttagaactgaaggaaagggtcctgtgagaagaaagaagaagcttgtccacaggacaccaaccacagatgacaaaaggcttcagagcaccctgaagagaataggggtgaatgccatccctgctattgaagaggtcaatatctttaaggatgacgtagttatccagtttctaaatcccaaagttcaagcatccattgctgctaatacttgggttgtcagtggttcaccgcanacaaagaagttgcaggatatactccctagcattatccaccaattaggaccagataacttggaaaacctgaagaagctagccgagcaattccagaagcaggctcctgaaggggccgctggttcaaccacagc

SEQ ID NO: 260416 - DNA, 429 bp, Glycine max
  unsure (1)..(429): unsure at all n locations
gttgaatcgcgattgttctgtgcgagagaaagaagagagagatcgaaaatggcgttggctgtcgacgagttcggaaggccgttcataatcctgaaggagcaggagcagaagagcagactccgaggattggacgctcagaaagccaacatctccgccggcaaagccgtggctcgcatcctccgaacctccctcggccccaaaggcatggacaagatgctccagagccccgacggcgacgtcaccatcacgaacgatggagccacgatccttgaccagatggacgtggacaaccaaatcgcgaagctgatggtggagctctcgcggagccaggactacgaaatcggcgacggaaccaccggcgtcgtcgtcatggccggcgcgcttctcgagaaggccgagcgccttctcgagcggngaattcaccccatc

SEQ ID NO: 260417 - DNA, 442 bp, Glycine max
ccacgccttccggcaggtcttggtgattacttgggaggtaaaggccattcctgggttggggggaccagggttcctgagggtcaaccccttctccaagctggtgtccatactgttgttggcactcctgggcgagtgtttgacatgctgcggaagcagtctcttcgcccagattgcataaagatgtttgttttggatgaggctgatgaaatgctttcacgtggtttcaaggatcagatctatgacatcttccagctgctgccatccaaaattcaggttggagtgttctctgctacaatgccgccagaagcccttgaaattacaaggaagttcatgaataagccagtgagaatcctggtaaagcgtgatgaactgaccctggagggtataaagcagttttatgtcaatgttgacaaagaagagtggaagctggagacattatgtg

SEQ ID NO: 260418 - DNA, 426 bp, Glycine max
gcctggtgccgttggtgttgttttcggaacgaaaaaaaaaatggtgtcaggttctgaaatctgcgcaaagcgggtggtggtggacccccgccaccacatgctgggtcgtctagcctccatcgtggcgaaggagcttctgaacggccagaaagtggtggtcgttcgctgtgaagagatttgcatctcgggcgggctggtgaggcagaagatgaaatacttgaggttccttcgcaaacgcatgaacaccaaaccctcccatggccccatccacttccgtgccccctccaagatcttctggcgcaccgttcgtggaatgataccacacaagacaaagcgtggggaagctgctcttgctcgtttgaaggtttatgaaggaatccctcctccatatgacaagaccaagagaatggttgttcctgatgcact

SEQ ID NO: 260419 - DNA, 444 bp, Glycine max
  unsure (1)..(444): unsure at all n locations
gtttcgaaccgcatggtccactctgcttaactccgctcccacttcttctccttccttctctcggatcatcactcctcgtttcgctttcgctccaatcactcgcatctctctccgaaacggcgtccgtagcaaggcgatcgaagcagtgaagttggagaatggaaggccgagcgcgagcgagttcgtagtcagcggaagcggaaacgcaattccgagttacgtcgtggcgccaaacgcgcgtgttcaggatttggttaaccgaaacgacactcgcctccggatattctccggcactgccaatccggctcttgctcaggaaattgcatgctacctgggcctggagctaggaaaaattaagataaagcgttttgctgatggtgagatatatgtccagctgcaagagagtgtcagggggtgtgatgntgttcttgtgcagcccacatg

SEQ ID NO: 260420 - DNA, 462 bp, Glycine max
cttcgggcatgcagatctttgttaagacccttacccgccagactattaccctagaagtcgagagctgcgacgccattgacaaccgtaaggcttaaaatcaagaccagggaggtattcccccaaaacaacaaaagcttatctttcgccgccagcaacttcaaggccggcctacccttgcttcctccaccatcaaaaaggggtaactctcaacttggtgtgcgtcttcgtggtggtatgcagatcttcgtcaagacccctacggtaagactattaccctcgaggtggagagctccgacaccattgacaatgtgaaagcgaagatccaggacaaggaaggaatcccaccggaccagcagaggcttatttttgctggcaaacaactagaagatggaaagaccctcgctgactacaacatccaaaaagagtcaactcttcacttgggtgtgcgtcttcgtggggggt

SEQ ID NO: 260421 - DNA, 407 bp, Glycine max
gaaataatgtccgggatcatccacaagattgaggagaccctccatgtgggagggcacaagaaagaggagcacaaaggagaacaccatggtgagcacaaaggtgaacacaaaggagaacaccatggtgagcacaaaggtgaacacaaaggagaacaacaccatggggagcacaaggagggacttgtggataagatcaaggacaagatccatggtgatggccatgacaagggtgagaaaaagaagaagaaggacaagaagaagaaggagcatggacatgaccatcatggtcatagcagcagcagtgacagtgattagatcttatatgttaagcaggtgtacggtacgatggtagtgaggagccagaatccctcttcctgctttatgatataatacaaataaaatagcga

SEQ ID NO: 260422 - DNA, 407 bp, Glycine max
ggaaagttttcaaagccaagcaaatacgagctttacccaattttcttgctgttgaattttgcactgttcaatcttcaaaatcacatttttctcgatcttcaccttctgggttgctttttttttttctcttcttcttcttcttcttcttttgttttcgctatggaatcgaaaaacctgcgaggtttacgctggggaagcagtcgtcgcttgccccagaacgccataacaaagaagcagagctccaaaaagatggggaagctgttgatcagggtgtgaggttgatgtattcggcattcgaaggcgatgtggatggaattcgcgaggcgttggagtctggtgtgagtgtgaattacaaggatattgataatcgcactgctctttatgttgcggcgtgtgagggcttcact

SEQ ID NO: 260423 - DNA, 456 bp, Glycine max
gcaagtcgaaaagatcatctctccctctctctcacacatcccagccatgagcctgtgcggtataggcagaaaccagagaacattccgcccgaaaaaaagtactccttctggaagtaagggagctcaacttagaaaacatattgatgccacgttgggtagtggaaatctgagggaagcagtaaagctacctcctggggaggatttaaatgagtggctagctgtcaacactgttgatttcttcaaccaggtgaatctgctttatggtacccttacagagttctgtactcctgagaattgtcggacgatgtctgcaggacccaagtatgaatatagatgggcagatggtgtacaaattaagaaacctattgaggtttctgctccaaaatatgtagaatacctaatggactggattgaagcacagcttgatgatgaatccatattcccacagaagcttgg

SEQ ID NO: 260424 - DNA, 385 bp, Glycine max
  unsure (1)..(385): unsure at all n locations
aaaagcttgcagagatactgaaaaatagactcaaccaatatgttcaaggaaacaaagagggttttgttaatgatgcagaagctgaagtagcccggctatctaatgcagcttatggggttgatatgttgaataccattggctacatatacgcaaggcaggcagcaaaagagctagggaagaaagcaatttatttgggtgtgccttttattgctgagtggtttagaaacaaagggcactctattaaatctcaagttacagcagcaacaggggcaattgctttaatccaattgcaggaggatatgaaaaagcaactcagttcagaaggcgactatactgaagaagagctnngagatacatgcaaatcacaagaaataaatgatgacta

SEQ ID NO: 260425 - DNA, 411 bp, Glycine max
  unsure (1)..(411): unsure at all n locations
ctgtcactcaccgaccctccaccgcaacccatatataaataccacttttgaacccaaccaaacacgcgcgatcgcaatggccatggctcttcgcagactcaacaaacctttctccaacgccacttccatttatcgccagtcctcttcgctctccgctcacgaaaaacacaaatctcgcgccgattggataaagcagctcaacgatcctctcgaggccatcgatcccgagatcgccgacataatcgaactcgaaaaggcgcgtcaatggaaggggttcgaacttataccttcggaaaatttcacgtcgctgtcggtgatgcaagcagttggatcggtgatgacgaataaatacagtgaaggatatcctggtgctagatactatggaggaaacgaatacatngacatggctga

SEQ ID NO: 260426 - DNA, 436 bp, Glycine max
cttcctaccaaaaggcaccttctaacttgcttaagatctttttgcaaggaggccaaaaaaatatctggcaggttgcgaaaaaagggttgaccccctctcagattggtgtcattctcagagattctcacggtattgctcaggtcaatagcgtcactggcagcaaaatccttcgcatcctcaaagctcacggacttgcgcctgaaattccagaggacctgtaccatttgattaagaaggcagtttcaattaggaagcatcttgagaggaacaggaaggacaaggactccaagttcaggttgattcttgttgagagcagaatccaccgacttgctcgctattacaagaagactaagaagctcccaccagtctggaagtacgaatcaacaactgctagcactctggttgcttagagaatgtatcaactttcatgggtttt

SEQ ID NO: 260427 - DNA, 436 bp, Glycine max
  unsure (1)..(436): unsure at all n locations
ctggaagaacctcttcacgaaagtgcgaaacttgatcagtgttggacgcgccttctnctncgcctccgccgncgccaacgccatgggtgacgttcagatccacaagaccaaactctgcatcatcggaagcggtccctccgcccacacagccgccgtctacgccgctcgagccgagctgaagccgatcctcttcgagggctggatggccaacgacatcgcccccggcggccagctcaccaccaccaccgacgtcgagaacttccccgggttccccgacggcatcctcggcggcgagctcatggaacgctgccggagccagtcgctccgcttcggcaccgagatccacaccgagaccgtctccaaggtcgatttctcgaaccgtcctttcagggttttcaccgattcccgaaccgtcgaggccgaatccgtcatcgtc

SEQ ID NO: 260428 - DNA, 265 bp, Glycine max
gaaaactaaggaaggaaggaagagtgagcgtgaaagatgccttgggcgaggctttcagggtctccaaggctcgacgttgctattgacatgggcaatccatttctcaatctcactgttgatggtttccttaagatcggagctgtcgcagccacgcgatcagctgctgaagatacttatcatattatccaaaaggggaatatctcaagtcatgatttcgagaaaacgttgaaaaagatgtgcaaagaaggtgtatattggggaacta

SEQ ID NO: 260429 - DNA, 444 bp, Glycine max
  unsure (1)..(444): unsure at all n locations
tacatgtgtgggttggtgtttgaggacttgttggagcaaggtggcttgtgggagggtgaggggaataatcagaagaaagctgacattctctacagtgcaattgatggcagcaaagggttctataaatgccctgttgagaagtctgtgagatctttgatgaatgtgcctttcactttggagaaatcagagctggagggtgagtttatcaaggaggctgctaaagagaagatggtgcaactcaagggacatatatcagtgggaggtatgagggcttctatttacaatgccatgcccttggctggggttgagaagttggtggctttcatgaaggattttcacgcaaggcatgcctaaaggagtaacctcaatctgaaacaaatacttgcattgcataaacctaatgcctaaaggattntatgctaataaaatgtttgtctggtattc

SEQ ID NO: 260430 - DNA, 448 bp, Glycine max
cctagccactctcccggcgtcacgatgcagatcttcgtgaaaaccctaacgggtggaacgatcacgttggaggtggagtcttcggacaccatcgacaacgtgaaggccaagatccaggacaaggaaggcatccctccggaccagcagcgcctcatcttcgccgggaagcagctggaggacggccgcaccctcgccgactacaacatccagaaggagtccacgcttcacctcgtcctccgcctccgtggcggcgccaagaagcgcaagaagaagacctacaccaagcccaagaagatcaagcacaagcacaagaaggtcaagctcggcattcttcagttctacaaggtcgacgattctggaaaagtccagaggctccgcaaggagtgccccaacgccgagtgcggcgccggcaccttcatggccaaccacttcgaccgccactactgcg

SEQ ID NO: 260431 - DNA, 439 bp, Glycine max
  unsure (1)..(439): unsure at all n locations
cacgcgtccgtccacgcgttcatccacgcgttcgggatccagtttgtttacaggctacggcacaatcgccataaccgaaaccaagaagtcccccttctccgtcaaagtcggcctagcccagatgctccgcggcggcgtcatcatggacgtcgtcgacgccgagcaggcccgcatcgcggaggaggccggtgcctgcgcggtgatggccctggagcgtgtccccgccgacatccgggcccagggcggcgtggcccgcatgagcgatccgcagctcatcaaggatatcaagcgggccgtcaccatccccgtgatggccaaggcccgcatcggccacttcgtcgaagcccagatcctcgaagccatcggcatcgactacgtcgacgagagcgaggttctnaccctcgccgacgacgccaaccacattaacaaacacaacttc

SEQ ID NO: 260432 - DNA, 347 bp, Glycine max
  unsure (1)..(347): unsure at all n locations
acgaagaagcanacggagtagcggcattaaaaattcagatcttcgtgaaaactctgacggggaggactataaccctcgaggtcgagagcagcgacaccatcgacaatgtcaaggccaagattcacgacaaggaaggcattcctccggatcatcagcattagattttcgccggaaagcatctcgaagatggaaggactctggccgattacaacattcaaaaagaatcaacctttcatctcagcctcatgctaagtggtgacatcattgatccttaactcatggctttggctcgcaaatacaaccaacacaagatgatttgccgcaagtgctatccccgtctgcattct

SEQ ID NO: 260433 - DNA, 380 bp, Glycine max
cacgcgtccggcaaccagatggtcttttgcataggaatgcaattggtgaagctgaagaaaatcccaaatcgactgctattgacacttcccaagcagatagggtggcaatggaagaagatgatattaatgaaataggagaagaagagaaagaaaaattaaatgacgtagattacttgacagggaatccacttcctaatgacattctcttatatgctgttcctgtttgtggtccttatagtgcagttcagtcttacaaatatcgggtgaagataattcctggaccggcgaagaaagggaaagctgcaaaaactgctatgaacctattcagccacatgtcagaagcaacaactccggagaaggagttgatgaaagcctgtaca

SEQ ID NO: 260434 - DNA, 431 bp, Glycine max
cagcgatcgaagtttcacatcagccttatccagtttagggtttcggttccttaccctacctttgacgtatcgaaaccttaaatttgggattaggtctgagcaatctggttggtagaacctttggtcttagagagtcaagttttatgtctggattagacgatcaaattcctactgccttcgatccttttgctgatgcaaatgctgatgactcgggtgctgggtcaaaggagtatgtgcatattcgcgttcagcagcgaaatggtaggaaaagcctgacaaccgttcagggattgaaaaaagaattcagctataacaagatacttaaagacgtttagaaagagttctgttgcaatggaacaggtgttcatgacccaagactaagacaggttattcaaactcaaagtgatcagaggaagaatggttctactttc

SEQ ID NO: 260435 - DNA, 395 bp, Glycine max
acgctcacgcgtacgctctaatcactctagctgttgcaaatttctactattattcaatggcttctgcagatgttgagttccgttgctttgttggtgggcttgcttgggtcaccggcaacgatgccctcgagaaagccttttcaatctacggcgacatcgttgaatcgaaggttatcaacgaccgtgagactggaaggtccagaggattcggatttgtgaccttcgcctcagagcagtcaattaaagatgcgatcgcaggaatgaacggccaggaccttgacggtcgtaacatcactgtcaacgaagctcagacccgcgccagccgtggtggtggtggaagctgtggtttcggaagtggtggtggatacaaccgcggtagcggtggatatggtggt

SEQ ID NO: 260436 - DNA, 250 bp, Glycine max
tctgcaacaacttcttcttgagtgttttctcagttcctcacatcatgtaccgctttgcaacctccctcgcctccaaagctagaattgccaggagcagcactcaacagattggaagtagggtcacttggaacaggaattatgcggtcaaagacattaattttggtgtggaagctcgagctctgatgcttaaaggtgtcgaatagctcgctgatgccgataaagtaacaatgggcctctaggggcgtaatgt

SEQ ID NO: 260437 - DNA, 465 bp, Glycine max
ctctgacgtcactgatggtggctactgcattctcaagtggtggctatggcgccgctggtgggggtggtgtgtaccctgacactaccactgatggtgggtacagcaaaacaagtggtggtgggtatgatgatgaggttgactataagaaggaagagaagcaccacaagcatcttgagcaccttggtgagttaggtgctgcatctgctgctgcttacgccttgcatgagaagcacaaggcagagaaagacccagagcatgctcacaggcacaagatagaagaggaggttgcagcagcagctgcagtgggatctggtgggtttgccttccatgaacatcatgagaaaaaggaagcaaaggagcaagattaggaagctcatggaaagaagcaccaccatctctttggctgaagcataagcaaccaattatgaacatattccttctacttggctatatatatatatgctt

SEQ ID NO: 260438 - DNA, 359 bp, Glycine max
acggactatcgaaggatgagattgagaagatggtccaagaggcggagaagtacaaggccgatgatgaggagcacaagaagaaggtcgacgcaaagaatgctttggagaactatgcctacaacatgaggaacaccattaaggatgagaagattgcatcaaagctttctgatgacgacaagaagaaaatcgaagatgccatcgagagtgctattcagtggttggatggaaaccagctagcggaagctgacgagttcgaagacaagatgaaggagcttgagagcatttgcaacccaatcattgcctaaatgtaccagggtgcaggtgctcccgacatggctggaggcatggatgaaagatgt

SEQ ID NO: 260439 - DNA, 417 bp, Glycine max
  unsure (1)..(417): unsure at all n locations
ggaatgcttggtcaggctggcagtggcaagcttcgtgtgtctgttggtcaaagcaaacttgcagcaaaagttgctaaaaaatttaaggaaaagaattatggtagtagtggtgctacctctggtttgacatcaagtcttgcattcacaccagtgcagggtattgagctgacaaatccacaggctcatgcacaccaacttggtagtggaactcaaagcacttatttctctgaaacaggaacattttcaaagatcaagaagacatgaaaccatgcatgaatgcaaattcttgttcaatgcctggattattcttggtgtccaatgcctaaaaattgttgattccgatggatattactttatatgtntattggagatttttgaagaataaccatgtatgttggtgatacgttcccttggata

SEQ ID NO: 260440 - DNA, 438 bp, Glycine max
  unsure (1)..(438): unsure at all n locations
gtggaactcttggcctttctacagcaactgtcaaacttttgagtagtgatggtagcacacatgttgcttgttctgttggtacaggaccagtggattcggcatacaaggctgtggatctgattgtgaaggagccagtaacacttcttgagtactcaatgaatgcagtcacggaaggcatcgatgcaattgccactacccgggttgtgattcgtggggagagtgaaacaagtactagtactactcatgctttaactggagaagctgttcttcgaacatttagtgggactggagcgggaatggatgtcgttgtttccagtgtcaaggcctatattgctgcactaaacaagatgttgggtttcaaggaaacatctncatctgctgaaaaaattccagtttcttcattgaagatttgagaatttgtgttgctgctttggtaac

SEQ ID NO: 260441 - DNA, 394 bp, Glycine max
aaaaaaaaaaaaactttcgaaagattttatccaattgaaattttaaaaatgactgggataaacttaagaattcaattattgaaattgaataagtaaacaatttaattggattggtcgaatggtatcaaaaaaatggagtactaactcccatttcttatttattattgaattaaccgatcaacttgctttgttatcgaacatttctttttgatttcaaaaattttccggaaaaaatttgaatctatttttatatgcgaatcaatcctactacttctggtcctgaagtttctgcgcttgaaaaaaaaaatctgggacgtatcgcccaaataattggtccggtactagatgtagcttttcccgcaggtaagatgcctaatatttacaacgctttgat

SEQ ID NO: 260442 - DNA, 231 bp, Glycine max
ttcacgcgtccgactacgcgtaggtttactttaactgtgatgttatgaatgagttatcttgacttttgaaacgagagactgagaatggaacgtggggctcttgataggatcattaatagggtgcttgaagtcataggcagaccactgaaacatgtgcaacattatgaggctgacatcaaacagctctgtcttgtctacaaggatatcttgatgaggcagaccaacctgttg

SEQ ID NO: 260443 - DNA, 91 bp, Glycine max
caacacgccctcaagttcagccaaatgttccatttgataccaaccacacagggaaactattatgtgttgaatgacatattccggttgaact

SEQ ID NO: 260444 - DNA, 322 bp, Glycine max
tcgctctgacgtcactgatggtggctacggcatttcaagtggtggctatggcgccgctggtgcgtgttgtgtgtaccctgacactaccactgatggtgggtacagcaaaacaagttgtggtgggtatgatgatgaggttgactataagaaggaagagaagcaccacaagcattttgagcaccttggtgagttatgtgctgcatctgctgctgcttacgccttgcatgagaagcacatggcagataaagacccatagcatgctcacaggcacatgatagaatatgaagttgcagcatcagcttcagtgggaactggtgggttt

SEQ ID NO: 260445 - DNA, 233 bp, Glycine max
gagatattgccttctaaggactgggaactagagtctattcatagctcgtaagttttggatatgataagggaacacataactactgtaactggcttgagagcaaaatctagtgtaactgagtgttgggcaacaacccaagttagacaattcttacttgcccgggtttacgttgcctccatattatatggttactttttgaagtcagtttcattgaggtaccacctataacggaa

SEQ ID NO: 260446 - DNA, 288 bp, Glycine max
tagtgaatacgtgatatctcacaaggcctatgcgagggtgggattgctagggaacccgagcgatgtctactacggcaaaacgatagcgttaagcgtcgccaacttcttcgccaccgtcacgctgcgtcccttcgaccagttaatccttcaaccccactctctgcacgatctccttcatttctcatcgagtcctcaattggtcaacaggttgagctcccaaagttactatggaggcgtgcgattgcttatggctatttgcaatgtcttctacgcgtattgcagagagaa

SEQ ID NO: 260447 - DNA, 344 bp, Glycine max
tccacgcgtccgggcacttctaatgatcattttgtgcattcgtctagtgctggaccattctttacagtgtctgtcataattggaggaagaaggttggtgtaaatatgacagacaaacatttcatgttgatgctggttttattgatcttacaatgggaagtggacaagggcatcacaagcgtaagagccctggaattccttcagtctacgagggaggcagtactagtagatactttaatgctgggagttcaactgatcttcctatatcttcagaattggggcaagagaagccaaatattgattctcaatatatgccctgggatcattttactatgacacccacat

SEQ ID NO: 260448 - DNA, 391 bp, Glycine max
tccacgcgttcgagagcttgcacctattggtatcttctacaatatcctctcatagtgctctggttcttcttcattttcattatcaagatgtctttgctttcggatctcatcaacctcaatctctcagaatccacagaaaagatcgttgctgagtacatatgggttggtggatctggtatggacctcataagcaaagccaggactcttcctgggccagtgagtgaccctgcaaagcttccaaagtggaactacgatggctctagcacagaccaagctccaagggatgacattgaagtcatgctatacccacaagctattttcaaggacccctttaggagaggcaacaatattcttgtgatttgtgatgtttacacccccgcttgtgagccac

SEQ ID NO: 260449 - DNA, 460 bp, Glycine max
  unsure (1)..(460): unsure at all n locations
gaaatcccaatcccacacaaatggcatgctcagccacctctgctgctctcttctacggaaaccccacacctctcttctctcccaaatcctccctctccctccctaacaactctctccacctcaaccctctgcccacgcgcccttctctctccctcacgcgcccctcgcacactcgccgctccttcgtcgtcaaagcctcctccagcgagcttccgctagttggaaacaccgcaccggatttcgaagcagaggctgtgtttgaccaggagtttatcaacgtgaaactatctgattacattgggaagaaatatgttgtgctcttcttctacccgttggacttcacttttgtttgtcccacagaaatcactgctttcagtgaccggcatgcanagttcgaggcactaaatactgagatattgggtgtttcagttgacagtgtgttctcgcaccttgcatggat

SEQ ID NO: 260450 - DNA, 461 bp, Glycine max
  unsure (1)..(461): unsure at all n locations
atttgagtgtggttcttcatttcggacattcatatcttcttcgtcctctgaatcaagtttcgactttatttgagtagttttgctctttccttccaaaatgagccggccaatggaggaagatactgctggtaagaatgaggaagaggagttcaacaccggaccactatctgtactcatgatgagtgttaaaaataatactcaggtactgataaattgtcggaacaacacaaagctgctgggtcgagtaagggcttttgacaggcactgcaacatggctcttgaaaatgtcaggtagatgtggactgaagtgccaaagactggtaaaggaaagaaaaagtcccagccagtcaacaaggattgattcatcagcaaaatgtttctgcgtggagattctgtcatcattgntcttaggaatcccaaatgagattctgtcatcaacttgtataaagaaatggctctgt

SEQ ID NO: 260451 - DNA, 460 bp, Glycine max
attgtttaaacctaattctcatttcttcatcgttcgattcttctcctcctaaagatgcagatcttcgtgaaaactttgaccggtaagaccatcacccttgaggtggagtcctccgacaccatcgataacgtgaaagctaagattcaagacaaggaagggatcccacctgaccagcagagacttatctttgcgggtaaacagcttgaggatggtcgaacccttgccgactacaacattcaaaaggaatccactctccacctcgtgcttcgcctcaggggtggcatgcaaatctttgtcaagactttgactggcaagaccatcaccctcgaggtcgaatcctcggacaccattgataatgtcaaggccaagatccaggacaaggagggtatcccttcagatcagcagagggtgatatttgctggtaaacaacttgaggatggaagaacccttgctgattaca

SEQ ID NO: 260452 - DNA, 387 bp, Glycine max
tcgcccacgcgtccgcttctcagtgctttgactaacacgacgtcgtgatgggatttttgaaaaggatagccggatatctagggtttggaaaccacgaacacgattccaaggatgaggcccgcgatggtcaacctcgtaccacacaacctcgtaaaggcttcagtgtccctgcccaggtcgtcgtcgatcgcccccacctcgctcccgttctcactccttctacttccggcgacggtggaattcaaggtctggattggtatgtaaagcgtcttaagatggatgaagatggtgatttagcagatgaattccttgatgaggtttcattatagagcccagaaggacatgcagtagatcatcttaaaaccaggccaaggttaaacccaacaa

SEQ ID NO: 260453 - DNA, 359 bp, Glycine max
acgctgacgctatcgaatcaactatcatgtcagccgacgagcaccacttcgagcaccatgccgaggccagagcctacaaaagatactctcaaaaagacggtaccataggcaagaacagctacatgaacatctacggccggatctgcagggttgcctacgttgctactgacaaaactgctaagcacagtgacgctcactgtcactctgagggaaacgatattggcactgacaagaaaactgacgatatactggccgatattgacaactgtgatgacacccatgagaatcgtactgagtaccggactaatgaccatgccaatgatagagcttagagtcgacttactggaaatggtaacgct

SEQ ID NO: 260454 - DNA, 339 bp, Glycine max
cccacgcgttcggtggctcctggcggcacgtgtggcggtatcggctataaataaaggggtctctcttatgttctaagtttgaagcggcgccaccatagttggtgtagctagcgagggagggatatagggggaagcgtttattcattcattaagatggcatcggagcttcaattgcccccaggcttcagattccatccaacggaccaggagctggtgttgcactatctctgccgtaaatgcgcgtcgcagcctatcgccgttcccatcatcgccgaaatcgacctctacaaatacgacccttggacctacccggtaacattatcttcaacttctgatata

SEQ ID NO: 260455 - DNA, 462 bp, Glycine max
ccatcgagtagcaacaatgtcgaagcgaggtcgcggaggatcggcagggaacaagttccgcatgtcactgggtctgccggtggttgcgacggtgaactgcgccgacaacaccggcgcgaagaatctatacatcatatcagtgaaggggatcaaggtaaggctgaaccggttgccgtcagcttgcgtgggtgacatggttatggccaccgtcaagaagggaaagcctgatctccgtaaaaaggtgctccccgccgtcatcgtccgtcagcgcaagccgtggcgcctaaaggacggggtttacatgtacttcgaagataatgctggggtcatagtgaatcccaagggtgaaatgaaaggttctgctatcactggtcctattgggaaggagtgtgctgatctgtggcccaggattgcaagtgctgcaaatgctattgtttaagctgggtttttagtttatgtaat

SEQ ID NO: 260456 - DNA, 429 bp, Glycine max
gttctagcaagtgttgcaatggaagcagagtcggataccaagcagcagcagacgatggaaggaagttattcccaaactatgcaaattgatccgaaaagggctcgatttccatgctccgttgtgtggtcaccacttcctgtgatctcgtggttcattccttgcatcggtcacattggcatctgcagagaggatggagtgatattggattttgcagggcctaattttgtgtgtgtggacaattttgcatttggagctgccacccgctatattcaaattcccaaagaaaagtgttgcgttcctttagtccagtctgtgtacaatggtgaggaacactacattcaagatgaaactaaaggagatttgaggacttgggatgatgcactaaagaaaagcactcaagaattccaacatttatcttacaatctcttt

SEQ ID NO: 260457 - DNA, 461 bp, Glycine max
ttgttttctgtatctaaaaaatcttgtttttttgaacataaagaaataaagaagccattgcaattgccggaaatactaggcctactagaggaacaaaaatggaaggaaagtttatcataaaatgggtacctcgatttactatttgtaccttatatatattatttttatatttatatagattctttttttttttttttatttttttattcttatttatattattatataaagatagtctataatcactagaatttctatatatttatacttagtatataataattctagtgattatagctaagccaatatatatcataatataatatacccttttcttattcaaagaatttatggctatgccttatcatttttagtcaaagaaaagaaattatggaattgaaataactcactcagaacgccctttaaaagattacgcggtacgattgaatcaaataagccct

SEQ ID NO: 260458 - DNA, 269 bp, Glycine max
actacgcgtccggttggagtgagcgaagaatatgtattctagagattcatggggtggaccgttggagataaacgcgacggactcggcgacggaggacgagcggagccggaacctgcaggacgttgacagggcagcgctgtcgcgtcccttggatgagacgcagcatagctggctccttggcccctgcgagcagaataagaagaagtacgtcgatctcagctgcatcatcgtcagcctcaagatcttcaagtggaccctctgcacaatcc

SEQ ID NO: 260459 - DNA, 367 bp, Glycine max
  unsure (1)..(367): unsure at all n locations
cgcgtcgcttcgcaccagtttcaccgcacgaatatcttgttgtttggagcgatccgagaaaaactctgtaaacatgttggtttaccaggacctgcttacaggtgatgagcttctctctgactccttccgttacaaggaaattgagaatggaatgctgtgggaagttgaggggaagtgggttgttaaaggagcagttgatgtagacattggtgcaaacccttctgctgagggtggaggagaagatgaaggagttgatgatgcagctgttaaagttgttgacattgttgacacattcagactttangagcaacccgcattcgataagaagcagtttgttaccttcatgaagaggtttatcaagaatttg

SEQ ID NO: 260460 - DNA, 236 bp, Glycine max
  unsure (1)..(236): unsure at all n locations
aaaaaatggcttctagttcagaatctcaatctcagtctaaaccgctccaagaccgagttgcaatcgtcaccggctcgtcccgcggaatcggccgagaaatcgcgcttcacctcgcctcactcggcgcgcgactcgtcgtcaactacaccttcaactcggcccaagccgactcaatcgcggcgcaaatcaacgccggttccgncaccacgacaccgtgcgccgtcgtggtccaagcc

SEQ ID NO: 260461 - DNA, 353 bp, Glycine max
aaaacacgtccgctacgtcagtgtaatactactactcttaacagcgtcatgactaggccgcggaacggatgcggtgcactggacgaatttatggaccaaaggatcgatacggccgctcaatcggctcggtagacatcgtcaggacacgagagtgattgctacagcgcactagtttacagttgacacaagcgcactaagatgagctaccacagcccaggccatctcggtcgaacaaaacggtgacagatcggatgatgcggagacccagttcgaactcgaacgctgcaagtgtgacctatcgatccaaatgcccttcaggatatcaagctagatgtaccggacaagttactaca

SEQ ID NO: 260462 - DNA, 424 bp, Glycine max
atttaaaaacccggaccgtcgtatcgttccaccggcgccgtcaacctccaatgctcgaaccagcatccttccactcaaccgcgcacttgcactcgtcggctcaagctaccaccgcagcacgcctcagccgccgccagttaacaagcatttgctcataaagaaggaaggaagatggtgtttgggcaagtagtggttggtcctcctggctctggaaaaacaacttactgcaatggcatgtctcagtttctcagtcttattggaaggaaggttgctggtatcaatttggatcccgctaatgattcggtgccctatgaatgtgctgtgaacatcgaggatctcgtgaaactaaatgatgtaatggtggaacattaggttggaccaaatggaagtcttgtgtattggatggattatcttgagaaaaata

SEQ ID NO: 260463 - DNA, 343 bp, Glycine max
ctactgggcacctacaagggacgatcgtgttggcgtctgcaatggaattttccgcactgacaatgttcctaaggatgacattgtcaagcttgttgacaccttccccggccaatctattgatttctttggtgcactcagggctagagtatatgatgatgaggtgaggaagtggatttctgttgttggtgttgacttcattgggaagaagcttgtgaactccaaggaaggacctccaacctttgaccaaccgaagatgactttgagcaagctcttggagtatggtaacatgcttgtccaagaacaagagaatgtgaaaagagtacaactggcaaacaagtacttg

SEQ ID NO: 260464 - DNA, 334 bp, Glycine max
  unsure (1)..(334): unsure at all n locations
atacgcaaaaggccacacaanaaaaggacattagaaagaaagtccgggagcaaccacaagagggaggagaccctccatgtgggagggcacacacgagaggagcacaaaggagaacaccatggagagcacaaaggagaacacaaaggagaacaccatggagagcacaaaggggaacacaaaggacaacaacaacatggggagcacaaggagggactagcggctaagatcaaggacaagatccatggagatggccatgacaagggtgagaaaaagaagaagaaagacaagaagaagaaggagcagggagatgaccatcatggccatagcaccagca

SEQ ID NO: 260465 - DNA, 359 bp, Glycine max
ggaaggtataggaagcagacgcaagatcatgagcaagagcgaaagcagtagagaatatggaaggagaagagggttctcagcagccacagatggtgctcgcggacaagctattccttctccggcaacccgatgtgcaagacattgacaaggttcgctacaaagaggatgtcttcactcatgtcaaggaaaacgatatggtccctctgtacgaaaccctagacgctgattccgtgtaggacttggatcgtgcccttttggactctatgcgcgctaaaattgacgacgagctcaacaagcttgacgaaaagattgctgatgccgaagaaaacttacgagagagtgaaattcgcgaggctcat

SEQ ID NO: 260466 - DNA, 239 bp, Glycine max
acgcccacgcgttcgtccacgcgtccgaaggactttaggttgggatttgggaatataggttattcgcgtggcgaagatgattgaggtggttttgaacgatcgattggggaagaaggtgcgcgtgaagtgcaacgacgatgataccatcggcgacctgaagaagcttgtggcggctcaaactggcacaagagcctgcaggatccgcatccagaagtggttcaccatctacaaggatcaca

SEQ ID NO: 260467 - DNA, 452 bp, Glycine max
cccacgcgtccggataagtactactataatagtataactaaggaaggagtaagggtgatggtggttctgatctgacttttggcggtgtgggagtcacgagagcagcaaggggaagtcacaagagtcacaagaatggagagaggttcgggcaagctgagcaggaagaaaagtggtggtggaaacggacaggttctagacggttctaatattatggagttggttggaaaccagcaagttttcaccaccttcgtggaccataagtttcacgagttagacacagacaaagatggcaaactctctgtcaaagagctccaacctgctgttgctgacataggagctgctcttggtttgcctgctcacggcactaaatctgattctgatcacatctattccgaggtgttgaatgaattcacacatgggaagcaagaaaacgtgagcaagaatgagttcaa

SEQ ID NO: 260468 - DNA, 455 bp, Glycine max
cccacgcgtccggggcagctcgtgtgggagatcgtcaagaaaaacaattccttcttggtcaagcagtttggaaggggcacccagagcgtcgaattcagcagagagagcaacaatctctacaacctcaattcgttcaagtactctggtttggcaaacaagaaaactgttactgttcagcctgagggcaaagatcaggctgtgttgttggctacaaccaagacaaagaagcaaaacaagcccgttgcattgctccacaaatctgtgatgaagaaggagttcaggaagatggcaaaagctgttgaaaaccaggtggccaaaaattactacaggcctgatctcaagaaggctgcccttgcaaggttgagtgctgttcacagaagcctcaaagttgccaagtctggtgtcaagaaaaggaatagacagggcgtgagagtcgctggtagggagtgaaaggg

SEQ ID NO: 260469 - DNA, 468 bp, Glycine max
  unsure (1)..(468): unsure at all n locations
gcgctttgatcactgtttttcaaaagttggggttaacaaccaccccttattcctaacattagggtatttggaaacctggtttccaagttttggtgggggcctcctggggctaatataaaacccagaaaaatttttacctaatttcggccaaggggttcctccgttttttccacttcccagtcacaatatgcagacagcgttgaatctgaagcaggagctgatactatnngactataaatcttaaccgatgaagagtggaagaagcggctcacaaatgaacagttctatattactcgtcagaagggaactgaaagagctttcactggggagtactggaatactataaaccccgggatttaccattgcatatggtgccacacacctttattcgaatcatctactaagttcaatagtggaactgggtggccattctattaccagacaattgggaaaaatgtgaaatcaaag

SEQ ID NO: 260470 - DNA, 337 bp, Glycine max
ctttggtcactcttcttctcttgcggctagggttttagcgcagcttcttctagatttaaggaagatgggtaaggaaaaggttcacatcagtattgtggtcattggccatgtcgactctgggaaatccactaccactggtcacctgatttacaagcttggaggcattgacaagcgtgttattgagaggtttgagaaggaagctgctgagatgaacaagaggtctttcaagtatgcctgggtgctggacaaacttaaggctgagcgtgaaagaggaatcaccattgatattgctttgtggaagtttgaaacaacaaagtattattgcacagttattgat

SEQ ID NO: 260471 - DNA, 427 bp, Glycine max
cccacgcgtccgaacaattatgaagtaggaaatatgattgctgaagcattgagcagagttggtagaaagggtgtcgtgacccttgaggagggaaagagtgctgataacagtctgtatgttgttgaggggatgcaattcgaccgtggttatatttctccatacttcgttactgacagtgagaaaatggctgttgagtatgagaactgtaagttgctgttagttgacaaaaagataaccaatgcacgggatcttatcaacatactggaggatgctattagaagtggacaccctatattgattattgctgaggatattgaacaagaagctttagcaactcttggggtgaacaaacttagaggatcacttgagattgcaacacttaaggcccctgggtttggagaagcgcaagaccagtaccttgatgata

SEQ ID NO: 260472 - DNA, 432 bp, Glycine max
  unsure (1)..(432): unsure at all n locations
tagaagaaaatgtngacagaaaggataatgcatgaatgcatcaagaagttattgggtcaggatcaggatccggatgaagaagatatttgaagctttgccaacctgatgaactcttttgggggagaatatgcatcttccagaccccgagcatatggatgcatattttgaaatgatgagatcattatcaaacaacatgaatttatcttctaggttgaggttcatgttgaaggatgtcattgatttgagaaagaataaatggcaacaaagaagaaaggttgaaggtccgaagaagattgaggaggtgcacagagatgcttctcaagagaggctggcccaagctagtangctgggtcgtggtccaggcaacaatccacctcgaaagatccctatggattttggtccaagaggatcatcaatggtatctcctaatgc

SEQ ID NO: 260473 - DNA, 285 bp, Glycine max
  unsure (1)..(285): unsure at all n locations
gttgcaggaaaaatggtttcgctgaaactgcaaaaccggttcgcagccagcgtcctcaagtgtggcagaggaaaggtttggcttgaccccaatgaagtcaacgaaatctccatggctaattctcgccaaaacataaggaagctggttaaggatgggtttattatcaggaagcccaccaagattcactctcgctcacgtgcccgccgaatgaaggaagccaagaggaaaggacgtcactctggatatggtaagcgtaagggtacaagggangcaaggcttnccact

SEQ ID NO: 260474 - DNA, 356 bp, Glycine max
actagctgcagtgactgagctcaatttcaacatgattggcttcatgggggctatgatatcaaatttggcatttgtcttccgcaatatattctcaaagaaagggatgaagggaatgtctgttagtggaatgaactactatgcttgtctttccataatgtcactgttaattctgacaccttttgccattgctgttgaaggccccaaggtttgggctgcaagctggcaaacagctgtatctcaaattggtcccaattttgtatggtgggtagctgcacagagtgtcttttaccacttgtacaatcaagtctcatacatgtctcttgatcagatttctcccttaacatttagcatttgaa

SEQ ID NO: 260475 - DNA, 419 bp, Glycine max
  unsure (1)..(419): unsure at all n locations
gaccaagccttccggtacgtgcaaggtgaaatattagggtggaatccatgactggccggggttacaagctgaagggaagtttgacccaaatgaccaagaaatattagaacatttggaggcaaaagtggcgtctgatgcatgcaagcttcatccccttattgacgagttcataccaacgcttgaaggcgaaaatgggatctgttatacacacccagaaaagctaccaggtgcttcatgttttacttaatttattttattttaattattttttgtctaattaattagtatagtttcgtgttttagaatacttattgcatatacacatcattgaattctcatttattgggagacacgtcttgatgtgcacgataccgcatgcatgaaattaatngntttagcaatgaaatgatttttttttc

SEQ ID NO: 260476 - DNA, 408 bp, Glycine max
ctctctttctctttctcactcactctcactctctgtcacggacagacagagaaaaactcaggcgcccacgttcacacttccctcacaccatcccttactgttccttcttcttcttcttcctttgtttttttctcttaatggaatgatggaacacaacatcatcgttaacaacaacaacgtgatcgcaccgtttgtcataaaaacctacaacatggtgaacgatcccaccaccgataaactcatcatgtggggcccagccaacaacagcttcatcgtccttgaccccctcgacttctctcactccctccttcctgctttcttcaagcacaacaacttcttcagcttcgttcgacaacttaacacttatgggttcaaaaaggtggatccggatcggtgggaattcgcaaa

SEQ ID NO: 260477 - DNA, 320 bp, Glycine max
cccacgcgttcggaaacattctaacacgcattacccagctttacattcatttttgttcgtgagttccaatggctggggaggctgcttccttggttcctgcttcttttcctattgctaaagagggaaagtctggtgtatctctcagggacaccacaatgtttggtgtttcattgtctgatactctcaaatctcacttcagctctccctcatcgacttgcaaaagggaattccaactcaaatttggccctttgagggttcagtcagtggcaacaactactccaggagtcaccaaggcttcaccagaaggcaagaaaactttt

SEQ ID NO: 260478 - DNA, 436 bp, Glycine max
cccacgcgtccgtttttttcttccaacgctcctcctccttctcatagccttcgccacctgtgtctccggccgccgtgacctcgtcggagactttctccggctgccctccgaaactgataacgacgacaacttcaagggcacccggtgggccgtcctcctcgccggttccaatggttactggaattacagacatcaggctgatgtttgtcacgcctatcaaatattgaggaaaggtggtctgaaagaagaaaatattattgtttttatgtatgatgacattgcattcaatggggaaaacccaaggcctggagtcatcattaacaaaccagatggaagtgatgtttataaaggagttccaaaggattacaccggcgaagatggtactggtgataacttttttgctgctttacttggaaataagtcaacactgactggt

SEQ ID NO: 260479 - DNA, 404 bp, Glycine max
ctagcttccaaaccctaacactcctcttcctcttcgatcatcacctctccacaatgccgccgaagttcgacccctcccagatagtcgacgtcttcgtccgcgttaccggcggcgaagtcggcgcggcgagttccctggccccgaagatcggtcccctcggtctctcccccaagaagatcggagaagacatcgccaaagaaaccgccaaggactggaagggcctccgcgtcaccgtcaagctcaccgttcagaatcgtcaggcgaaggtcacggtggtcccctccgccgacggcctcgttatcaaggccctcaaggagcccgagcgcgaccgcaagaagaccaagaacatcaagcacaacggcaacatctcgctcgatgacgtcatcgagatcgctagggttatg

SEQ ID NO: 260480 - DNA, 360 bp, Glycine max
cttaacaacagcacaaagcgggttactgtctgttcaagctaccatctctctctctctttctgagtgcctccttgccagaagttaaaatggcccatgaaactttcctattcacatctgaatcagtgaacgaggtgcaccctgacaagctgtgagaccagagctacgatactgtgctctatgcgtgcttggagcacgaccatgacagcaagtgcgactgtgaagacctgaataagaccaacatggtgatggttttcggagagatcacaaccaaggccaacgtggaactatgagaagattgtgcgtgacacatgcaggaacattggttttgtctctgatgatgttggtcttgatgctgacaac

SEQ ID NO: 260481 - DNA, 439 bp, Glycine max
cccacgcgtccgagagcatggagtgtggcaactagcgttggagttgtggaggccttaaaagaccaaggtatatgtaggtggaatcatgctttaagatcagctcaacaccatctcaaaaaccatgttggttcattctctcaggctaacaagctttcttcttctgctatgagctccacaacactaaaacatgggaagacaaatcagtcagaggagtcattaaggactgtcatgtacttgagctgttggggtcccaattagatgccataaggccaataaaaaaattggatctttctctttcaatttctaaaaatgaaacttaatctcaaaagattattatgggtgagatttctggggtcatactggataggattgaaagattgcttggctgatgtgacaatcaagttggaaattttggtaaatgattatggttaacattggc

SEQ ID NO: 260482 - DNA, 439 bp, Glycine max
gaccaacccttccgcgaccccttggttccggttcaaatttatggcctaaaaccccttaaccagaactggaagtggctttcaaagcacttgggaagctgatatttgacattggattgatgttggcatatcactgcgatcaatatgtatccaaagggatgaaaattcacaaggatgaaggtctggaatcaatacttcgttgctcccgctgtcataaaggacgtttgctatattattttccttcacaacagggagtcccagatggcaactctttgtcttcttggtgtggatggcatactgaccacggttcactgacaggtctgacttgtggtatgtttacgagagatggtgtagaaattgcttgccctgatagtgcttgctggcctctatattcgaacaagaaataatcaaaattatcaaagttgtctattggaaaagatga

SEQ ID NO: 260483 - DNA, 393 bp, Glycine max
gcagatcttcgttaagacactcaccggcaagaccataaccctagaggttgaaagctccgacgaccatcgataacgtcaaggccaagatccaggacaaggagggtatccccccggaccagcaacgtctcatcttcgccggaaagcagctcgaggacggccgcaccctcgccgactacaacatccagaaggaatcaacccttcacctcgtcctccgtctccgtggtggcatgcagatcttcgttaagaccctcaccggcaagactattaccctagaagtcgaaagctccgacaccatcgacaacgtcaaggctaagattcaggacaaggagggaatccccccagaccagcagaagctgatcttcgccgggaagcaactcgaggacggacgcaccc

SEQ ID NO: 260484 - DNA, 387 bp, Glycine max
cccacgcgttcggtaaataatctccatccacatcaaactagacttaccctacctacctggtggttaaaggcacaccaaccccaccaaaactattagcatcatctactttctagcttattgttcaagagttgtgatcaagaatgagttcaacaagccgtgcttggacttggaccgtggcggcaagtgttggagtggtggaggccttgaaagaccaaagtatatgcaggtggaacagtgtgatgagatcagcacaacaacatgctaaacataatatgaagtctttgtctcagaccaagaagctttcttctcaatcatctgttatggcttcagccaaattgaaagatgagaaagcttagaagtcagaggagtccttgagaaccgttatgt

SEQ ID NO: 260485 - DNA, 334 bp, Glycine max
caacagcatcggcggcgacagtcactctccgacaacaacacttccgcggcgaaaaatgtctctggtggcgaacgaggatttccagcacattctgcgtgtgctgaacaccaacgtggatgggaagcagaagataatgttcgctatgacctccatcaagggtattggaaggagattcgccaacatcgcttgcaagaaggccgatgttgacatgaacaaaaaggctggtgagttgagtgctgcagagttggatagtgtgatgactgtggtggcgaaccctaggcaattcaagatcccggattggtttttgaacaggaagaaggattacaaggatgga

SEQ ID NO: 260486 - DNA, 333 bp, Glycine max
attttattgtcatggctgagctgtcaagagattgtagctgcagaaaatctcttgtactgctttggaatgattttggagttcattgcgttcattctgttgcggatcaaacaccccgacgcatcccgaccttacaagataccggggggaactgctggagcaattatcatgtgtatccctacgacaatattgattggtgtggtgttgtttttctccacccttaaagtaatggttgtaagccttattgctatggcaattggccttctgatgcatccttgtctcaaatttgttgagaagacgagatggatgaagtttaccatagttctgaactccctg

SEQ ID NO: 260487 - DNA, 434 bp, Glycine max
cccacgcgtccgcccacgcgtccgcccacgcgtccgttttatcttccgttccatgtctatgcactgaaatggcgtccatgtctacgtgcatcactgtgatccccacttgtgggctaccgcggcggctactttccttcaccccgaagcagccaatatcactcccttgcgtgattggaggagtcccgaaaagagtatgggattctagggttttggtggcgaggccggggggcgcagtggaaagcgaccagttgccttcggatgtgagaaagcgaacgatggatgccgtggatgggtgtggagggagagtgaccattggggatgtggctagcaaagctggccctaacttggattaaggccagaaagctcttcaagctcttgctgctgatgcggatggctttttagagggttctggggaaggtgacgttccggatgga

SEQ ID NO: 260488 - DNA, 423 bp, Glycine max
atgcaacccaccccctaaaactccaaaacacccacctgtcccaaagccacctttcccaaagcaagcatgttgccccagagacactattaagtttggtgtgtgtgctgatgtgttaggtttgatcaacgtgcatcttgggaagccaccaaagaccccatgctgcaacctcattgagggtctcgctgatcttgaatctgcagtgtgcctctgcactgctctcaaagctaatgtgttgggcatcaaactcaatgttccagtgaacttgagcttgctactcaactactgtggaaagggtgttcccaaaggtttcgtctgctattaatgaataaacacttctataatgtgtagtttcctaatgtaaagtatgtctcaaggttctatttcgctatagtcgatattcatcatgctttgtactttgtactt

SEQ ID NO: 260489 - DNA, 398 bp, Glycine max
aattgccttaaggaacgttcgagaccacagaggtttctctagtcttcttctgtggagagcttgttttctcttgtgcattcatctcacttccaattaaggaacaagctttccaccaatttgaatcaccaatggctcgctctttctccaacctcaaggttctctctgctcttgtcgccgacggattctccaacactctcaccaggcgtgggtacgcagtagcgacacaaagcgcaacaagaggaggagcagcctccatcagcggcaagtcaggggaagacaaggtactaggaagaggtgctgaaaaggtttcgtgggtcccagaccctgtcactggttactacaaaccggagaacatcaaagagaattgatgtgctgagcttagaaccacggttttgggc

SEQ ID NO: 260490 - DNA, 367 bp, Glycine max
cccacgcgttcgcccacgcgtccgcaaaacaggagctccgagaggttcaagccatggggatggacctagctgaagggttcagcagttaaggaaaagagacgaagattttgagctcggaaccattgcgatggccatggcttccaaccatcttcgaaacctcaatcgcatctccatccaccattttcaggctctcctcaacgatactaccaggttcttctccgacgctgcttcttcattgcctcaaccgcaacctccctcatcatccttgaagcacaatgagctcgccaagttcgccgccatcgccgatacctggtgggattctgaaggcccctttaaaccattgcatgtgatgaatcctacgagactt

SEQ ID NO: 260491 - DNA, 328 bp, Glycine max
caaaaaagaaaatgatgctcggagagcaccatcgcgcgaatccaacggttcacgtgccaccgtggccaacccacgacgatccaacggccgagatgtactccgcgtttttaacaaacgacgtcaatgctggtgagtactctccgtactatcttcaagaagcactaacggctctgcagcgttttctgccgtctaacgaaacggacgctgactcggacacggaggctcaacccgacgcggcggtggacgcgtactcgtgcgaccatttccgcatgtacgagttcaaggtccgtcgatgcgcacgtggcaggtcacacgactggacggagtg

SEQ ID NO: 260492 - DNA, 315 bp, Glycine max
  unsure (1)..(315): unsure at all n locations
ncgccacgcgttcggattcttcttcataaccatattattggataaaaattttaaatatcttatacacatgtcatagtttggttatggtggaattaaaatcattctatttgggttcattagctgtgctaaaatacgaagaagacattgctatgtatactgntaaagcggcaaatgatccaagaacatgcaaccgcgtcgttatttatcggccacagaagaatatcatatcacagaatgagttgacatcattgtgggagcaaaaatgtggtcagacttttcacaaggctttcatttcggaagaagaaattgtcaagc

SEQ ID NO: 260493 - DNA, 335 bp, Glycine max
gaacacagcaactgaaattggtgctctttagcttcaacaatctctcatgcaacgcatcagccgaatctagtggcatatctcagccttcactttcacaacactgccaaaaaaaaagaagtagaaaaaaagaaaccctttacttctttttagggacgcaggtcgtgtttgtcttgttttggctgctgacactatcatagttttttgttaggtgaaatcaagcccactaatgtgtgtacgcattagagaagggcattgaaacaaagtgtgatttctggtggagcttgattagtcatcttctatgctgtctttggtaacagaaaacatgggcttactct

SEQ ID NO: 260494 - DNA, 371 bp, Glycine max
attatatcgtttacaatgttcctttaccccctaacgactatccatccagctcatggacattgtgaatgaaaagcctgagttgtttgccgtttccattgatccaaatttctctttttatctgcacaatgattttctgtctgtctttcccaacaaaaaggagccccatggcatcatactgcatagaaacaaacgccaatatggaaaattagatgagctttctgcaatatgctctgccatggaaggtgttaaagtaattaatggattggaatgtaagatagcttgcagctcatctaagatttcttatgttcttgacacacaagaatttttcttccgaccaagaaagaatagacgaacgccttcagggaccacaa

SEQ ID NO: 260495 - DNA, 444 bp, Glycine max
gtcgtcgtcgttaattcgcctccgccgcaccatcagaacactctcgggcatctcccactcgttgtccgcgactcatgcggcgtcgttttcctcccccatcgggtgcggcgtttcatggagtttgcagtcaccgaagaagggtgtggttcagtcccgttcattcaggtcaagctcaatttcacttctatcttttcgatcctcgcagcggcagaacaacatccccgatgagattggtcccgataccattctcttcgagggctgcgattacaaccattggctcatcgtcatggaattcaaagacaacaacaaaccctctcccgaagacatggttcgcgtttacgaagagacttgtgccaagggtcttaacatcagtttggaagaggccaagaagaaaatgtatgcgtgcagcacaacaacttacataggccttcaggcagtcatgac

SEQ ID NO: 260496 - DNA, 351 bp, Glycine max
  unsure (1)..(351): unsure at all n locations
cttcagagaaacaacggagggaaggagatggaaaacaatgctgaatctggaaaatccaaaagggaaagggaaagggattccaattcacggagggaagtacgttcgctacaacatcttaggcaaccatttccaagtctattccaagtacgctcccnctctccaacccgttggtcgcggcgcatacggcatcgtttgctgtgcgacgaattcggagacgaaagaaggagtggcgataaagaagattgggaatgcctttgacaacaggatcgacgccaagaggacgctcagggaaatcaagcttctctgtcacattggaacatgataacataataaaaattaaagacataattc

SEQ ID NO: 260497 - DNA, 405 bp, Glycine max
gagtgatacacatcacattttctcaaagtaatttattaattaataaataaatggcggcggcggcagcagtgacggtgctactcccacctaggattccgaccgccaccaacgttacccgctgctctgctttgccttctctgcctcctcgcggcaccaacactaaaaccactttgctcttatcttccctcaaccacttctcagtgtcccgaaaatcttctctgcttcagaccagagcttcttcagaggaatcatcctcagtagatgccaatgaggtgttcacagatttgaaggaaaagtgggatgctctcgaaaacaagtccacagtacttgtttatggtggtggggctctagctgctgtttggctatcgtcgaatctcgtgagcgccatcaactctgtgtccttgc

SEQ ID NO: 260498 - DNA, 413 bp, Glycine max
  unsure (1)..(413): unsure at all n locations
cggacccgtggccgcgcactctctcttttctctcttaacacaaaaaccctatcgttcttcggggtttcgccgattctcgccatgccgaaagccaaatccgacgccaaagccgccgatagccggttgaagcgcaagggcgctggtgctggaaggaagcaatcgaagaaagctgctaaggatcctaacaagccaaagagacctccaagcgctttcttcgttttcatgtccgagttcagagagcagtttaagaaggagcatcctaacaacaaatccgtcgctgttgtcggtaaagctggtggtgacaaatggaaatcgctgtctgatgctgaaaaggcccccttcgttgccacggccgaaaagaagaaacangagtatgagaaaactatnttggcttacaataagaaattggaggg

SEQ ID NO: 260499 - DNA, 426 bp, Glycine max
acccgtagaaacctgtgacactctggttctcttgcggctagggttttagcgcaggtggggctagatttaaggaagatgggtaaggaaaaggttcacatcagtattgtggtcattggccatgtcaactctgggaaatccactaccactggtcacctgatttacaagcttggaggcattgacaagcgtgttattgagaggtttgagaaggaagctgctgacatgaacaagaggtctttcaagtatgcctgggtgctggacaaacttaaggctgagcgtgaaagatgaatcaccattgatattgcttatgggaaagttgaaacaacaaagtgttattgcacagttattgatgcgcctggacatatggatttcactgagaatatgattactgggacatcccaagctgactgtgctgatcttatcattgaa

SEQ ID NO: 260500 - DNA, 368 bp, Glycine max
cccacgcgtccgcaaattttggtccaattgcaactgtttaaatattgttactatagtctacgacatgcttgacttgggaagagtgtaacaaagtacctgatgcatgtgtttactaaaagaatatatgtatgtgtgtaatggttttcaactttggttttatgtaataaattgattgtgagtccgtaattgatcattgaagtaatcgtatgtaattcttactttaaaaaagaggaggattctatcgtcaattgaacagaaagaagaagctaaagggaacgatgtgagtgtgaagaggataaaagagtataggcagaaggtggagtctgagttgtccaatatctgcagtgatatcatgacttgtattgatg

SEQ ID NO: 260501 - DNA, 449 bp, Glycine max
  unsure (1)..(449): unsure at all n locations
ggctggagaaaattgagaacctccagagtcatgacaacacagagatttatgaaaaggcgggcaagattcttgagacatactggttggaggaggaagatgagactatgcctccaggggatgcttctcagtcagggttcaactttggtagcagtgacgctcctactgtgccatccggtggattcaactttaattagaagatattcatgctctactggggagttttgggtggtctatccgtaaagtcctccattatgacgcgacagcagttgggggataagtcaacgtcttgtcattgtcctaatgtccttgggtcgtacgaagtccagcaagttaatacatggttgctggactggcttgngttttttgcaatgcctggtatttcatatctcatggtgtaaaatgctntgtggctatatttttttgccaccgtagagaatactagagtcttc

SEQ ID NO: 260502 - DNA, 255 bp, Glycine max
gtctcgcgaacattgagagcctacagagtgttgacaacacagcattgtatgaaaaggcgggcacgatccttgagacatactggttggacgaggaagatgagactatccctccataggattcttttcagccatgcttaatgtttggtagctgtgactctcatactgtgccatacagaggattcaactttaattagaagatattcatgctatactggcgagtttcgcatgcggtatccgtatagcactgcatgatga

SEQ ID NO: 260503 - DNA, 426 bp, Glycine max
cagcgttagaactctcgtgtcttctttaaccctcaatcagcaacgtgcgccctcctggggtcaagctcagtcagcactgcaccgcaaatttttctttgcccctttcgatgagtaacgccacagactccgccggcgagatcccaccggagacgaggtccgccgagagtgacggtggtgggccccggcccacgattaagatcaatgttacgcacggttcctctcaccacgatttacacctcccggcccaatcaacttttggggatgttaagaaactccttgtcaataaaactggtttagagcctgcagagcaacgacttttcttcacagggatagaaaagggtgataaccagcgtttgcaggctgaaggtgtaaaggataagtcaaaaacttatcttttggaaggcattggtagcacagagaggaaac

SEQ ID NO: 260504 - DNA, 435 bp, Glycine max
tttctcttctcaatgtctcaagtgtgccgagaaaatcatggtggacgcatcagaacgtagatgcttggaggatgatgatccatctctcatgaaaactatcaagggcgcaacaactggtttagtggctggaactatctggggtactgtagttgccacctggtatgatgtcccccgtgtcgagagaaatgttgctcttccagggctgattaggactatcaggatgatgggcaactatggtttgacctttgctgccatacgaggagtctacataggtgtagagcagttggcgcagaactatacgatgaagagggatttagtcaatggacctgttggctgatttgatgcaggtgcaactattctggggtacagatgaatgagcatcaaaaccgcactatctgctggatcagcatatgcattcacatatgaattccttga

SEQ ID NO: 260505 - DNA, 347 bp, Glycine max
  unsure (1)..(347): unsure at all n locations
ataatctaccaatttgctggactaatagtaaattgaggcaaaaaatggaatctaaagagtccatcnttgtgaagctnntgctgattctgcatttgtccgttctctgggtttcacaggagtttgatttctactactttgttcagcagtggccaggatcatattgtgacacgacacagaacagctgttgctaccctacaactggaaaacccgctgcagattttggcattcatgggctttggcctaattacaaagatggttcatacccatctaactgtgattcagacaatcgttttcagccatctcagatatcagacctcactagtagcttgcaaaggaactggccacac

SEQ ID NO: 260506 - DNA, 365 bp, Glycine max
gtcagtactagctgaggggtgtaaataagtgacttttggaccatgcaattgcaattttccttatgtgaaaagtgattatctataattaatttgtgttctatatttgactaagatcctgcaaccataggaagcacttatcgcttgtaattttcaatgatcaaaattttacatttgttcttttttgttggcttcttcatctgtggcaattaagtttctatcacggaatacaaaagatggctcctatttcaagaatctacccaagtcaagtgccattaagctcattgatttcgggagtacatcatttgaacatcaggatcacagttatgttgtttcaacaagacactatcgtgcaccagaagttatct

SEQ ID NO: 260507 - DNA, 332 bp, Glycine max
  unsure (1)..(332): unsure at all n locations
agatgaggaagtcgcccgtgtatatattgctgaagtggtgcttgcattagagtatttgcgtgtcactgcgtgtggttcatcgtgacttgaagcccgacaatttattgatagcacatgatggtcacatcaagttaacagactttgggctttctaaagttggtctcatcaacagcacagatgatctgtctggtccagcagtgaatgggacatcactacttgaagaagatgaaactgatgtatttacatccgcggatcaaagggaaaggagggagaaacgttctgcagtgggcacacctgattacttagccccagagatactnttgggaactgga

SEQ ID NO: 260508 - DNA, 357 bp, Glycine max
cggacgcgtgggttggagttggacttatgggctacatgggaaacaaggggtcagtttggagtagtatgtctctctttcagtcacgtatgtgctttgtttgttcccatttgacttctgatcagaaggaacgggctgaacatatgcgaaactctgatgttcattaaattctaatacgcacttgcttctcatcatctgtatttgacgcagatcaaccactgactataccatctcatgaccagattttctggttccaagatttgaattatcgtatcaatatcatggatgctgaggttataaaattggtggctctaatgaagtgggatgagttgaagaactatgatcagctactcacagaat

SEQ ID NO: 260509 - DNA, 350 bp, Glycine max
gccacatctgctttaaaagcctgtacttttgaacctctctcgtgatcactctaatatggtgggggtggttttgaacgatcgatttgtgaagaaggtgcgcgtgaagtgcaacgacgatgataccatctgcgaccttaacaagcttgtggcggctcacactggctcaagagccgtcaagatccgcatccagaagttgtacaccatctacaatgatcacattactctcaaggattacgagatccatgaccgcatgtgtctcgaactctactacaactctacacaacaaggtgtgccttatgcgtaatatactatgtgcttctaatgggataagcgcttaatgtaattctgac

SEQ ID NO: 260510 - DNA, 376 bp, Glycine max
acagagaagagaagttgatgtcaacagcagatgctcctcctccgttccaagaagcagcgcgatgcgtcgtgtgcaattgcagtttcaacaccttcagaagaaggcatcactgtcgatcctgtgggagaacattgtgcaatgaacattcatcagatcaaatggctataccacaattcggcatttactcagatgtacgagtatgtgctgatcgtttcaacgactaacagtctgggaaggatgaaccacagactgcttcagagggacgcacagtgtcacagatccactttctaaatgagacctcgacacatatgttgattcaacgtccataccaactgcagagaataagcttgtgttgggcatttaagagtcgtaatgt

SEQ ID NO: 260511 - DNA, 445 bp, Glycine max
cccacgcgtccggtttgaatcgtgaaaatgttcagaaaccagtacgacacggacgtgacgacatggagcccggcggggaggctgttccaggtggagtacgcgatggaggcggtgaagcagggctcggcggcgatagggctccgatccaagacccacgtggtcctcgcatgcgtcaacaaggctaactccgaactctcatcgcaccagaagaagatcttcaaggtcgacaaccacatcggcgtcgtcatcgtcggcctcaccgacgacggccgcgtcctctaccgctacatgcgatccgagtgcatcaactataactacacctacgagtcaccggtccccgtaaggagactcgtcgttcagctcgcggataaagctcaagtttgcacccagcggtcatggaaacgttcttatggagttggactcctggtaactggattagatgaat

SEQ ID NO: 260512 - DNA, 384 bp, Glycine max
gtcttcttctctaaaataaaaaaccctactttctgaacctttcaccgcatcgccaccgatgccctatctccactaatcaaagaaaagaaaatgagtagacgctcgagcagaactgtctacgttgggaatctacccggtgatatccgtgaaagagaagttgaagatttgtttctgaagtacggacacataacacacatcgacctaaaggttcccccaagaccacctggttatgcatttgtagagtttgaagatgctcaagatgctgaggatgcaattcgtggtcgtgatggctatgattttgatggccaccggttacgggtggagcctgcccatggtgggcgtggtcattcatcctcaaaagatcggcacaatagtcacagcaat

SEQ ID NO: 260513 - DNA, 401 bp, Glycine max
cccacgcgtccgtgttcacaatgagaagcccatagcagagtctcttgtgattgttgaatacgttgatgagacatggaagaacaaccccatcttaccttctgatccttaccaaagagccttggctcgtttctggtccaaattcattgatgataagattgtgggtgctgtatggaaatctgttttcacggttgatgagaaagagcgtgagaagaatgttgaagaaacatatgaggctcttcagtttcttgagaatgagctgaaggacaagaagttttttggaggagaggaatttgggttggtagatattgctgctgtcttcatagcattttggatcccaatttttcaggaaatatcatggttgcagttattcaccagtgagaaaattcctatactctacaaat

SEQ ID NO: 260514 - DNA, 244 bp, Glycine max
ctcttcttctcttgcggctagggttttagcgcagcttcttctagatttaaggaagacgggtgaggaaaaggttcacatcagtcttgtggtcattggccatgtcgactctgggaaatccactaccactggtcacctgatttacaagcttggaggcattgacaagcgtgttatcgagacgtttgagaaggacgctgctgacatgaacacgaggtctttcaagcatgcctgggtgctggacatactt

SEQ ID NO: 260515 - DNA, 378 bp, Glycine max
  unsure (1)..(378): unsure at all n locations
gacaacgttgttgaacagcgaatattcgaggctgttcggcgaagacacggacttgtacaaccgcattgtgttgggcgccctattgccgcactctgtgtggggcccactcccgcgcttcctccagacgtggcttcgcaattacctcggcggcgttctcctctacctcctctctgggctcttgtggtgcttctacatttattattggaagcgcaacgttcatgtccccaaagatgctattccctctcaaagagccatgctcttgcaaatatctgttgctatgaaagccatgccgtggtactctntacttccaactgtttcggagtacctggtagaaactggctggacaaagtgctatcctagattatataatgttggttg

SEQ ID NO: 260516 - DNA, 450 bp, Glycine max
caaccaaaaccaaaaccagaagataacaattaaaccgttcttcttcgattcaagttcgaagaagaagcgatgagttcgggtagcagccacagcagtgagaaggagaaggagaaacagagggtgagtcgcacgtcgctgatactgtggcacgcgcaccaaaacgacgccggatcggtgcgcaagctcctccaggaggatccctcgctcgtcaaggccagggactacgacaaccgaacgccgctccatgtggcgtccctccacggctggatcgacgtcgccacgtgcctcatcgagttcggcgccgacgtcaacgcgcaagatcgctggaaaaacacccctctggcggatgcggaaagagctaagaagagtaatgtgatcgagctcttgcaatcgcatggaagattgtcttttgggcaaaatggaagccatttcgagccgaagccggtagcg

SEQ ID NO: 260517 - DNA, 433 bp, Glycine max
cccacgcgtccgcccacgcgtccgttgttccttctccttgtgatcttcttcaaccttcagagtgagaaaacacattcagaaaccacgtttctctcttcttcttcttcttcttctttttcttctctcgaggtcattattaagtattcaccatggaggcaccatcttccaccaaacccaacgacccaacaaaaccttccaacactttcaccacccttagtctggaggccggcccggcccaagcgagcccactccgaaaaatgtttgccgtggcgttcatcgccgacggcatacagttcgggtgggctctccagctctctcttctaaccccctacgttcagcttttaggagtcccccacgctgcggccttcttcatctggctctgcgggcccatcttcgggctcgtggtacagcccattgtgggctactacagcga

SEQ ID NO: 260518 - DNA, 334 bp, Glycine max
cccacgcgtccggccatttgtatatttgatgatgttgctgagcacggtcgtgaagccgctgttaaatattatgattcttttcttccattcttactcgaagcttgcaatgatgaatatcccgatgttcgacaggctgctgtttatggtgttggtgtttgtgctgagtttggtggatctgttttcagcccccttgttggagaggcactttcaaggttagatgctgtgataaggcatccaaatgcactacatgctgataacataatggcatatgacaatgccgtctcagctcttggaaaaatatgccaattccatcgtgatagcataaatgcagcac

SEQ ID NO: 260519 - DNA, 435 bp, Glycine max
aacaaaactaaagaaagcggtttcacagaccgagaaatcccaatcctatggcagaggaagggaaacccgatgaacagctctttcagcttctctccaatcttctccaccaggtggaatcactgacgaatcaagaagaagttgagctgcgttctaaaattgaaactcttggattagaggttacaaaagttccttcaaagtcaacgcagcaccttaacgagttggaaatagctgaggagttggataaattatcagcaagattggataatcttgatgagatgatatcatcatcaatggcttcagatccacaggtgcagtcactcttgagtgatacagccgatgtgtggatgccagttatcactgctacttctgaagaaaggcgcaacttcacagcggctactggagacagcaccctccaaactgatgtggaaaagtcta

SEQ ID NO: 260520 - DNA, 447 bp, Glycine max
  unsure (1)..(447): unsure at all n locations
ttcttcttcttctctcgcgccgcaataataatactaaaacatgtccaactctgatggagccactaacgccgtccctcccaacgacgccaacaacaacacaatcgttgagtaccagcagcgaaccaccaccaccaccaccgccgccgccgccgccctcgccgtcaagaaaccgccttccaaggaccgccacagcaaggtcgacggccgcgggcgccgcattcgcatgccgatcatctgcgccgcccgcgtcttccagctcacgcgcgagctcggccacaagtccgacggccagaccatcgagtggctcctccgccaggcggaacccttcatcatcgccgctaccggctccggcaccactccggcgagcttctccactgtctccgaccacaagcccctncttccttcccctacccccttcatcctggcaaacgcattcgccctgacgac

SEQ ID NO: 260521 - DNA, 326 bp, Glycine max
gagaaaggcgtggacgagttcccgttctgcgtgcacctggtctcgtgggagaaggagaacgtctccagcgaggctttggaggcggcgcgcatcgcatgcaacaagtacatggccaagttcgccggaaaagatgccttccacctgcgcgtgagggtgcatcccttccacgtgctccgcatcaacaagatgctatcgtgcgccggggccgacaggctccagaccggcatgaggggcgcctttgggaagccgcaggggacgtgcgctagggttaacattggtcaggtgctgctctcggtgaggtgtaaggatgctaacagtcaccatgc

SEQ ID NO: 260522 - DNA, 452 bp, Glycine max
gcttctctgattacaaaaatcacttttggggagatggggaggttcgaaaaccatgttgtcaaaggaggcatcaagttgccaattgggttcaggttttgtcccaccgatgaagagcttctccttcactacctcaagaagaaggcgtttgctcaacaattacccgcttcagtcatttcagagtttgacgtgtttcagactgagccatggaaacttccaggtgaattgagggaaaataggtacttttttagcaatagatcaaatggaaacatcaagagacctgctggttctgggtgctggaaatctgtaggcaaagaaaaacaaatcatccattcagagagcaatcaagtaattgggatgaaggaaacactgtttttttgcaaagggtcccatgagacaagaactcagtgggtcatgcacgaattgcgccttgtagctttctacccatgtcagat

SEQ ID NO: 260523 - DNA, 272 bp, Glycine max
ctcaattgaaactatgaaatcaacacacgccatgtgtgacgctctgaaaggcgttacataggccatcttgcaaatgaattggcaggtgtacatgccataattgcaaaaaagcatgcaagtctttgagagacagaatgagaagatggaatggacatacgagatgatgggcgatgccgtagatgatgcttagctaggagatgtagatgaagaggaaactgtagacctttgttaccaagtccttgatgtgattctcattgacatttaccaagatc

SEQ ID NO: 260524 - DNA, 438 bp, Glycine max
  unsure (1)..(438): unsure at all n locations
caaaaacttaccgatttttcgagcaattggaagctttagacggaaaccactcacttcttcctccgacaacaaccgttggtgatgatgttgtcctgaacgcggttccgtgttcggttagtgcggcggcgcacgagcattcgagttcgacgacgtcgtgttcggggaagaagaagaggaagctgacgcagtttctggaggggttgatgagggaagtgatagagaagcaagagacgctgcagaggaagtttgtggaagtgttggacaagtgtgaaaaagatcgaatggcgagggaggaagcgtggaagaaggaggagctcgaaaggatcaagaaagaacgcgagcttctggctcangaaagatcaattgctgctgccaaagacgaagttgttcttgcttttcttagaaagtttgcagaagcagaaggcacggtgcagttac

SEQ ID NO: 260525 - DNA, 443 bp, Glycine max
cccacgcgtccgcttctgtcccgtctgacaaattatctcatgtgtacactgccattttgaagcctgacaatgagttgcaaattttgattgatggggaacagaagaagaaggtaaatttcttatctgctgatgattttgaaccccctcttatccctcccaagacaatcccagatcctgatgataaaaaacctgaggactgggatgagagagagaaaattccagactcaagtgcagtaaagccagatgactgggatgagaatgcacccttggaaattgttgatgaagaagctgagaaacctgaaggatgggacaatgaacctgaggagatagatgatccagaggcaacaaaaccagaagattgggacgatgaggaagatggtgaatgggaagccccaaagattgagaacccaaaatgtgaagcagcccccggttgtggtgagtgg

SEQ ID NO: 260526 - DNA, 363 bp, Glycine max
caattttctagggtttatacaattttcgatggcttcttcagatgttgagtaccgttgctttgtcggtgggctcgcttgggccactgacgaccaagctctcgagagagccttctctcagtacggcgaaatcgttgaaacgaagattatcaacgatcgtgagactggaagatccaggggttttggatttgtgaccttcgcctcggagcagtccatgaaagacgccatcgaagggatgaacggccaaaaccttgacggccgtaacatcactgttaacgaagctcagtcccgtggtggcggtggcggcggaggcggtggaggtggtggatatggtggtggtcgccgtgggtggatatggtggtggtg

SEQ ID NO: 260527 - DNA, 452 bp, Glycine max
gcgggtctttcaaaaaaaggattagcttattttaataaatacatccaaccaaccccaatccttttaccgattaacatcttagaagatttcacaaaacccttatctcttagttttcgacttttcggaaatatattagctgatgaattagtagttgttgttcttgtttctttagtacctttagtagttcctatacctgtcatgttccttggattattcacaagcggtattcaagctctcatttttgctactttagctgcggcttatataggtgaatccatggaaggccatcattgaccagttttctacaaaatagtccttttcgtttagcttgccgcacatatattgcggctcaatataatctacttagtaaacatctatatctatctacctatatctatatagatataggtagatagatatagatagatattcgattagcatatattagcata

SEQ ID NO: 260528 - DNA, 436 bp, Glycine max
cacactactacttctccctctctccctctctaatagtaacagtaatagtaatatacataacataaccaatggaagcacgtgcaggagccaatcaacgtattgcaagaatctctgctcatcttcagccttcaaatttccaggaagggagtgatgttcttcttaagagaggtgagtgcagagcaaaaggtggggcacctggattcaaagttgcaattttgggggctgctggaggaattggtcaatccctttctttgctgatgaagatgaacccattggtttcagttcttcatctttatgatgttgtcaacacccctggtgtcacagctgatgttagccacatggacactggtgctgtggttcgtggctttctggggcagcaacaacttgagagtgcactcactggcatggacttggtaatcatacctgctggggtgcc

SEQ ID NO: 260529 - DNA, 417 bp, Glycine max
  unsure (1)..(417): unsure at all n locations
attcatcactagaagtgttggatgcatttctatttctaactaattattgtgcttattattattgttgagaaagaaaagaatggcaaagttaataaaattctttgagttgaacacaggggccaagattccttctgttgggttaggcacttggcaagctgagcctggtgttgtagccaaagctgtcaccacagccattctggttggatacaggcatattgattgtgctcaagcgtataacaatcaagcagagattggttctgctcttaagaagctttttgatgatggtgtggtgaagcgtgaagacttatggatcaccttcaaactctggtgttcagatcatgcttcagaagatgtgcccaaagcattggataaaacattgcangatttgcaacttgattaccttgacctctatctgat

SEQ ID NO: 260530 - DNA, 441 bp, Glycine max
gaaaaactggttcttttcgcgttgcgttttcttggtctccccgtcgattcttcttctgaaggttaatacttcggaacttttagtttcctctcctggcttctggttggagtttccggcgaccttgtcggagattttgttgtttatttttcgcaccccttgtgaaacttctcaaagaaaactaagaatgtttcttgttgattggttctatggaattttggcgacccttggtctgtggcaaaaggaggcgaagattttgttcctagggttagataatgctgggatgaccactttgcttcacatgctcaaagacgagagactggttcagcatcaacctactcagtatcccacttcggaggagttgagtattgggaagataaagtttatggctttcgacttgagtggccaccagattgctcgtagggtctggaaggactattacgc

SEQ ID NO: 260531 - DNA, 395 bp, Glycine max
  unsure (1)..(395): unsure at all n locations
cccacgcgtccgcccacgcgtccggcataactgaacaaacaaagcaaccctatgtcgaaggtggtttgtgtcaccggagccagtggcgccattggatcatgggtggccctcctgctcctccagcgtggttatacggtccatgccaccgtccaagacatcaaggatgaaaatgagacgaaacatttggaggaaatggaaggagcaaagagtcgtctccatttttttgaaatggatcttcttgacatcgactccattgccgctgccataaagggttgctccggcgtaatccacctcgcatgtnctaacatcatcggtcatgtcgaagatcctgagaagcagatactggagccggcgataaaaggaacagttaatgcgttgaaggcggcaaaggaagc

SEQ ID NO: 260532 - DNA, 306 bp, Glycine max
attctaaagtgtttgttgttggatctggtgctttgggatgcgaatttttaaaaaatcttgctctcatgggagtttcttgtggaagtcaggggaagctcactattactgatgatgatgtgatagagaagagtaacttaagcagacagttccttttccgtgattggaatattggacaggccaagtccacagttgctgcttcagctgctgcagctataaatcctagttttaatattgaagctctacaaaatcgggttggttctgaaactgagaatgtgttaatgataccttctgggaaaacttgagtgt

SEQ ID NO: 260533 - DNA, 446 bp, Glycine max
cccacgcgtgcgcaacactatgaccctctcactatcagtctcactaactcccttaacttagtgaaaactcaaaacactttgcagtttcactatgagctaccacaagcgccaacagcacgacccatgggttgcacggcgtccaagctcgcaaaccaggacaccgtgcagccggtgcaagggagcggaaccacctcatgaacgaggcggtctacgcgcgccatgacctctctgatgtccactgcgactactgccggaccgtctgcctcatcggctccgtcctctccagcttatccgtctgcgaatccgtctacagttgcgaccacactctcgacgtcttccataacaaactccaacaccaccaacaacaccgtcgacaacaccgttagttaacccttcaccttcgcctacgctagcgacaaaactcgccagcagcaacacacggcggc

SEQ ID NO: 260534 - DNA, 452 bp, Glycine max
cccacgcgtccgttacaataaaaacactcaaaagaggagaaaaaaagaagaaaagaatggtaacaatagctggtggtgtgagtctttcaagccctagcagggtatttgctaatgctaagggaatagactcagcacaaaaggcccaggccgtgaggtttccagctctgtcgaggcccattcaaaagtggcctggtttggtgaagacccggcccgttcgggcgacgccggagaagatatcggagaaggtagaggagagcataaagagcgcggaggaggcgtgctcgggaggcggcggtgacgcggaatgcgcggcggcctgggacgaggtggaagagctgagcgcggcggcgagccacgccagggagaagcagaagcagtctgacccgctcgaaaattactgcaaggacaatccagagactgatgaatgccgcacctatgataattgatgactg

SEQ ID NO: 260535 - DNA, 450 bp, Glycine max
  unsure (1)..(450): unsure at all n locations
cccacgcgtccgaaaaagagttctttcaaaatgcaaacagccttaaccttcgctgcccccaacgttgtgccattggcacccacaaagagtgtctcccatattaccatctttcctaccaaattgaaagccccgcgctcctcacctcgttactctccgattagggttgcaaccgtggagcccgacacttcaactgtcgactacaactctgcgttctcagtgtttcctgcagaagcatgcgaaactgtaagaggggaagcctgcatggcggagatgtaccctgaaacgaagctacagccagaggctaagactccacgagtcgttacagagaacgttgagagagagtatcttgaatacgatgatcctaanacgtaagatatataggaatcaattcagatacactcttattatagaggtttttaaagtgacaactaaatagaaatcatcatggac

SEQ ID NO: 260536 - DNA, 414 bp, Glycine max
gaagaacatacagtgatcgagtgcgtattcggattgttgggtactggattcgcgatcgtggcggctgattcatcggctgtgcacagcattctcgtccacaagtacaacgaggacactatcatgcttctctatttccacaaactcatcgacgttcgcgatcagctcggatacagggttcaattcactgagtacattcagaaaaacgtctgcttgtatcagatccgtaacggcatctatattaccaccgtcgactacgccaatttcacacagggcgaacttgccactgctctacgcaagaacccatactctgtgaacatacgttttgctggccatgacaaacatacaggcccttgactgcactatattgactacattgcaacgcttcagatgcttgaaaagggagctcatggttat

SEQ ID NO: 260537 - DNA, 439 bp, Glycine max
gttcagttctgaacggaaaagcaccgtcgcaccttctctgaggcttctattgtctgtcgcgagtgtccatggtgagggttagtgtgctgaacgatgctctgaagagcatgtacaatgctgagaaaaggggaaagcgccaagtcatgattcggacatactccaaagtcattatcaaattccttttggtgatgcagaagcacggatacattggagagtttgagtatgttgatgaccacagggctggtaaaatcgtggttgaattgaacggtagactgaacaagtgtggggttattagtccccgttttgatgtctgcgttaaagagattgaaggttggactgctacgcttatgccctcaagactagttgggtatattgcattgactacctctgccggcatcatggatcactaataagctaggagaaaaaatgttggtggtaa

SEQ ID NO: 260538 - DNA, 449 bp, Glycine max
aaaaacttaagttcattccttgtgttttgctttcttcctcaaaaccaaacatgtcgaacacatgctgcaactgcgactgcgctgacaagactagctgcaccaagggaaacagctatggtgttattgtagagactgagaagagttacatcgagactgttgtcatggatgttccagcagctgagcatgatgggaagtgcaagtgtggcactaactgcacttgcacggactgcacctgtggccattaaggaatatgtatgaaaatgtaattgccatgtgtttggcaatacaaatatccaaataatgtaatcttcgtatgaataaatgtgtgtgctgttatcctacttcaggtctgtgtagtcatgcagtctgaatcatttcaagctcctgtcttaggtaatataacagccatggtatgtggcattctatggtgtattagactaaaataagtg

SEQ ID NO: 260539 - DNA, 453 bp, Glycine max
  unsure (1)..(453): unsure at all n locations
cccacgcgtccggccaccgcaagcaacaatgacgtcgccgccgccaacgacggtcccgtgatgagccttatcaacaagcgcctccgcgctctccgcaagaagctgaaccgcatcctcgccatggaagaggccgtcaccttgggcaagcccttgaacaaggagcaggaagaggttctacgctccaaaccctccgtcctcgccctcatcgatgagctcgataagctccggcaacctctcgccaccgctctctccgaagagctccaaatcaacggcacgtcttctcaaaaccctcgccacgagaccgagaccgaaaacgaaaccctagctgagagctccggctcgactgagccgaactcgaactcgaggaacgacgtcgttgtggaggaccttgctaatttgctctatnttggttcacttttcgatgtgaagagtgactttgcgtccacgatgctt

SEQ ID NO: 260540 - DNA, 437 bp, Glycine max
gtaaataccatgactatgaccacaagtgaaccattcatgtcaaacatgcatgtgacttttcatatatctcataataaaaccgcaagccattaatgtcaaaatataataacagactaataaactcaacaaggaggagaagatgtcgactccggactaggaagagactgatgagggaattataaaagattgcaacaagaatcctacagctggcatcagtggggctccccaagacaataatattatgctttggaatgctgttatctttggcccagatgacaccccttgggatggaggtacgtttaagttgacacttcagtttacagaggattatcctaataaaccacctactgtgcgctttggttctcgaatgtttcatcctaacatttatgcggatggcagtatatgcttggacattttacaaaatcagtggagcccta

SEQ ID NO: 260541 - DNA, 449 bp, Glycine max
cggacgcgtgggggaaaactctggacaaaaaatggagtgctacacaaggccaaacaggagtgacatccacctctcagcagaggaagaagccaccatagaagcaaagaccagagagtactttgatggaatcgcaccacaccgccacacaaagcctcaacgaagtgactattcagctcaatatgtcgatgctttctccaatagcccatcactcttctttaactataccagaattaacacaattccaactcctccagaatgatccccaagagaagaaatcggtgtacaatggaagtcaagtaccggaagaatttgtggaaacagagtattaccaagatctcaacagcgtggacaaacaccaccatacgactggaacaggatttatcaaagtagagaaaaatggaaatgactttcacatagaaccagataatgacactggttgccatcactct

SEQ ID NO: 260542 - DNA, 258 bp, Glycine max
gttagtctcagaaatcggtaaacaaataccggttacagtggatggtcatgtattattaagtgtacgaattggtaacgaataattattttattaatgaaacatgtattttttttaaaaaaaatacagtggatgttctacactgtaacttagtctgtgtactgttgaaggactaattgaaaggtgaagaattcacataatgattcttctccccccttccttttaaaaaaataatagtaagaactaataaataagttgaac

SEQ ID NO: 260543 - DNA, 443 bp, Glycine max
cccacgcgtccgatccctctaatcactctagctgttgcaaatttctactatttttcaatggcttctgcagatgttgagttccgttgctttgttggtgggcttgcttgggtcaccggcaacgatgccctcgagaaagccttttcaatctacggcgacatcgttgaatcgaaggttatcaacgaccgtgagactggaaggtccagaggattcggatttgtgaccttcgcctcagagcagtcaatgaaagatgcgatcgcaggaatgaacggccaggaccttgacggtcgtaacatcactgtcaacgaagctcagacccgcgccagccgtggtggtggtggaggcggtggtttcggaagtggtggtggatacaaccgcggtagcggtggatatggtggtggtggtggcggcggcggatacggtggtcgtcgtgaaggtggatacaa

SEQ ID NO: 260544 - DNA, 446 bp, Glycine max
gttctgaaaccactctcgcgtcgttaccatgccgcaaggggattacatagaacgccacagaggagactatggctaccgtctcgatcacttcgagcgtaagcgcaagaaagaggcacgtcaagttcacaagcgctctgcaattgcccagaaggctctgggtattaagggcaaaatgattgccaagaaaaattatgctgaaaaggcgcagatgaagaagactttggctatgcatgaagaatcatcgtctaggcgcaagactgatgataatgttcaggatggagctgttcctgcatatcttcttgatcgtgataacacgaccagagcaaaggttcttagcaacaccattaagcaaaagaggaaggagaaggcagggaaatgggatgttcctctacctaaggtacgtcccgtggctgaagatgaaatgttcaaagtggtccgaactggta

SEQ ID NO: 260545 - DNA, 407 bp, Glycine max
tccaaaatttccacgacgaggcaccgcaatggacgaaccgaacgacgcacaagacaacagggaactctacgcgctcttgaatgagtattcagaagcttccgatgaagaaattcgcagagcgtatcgtcaatgggcgcaagcctatcataccgataaataccaagctcctcacatgaaggatattgctacggagaactttcagcgaatatgcgaagcgtatgagattctttcagatccaaataaaaggcagatctatgatatctacggcatggaggggttgacctctggtttggaacttggtccaaagcttaatggaactgaagagatcaaggcagaactcgagagattgaagaggatgaaggaacgcgagataatggcggcgcattttcaacccttcggtacaattg

SEQ ID NO: 260546 - DNA, 397 bp, Glycine max
actatatataggtttttatagggtatcctttgtgtgaaactcaagagacctcgttttcaggggattttctgtttgatgtccataaggattatcaattatgttatatatggtctgggatacagtcttgacttacagtttttaacttggttgttttcattgttatggcaaaaaaaaaaaaacaaaaaaaaaaaaaaaaaaaaaaaaaaaaaaaaaaaaaaaaaaaaaataaaaaaaaaaaaaaaaaaataaggacaacacttatgaacgttcccaacatcgaacccctcctgcctaccttatacatcgccattactgcgacccaaacacatgtcattaggccgaatctttacaccgaagtggctggggaacccatggcgttaccctacttaattacctt

SEQ ID NO: 260547 - DNA, 334 bp, Glycine max
gcattattttgaggataatgtgaaggaaatcctaaattttcgtggatttaattctgaaattggcctccaaattcttgttgataaatcactcataaccattagttacgggaagatttatatgcatgacttgttgagagatttaggcaagtgtattgttagagaaaaatcacctaaagagccaagaaagtggagtagactatgggattgtgaagatctctacaaatttatgtcgagcaataaggaagcaaaaaatctggaagccatagttgttgaagatgaaccagggatgttttctgaaacaacaatgagatttgatgctctatcaaaaatgaaa

SEQ ID NO: 260548 - DNA, 338 bp, Glycine max
gaatcacgctgatttgagtaacgaagtagttgtgctggttgctgttgtaatattggttggggtattcagcatgcatcattatggttcagataaagctggttggctatttgctccaattgtccttctttggtttcttctaattggcggcataggaatattcaacatctgtcaatatggcagcagtgttctaaaagctctttcaccattgtatatataccgctatctacaacgagaaggcaaagatggatggctttcccttggtggcattttgctcagtataacagggacagaagctctttttgctgacctagcacactttccagtttcttgtgtacaga

SEQ ID NO: 260549 - DNA, 452 bp, Glycine max
ggaaaaccctagctagtagtctcagttcgtttgagagagaaaaaatggcagagggtctcgttctccgcggaaccatgcgcgcccacaccgacgtcgtgacggcgattgccactcccatcgacaactccgacatgatcgtgacggcgtcgcgcgacaaatccatcattctctggcacctcaccaaggaggacaagacctacggtgtcccccgtcgccgcctcaccggacattctcacttcgtccaggacgtcgtcctctcatccgacggtcagttcgccctctccggctcctgggacggcgagctccgcctatgggacctcgcggctggcacctctgcccgccgcttcgttggccacaccaaggacgtgctctccgtggcgttctccatcgacaaccgtcagatcgtgtcagcctctcgtgaccgcacgatcaagctgtggaacaccctgggt

SEQ ID NO: 260550 - DNA, 443 bp, Glycine max
  unsure (1)..(443): unsure at all n locations
ctcactgtgtctgtctatgtgtctcttacacccttccattttctccttctcttcctcccatggtgtaattgctccaactatggccgtggacctcatgacgacgggttgcagccgaaacgacaacatcaatagtttcacaaccaaagccgaggaaaatgccgtccaagaagctgcttccggcttagagagcatcgagaagctcatcagactcctctcgcaaacccaaacccaaacccgccatcaaatcaacaacaatagctctaatgaaatcgccatcgccatggactgcaaggtcgtcgctgacgtggcagtctccaagttcaagaaggtcatatccctcctcggccgaacccgtaccggccacgccaggttccgacgcgcccctctccccaaccaaaaccaacacactcaacctncctccgaaccacccgtgttccacgcta

SEQ ID NO: 260551 - DNA, 434 bp, Glycine max
  unsure (1)..(434): unsure at all n locations
gggtgatgatcgagagagagcttttgggccgggagattatgaatgggatagcatgtgaaggttctcagaggattgagaggcctgagacatacaaacagtggcaggttaggaatacgagggctggtttcaagaagctccctctgaatgaggaattaatggccaaattgaggactgcgttaaaggaatggtaccacagattttgtcttggatgaagataacaactggttgcttcaaggttggaagggccacattttgtatgcttccacttgttgggtgccagcataatgagatgctactggactgggttcagaactcatactatactgaaggttttggtatccttggtttggctacctctactagcttaaccttcaggtgctgtgatgaagatngcaacaagctttgcacgaagttacttggtaaaactatggcac

SEQ ID NO: 260552 - DNA, 449 bp, Glycine max
gtgaaaacgaatggaggttgatgatcgagagagagcttttgggccgggagattatgaatgttatagcatgtgaaggttctcagaggattgagaggcctgagacatacaaacagtggcaggttaggaatacgagggctggtttcaagaagctccctctgaatgaggaattaatggccaaattgaggactgcgttaaaggaatggtaccacagattttgtcttggatgaagataacaactggttgcttcaaggttggaagggccacattttgtatgcttccacttgttgggtgccagcataatgagatgctactggactgggttcagaactcatactatactgaaggttttggtatccttggtttggctacctctacttgcttaaccttcaggtgctgtgatgaagatggcaacaagctttgcacgaaagtacttggtaaaactatggcac

SEQ ID NO: 260553 - DNA, 227 bp, Glycine max
gaaaaagacatttgtcaatgtttgaaagtattgaaaattatctagaacaaaataacttgatgcctattagatattcatacaaggaagttaagaagatggcgggaggttttaaagacaagttgggtgaaagaggatatggctctgtgttcaagggaaaattgcgtaacgggtcttgtgtggcaataaagatgttaggtaaatcaaaaggaaatggccaagattttatt

SEQ ID NO: 260554 - DNA, 303 bp, Glycine max
tgcagatcttcgtcaagaccctcaccggatagaccatcacccttgaggtggaaagctctgacaccatcgacaacgtcaaggccaagatccaggacaaggaaggaattcccccggatcagcaacgtctcatcttcgccggaaagcagctcgaggacgggcgtaccctcgccgactacaacatccaaaaggagtcaacccttcaccttgtccttcgtctccgtggtggcatgcagatcttcgtcaagactctcactggcaaaaccataaccctagaagtcgaaagctctgacaccattgacaacg

SEQ ID NO: 260555 - DNA, 369 bp, Glycine max
  unsure (1)..(369): unsure at all n locations
attttatccaattgaaattttaaaaatgactgggataaacttaagaattcaattattgaaattgaataagtaaacaatttaattggattggtcgaatggtatcaaaaaaatggagtactaactcccatttcttatttattattgaattaaccgatcaacttgctttgttatcgaacatttctttttgatttcaaaaattttccggaaaaaatttgaatctatttttatatgcgaatcaatcctactacttctggtcctgaggtttctgcgcttganaaaaaaaaatctgggacgtatcgccaaaatattggtcccgtacttaaaggaacttttcccccaagtaagaagcctaatttttaccacgctttt

SEQ ID NO: 260556 - DNA, 228 bp, Glycine max
attttatccagttgaaatcattgaactgacttggataaacttaagaatgcaattatggatagggaatcagtgaacacttcaattggattggtctaatggtatgaaaaaaatggagtactcactccgatatattattgattattgcattaacctgtcaactcgctctgtaatggtgcacttctttccgatctcaaaacttatgcagaaaacagcagaatctatctggat

SEQ ID NO: 260557 - DNA, 439 bp, Glycine max
cccacgcgtccgcccacgcgtccgcccacgcgtccgggaagatgagtttgagggcatcagagatagcgaagaagttgaatctgcaacctcacccagaaggtgggttttacgtggagacattccgagaccattccgtccagctttcgacctctcagctcccccccgaatacaaagtggatcgccctgtatcgacctccatctattttctcgttccttctgggagtgtgtctcgcctccatcgcataccctgcgccgaaacctggcatcattacatcggcgaccctctcaccgtatgtatatcttcatctctctctttcttttttaacctaatctgatatgaattgtattgcaagtagtggaattgaatgagaaagatgggagcgtaaaattcacttgccttggatcagatctgactcagaatcaagtgccgcagtacacg

SEQ ID NO: 260558 - DNA, 455 bp, Glycine max
gcgtccgcccacgcgtccgctgacaagctgaggtcattggtgcgaaaatggcaaactctaattgaagcccatgtggatgtgaagacaactgataactacacattgaggatgttttgcattggatttaccaagagaagagctaaccaagtgaagagaacctgctatgcacaatcaagccagattagacagattcgtaggaagatgagggagatcatgaccaaccaggcaacatcctgtgatttgaaggagttggtccgcaagtttattcctgagattattggaaaagagattgagaaggcgacatctagtatttaccctttgcagaatgtgtttgttcgtaaagtcaagatcctgaaagcccctaagtttgatcttgggaaactgatggaagttcatggagattactcagaggatgttggtgccaaagtagacagacctgctgatgaaataatggc

SEQ ID NO: 260559 - DNA, 392 bp, Glycine max
aaagattctaaagaaatataactaatattctttagaataatcaaaaagaatattaaattcaaataaattttagatagaaaaaagacttaaaaaggaggatttgaaatgcgagatctaaaaacatatctttccgtggcaccagtagtaagtactctatggttcggggctttggcgggtctcttgatagagatcaatcgtttttttccagatgcattgatattcccttttttttcattctagttattgacacggaaaggggtgaagaagattatagatccaattaagtattaaatatatgtaattaatatgtaattaatctcctcttctttatttcgtcttttatttcttcttttttttacaattgtaatagaataagttaggaaagagaaaga

SEQ ID NO: 260560 - DNA, 369 bp, Glycine max
cccacgcgtccgcgtaacgcattcaccacgatggtgaccaaagcgatggaggtggtgaaggatctggacgtgaagcggtacatgggtcggtggtacgagattgcgtgcttcccgtcgaggtttcaacccagtgacggcaccaacaccagagccacctacactcttcgagatgacggcaccatcaacgttcttaacgagacttggagtggcggcaaaagaggtttcattgagggcactgcttataaggctgatcccaacagcgacgaggccaagttgaaggtcaagttctgggtgccttcctttttacccatcattcccgttactggggattactggcttttgtacattgaccaggattatcactatgct

SEQ ID NO: 260561 - DNA, 428 bp, Glycine max
caattccaaattttcagtttcttcctcgcttttctgcaaaatcatctaaatccgtttctgatcctgaatcatcagtttttcccttgaaagatgggaggtggcaaggacaaacacaatgaagaagagaaaggagttttctcacatctggctcatggagtagctcaagctgctcatggttaccctccaggggcatacccttcacctactggggcataccctccttaccaagggtacccacctgctcatggctacccttcacaaggtggctatcctccggctggttattcccctgctggctatcctcctgctgctggtggttacccccctgctggttaccctccacatggttatcctggatcatctgctccacatggatctcatgcgcctgggcacggcggtatgggggcattgcttgcttgtggtgctgc

SEQ ID NO: 260562 - DNA, 244 bp, Glycine max
cggacgcgtgggcggacgcgtgggtgcttggcagatcgttgcacagattcctccatcctagggtagtgctagaaagagtaaagtatgtcctgcaaggatggtagcagaaacggaatcggaatggataacgggaagtatgtccgttacacgcctgagcaggttgaagccctagaaaggctctatcacgattgccccaaacctagttccattcgccgccagcagctcattcgcgagtgccccattc

SEQ ID NO: 260563 - DNA, 425 bp, Glycine max
acgcgtacgcgtacgcgattgttagtgtggacgatttggaagatataattggggggcatgtatggttgggttccatttgtatacttggtggaatctggcatatcttaaccaaaccttttgcatgggctcggcgtgcacttgtatggtctggagaagcttacttatcttatagtttaggtgctttatctgtttttggttttattgcttgttgctttgtctggtttaataataccgcttatcctagtgagttttacgggcccactgggccagaagctatttcagctcaagcattacttttttagttagagaccaacgtcttggggctaatgtaggatctgctcaaggacctacaagtttaacgtaatatcttatgcggtccccgacaggagaagttatttttgggggaaaaactatgccgttttggg

SEQ ID NO: 260564 - DNA, 451 bp, Glycine max
caaaggcggcatctgaagcatcttcaaagtttggaccagccttggcttcaggttcaggtgtctttgtgtttgagaaggtgtccactttcattgttacagaagaaaaagaagttgaagcccctcctgcagtagaaactaaaacagaagaagaaacaagtagtgttgtcaaagagagggagacagtggttgaagaagaaaaaaaggaagaggaaaaaccacaagcagacgagacaagtgatgagaaaaaagtggaagaaaaacaagctgagactgctgctaaagaggaagagaaacctgctgaaccagcagaaccaccaaagccttgaaaatttcgttctgaacagaagctatatatatgtagctgcttcatgaagatgcagaagatcatatacgtgcattcttagtttgcatatagtccaaaattgtcacataccattcccttattctttta

SEQ ID NO: 260565 - DNA, 447 bp, Glycine max
agacaatggagaggtgttggatgaaggcgtgcaggggtattctttgattttcaaagggagtggagttgaagaattgactcgaaagtttgaggaagaaacagggctagagggaatcattgtgtgtaatcggagtccattgaatggaaagctttatcctcttcgcttgcagcttcctccaaacactgtcaccatgcgggttgttttggttcttcccttgtcaaatttggcaagagactttgaggaacaaggcttactgtgagaagccttaaaattttccaacgaagacctatgtatatgtactgatcgaagccagttcagaatttaagaattaatgtgttctagtccattgcatttattaagcagagttcatcgtggtcctgtgtgggaagcttagcgttgtcatgggatgggtcataaatgaaataatcctttatcaatgacatgtgc

SEQ ID NO: 260566 - DNA, 438 bp, Glycine max
cggacgcgtgggtgaagaccaccactctcttctggcggcggcgtgccggttgggcagggcgggggggcatttacagcggggcctctttcggattcggcctcagctggtaccgtgaagcgcaggggcagacctcgtggttctgtcaacaaaaataagaagaatgatagctctaactcctctaagcattctgggccaggatcttggtttactccgcatgtcattacggtgaacgctggagaggatttgtcagcaagaattatgacaatttcccagagtacttcaagaaatatttgcatcttaacagcaaatggagccatatctaatgtgacacttcgacaacctgcctcatgtggtggaactgcgacttatgaggggcgatttgagatcctatcacttcgaggctctttttttcgcgcttgaacttaaaaagcttggggg

SEQ ID NO: 260567 - DNA, 397 bp, Glycine max
  unsure (1)..(397): unsure at all n locations
tctcacttcaagggcaagtaccatgatgagcttatcgccaatgctgcgtacattggcactgctggaaagggtattcttgctgctgatgagtcaacagggacaattggcaagcgtttggccagcatcagtgtagagaacattgaatccaacaggcgagctcttagggagctgcttttcactgctcctggtgttcttcaatatctcagtggtgtcatcctctttgaggaaaccctctaccagagcacagctgcaggcaagccctttgtgaatgtcttgaaggaagctggtgtgcttcctggcatcaaggttgacaagggcacagtcgagcttgctggaactaatggagaaaccaccactcanggtctagatggccttgtcagcgttgtgccaagtacta

SEQ ID NO: 260568 - DNA, 408 bp, Glycine max
  unsure (1)..(408): unsure at all n locations
cccacgcgtccgcaattctccaagcttctcaccaagaaacaacatgcctgagatgcgctccccaagccttcttgacttcccttcccttgctctaagccctgttacaccattgaatgatgacccttttgacaagtcctccccttcattggggaactcgtcagaggaggataaagccatagctgaaaagggcttctacttgcatccctctcccatgaccactccaagagactcagaaccacagctcttgccgttgttcccagttacctcacctagagtctcatcacaatcaccttcttgatcttgatgagatgaaaagagatngtgttcctgtgctgtggatgattggttaattacatcatgnggtttttatttttgatttgaatatgggttatgggttcctctatcaac

SEQ ID NO: 260569 - DNA, 195 bp, Glycine max
gcctatacgaacctaattcattatttcagggttattaattagaacccaagggaagaaggcgggtaggtggaaaccaaaaatggcaatggaaggtttttttggacaccaaatatttttactttcattttttggctggaaggataaaaaaatggtatggttcaaccttaaacttatttggatggaactggtaatagc

SEQ ID NO: 260570 - DNA, 298 bp, Glycine max
agaagacgagttgaaaaaagtcacggcacgtggtatcagagatatatctcaaatctacacaaggcttcttactaggctctgggtgatgggcactaaaaaaatggactacatttggttcacacatggtgtcatatttccactgctccatacacagccgcatggggtataagatgttatatacaggggagaccagttgatttgactcctgagctagaggaggctgctacaatgtatgcagtcatgcgagatacacagtacatgcagcaagatatgttcaaggaaaagttctggaatgact

SEQ ID NO: 260571 - DNA, 398 bp, Glycine max
cccacgcgtccgcattactattggatctggaactaatatacaagacaattctcttgttcatgttgccaagtctaatttaagtggaaaagtcttgccaactatcattggagataatgtcactgtaggtcatagtgctgtgttacaaggatgtactgttgaggatgaggcatttattggcatgggtgcaaccttgcttgatggtgtatatgttgagaaacatgccatggttgctgctggagctcttgtcaggcagaataccaaggatcccttatggagagggttgggggaggtaatcccggcaaggttcttgagaaagctcacagaagatgaaatgaccttcttctcacaatctgccttaaattattctaatttggctcaggctcattctgcttgaaatg

SEQ ID NO: 260572 - DNA, 367 bp, Glycine max
  unsure (1)..(367): unsure at all n locations
atttcaacactggggtgatggtgatggatttggtgagatggagagcgggcgactacacaaggaagattgagaagtggatggagattcaaaaggagagaaggatctacaagttggggtcactccctccctttttgctggctttcggtggtaatgttgaggccattgaacatagatggaaccaacatggtcttggaggggataatgtaagaaatagttgtaggactctgcatcctggtccagttagtttgctacattggagtggtaaagggaaaccatggactaggctngatgccaagatgccttgctcagtggattttctttgggcaccttaatatctctacataccccatcaccatacataccatca

SEQ ID NO: 260573 - DNA, 463 bp, Glycine max
aatttgtaattatattattacacacatatatatatagttgaggaataaaacaaaggctctgatatcaaagcagacacagctagctattcacaatggccctgcgggttcatttctcaatagtttccatagcggttttggctctatgcacttctgcagattacttttcggctaattttagctatgctggtccaaatggacctgagtactggggaagcttgagtccatcttatgcagcatgctcacatgggaaatctcagagtcctgtggaacttatgaagactgatattgtcatcaacaagcagttgaagaatctaaacagaaactaccttcctaccaatgccacacttgttgacaacatattcaacattggggtgcactttgaaggaaaagtaggggatattaatataaatggaaaaaattactccttaaaacaattgcactggcattctccatcagagcacat

SEQ ID NO: 260574 - DNA, 410 bp, Glycine max
gggctttctaggcttgcattgacagaaacatctcatatctcaaccgccccacaagggactgcaggttatgtcgatccccaataccaccagaactttcagctttctgataaaagtgatgtctacagttttggagtggttttggtagagataataactgccatgaaagtggttgattttgctcgacctcgaagtgagattaatttagctgcacttgctgttgataggattaggagaggtgctgtagatgagatcatagaccccttccttgaaccacatagagatgcttggacactgtattctattcataaagtggccgagcttgcatttagatgccttgcttttcatagtgacatgaggcctactatgatggaagtagcataagagctagaacacattagacgcagtggatg

SEQ ID NO: 260575 - DNA, 400 bp, Glycine max
  unsure (1)..(400): unsure at all n locations
gaattattgtcttcacatttgagcctaattgttaaggcttcaggttttttcttaccttgggctggctggaagcatttcaaataactgttctgtgaattgttatgtagttgggccagaacacactgtcttggagtctttggaatttgatttggttacaattgaagcagccacaaacaatttttctgaagaccgcangattggcaaagggggttacggagaagtgtacaagggaatccttcctaaccgagaggaagtagctgtaaagagattatcaacaaattctaagcaaggagcggaggaattcaaaaatgaagtgttgttaatagcaaaacttcaacacaaaaatttggtgaagataggtaggattttgcccagaagacagagaaaaaatacttattta

SEQ ID NO: 260576 - DNA, 482 bp, Glycine max
  unsure (1)..(482): unsure at all n locations
acgaagtgcttgaattggttgaattctaagaaacccaattcagttctttatgtcagctntggaagcttggctcggttaccctctgagcagttaaaggaaattgcttatggtcttgaagcttctgaacaatcgttcatttgggtggtgaggaatatccataacaacccatcagaaaacaaagaaaatggaagcggaaactttcttccggaagggtttgagcagaggatgaaggaaaaggataaagggttggttcttagaggttgggctcctcagctgttgattttggagcatgttgcaatcaaagggtttatgacccattgtggatggaactccactttggaaagtgtgtgtgctggtgtgccaatgattacgtggcctctctcggccgagcaattntcgaacgagaagttgataactgatgttttgaagattggtgttcaagtggngagcaaggagtggtggtcgtggaattcagaatggaa

SEQ ID NO: 260577 - DNA, 297 bp, Glycine max
  unsure (1)..(297): unsure at all n locations
gaanacccgggccgaccgacgcgtaccgcaaaaccttaagtatcggatcaggttttagtaattttgttggtagaacctttcgtcgtagggtgtcaattattatggctgaatcacaccatcaaattcctactgccttcgatccttttgctgatgcaaatgctaatgactcgtttgctgtgtcaaaggagtatgtgcatattcgcgtacagcaacaaaatttaatgaaaagcctgacaactcttcagggattgaaaaaagaattcaactataacaagatacttaaatattttaacaaag

SEQ ID NO: 260578 - DNA, 456 bp, Glycine max
  unsure (1)..(456): unsure at all n locations
cagacggcttcgcaaatacgggctccgatatgacgatttgtacgatccttactacgatctagatgtgaaggaggcgctgaatcggcttccgaaagaggtggtggacgctcgccacgcgcgtcttaaacgcgccatcgatctttccatgaagcacgagtacctccctgacaatcttcaggcaatgcaaacaccattcaggggctaccttcaggatatgctgactcttgtgaagagggagagagccgaacgtgaagcattgggaggtttgcccctatatcaacgatccattccttgagtgcattaattattttgattgaagtgggaaggttaaattgtattgatgttgtgatagaatgttttcttttaaagaagaaaatatggacaagctttgtggtataaactntataatgaatgcantttttaatggtatcaacctggcgcaggcattttattaat

SEQ ID NO: 260579 - DNA, 450 bp, Glycine max
aaagagatcacatagcagaatggcttctactcaatgtttcttgcaccaccatgctcgtacgacccctgccagatccccatcacaacgcatcatggttagcaccaagcctaaccagcttgtttgcaaggcacagaagcaagaggatattgatgtcagcccaatctctcgccggttagctctaaccgtgctcattggtgctgctgctgttggctccaaagtccaacctgctgatgcagcttatggggaagctgccaatgtgtttggaaagccaaagacagacacagatttcctgccatacaatggagatggattcaaactatcgattccctcaaagtggaacccaagcaaagaggttgagtacacaggtcaggttgttagatatgaggataactttgattcaaccaccaacgtggttgtcaccatcactccgactgataagaagtctatcac

SEQ ID NO: 260580 - DNA, 395 bp, Glycine max
  unsure (1)..(395): unsure at all n locations
cccacgcgtntcgccacgcgntccggccacggttggctttcttaaaacacatggatggcggggataatcgtgccaacaactttgtctctaggtccatgaccatgggttacggcacttcctaccacagaactagtttaaggaacaacaacaacaacaacaacaacaacgtttctgtttcttcaccaagatctgcgagattctacgacgccagattcgaagatcaacaccacccccacttnctctccgcttgtttcctctgcaaaaaatctctcggggacaatagagacatcttcatgtatagaggggacacaccgttttgtagcgaagagtgcangcaagagcagatggagatagacgaagcccaagagaagaataggaacctttcttcatcgatg

SEQ ID NO: 260581 - DNA, 447 bp, Glycine max
  unsure (1)..(447): unsure at all n locations
ccctaacatagcatcatcctaaggcacatccttctccccctgaatacttggccctccggggggacgcgacttataaagacgatctatatntaaggaagaggacagggatgcgtcgggggctttgttgcacatgtcaggtggaagagtcttacccatcaaatgaaaatgagcacctgaaaagcccaaggaattatggagatggaaatcaaaaaggctcaaaggtgtcagctcctgtcaagcctgaaacacaaaaggcacctccacctattgaagctccagccttatctttagatgagctgaaggagaagacagacaactttggttcaaaggcattaataggtgaaggatcgtatggaagggtgtattatgcaaccttaaacaatggaaaagcagtggctgtgaaaaagcttgatgtttcatctgaacctgaatcaaataatgagtttt

SEQ ID NO: 260582 - DNA, 469 bp, Glycine max
tttttctctctctcactctctttggcttccatcttcgtcaccacccgcactatgcaatcccgaggggttcttgattccaccatccgtaagtgatttgtggtgaaacctaagtttctgggctggttttgtggaatctggtgaagttttggattttgggggtgttggttgagtagagtgggtgaattggattggactagttggttgaagtttggtgcaagtgagttgagatatgagtgtggtggggtttgacattggtaatgagaactgtgtcattgctgtagttaggcaacgtggcattgatgttttgttgaattatgaatccaaacgtgaaaccccggctgtggtctgcttcagcgagaagcagcggattttggggtctgctggtgctgcttctgctatgatgcacatcaagtccacaatatctcaaataaagagactaattggaaggaagtttgcagaccctgatgtg

SEQ ID NO: 260583 - DNA, 430 bp, Glycine max
  unsure (1)..(430): unsure at all n locations
gaanacccggggggaccgacgcgtacgcccacgcctccggaaccaccaactgtttactttatggatcgatccccaatccttccgagagagcctttcataagggatgtcatccncacgaatttgctgatacaggcaatgtaccaagtgtctgtcttgcttgtgctcaatttccgaggcataagcatactgtgtctgagccatgacagaaaagctcatgcaatcaaagtgaagaatactttgatattcaatgcatttgttctctgtcaaatctttaatgaatttaatgctcgaaagccagatgaattcaacatattcaaaggagtcacaagaaactacctctttatgggtatcattggattaacggtttggcttcaaatttgcatcattgaatttcttggcaagtttacaataacaagtgagcttaatttga

SEQ ID NO: 260584 - DNA, 474 bp, Glycine max
caaataccatttcattcattcttacatattgcttaattttatctgaattttgaaacgcctgctgaatggctttttcaagagttgcattgttaatatgcacggtaattgggtattttgtgattgcctctgcgggcaatttttaccaagattttgatatcacttggggagatgggcgtgctaagatactcaacaatggcgagcttctcactctgtctcttgacaaagcctctggctcgggtttccaatccaagaacgaatacctttttggtaaaattgatatgcaactcaaactagttccaggcaactctgctggcaccgtcacagcctactacttatcttcaaaaggagcaacatgggatgagattgactttgaattcttgggtaatttgagcggtgagccatacatccttcacaccaacgtgttcagccaaggcaagggcaatagggagcaacaattctacctctggtttgacc

SEQ ID NO: 260585 - DNA, 477 bp, Glycine max
cccacgcgtccgaaagaactgaaacaagtcagacaactaaagctaaaaagcctaccgggcctgctcccttagagaagcatgtggctcgttggggtgatgagtctgatgaagatgaagataaagataaaaatgaagaagaacctgtgagaacaaaggaggaagaggagctgatactgaaggctgagaaggcaaggaaggaggaagaggaggcaaagttgaaggaaaagcggaggctagaggagattgaaaaagctaaggaggcactgcagagaaaaaagcgtaatgcagagaaggcccaacaaagggctgccttaaaggcacaaaaagaagctgaactgaaagagaaggaaagggagaagagagcaaagaagaaggaaagaagaaagacatcttctgctgtcactgctgagaatacagaacaagaatctgctcataccacagaaactctaacaagtgtggaagaaagtgacctgactg

SEQ ID NO: 260586 - DNA, 469 bp, Glycine max
cccacgcgtccggtttctctgcctaataggattgaaagatgggtcaagcactagggggctgtgaagttgatcagtcagatgtggctatcaaggagcattttggaaaatttgatgatgtcctagaacctggatgtcattgcctgccttggtgtcttgggtaccagattgctggtagtttgtcactgcgtgtgcagcaacttgatgttcgatgtgagacgaaaaccaaggacaatgtctttgtcactgtggttgcatctgtgcaataccgagctgtgtctgagaaagcatctgatgcattctataggcttaccaacacaagggagcagatccaatcatatgtttttgatgtcatcagggccagtgtaccaaagttggagttggattctgtctttgagcagaagaatgatatagcaaaggctgtggaggaggagcttgagaaggccatgtcaacctatggatttgagatagt

SEQ ID NO: 260587 - DNA, 491 bp, Glycine max
cgaatcccggtcgaccacgcgtccgttctgtctgagtcaagctttttggttaatctctccagaatcattcataaaaccttggtgtagctccgagctactggtttgcaatccaaccatattgaaatttgctgaaatgctttccctcaatggtagatctgtgaattacaccaagggaagtttcatctttcccggtgctcagccctatccccatcgcaacttttctgaggaagttgctattcttgatggctactttggcaagcttagtgcaagaagcaatgcttatattttgggtggccaagacaaatcacagaactggcatgtctactctgcttctgcagattctgtaactccatgcgacaatgtttacactctagagatgtgcatgactggcctggatagagagaaagcacaggttttctacaaagaacaatctgcttcagctgccattatgactgttaattctcgcattagaaaaattcttccagattctg

SEQ ID NO: 260588 - DNA, 477 bp, Glycine max
  unsure (1)..(477): unsure at all n locations
agaaacatggcttgagaaggtcaggttgtccgcgtccacaccggtgatgcgtggaaccagcggctggggaatggaaaagactcccaaaaattgattgtggtggattttactgcttcctggtgtggtccatgccgttttattgccccagttctggcagagattgctaggcatactcctcaagtgatcttcctcaaagtggatgtggatgaagtgaagcctgttgcttaggaatattccattgaggccatgccaaccttcctcttcttgaaagaatggcaagatcgtggataaggttgttggtgctaagaaggaggagctgcaactcaccatagccaagcatgtatctgctgctgctgcttcttcttgaagtgaagtatcatcatatgaaagaagatcaagaataatgcattntaatgttttcaagtcagtttgcatgttttctctatggatattgagttggcagaacattgagtgatg

SEQ ID NO: 260589 - DNA, 362 bp, Glycine max
gcgcaacaaacaaagagggtttgccttgggcccgttgtgtttgtttccggaccaaaaaaaaagagggggtgaggtcttgaatcttggccaaaccggtggtggttgacccccccccacccatgctgggtcgtctagcctccatcgtggcgaaagagcttctgaacggccagaaagtggtggtcgttcgctgtgaagagatttgcatctcgggcgggctggtgaggcagaagatgaaatacttgaggttccttcgcaaacgcatgaacaccaaacccttccatggccccatccacttccgtgccccctccaagatcttctggcgcaccgttcgtggaatgataccacacaagacaaagcgtggg

SEQ ID NO: 260590 - DNA, 390 bp, Glycine max
  unsure (1)..(390): unsure at all n locations
ntccgcaaaagctattggtatggggaactcatttcaaaaaaagggggcactacttttttgacttgggcctgctttggaagaaaaggtggatgggtcaaatccaaggggaccaaaacaaaaaaccgaagctttggctggcttatctaatgcatttggttcatcttctgaaaaagcatcccgtttggcacaaaataaattggatgggttagggccaaggggaccaaagcaaaaggcaaaaactttaaccggtttaaactctgcatttaattcaatatctgggacgaagacttttacttctaggccatcctgaagaagtcaaggatcacaaagagctgcagcagtagctgctctttcacagttcttatggctgaaaagaaaaaatcaccggat

SEQ ID NO: 260591 - DNA, 278 bp, Glycine max
ctcagtcgcttctcgaaccctactttcttccgcggtgattgcatttgaattcctgtaatggggattgataatatttttaaaaatgaagctagtgaagaaaaaggagagcgtgccagaatggcttcttttgttggagccatggctattgctgacttagtgaagacaaccttggggccaaagggaatggataaaattttgcagtcaacaagtagaggacgtgaaggtactggcaccaatggtggcgctacaatcttgaaggccctccatattgataaccc

SEQ ID NO: 260592 - DNA, 299 bp, Glycine max
ctcacgcgttcgtccctctgttttgtatcgtattgaactgaggcccacttctatcgagagggaggtgtttccaaagattgctttcaagaaaaagctataatgcaatggtcctgccagaatttttgatggacattggacaaccgatggattatattgctggcctaaagctttacctgcactcattgaggaagaagtcatcttctaagttggccaatgactctcaaattgtagggaatgtcattgtggatgagacatccaaaatttgcgaatgatgcctcattgtacctgatgtttctatt

SEQ ID NO: 260593 - DNA, 445 bp, Glycine max
  unsure (1)..(445): unsure at all n locations
ggaaaacccgggccggccgacgcatacggatggtttgtaccataccacaccgattcgattatggatgtcgccgtctccncaaaggctcggtgtcaatactatacacacgctataaccatttgcaagaactaaaggccttctactaatccaaagctggagttaaaggcctgatctactccggcatcaccaaactcccaaaaattttcgtccggccgccagaagacctcgccgccgtccacccaatatccgacaaccctgccggtgcccagttcacgatccccataattgacctcgacggccttaccggcgagcgctccagcatggtggctgcagtccggcgggcggccgagacggtggggttctttcatgtggtgaatcacagaattccgctgaaggtgctgaaagatacgatagcatctgtgcatgagttccactagctgccaca

SEQ ID NO: 260594 - DNA, 461 bp, Glycine max
gcgtccgcccacgcgtccggtgacctgcaacaacagaattataaggtgggtggggttgaagggtgtctgttgtttttgctgggatgccagcacttctcctaactttgggagccttgttcgtggtggacacccccaacagtttgattgaacgtggccgcttggaagaaggaaaaacagtgcttaaaaagattcgtggcactgacaacattgaacttgagttccaggaattgcttgaggccagtcgtgtggctaaagaggtcaagcatccattcaggaatcttctcaagcgcaggaaccgaccccaacttgtcatttccgttgccctacagatattccagcaattcacaggcatcaacgcaatcatgttttatgccccggtgctgttcaacacgttaggattcaagaacgatgcatccctgtattctgctgtgataactggggctgtgaacgtgctcttcact

SEQ ID NO: 260595 - DNA, 394 bp, Glycine max
ctcattcactggcctcaaggcaagcgcaggcaaagtgagtgccgccgcagttaaagtctcagctccgcaagccacaaagttctgcggcatcaaagctttcctcaaagacgttggaatcgctgttgtggccactgcttcgagcgcagttctagctagcaacgccatggccattgaagtgttactgggcactgatgacgggtctctggttttctcttccaactctttctccggggcccctggggaaaagatcgtgttcaaaaacaacgcaggtttcccccacaacgttgtgttcgacgaggacgagattcctaacggcgtggatgcagggaaaatctccatgagcgaagaagaccttctcaatgcggctggtgagacttacagcgttactttggat

SEQ ID NO: 260596 - DNA, 394 bp, Glycine max
  unsure (1)..(394): unsure at all n locations
cccgggggggccgaggcgaacgaagatgtcnaagcgtggtcgtggtggttggttggggaacaagttccgcatgtcggggggtgttgcattggcggcgacggtgaactgcgccgacaacacgggggcgaagaacctctacatcatttcggtgaaagggatcaaaggccgtttgaaccgtcttccctctgcctgcgttggcgacatggtgatggccaccgtgaagaagggaaaacccgatctgaggaagaaggtcttgccagctgtcatcgttcgccagcgcaagccatggcgcccaaaggacngcgtctacatgtacttcgaagataatgctggtgttattgtcaatcccaagggagaaatgaaaggttctgctatcactggtcccattggaaaa

SEQ ID NO: 260597 - DNA, 470 bp, Glycine max
cccacgcgtccgatctcaccactaagtttattattatcaaaaccaaaagctagcaggctacgttgcaaagcaacacatggcttctacagacaagcatggcgacactgaatacagaacatcatcttcaactccagctcctgcgggtgttgattactttaaatttgatgttatcctaaggtttgtgttatttgcagcatcactggtagctgttgtggtgatcgtcactggtaatcaaacagaggttattcttgtgccacagcctgtgccatggccagccaagttcagatacacaccagcctttgtgtattttgtagctgcattgtccgttactggcctctacagtatcattacaacacttgcatcactctttgccagtaacaagccagccctcaaaaccaagttgctcctctactttatcttatgggatgcgctgatattggggataatagcctcagcaacaggcacagctg

SEQ ID NO: 260598 - DNA, 500 bp, Glycine max
  unsure (1)..(500): unsure at all n locations
gaanacccggggcggccgacgcgtacgggcccttgcccttggcgctgatctgattctttactccttaacaaaatacatgggtgggcagcatgattcccttggtgggtgcataagtggttcaactaaggtggtttcgcaaattcggactttgcaccatgttttgggtggtacacttaacccgaatgctgcatacctattcatcagaggcatgaaaacgctgcatcttccgtgtacagcagcagaattcaacaggaatgaggatggccgaacttttagaggcacatcccaaggtgaagcgggtctactatccaggcttgccgagtcatcctgaacatgagcttgccaagaggcagatgactggtttcggtggtgttgtcagttttgagattgatggagatctacataccacaataaagtttattgattcactgaaaatcccttatattgcggcctcgtttggtggctgtgagagcattgtggatcaacctgctattttgtct

SEQ ID NO: 260599 - DNA, 470 bp, Glycine max
  unsure (1)..(470): unsure at all n locations
cttcagaagacatggcctcattgggtgggttacaaaatgtgagcggcatcaattttgttaggaaagagggtccaaaagtcaatgcaaagttcgagctgaagccgccaccatatccactgaatggtttggagccggtgatgagccagcagacacttgagtttcactgggggaagcaccacaagacttatgtggaaaatctgaaaaaacaagttgttgggacagagcttgatgggaagtcactagaagagattattgtcacatcatacaataagggtgacattcttccagctttcaacaatgcagcacaggtatggaaccatgacttcttctgggagtgcatgaaaccaggtggaggtggaaagccatccggngagcttctagaactgattgaaagagactttggttcatttgtaaaattccttgatgagttcaaggctgctgctgcaacacaatttggttcaaggtgggct

SEQ ID NO: 260600 - DNA, 474 bp, Glycine max
  unsure (1)..(474): unsure at all n locations
cccacgcgtncggcacgaatatctttgttgttggagcgatccgagaaaaactcttgtaacgtgttggtttaccaggacctccttacaagtgatgagcttctctctgactccttccgttacaaggaaattgagaatggaatgctgtgggaagttgaggggaagtgggttgttaaaagagcagttgatgtagacattggtgcaaacccttctgctgagggtggaggagaagatgagggagttgatgatgcagctgttaaggttgttgacattgttgacacattcagacttcaggagcaacccgcattcgaatagaagcagtttgttaccttcatgaagaggtttatcaagaatttgactcccaagctcgatgcaaagcaacaggaagttgttaagaagcacatcgagggagcaactaaatacctgctctctaagattaaagatttccaattttttggtggtgagagcatgggtgat

SEQ ID NO: 260601 - DNA, 305 bp, Glycine max
  unsure (1)..(305): unsure at all n locations
gcgaaaaccaagagatggttagaggaaacaccttatatgaaaaatatcattcttatgctcggccttgttggtacctgcatggtgattggagatggtattcttacaccagctatatctgttttatctgccgntggtggcatcaaagtgaatcacgctgatttgagtaacgaaataattgtgctggttgctgttgtaatattaggtgggttattcaacatgcaacattatggtacaaaataaagttggttggctatttgctccaattggcccttctttggtttcttctaattggaggcataagaata

SEQ ID NO: 260602 - DNA, 178 bp, Glycine max
ctttcctcaaccttctttcttcttatatatcgaacatggctaagtatcattcaagtgggaaaagctgttccattactgctatagccttcctgtttattcttctaatcacttatacaggcacaacagatgcacaatccggggtatgttatggaagacttggcaacaacttaccaacccc

SEQ ID NO: 260603 - DNA, 326 bp, Glycine max
cgtacgcaaagtaccatggcttctgcgggtgttgatttccgatgctaagttaataacactcggtggggcttctgacaacgtgggagctgtacaaagccttctcttagtacggtgacttctatgaatcgaagattatcaacgatcgtgagactggaagatccaggggatttggatttgttaccttcgccttcaaggattcaatgagggatgcgatcgacgggatgaactgtcagaaccttgatggacgcaacatcactgtgaacgaagctcagtcccgctgaagccgctgtggaagcggtggctgttacagaagtggcggttgatac

SEQ ID NO: 260604 - DNA, 473 bp, Glycine max
  unsure (1)..(473): unsure at all n locations
ggaaaaatggtttcgctgaaactgcagaagcggctcgccgcgagcgtgctcaagtgtggcagaggaaaggtttggcttgaccccaatgaagtcaacgaaatctccatggccaattctcgccaaaacataaggaagctggttaaggatgggtttatcatcaggaagcccaccaagattcactctcgctcacgtgctcgtcgaatgaaggaagccaagaggaaaggacgtcactctggatacggtaagcgtaagggtacaagggaggcaaggctttccactaaaattctatggatgaggagaatgcgtgtgctcagacgcttgcttcgcangtacagggaatctaagaagattgacaagcacatgtatcatgacatgtacatgaaggttaagggtaatgttttcaagaacaagagagttttaatggagagcattcataagtccaaagctgagaagggcagagagaagaccttgtc

SEQ ID NO: 260605 - DNA, 437 bp, Glycine max
catcaaagtttcacttcagccttatcccggttaaggtttcgggttttgacccaacctttgacgtatgcgaactcttaaatttcggatcaagtctgagcaatctggttggtagaacctttggtcttagagagtcaagttttatgtctgaattagacgatcaaattcctactgccttcgatccttttgctgatgcaaatgctgatgactcgggtgctgggtcaaaggagtatgtgcatattcgcgtacagcagcgaaatggaaggaaaaggcctgccaaccgttcagggattgaaaaaaagaattcagctataacaagatacttaaagatgttaagaaagagttctgttgcaatggaacagttgttcaggacccagaactaggacaggttattcaacttcaaggtgatcagaggaagaatgtttctaccttcctggtcc

SEQ ID NO: 260606 - DNA, 251 bp, Glycine max
atttctagcaatggccaagatcaaggggtacgagctgatgcataagacgaatgctcatcttctttatcaactcaaagacctgaaagcggagcttggcttgcttcgtgttgctaacgtcaccggtggtgcccctaacaagcttctccagatcaaggtggggaggttgaacattgcccatgttttgacggagatttctcataagcagaaggctgcgttgagggatgcctacaagaataagaagtacttgccta

SEQ ID NO: 260607 - DNA, 478 bp, Glycine max
  unsure (1)..(478): unsure at all n locations
agctaagaggcgcagccgtagcaaaagctcgtggaattgctagcaatggcgaggatcaagggttacgagctgaggcagaagacgaaggctgatctgctgaatcaactgaaggacctgaaggcggagcttgccttgcttcgtgttgctaaggtcaccggtggtgcccctaacaagctttccaagataaaggtggtgaggttgaacattgcccaggttttgacggtgatttctcagaagcagaaggctgcgttgagggatgcctacaagaataagaagtacttgcctctcgatctccgccctaagaagaccagggctattcgcaggaggcttactaagcaccaggcatcattgaagacagagagggagaagaagaaagagttatatttcccactaaggaaatatgctatcaaggtgtaactntagagcaatcttatcggttaattggacatttacctnctttatactcgacaagttttga

SEQ ID NO: 260608 - DNA, 379 bp, Glycine max
  unsure (1)..(379): unsure at all n locations
cccacgcgtncgcttttctctctgaatactctctactcaatacattgcgctctagtctcgtgtcaggatattaattttaggttcttcgttacgcgttgtgttgcgttgtgcgtgagaaagtgcgcgtggtgaaaaagcatggcttctcagctcctgagacgaaccttcggaagtcgtttccttgcaaaccctagggccttctcctccgctgcttccactccgatccgcgccactctcttccccggcgacggcatcggccccgagatcgccgattccgtcaaacagatattccaagcagctgatgtcccaatagaatgggaagagcactatgtaggaactgaaattgaccctagaacgcagagctttctgacatgggaaa

SEQ ID NO: 260609 - DNA, 369 bp, Glycine max
agcaaatgcagaaagaatttataaaacacatcaaagtataattcgctttatttcaaatttacacaagtattttcatactagaaatccgaattcacataattcttgtgacatctcctttttgtcacaagcatatgtattttttaatttattacacacccgaattattaacataaacatctataagttaagatctgtttttcaatatcatggaatttttttttttctgaaaaatgaaataaaggattctttttttggagcacaaggaatatttcattataaattaaaacataataaccctctcaattctgtaataaatcaatggacaaattggttaaaggatcattattatcaatatgacttatctaaaag

SEQ ID NO: 260610 - DNA, 323 bp, Glycine max
agctaaaacaatacttcaggccagaatttttgaatagattggatgaaatgattgtcttcaggcagctcacaaaactggaggtgaaggagattgctgacataatgctcaaagaggtgtttgatagactgaaggtgaaagatattgaacttcaagtgacagaaagattcagggacagagtggtggaggaaggttataaccctagttatggagctagacctctaagaagagccataatgcgacttttggaggacagcatggctgagaagatgcttgccagagagatcaaggagggcgactctgttataagtgatgttgattctgat

SEQ ID NO: 260611 - DNA, 395 bp, Glycine max
gcgaaaaaagtgtagtgggaaatggcaggtgcggttgcaggaggagggtatggggacgcgaaccggatgagagactacgtgttcaaggtggtgctgataggggactcggcggtggggaagtcgcagatactagctcggtttgcgaggaacgagttcagcttggactccaagtccaccatcggtgttgaatttcagacgaggactttggttatcgatcacaagaccgttaaggctcagatctgggacactgccggccaagaacgtacaacaagcctcagttcaaaaccgttgcctatcttgagatttagagcacgcagacagaagtcagaacaagctgcgatggactaatccgtgaaatggctgcatgggcaatctatgcaaatggttcatacttg

SEQ ID NO: 260612 - DNA, 400 bp, Glycine max
ctcctccaccaaggtctgcaccagcacctgcttttggtccatcctctgaaccagctactttgattgttggagaaaccgctggctggattgttcctggcaacgcttccttttacacagcttgggcctctggcaaaaacttcagggttggagacgtccttgtgttcaactacgcatcaatacacacaacgtagaggaggttacaaaggccaacttcgatgcttgcagctcagcctctcctattgccactttcaccactccacctgcgagagtgaccctcaacaaatctggtcaacatttcttcatctgtggaattccagggcactgtttgggaagtcaaaagcttgccatcaacgtcaccggcagcaagaacggcaccccacctttcggcgcgggccccccc

SEQ ID NO: 260613 - DNA, 289 bp, Glycine max
  unsure (1)..(289): unsure at all n locations
gtggaaatgtcgggatcggaggacgagggaggagaagagtacctcttcaagatcgtcatagggggagactctgcggtgggcaaatccaaccttctctcccgctacgcccggaacgagttcaacatgcactccaaggccaccataggtgtcgagttccagactcagtgcttggaaatcgactccaaggaagtcaaggctcagatttgggacaccgccggccaagagcgattccgcgccgtcacctncgnctactaccgcggcgctgtcggcgccctcattgtctacgaca

SEQ ID NO: 260614 - DNA, 323 bp, Glycine max
gcacagaagaagaagacgaagaagaagaagaagaagaacgatagtaatggaaatcaagcccggtttgtcagcactcgttaccggtggtgcctctggaatcggcaaaggtcttgcactagctcttgcacagaagggtgtatttatcacgatcgtggatttctctgaagaaaagggaagacaagctgcaatcctcgtcgagaaaattaactccaattttcattctaagttaggatttccgtctgccatatttgcgaaatgtgatgtgagtaatgcaagggatctagctgctgcatttgacaagcattttttgacatatggaggac

SEQ ID NO: 260615 - DNA, 375 bp, Glycine max
  unsure (1)..(375): unsure at all n locations
cccacgcgtccgcccacgcgtccgggtagttggtagttatagttgttgtcccagatatggaagaagcaggtttaggagattgttgttcctcgaattcgacgattacgaggaagagcgataagcgaaagcagcaacaccaacaacaagagaagccatacagaggaataaggatgaggaagtggggcaagtgggtggcggagattagagaacccaataagcgttcgaggatctggctgggttcttacgccacccccgtcgccgccgcacgcgcctatgacaccgncgtcttccaccttcgaggccctttcgctcggcttaacttccccgaattgctgtcccaggacgacgacgtttcgacccaacaacagggcaaca

SEQ ID NO: 260616 - DNA, 383 bp, Glycine max
cccacgcgtccgcccacgcgtccgggaaagtccaacttgcaaaagagcttggcttgcggccaaggcaagttgctatatggttccaaaaccgaagggcaaggttcaagaccaagcagctagaaaaagactatggcgtgttgaaagctagttatgacagactcaaaagtgactatgaaagtcttgttcaagagaatgacaagttaaaagcagaggtgaattctctggagagcaaattgattcttagagataaagagaaggaggagaattcggatgacaagtcatctcctgatgatgctgtcaattcttcttcaccccacaacaccaaggagcctatggattaattaattatttcaaaaaatgcaccaccaccaccaccatctgaa

SEQ ID NO: 260617 - DNA, 302 bp, Glycine max
attcggtcgaccacgcgtccgtgaggtggaactaccctcaattggaatgccatgaaccaatctccaaacccgtggcgcgtgggattctcgtatgccagagcccttcaaaacactgacttgaagacatggggaggcctgccagagaacgtgaaggcagcacaagatgcactcgcattccgtgccaagtacaactcactcgctcagcttgggaagctcactggtgagggtgaatcccaggtagccataaaggagttgttcgtcaaaagctactactactaagatggttgcagtgaacatgatac

SEQ ID NO: 260618 - DNA, 318 bp, Glycine max
acgttcaaaagctacaatgggaggttttggaagccaaaattggtaactggattcatttcatgcgtattgctgtgaaagtgttgtttgctgctgaacggaaagtttgtgatcagatatttgaaggatttgactcacttagtgatcagtgttttgctgaagtaactacaaacagtatttccatgctacttagttttggagaagcaattgccaaaagcaagagatcacctgaaaagttatttgtacttttggacatgtacgaaatattgcaagagattcatgcagagattgaaatactctttaaaggctcagcttgcacta

SEQ ID NO: 260619 - DNA, 391 bp, Glycine max
cccacgcgtccgcccacgcgtccgctttaaccgaaacccctagttctattcacgcgattccggagaaccagagcgtcttctccagagaattgaacttttctgagtatggtttcgacccaaagactgggaacaatcagaatcaccattctctgaagccggaatccggcgagattctcagcttcggcgagagcaagagaacctcctacggcggcgtcaatgggaattccaattccaattcccattttttctccggtcagtcgccgtttgttgctgctgcggatgagaacaccaacaaaaataacatcaacaacaatgggaggacaaagtcaccgaattcgcccggtaccaccgacaacggattgctttccttaacttccggcgggatttttcc

SEQ ID NO: 260620 - DNA, 381 bp, Glycine max
gttgacctcatctacttcgatggaattcgcgtcttcttcatcatccttcccaaaatccaaagcccgatggacatacgatgtgttcatcaattttagcggagaagatctccgtaagaatttcatttctcatctctcttatgccctttcaaaagctggaatcaacactgtccttgacggccaacaaatggagctggaagaactaatcaaaccagaaaagtctcagatctcaatagttgttttctccaaaagttatactgaatctacttggtgtcttgatgagcttgcaaaaatcattgaaatccatgaaacttatggccaaagagttgtggtcgtattttacgaaattgacccatcccatgtacgtgatcagaagggagattt

SEQ ID NO: 260621 - DNA, 306 bp, Glycine max
cccacgcgtccgcccacgcgtccgggcctgtcggcgctgccggaccagcgcagatccgacgggatgctcctgacgccgtgcgggacgccggcctacgtggcgccggaggttctgaagaagaaggggtacgatgggtcgaaggctgatatatggtcctgcggggtcatcctctttgctcttctttctggctatttgccctttcaaggtgagaatgtgatgagaatttacagcaagtctttcagagccgattatgcgttccccgaatggatttcccctggggctaaaaacttgatctccaatttactc

SEQ ID NO: 260622 - DNA, 275 bp, Glycine max
caaacacagacagacagagagagagaaagagaaccaaaccaaataaagctcttggttggttgacccttgtgcttattttttgttgctgagaaagagcaaagaagaagaataagaagaaggttttgatcggatgcgatgagcacacaaggacaagtgattgatgaggcggttctggatgacataatccggcgcctaacggaggtccgattggcccgacccggaaagcaggttcagctctccgagtctgagatcaagcaactttgcgtcgctttcag

SEQ ID NO: 260623 - DNA, 363 bp, Glycine max
acggaggaccagtatatattacatactgctgaggcccagaatattacccttccattcgcgtgcgggcatggttgttgtactagctgtgctgtacgtataaagaatggaaagattaggcaaccagaggcactagggatatcggccgaattgagagacaagggttatgcacttctttgtgtgggcttcccaacctctgatgttgaagtggaaactcaagatgaagatgaggtatataggcttcaatttggacgttattttgctcgaggaccattgtaaagagatgactatgccttggagttggccatggctgacgagtaagcaatgtataaaatctgacaattattggaacaaagaatgtgaata

SEQ ID NO: 260624 - DNA, 322 bp, Glycine max
tcgcttacaccatgtgatttgaatgcagataatgtctatagtccaactgctggtgcagcggtagcgagtcatatggatgttgacaagctagcattcactggatctaccgagactggaaaagttgtgcttggattggctgcgcaaagcaatttgaagcctgtgacattggaacttggagggaaatcacctttcatagtgtgtgaggatgctgatgttgaccaggctgtagaacttgcgcactatgctttgttctttaatcaggggcaatgttgctgtgctgagtctcgtacctttgtacatgagcatatctatgatgaggtct

SEQ ID NO: 260625 - DNA, 387 bp, Glycine max
  unsure (1)..(387): unsure at all n locations
gcggtttgttacaaggctctactctactgctgcacttggtgctctagaaaattcagtggtgatagatcgcgtcngctactctctctgtagccaaaccagcccttcaggcaaatgggaaaggcttctctgaattctctggcctccgcagctcatcaggcttccttcccttttctagaaaatcttcagaggatttccattctgtcattgccttccagacctatgcagttggaagcagtggaggatacaagaagggtgtgacagaagcaaaactgaaggttgccataaacggatttggaaggattggaaagaacttcttgaagtgcttgcacggtcgcaaagactcccctcttgatgtcattgccaataacgacacccgttgccttaaac

SEQ ID NO: 260626 - DNA, 417 bp, Glycine max
ctccgtctctctactctcttattctcaacgtcaaacccaaaaccccttcttcttcttcttctctcgcgccgcaataataatactaaaacatgtccaactctgacggagccactaacgccgtccctcccaacgacgccaacaacaacacaatcgttgagtaccagcagcgaaccaccaccaccaccgccgccgccgccgccctcgccgtcaagaaaccgccttccaaggaccgccacagcaaggtcgacggccgcgggcgccgcattcgcatgccgatcatctgcgccgcccgcgtcttccagctcacgcgcgagctcggccacaagtccgacggccagaccatcgagtggctcctccgccaggcggaaccctccataatcgccgttaccggttccggaacaactccggcaagctttt

SEQ ID NO: 260627 - DNA, 352 bp, Glycine max
cccacgcgttcgcccacgcgtccgcagagaactagtctcctactctcacccgcaagaaaagggtggcgtctcacatcgttggatacccccgtatgggtcccaagagagagctcaagttcgctctcgagtctttctgggatggcaagagcagcgccgaggatttgcagaaggtgtcttctgatctcagggcatccatctggaagcagatggctgatgctgggatcaagtacatccccagcaacactttctgtcactatgaccaggttctcgacgccaccgtcaccctcggtgccgttccaccaatgtacggctggaccggcggcgagattgcgtttgatacctacttctgcat

SEQ ID NO: 260628 - DNA, 324 bp, Glycine max
attagtccctactcaacacgcaatatggattgtcaaatagtactgacgaggccatgtttgtgattgaggcttataagactcttcgtgaccggtgtccataccctgcgaatcaagtggtcaaggaacttgatggcagttttgctttagctgtctatgacagcaaggttggcagtgtctttgcagcactgggttctgatggatgagtgaagctgaatcggggtattgcaactgatggatctgcggtgatctctgatgatctagaagtcataaaagagggttgtgccaaatcctttgctacctatgcacagggtgtatgtttcacag

SEQ ID NO: 260629 - DNA, 410 bp, Glycine max
gtagaacactgcgactcttcacacttttcttcttcccttcgtcttcagcttctgcttcttcggttgttgctgcttcaaaacagtgagaaaaatatggggttctcctcctttctgggtcgcgtcctctttgcttccctcttcatcctctcagcatggcagatgtttaatgaatttgatgacactggtggacccattgcaaaggagttgattcccaagttcactgttctgaagagaaatttatcctccaaactgggggtaaagacaccagatattaatgtgcggtcagtcattgcctctatcatatttctaaagggggttggaggaattctattcgtgcttggcagtacatttggatcttatcttctgctcttgtatctggggctttctactccaattctatatgattttta

SEQ ID NO: 260630 - DNA, 390 bp, Glycine max
  unsure (1)..(390): unsure at all n locations
cccacgcgtccgggatcttatcatatcatattgcaaggccgattctgatgattcattgtccgaaggaaatgcaggttctattaatgtcagcaacattttaactggcaagtgtcttgcaaagataagagcaagtaatggcttacccatggtgaaggaatgcagttgcagcgatgacaattgttcaagtagtgcttgcaattcagggaaacgaaagcgttcctccagaattaggagcacagttgcggaagccttggaagacattactgctctcttctacgatgaagagcgcaacgagatctataccggcaataggctcggtctggttcatgtctggtctaactaaagcactgttaaacttattcttgccttgnggtttctcattagcattta

SEQ ID NO: 260631 - DNA, 328 bp, Glycine max
ttcatctgaatttccattctcagataaccaattcatactcagaatggtgccatctccaatgtgcacatacactaaacactgacaaaactatgtgaatacttggtttaatcaaccatcccaaaagaccagaatacagttatctcaacagattaagactgtcaatattatccacaagcctactgctggatctctcacgcctattgctcatggccaaactctgaaatacaacatgaaagtcatagcccgtaaaggattttcactggaagaattgactgctacaaaaattcccaagaaacttgctccaactattgggatttctgatgatcac

SEQ ID NO: 260632 - DNA, 379 bp, Glycine max
gcggtggcattgtgggcggagcaatggccggaaaacaggtcggcggcgagggcctatcggttaacgctgggtggaatgtcgaagaaccagctctacgatatcatgtctcagatgaagagtttgatcgaacagaaccagcaacaggccaagcagatcctaatccaaaaccccatgttaaccaaagcgcttttccaggcacaaattatgcttggaatggtgcaagcacctcaaacggttccaaaagttcagccaatggttccgcagaacaatctgcagtcagtacaaccaacacaaaaaccaaatattcagcctgctccattattgcctgggcttggtggtgcacaggatcaagcaggtgtatctcaaacccagattcctc

SEQ ID NO: 260633 - DNA, 438 bp, Glycine max
gtcgccggcgccgcggcggccggatacggcctcggctcccgcttcggcggaagccgctacggtgcgctcggtggagctgtcgccctcggcgcggccggcggtgctgcggcgtacgctctgaacgcggctgctccgcaagtcgccgccgtgaatttgcacaactacgtcgccgcgttcgacgacccttcgaagctgaagaaggaagagattgaggccattgcgtccaagtatggtgtgagcaagcaagatgaggcattcaaaactgagatttgtcatatatattccgagtttgtatcttctgtgcttcctcctggtggtgaggaacttaaaggtgatgaggttgataggattgtcagcttcaaaaattttttgggaatggatgacccggatgctgctgctatgcccatggaaatgggaaggaaatttttaaggcaaagg

SEQ ID NO: 260634 - DNA, 407 bp, Glycine max
gcgaaaacagcatcgaacccgtcgtagcagaaaaacttgtcaccatggtttcttccgacaaggagccacgggaggatgtccttcaagcctggtacatggatgatagtgatgaagatcaaagactcccccaccacaaagaacccaaggagtttgtctcgttggaccaacttgctgaacttggagtccttagctggaaactagatgctgataaccatgaaaatgatccagagctgaagaagattcgtgaagagcgtggttacacctacatggatgtttgtgaggtctgcccagaaaagttgccaaattatgaacagaaaatcaaaagcttctttgaagagcatcttcacactgatgaggagatccgcttttgtgctgctggaagtggctattttgatgttagggatcgc

SEQ ID NO: 260635 - DNA, 343 bp, Glycine max
  unsure (1)..(343): unsure at all n locations
gcgtgattaaatgaatcggggtattgcctggcatcaagtcataccctggaatgaaataagacagagtaacgttcntcttaaattccttggtagttacataatacaattttagatattcattgaaaaaaatgttgacttgaaccttttctgaatgccaggaggattgcacaagtaaaagagaaccaatgtcaaattgctgtagaagatgttatgtacttgctgattttttacaagttttctgagatcagggtccctatggttccaaagctttctagttgtctttataatggcaggctagagatattgccttctaaggactgngaactagagtctattcatagct

SEQ ID NO: 260636 - DNA, 376 bp, Glycine max
cccacgcgtccgcttcgccgtttcagctgaagagccatccgcaggtaagcaatggttaagcagaataatgttatccccaatgggcacttccggaaacactggcaaaactatgtgaagacttggtttaatcaaccagcccgaaagaccagaagacggttggctcggcagaagaaggctgtcaagattttccccaggcctactgctggatctctcaggcctattgttcatggccagactctgaaatacaacatgaaagtcagagccgggagaggattttcactggaagaattgaaggctgcaggaattcccaagaaacttgctccaactattgggatttctggtgatcaccgcagaaagaatcgttctttggagagtc

SEQ ID NO: 260637 - DNA, 444 bp, Glycine max
gagagagagggctgcgctgcagctgcagctgcacctgcagaatcttttatcagcgatagcagcaatgtcttcgtcgaaagatgcagacccaagcctgggttacctgactcgcaaggacacggaggtgaagcttccgcgtccaaccagggtcaagaacaaaacccccgctcccattcaaatcaccgccgagcagattctccgcgaggcacgtgagcgtcaagaggccgagatccgccctcccaagcagaagatcaccgaccccaccgagctcggtgagtaccgtctccgcaagcgcaaggagttcgaagacttaatccgccgcgttcgatggaacatcggcgtctggatcaagtacgcgcaatgggaagaatcgcagaaggacttcaaacgcccgcgttccgtctgggagagagcgttggaggtggattacaagaaccacaccct

SEQ ID NO: 260638 - DNA, 371 bp, Glycine max
cccacaggcacgctgagcatggaacacagaaccctagaactcaacctggcttcagcaaaggagctgaaagacttgaatatattctcaaagatggatgtatatgctgtgctttcactctccggcgatcaaaagaccaagactcccgtccacagaaacggcggcaccaacccaacatggaattttccggtcaagttcacttttgatgaatcggtggcgcggcagaaccgtttggccctcgaaatcaagatccgctccgagcgcgccctcgccaccgataaggacatcggccaggtccacgttcctctcatggaactcctcaagcaacctggcgacgggaaatccttccagcacgttagttaccaggtcagaaa

SEQ ID NO: 260639 - DNA, 266 bp, Glycine max
cccacgcgtccggtttcgaatagattatcctatgtctttgggaatagtgctgcaatggctggaagtcaggaggaggtgacccttttgggagctactggaagcccatttgtgtgcagggttcatattgccctcaagttgaatggagttcaatacaaatatgtcgaagaaaatttgaggaacatgagtgaactgcttctcatattcaacccagttcacaatggatgtatcagtgtttatctacaactagaaacccatatcaaattctc

SEQ ID NO: 260640 - DNA, 476 bp, Glycine max
acgcccacgcgtccgccgaccccaaacgctcgaagaaaaaagccaccgaatcttcttctggcgcgaccatctgcgacgacgagatggacgaggacgggaagaagtccggcgattactcgaagaagtttcagagactgcggagcgaggaggacgaactcgccattctgaagggcgtggttgagttcacatcgaaaacagggctggaccctcttaagttccccaatgccaacgctttccacgatttcatgaataagtcgcttcacgtggaatttttcagcgaccagctgaaggagaagctccgaatgctcaagaagaagttcgagacccaggcaggaaaagggaagaatggagatgcccctaagttttccaaaccgcacgatcagaaattctttgaattgtccaaaaaggcttggggaagtgaggatggtggtgtagccaatggctccgtggagaagcccaagtccaatgggaatgct

SEQ ID NO: 260641 - DNA, 356 bp, Glycine max
  unsure (1)..(356): unsure at all n locations
cgaaacagtttccatctctctcacaaaatgacaacaatatcaaattgctcccttctcttcctgttcctggtcctctccaccctccacatagcttccaccctctcaacccccaccaacttcatcaagtcctcctgcagcaccacccagtacccagccctctgcatccagtccctctccgtctacgcctccaccatccagcaagacccccacgagctcgtccagacagccctctccctctccctcaaccacaccgaggccaccaaaaccttcgtcgcaaaatgcaacanattcagaggcctcaaaccgagagaatacgctgccttgaaggactgcgctgaagaaatcagtgacagcgt

SEQ ID NO: 260642 - DNA, 389 bp, Glycine max
ggagaagtggtgagaaagcaaggacaaaggggtgttggtggagataagtggtacttgtatagctgcttacaagactgtaaatattggtgctgtttaatacacgagactagttctctttcgatggtcccttttgagtgaaaaaccttgtcttctcagctttctttcgagagatcttaaagacattgactaacaacaataaagtggatcaatcaaaagacttacttcttcttctaacaacaataagatcacatctttcccactcatgaagagacttaacagctcagattcttccagtgccctcatgacaatttgtccatcaacagaggaacatagtccgaggaacagccaacacatgtatggtagggaagtccaatcgatgttggacggac

SEQ ID NO: 260643 - DNA, 427 bp, Glycine max
ccactttcaagtcagttacaaagaaacaagtgacaatgacaagaacctcctaatatgcagtggtgagttgttctatgttcctcagcgccttatcagcgattttgttgagcttgttaaccttgtgggggacctagaaatccatcagaaggttgcaattcctatgttctttgtctccctagattctcctcagaattttgaccccgttcttgatagaatgatctacaagcaaaatcccactgcaaattccaccactctttattctgccaaagtccctgctgttcatccattgagtgtatcaagtgagccagactttataaagcctatcagaattatggcagaaggggatccactcctgattgaattagtttgaaagtagaactctttcttactggtaatacctacctgaccagagaagatgccagaaaca

SEQ ID NO: 260644 - DNA, 423 bp, Glycine max
cccacgcgtccgcccacgcgtccgcttccttgtttcttttaagatatttttggtcacataggttatggtctgcctctgcgtagtgcttcaacagccccctgctcgctcgatcatcttgattattttttaagccttttaaatgcccaacatcttgttcttgatgtttgagattgatgtatccaattcttagtgaaatcttcttttccgggtgtatgatcaattctactgtgagacgacgcaggacccatttagttcaatccttctccgttgcttttctttactggctctactacgtttcatgatttctaattattattaattaaataaaagcctattatatctcttcttacatatttttatctgggtctgggtcctgcgtagtccatttttggttttggtaagtatttggtactactatgacta

SEQ ID NO: 260645 - DNA, 259 bp, Glycine max
acgcgcaggactttacgttgcatcagcattattctaacgatgcgacataggcgggtttacgaccctgggatatggtcgcgataatggcactgactgaagacaccattcaacaatcttagaaatctggattcgcaatcatactcaacatgctcctgacagtagtcactagatacttgtggctcacacggctgatatcgcttaaatgtaaaggactacgcctacctgcaaaggtcgagcccttactgatgagtctcgtatc

SEQ ID NO: 260646 - DNA, 377 bp, Glycine max
ggcaaacgcattaagttacaaatctgggatacagctggtcaggagcgatttcgaactattaggacagcttattaccgtggagccatgggtatcttgctcgtttatgatgttactgatgaagcatctttcaacaatattagaaattggattcgcaacattgaacaacatgcttctgacaatgtaaacaagatacttgtgggtaacaaggctgatatggatgaaagtaaaagggctgtgcctacctccaaaggtcaagcccttgctgatgagtatggtatcaagtttttcgaaaccagtgcaaagacaaacatgaatgttgaggaggttttcttttcaatagcaagagatatcaagcaaaggcttgctgacacagattc

SEQ ID NO: 260647 - DNA, 370 bp, Glycine max
ggagccagaggacaccctttatgaaggttccatatccagagatctagttgctgaagtggctgtggaggcattggcttatcctgaggcattttataaagttgtggaaatagtgtctcgccctgatgctcctaaacgcccataccatgacctttttggttccataaggcaacaatgatgcctgagatttggacttgattgcagattagcaaatgttgatttgctttatggtggcaaatttgtatctcaactgtgttcctatgtgtgttgtttcattcaattggtacactagaataatgtgtaaatatttcagtatatctttaaatttattctcctacctgccaaattaaaggttggtagataattcagcact

SEQ ID NO: 260648 - DNA, 401 bp, Glycine max
  unsure (1)..(401): unsure at all n locations
cccacgcgtccgcagaacgcttctcctgctcctcaaagcgcatcgtctgatgctgctgttgggcctgacgcttctcagaatgaccaagatgccaaaaaccctccaaggtataatgcattgatttttgaagctctatcagcactgaaagatagtaatggatccgacatgaatgccattattaaattcatggagcaaaaaaatcatcaggtaaaccaaaattttaaaagggcattaagtacacggttgaggaggcttgttagtcaagggaaacttgaaaaggtaccaaatggttacaaggtgaaaaaggaagcctncttcgggacaaagtcaccttcaccaaaagcaaaggatgtccggccttcacaaccacaacggcaatcttcagcttctctctttatgac

SEQ ID NO: 260649 - DNA, 399 bp, Glycine max
ctctttctcttcgagggtttgggtttctcttcctcccttggagaaaaagaagagccaccggtgcgacgccgttcgtgcatttttgaggtgccgctgtcatgtttgggcgtggtggaccaaggaggagtgataactccaaatattatgatattctcgggatttccaaaaatgccagtgaagatgaaatcaagaaggcctatagaaaggcggctatgaagaaccatccagataagggaggagatcctgaaaagtttaaggagttaggtcaagcatatgaagttttaagtgatcctgagaagaaagaactgtatgaccagtatggtgaagatgcccttaaagaagggatggggggaggaagctcgtttcataatccatttgatatatttgaatcattttttg

SEQ ID NO: 260650 - DNA, 269 bp, Glycine max
cagaaacccataaaggggtctccatatccaagggggtactatagatgtagcagctcgaaggggtgtttggcaaggaaacaggttgaaagaaacagatcagacccaacaatgttcatagtgacttacactgctgagcacaaccaccctgcacctactcacagaaactctcttgctggttccacacgccagaagccattggcacctcaaacagccaccaccactgaagaagactctgaaaagagcaagagcttcacaaaacccacttcccc

SEQ ID NO: 260651 - DNA, 312 bp, Glycine max
cgaccgcgctgcgaaacccagctctgatgttcataggctgggcttttcggacacgaagaataagaagggtcatgagcgcatctgcagaaagcatgaacgagaagaagggttgatgatcaagccccagagcttcactccccccatcgacacctcccaatggcccattctcctcaaaaactactatcgcctcaacgtccgcaccggccactacacccccattccctccggctactcccccctgaagcgccccctctccgagtacctcaaatacggcgtcctcaacctcgacaagcccgccaacccttcctccca

SEQ ID NO: 260652 - DNA, 453 bp, Glycine max
aatttccggtcgaccgcacgcgtgacgccacgcgtcctgtaggtaaacatttgtggtattgtattttgtaactacctcatttttaaggttctgggccaccgtaacttgcagcctgactctgaagctcagcttctgactattcactttgaatggaatggtgtcctaaaatctgtatccagcactttggttggagtgagccctgaatttgaaattgctttgtataccctgtgtttctatgttggtagggaggataaccacattcagcttggtccatatggggttaatatcaagtgctatcgattgggtgatcgaattggatctgttttccccattgcagattcttgaattttcagtttccatcattggtaatagttgttccctatgaaatcgtttgttatgcatacttgagaacttgtaactcatgggtttaaaagcaacaataccaattagatc

SEQ ID NO: 260653 - DNA, 302 bp, Glycine max
gcggcaacttcattccattcccaattcccactgaactcaccaaaccctattcagcatttcccccaagtcaccgtgacaccatgggctcctccgcgatggtgttggacccgaaaccctcatcggagcctccgccgttcctcccgtcgacgaaatcggactaccttcaaggcagcttcggcggcgacgccaccgcctccgacgaggacgacctctacagccgcctgaaatccctccagcgccagctggagttcatcgacatccaggaggagtacgtgaaggatgagcagaagaatctcaagcgc

SEQ ID NO: 260654 - DNA, 450 bp, Glycine max
cccacgcgtccgtgaaattcgaacaatgattttttcattttctttttaatacttttttggtggagactccctaagaatctgtcgatatttccaattaaatcttcttgttcctgtgaaggtcctataaaaaaaagggctatgccctttctttactcagaagggccttattccaagttccaccaaacaagtttttattcatttgaaacatctttttttccgaatacaagaaaaaattcatttcaatttcaattatttctataagataaaatcgatatagatagattttatcttatagaaataattgaaaaatacattcaattatgtcttcgcgtatcaaatattttcttttcatatcgatgcgtacgatatttttccagccattaattgatgggaaaccgaaactttcacttaccggtttttctttttaataatggatttcaatttttttta

SEQ ID NO: 260655 - DNA, 292 bp, Glycine max
cggtcttggaccgattacctcggcctgaccgtcggcgggacgctctccaatgccggcgtcagcggccaggccttccgctacggcccgcaaaccgtcaacgtaacggaattggaggtggtgagcggcaaaggcgaaaccttagtctgttccgaatcacaaaattcggaactcttcttcgccaccctgggaggattaggccagttcggcatcataactcgcgctcgagtcccggttcaacaagccccggacatggtgagatggataagggtggtgtacacagaatttggcgact

SEQ ID NO: 260656 - DNA, 445 bp, Glycine max
attcccggtcgacgacgcgtacgcgatcttggaccgattacctcggcctgagcgttggctggacgctctccaatgccggcgtcggctgggaggccttccgctacgggccgcaaaccgtcaacgtagcggaattggaggtggtgagcggcaaaggcgaaaccttagtctgttccgaatcacaaaattcggaactcttcttcgccaccctgggaggattaggccagttcgacatcataactcgcgctcgagtcccggttcaacaagccccggacatggtgagatggataagggtggtgtacacagaatttggcgacttcactcgagacgcatagtggctggtgactctccgagagggtgatggttttgattacgtggaagggttcgtttatgtcaacagtgacgacccttgcaacggctggaccaccgtccccgtgggccccaacca

SEQ ID NO: 260657 - DNA, 446 bp, Glycine max
catcaaggtctggcaggtaggaaagagtctcaaacttcttcttgccaactggtggcgacacgtgcatgcattgcactcttccaccgttgctagcaatggaggtaatgtcattgttggtctttctggtggggaagccagccatggacttgaggccagtgaatggagcaaccatgccggcaccggcacggttgacagtggtaacagctggggaagagatcattgaggaagccatttggcaaaggaagtagaataccttcttaggaagggatggattccttgcttggaattcgagttggagcacggtttcgtgtaccgtgagcacaacaggtcaccaggatactacgatggacgctactggaccatgtggaagctgcctatgtttggttgcactgatgcttctcaggtgttgaaggagcttcaagaggctaagactgcataccccaacg

SEQ ID NO: 260658 - DNA, 388 bp, Glycine max
cgaccgcgcgtgctgccatgtggctgatgctgcatcaggagaagctttaggtctatgttgtggccactgaagagtggcacagtgtatatgacttcttggaagtcccgttcggctatgtgggactcaattggagggaccatgtcgtcattgacaagagatactttcgcccctctgaagtcgataacctcaaaggggacgcttccaaggccaagaaagtgcttggttggaaacctaaagtggggtttgagcagcttgtgaagatgatggttgaccgggacattgagatggctaataaagagaatgttcttgttgatgctgcctacattgatgcttatcaacaaccttgaatctcatcttcaacttgatgaaaatggggttttgctgtttt

SEQ ID NO: 260659 - DNA, 445 bp, Glycine max
  unsure (1)..(445): unsure at all n locations
aattaaccgggtcgagccgacgcgtgacgctcggtgggagggtacgattgggccgatctgatttttactcccgacgggnaagagccgtggaggacagatgctggtgtacagtttcagctcttcatnctcgcttgcttagcgaagggactcgacgttagggctgctttttgagttgacgcttttggatcagagtgggaaggagagacacaaggtgcatagccattttgagaggaccctcgagagtggaccctacacgttaaaataccgtggtagcatgtggggttacaagcggttttttaagagaacagcactagagacatcagattaccttaaagatgattgccttagtgttaattgtagtgttggtgttgtgaagtcacacacagagggccttaaattatataaaatccaaattccgtcttctaacatggttaaccaatttgga

SEQ ID NO: 260660 - DNA, 460 bp, Glycine max
gtcgaccacgcgtgcaatagtgaactttttgattcctaaattctctagaattcgaaattctaatttcgttaggggaaagagattgtttgtgtgtgagtgagtatggctggaaaaggcgagggtcctgctatcggaatcgatttgggaacgacgtactcttgcgtcggcgtgtggcaacacgatcgtgttgaaatcatagccaacgatcagggtaacagaactaccccatcctacgtggctttcaccgacacagaacggttgatcggcgatgcggcgaagaaccaggtcgctatgaacccaaccaacaccgtttttgatgctaaacgtttgattggaaggcgtttttccgatgcatcaatacaaggtgacatgaaattgtggccgttcaaagtgattccttgcccttcttaaaaacctatgattgtggtgaactacaagggggaggagaaacaagttttcg

SEQ ID NO: 260661 - DNA, 410 bp, Glycine max
  unsure (1)..(410): unsure at all n locations
cgatgagttactacaatcagcagcaaccacccgtcggtgttcctcctccccaaggttaccgagcgccggattcttacggaaaggacgcgtaccctccgccagggtacccgccgcaaggaggataccctccgcaggcgtatccagcacaggggtaccctccaccctacgcgccttctcagtacgctcagcctccgccgcaacaacaccagaattcatctggcccaggttgcttagaaggatgtttggctgctctctgctgctgctgtctgttggatgcgtgcttctgagaggagaagaggttgctttgcacaaattggatttgaaactgtgttttgactttgaatatcngcgntaggttttattattctatgttgatttacatttcggggatatgaaatattggttccgaa

SEQ ID NO: 260662 - DNA, 369 bp, Glycine max
gcgttttctcacaatttccctgttcttgaagggcacagaagagggtttcttttcgtttcgtttgaatggggagcgaagaggagaacggcgaattctacctgcgatactacgtcgggcacaagggcaagttcggtcacgagttcttggagttcgagttccgccccgacgggaagctccgctacgccaacaactccaactacaaaaacgacaccatcatccgcaaggaggtttacctcacccccgccgttctccgcgagtgccgtcgcatcatctccgagagcgagattatgaaagaagatgataacaactggccggaacctgatcgggtggggcggcaggagctggaaattggtattgggaacgagcaca

SEQ ID NO: 260663 - DNA, 426 bp, Glycine max
cccacgcgtccggttatcaagcccatgctcgacttcctccgccaaaccggttcctacctaagggtgaatgcctatccgttcttcgcttacgctgcaaactctgataaaatctctttagactacgcgctgttcaaggaaaaccctggcgtggttgattcgggtaatggtttaaaatacaccaacttgttcgacgctcaaatcgacgccgtttttgctgccatgtcagcagtcaaatacgacgacgttaagattgcagtttcggaaactggttggccttctgctggggactctaatgagattggagccagccccgacaatgcggcgtcgtataacggaaacttggttaagcgcgtcttgagtgggagtgggacacccttgaagcccaatgagtcactcgacgttttcctcttcgcgcttttcaatgag

SEQ ID NO: 260664 - DNA, 254 bp, Glycine max
  unsure (1)..(254): unsure at all n locations
gcaatcgtcaccggctcgtcccgcggaatcgtccgagaaatcgcgcttcacctcgcctcactcggcgcgcgactcgtcgtcaactacacctncaactcgggccaagccgactcaatcgcggggcaaaataacggcgggttcggcaacaagaaaacgggcggcgtcctggtccaaggccgcctggtccatcccggttaagggaagtcgctcttcgactcgggcgagcgcgccttcgactcggcgatccacattct

SEQ ID NO: 260665 - DNA, 411 bp, Glycine max
gcgagagaggcttgcagaagacattgatgctgccatcaagaggatctcagatgaagcatatgaaattgcggtggagcatataaggaacaaccgtgaggccattgacaagattgtggaagtccttctggagaaggagactctgagcggagatgaattccgtgctatattgtctgagtttgttgaaattccagctgaaaaccgtgttgctccttcaactccagtaccagccactgtttgaatagcctatatatgtaacatctttcatatgtattatcttagaatacagaatgccctctgcagcctgctccatatttgtgaatgattaaagattctaccttactttttcattttttgtagtggtgacaaatgacaacagagagtatgtataaaaaaaaaactgtttttaggtgt

SEQ ID NO: 260666 - DNA, 401 bp, Glycine max
cccacgcgtccgaagaaacgggccacacaaaaatagtggtgcctactttgtttgacataatggctcaactgcagaagcaacaaaacttctgctttgtccttcttctctttgtggcactgggtatagcttatgctagagaagcttttgaagttagcttccaacagaactacaagattgcatggggaaagcatcatatcttctttctacagcatggtagagaagttcaactctcaattgataagacttcaggggctggtttcagatcaaaattggagtatgcttctggattcttccaaatgagaataaagatacccaacaaggactgtagaggagttgtgacagccttttatctgacttcaactgcctataaacatttgggaagcaaacatgacgagattgac

SEQ ID NO: 260667 - DNA, 385 bp, Glycine max
cgcagagatggacgcatatcacaggcttccgatgtgagtaacttgcctgctccttttgacgctgttgatgttcagaaacaaaagttcgcagcaaagggtctcaacactcaagacctcgtcacccttgtcggtggacatagcattggtactacagcatgccaattcttcagtaatagattatacaacttcactgcaaatggtcctgactcttccatcaaccctttatttctttctcaacttagagcactctgcccacaaaatagtggcggttcaaaccgagtggctcttgatacgggtagtcaaaccagatttgacacatcttactttgctaatttgaggattggccgtggaattctgcagtctgatcaagcactttggaatgatc

SEQ ID NO: 260668 - DNA, 398 bp, Glycine max
cccacgcgttcgggaagtcgatgcccaccctatccgagctatgaagctttctgtctcacctgttgtgcgtgttgctgttcaatgtaaggttgcatcacatcttcccaagcttgttgaaggtcttaagcggttggctaagtcagatcctatggttgtttgtaccattgaagagtctggtgaacacattgttgctggtgcaggagagcttcatcttgagatctgtctgaaggacttgcaggatgattccatgggtggagctgagatcatcaaatctgaccctgttgtgtcattcatggagactgttttggagagatcatgccgcaccgtgatgagcaaatcacccaacatgcacatccgtctgtacatggaagcaagaccattggaggaaggtcttgctg

SEQ ID NO: 260669 - DNA, 356 bp, Glycine max
cccacgcgtccgggtcaacaccgtattgaaaacagttgagccgacagaaagctctttgcggagctggaactccgaggaatttgggtctctgggtgaaaagcccaccatcctggtctccgagagacttggagaggcaggactgcaggtgttacgcggtgttggacacgtggaatgcgcgtatgagctctcgcaggaggagttgtgcacgaagatctcgtgctgtgacgctcttatagtgaggagcgggacgaaggtgacaagggaagtgtttgaagctgccaaaggaaggttgaaggttgtgggaagagccggcgtggggattgacaacgtggatttgcaagcagccaccgaatttg

SEQ ID NO: 260670 - DNA, 392 bp, Glycine max
cccggacttcctccccctcctccgcgcctcctccctcccctaccagctcaccgccccggccgtcgcgctcctcctcgtcttccgcaccgaggcctcctactcccgcttcgtcgaggggaaaaaggcctggaccatcgtcatcgccggcaacttcgccatcaagcacgcgctcttacactacatcattgccttccccattgcgcttaagtgccacgtgctgtatggttcggatgttaggagtgatcttcagcatttgctagaagtggatgatctggcggtggtcatgaattcgaagcaccggcctcgctgcattattgagtttatatcgcagagcatccgtttactgaaattggaggagtctagaagaaatgccctggaatcaaagatgactt

SEQ ID NO: 260671 - DNA, 349 bp, Glycine max
aaactctgaaaccctcaactcaaatccaatcctttggtgggtttcgaattggagggcaacgaaattctaaacacatggactcagctctgtcgcggttgcatctccacaatctccctcctctttcctccgccgctcaccgccctctcttgcagcctctcgccgccgccgcttctttctaccgctcttctcctcctctcccacgcctccgtctctcgccgcttctcgctgctaacaccctcaccgctaatgacgtctcgccaagaagtggactatacactgtcggtgactttatgacaaagaaagaggatttacatgtggtgaaacccacaacatctgtggatgaaagctt

SEQ ID NO: 260672 - DNA, 396 bp, Glycine max
cttcaattcaataatttagtaaaaatgttgtcttctctgctgaacccttccttcaccaccagccttccaatccattcaattttaatccctaataaccgccgcgcctccaccgtagtatcatgcacctcctcacacctcaccaccaacaaccactcccatgtttcttcgccgccgaacatcaaggacgaggcccgccgccgccccgcggcggagaacgacttcacggcgaagtacgtccccttcaacgccggcttcgactcgccggaaacctactcgctcgacgaaatcgtgtaccgcagccgttccggcggactcctcgacgtgcagcatgacatggaggctttagggcgcttcgacggcgcgtactggcgcgcgctgttcgactcgcgcgtgggg

SEQ ID NO: 260673 - DNA, 455 bp, Glycine max
cccacgcgtccgcagaattaaaatatttctttgagtcaagtcctttagcatcaggcagtgtaaaaaaatgggtttccgtataccaggtattattagacaggcatcattttctacagccaaagcaactcacaaggaacttgaagtcccaaaaggctatcttgcagtctatgttggagataagatgaagcggtttgtgattctggtatcatacttgaaccaaccttcatttcaagaattactgagtcaagcagaagaagagtttggatatgatcatccaacaggcagtctcacaattccttgcaaggagaatgagtttctaaacctcacttctcgcttgagtgagctatatatcatgctttaattgagactcaaacagattagttgagccaaatttgtacaagaaggaacttcttttattgtgatacttccaatttttttcttttataattcaactg

SEQ ID NO: 260674 - DNA, 382 bp, Glycine max
  unsure (1)..(382): unsure at all n locations
cccacgcgtccgcaacgcagtcctttttctatttgtatgtttgtatgagactganaaagatagagagatagtgtgtgcagaagatgtggctattcggcagaaaaggggcttctgggttttcatcatcatccactgcagagcaagtcactgaaggaattgatggaactggtttcactgccattgtcacaggggcatccagtggtattggcactgagactacgcgtgttcttgctttgcgtggtgtccatgtgattatgggtgtgagaaatatgcttgctgctaaagatgtcaaagaaacaatactcaaggagattccctccgctaaagttgatgccatggagttagatctcagttcgatgaagtctgtcaagaaatttgcatc

SEQ ID NO: 260675 - DNA, 465 bp, Glycine max
ggcctaccatgattgaagtggctgaggagctagatcttatcaggcgcagtgggtgggcgaccatggaggaaaccatatgcatggcttcttcggttgggtccgtgtgttcatcgcctcgaaatggaagtgttaattcacttagaggtgttagttttgagagagctgcaggacttgggagtgagacattgattgttccccacaagactgatgtttttttgcaatcaattgaggaggtgaaggacagctctcctgtgtctgtgcatgatagttggttaagtggaactagctcaccttcaacaaatagcttgttaggacatgtagttcagtgacatatatacttattttgggtggaacacctattatttgaatggcaaaagtcattaatgttttccttttctcttttggaggtgtaggatataaccattttggtgtatgattggcaccaagattctgctttcggttttc

SEQ ID NO: 260676 - DNA, 475 bp, Glycine max
  unsure (1)..(475): unsure at all n locations
gcgaaagaatgcattanagctctagataatgaccaagggcatatacctttcagaggaagtaaattgactgagagttctgcgagattcatttgtcggtgattcgcgcactgtaatgatatcatgcatttcacctagctcaggttcatgtgagcatactcttaacacattaagatatgctgacagagttaagagcctgtcaaaagggaacagctctagaagggatcccctttcctcctcaaaccttagagattccactgtgttgcctggctcttcagtcttatctcgtgatgaaaccatggaggatgaaataacttatgtttctagtgacaagaatcgatttggttggcccaaacagctggaaagagaaccctctcctccaaacaatgtaaaccgtgttccaagtggtagaatggggggaaatttggcaccatctatgtattctgatccacaaaatggtcaaagaggtagtcaaaat

SEQ ID NO: 260677 - DNA, 462 bp, Glycine max
cccacgcgtccgtcttgatatctaaaaggagcagggtagcccatcattgacaatatctaaggtgtgtgctctccatttgctccctattgaccgatccaaacccagatgaccccttggtgcctgaaattgctcatatgtacaagacagacaggtccaagtatgaaacaactgctaggagctggactcagaagtatgcaatgggctagcatgttggaataaggcattgtattataggataggacgtgatccttccatttttaaaagacattaatgtataatctatcttttcattcccgctgttgacatattgaggataggtaacagtgcggtgcggaggattttttagtttgtttgtatgaaacttctcttgtgagtgctgggaattgggaaatacatgtagctgatattcttctgtgtgttccaatttatttatctttacatactatgcttagtatgctaaaa

SEQ ID NO: 260678 - DNA, 360 bp, Glycine max
  unsure (1)..(360): unsure at all n locations
ccggaattgaattcccggcccgaccgacgcatttttttttcaaaccactcaaatattggcaagcactcctagcattccatcacacataaaagctggggcttattctgaatatgggaacacaaaaaaaattctcaaatttgaatctaacatacctataccagacatcaaggaagaccaagtcctcatcaaggttgtggctgcagcccttaacccaatagattataagagggctcatgggttnttgaagaacactgattctcctttcctactgttccggggtacgatgttgctggtgtggtggtcaaagtgggaagtcaagtgagtaaattcaaagttggggatggggtttatggtgacatc

SEQ ID NO: 260679 - DNA, 393 bp, Glycine max
gtgagaatttgccaaagaagaagaagaagaaacatggtggaaggttagagagtgagagagtgtgaagcatggaagtgggtatgcttccaatctcagcttcaaagagaggaaaactcttggctgctggttacaccactctcgatgccattgctcgtgcctcccccacccaccttgttcgagatattgatgtttctgagagtgaagccacggaaattctgaatcttgcaagcaaacctagtgctttggagagaccgaatgggtctcacactgctgttgttggtgatctggataacatccttggtggaggaattaagtgcaaagaagtcactgaaataagtggagttccaggcattggtaaaacacaaattgggattcaacttgcggtaaatgttc

SEQ ID NO: 260680 - DNA, 418 bp, Glycine max
  unsure (1)..(418): unsure at all n locations
cccacgcgtccgaaagaatgtttacttaagggatatctggccatccactcaagaaattgcagaggctgtccaatccagtgtgttgcctgacatgttccgaagtacatatgaagctattaccaaaggtaacactatgtggaaccaactacaagttcctgctgagaccctgtactcatgggaccccaagtcaacatatattcatgaacctccatacttcaagggcatgaccatggatcctcctggagctcatggtgtgaaagatgcctattgtctgctgaattttggtgacagtataacgaccgatcacatttctcctgctggtaacattaacaaggatagtcctgctgcaaaataccttctggagcgaggtgtggaacaaaaagacntcaactcttatggaagtcgtcgtggcaatgat

SEQ ID NO: 260681 - DNA, 447 bp, Glycine max
acggtggttttgacactcatgtcttataaagaggcagaaaattctcaaggagacagttataagagcaccaagtatccacaatgaattgggaaaatgtagaactgccccagttaaggctgaattgaatcctatactgttgatgttgagagacaccaagccctatacaactggtgtgcgagttggtaaaggttttcaagcagaagttcttgactggtcaggcccgataaaaagtgatgaagatgcccttcctgaaccattggaaattagtccttcagaattttataaattgctgggagaaaatacgagaaatcctactaaacttagttccattggtaattgggttaaatgtcaggagattatagatagagccaatggaactatatgtggaaagtggcgcagggctcctctttttgaagttcaaactgatgcctgggagtgcctttgtgc

SEQ ID NO: 260682 - DNA, 468 bp, Glycine max
tgctatttgtcttggtactgctaagggtcttgcatttcttcatgaagaactttcaccacctattgtacacagagacatcaaagctagtaatgtactacttgacagagatttcaatcccaaaataggtgattttgggctggctaaattatttccagatgacatcactcacattagcacaagaattgctggaacaactggttacttagcaccagaatatgcattaggtggccagttaaccaagaaggctgatatatacagctttggggttcttatacttgaaataattagtggcagaagcagtgccagaaggacaaacgggggaggatcacacaaattcctcttggaatgggcctggcaactttatgaagagaggaaattgttggagtttgtagatcaagacatggaagaatttcctgaggaagaggtaattaggtacatgaaggttgctcttttctgcacacagtcagc

SEQ ID NO: 260683 - DNA, 397 bp, Glycine max
cacacaattccaattcctctggatctcgtctcgatcgatagatctcgaacatgagcactggggagcttctcaacatcgaacctctcgaactcaagttcccctttgagctgaagaagcagatctcatgttctcttcaattgtccaataagaccgatagctatgtagccttcaaggtgaaaacaaccaatccgaagaagtattgtgttcgtccgaacactggggttgtcacgcctcgatctacgtgtgatgttatcgttaccatgcaagcgcaaaaagaggctcctgctgatatgcaatgcaaggataagtttcttcttcagagtgtaaaaactgttgatggtaccagtccgaaggatatcactgcagacatgttcaacaaggaggcaaggcatgtggt

SEQ ID NO: 260684 - DNA, 384 bp, Glycine max
atggcttctgcttctaatgccatcatccaatgcacctcttcttcttcttcttcgtttgagtatgacgtgtttgtgagcttccgcggtgaatacacacgcaacagcttcaccgcttttctttttgaagctctgaaaaaacaaggcatcgaggccttcaaagatgataaagatatcaagaaaggcgaatccatagcaccagaacctatacgaaccattggaaggtcttatggtttccctggtggcctttccaaaggcctttccttcctaaactggtgcctgcgtgaactagcacatatctggaattgctttcaaccatctaccagacatcttctggctattttctatgatgttgatccatcacaagtgcgaaaactgagtggagac

SEQ ID NO: 260685 - DNA, 396 bp, Glycine max
  unsure (1)..(396): unsure at all n locations
ccggggggacgactctttctgttgttgtanaactcgttcttgttcttttgatgctctgtgtttgtttttgtaaagtcgggcacctgaaaatgtcttgctgctgtgttaactgtggttgctgaagctcctgcaagtgcggcatctgctgcggaggctgcaagatgtacccagacttgatctacactgtttcaaccaccaccgagaccttggtcatgggagtggcacctgttaaggctcaatttgagggtgctgaaatgggtgtgcccgctgagaacgatggctgcaaatgtggaccaaactgctcctgctacccctgcacttgcaagtgaggtgttgggagagcaagctttaagcagtgatagcccttaattaggaatatatgataaactattaatg

SEQ ID NO: 260686 - DNA, 352 bp, Glycine max
gacccacgcgtgcgcccacgcgtccggtgttagggaggacaaataccgcccctttatgcgcgaagacagtgagaagaacagcaaatggagatatggtgctcctccaaattatgacgttgtcaacaaattatttgatgaaggcagaaccaaggtatggcctccgggttcacttgaagaaaaggtgcagactttagtgaagaattgggagatggaaatgttccacaaggaggatttcaaggataacagatcagtggacccagagaaatacactttcagcctaaacggaaagaagcctattagtttggaagagaaaaagaagcttggaggaaggtatattccactgctgcaaacc

SEQ ID NO: 260687 - DNA, 304 bp, Glycine max
cccacgcgtccgttccttttgaaggttagaagtgctacaatacaaacaatggcagctactgaggaagatgtgaagcttttgggtattgtgggaagcccatttgtgtgcagggtccagattgcccttaagttgaagggagttgaatacaaatttttggaagaaaatttgggcaacaagagtgatttgcttctcaaatacaaccctgttcacaagaaggttccagtgtttgttcacaatgagaagcccatagcagagtctcttgtgattggtgaatacattgatgagacatggaagaacaacccca

SEQ ID NO: 260688 - DNA, 376 bp, Glycine max
cccacgcgtccggttttgcattaccctcagaggaccaactcttgggattatccgtggggaggcacattttcttgtgtgccaccatcgacggcaagctatgcatgcgagcctacactccaacaagtagtgtggatgaagtgggtttctttgatctactcatcaaggtgtacttcaaaggtgtgcatcccaagtttccaaatggaggactcatgtctcaacatttggactctctacccattggatccatgttggacgtgaagggcccattaggtcacatagaatacaccggaagaagcaacttcatggttcatggaaaaccaagattcgccaagaggttggccatgttggctggtggaactgggatcacgcccattta

SEQ ID NO: 260689 - DNA, 394 bp, Glycine max
gaacccttcgcttactatttcaagggtagtgctcttaatttgttccctgttgaccgaccctaatccttaccatcctttggtcccttaaattgcccacatgttcaagacagacacgaacaagttccagtcaactgccacaaactgtacccagaaatatgccatgggttaagtgaccttgtggtatgtttgagggagagcctttctactctcagtgtttaggtctctcagcccttgtaggaatatttgtcgttttaaatcatgattaaagcccctccagttgaagatgaatgggggaaaacgtttctcctgctgtttgtattgcaaatgttcatggtaatttagaacagtgaaatgtttgcccaattaaaagttatgctcaagtttttaaccgttc

SEQ ID NO: 260690 - DNA, 265 bp, Glycine max
cccactccttcggtcggtacctgatatttcttgagttgcaaaaattaaaacaatggtttcggctgagaccatgaacatcccgtacggcttgtgcttcaaggtttatgccaaggtcatcgaagttgagggcccctgtggaaaatctgttcgagacttcaagcacttgaatctcaattttgagcttatcactgacgaaaacggttaattgaagctgaatgtggacgcctgcttcagttctcgaaaaacatccagcgccattcacacc

SEQ ID NO: 260691 - DNA, 428 bp, Glycine max
gcgctgcattccgcagggtgagagtgtagacggggaatagaattgtgttcatctatgaaagaagagaacgacacaaactataagatcatgaaacggggaatttagtttttggagaaaaggaagtaaagacacactccctcctcctcctcctcctgctctgtctccggcttcaatttcggattccaaattgagttgatttcggagattataaattttcttttacttttttatttttgcgaaaaaatggaagaggcaaaggcattgcaccagcaacaacaacaacaacagcagcagcaacaacttctgctacaacaacagcagcaacaacaacatcaacaacattatctgctcttacagcagttgcagaagcagcaacagcaacaacagcaagctgccgccatttctcgcttcccttccaacattgacgc

SEQ ID NO: 260692 - DNA, 310 bp, Glycine max
gccatgttgaatgttactttcatgtgcaggtctagcatatttgacgccaaggccggaattgctttgaatgacaactttgtaaaacttgtttcctggtatgacaacgaatggggttacagttcccgtgtgattgatttgattgtccacattgcatccgtggcttaaagaattgagtctgagcttggatatcatcgctacaccgttccaaatttttatcttaatcgagtttattttagtgtgaattcggaataaacactttgtgttgctgtgagagatatcattgaaaaacagtgcaatatgttgagttggt

SEQ ID NO: 260693 - DNA, 277 bp, Glycine max
  unsure (1)..(277): unsure at all n locations
cttacacttgnactattcatgaatacgctaatttaacactcaggtcatctcccatataaatatagctaattaaccagattgttgagggattctttaggtggtaaaaccaaaactatcattattgccacaatatccccttccattcactgtctggaataaacccttagtaccttggattatgcacaccgtgcctaaaatatcaagaacaaaccatagattaatcacaaaatgatgaaatctgcaatgattaatgatttgtattcagaaattgacagac

SEQ ID NO: 260694 - DNA, 363 bp, Glycine max
gccacttcaagtttggtatcttcttgttcttctctggctgggtcctcgtcatgtctgtctgcgtgcttttcctgttgcccgagactaataatgtccccatcgaagagatgaccgagagagtgtggaagcagcattggttctggaagaggtttatcgatgatgccgcggatgagaaagtagcccatgtctctaatggtaatggatttgatccaacctccaggttgtaaatcatttgcattgagtattttagactctagagtaagtacagtacatgcttatgtgggttagtaacaaattaagcaagttatttttttatttcccccaccccatccatgttggtggcctatgcctgcaacaacattc

SEQ ID NO: 260695 - DNA, 289 bp, Glycine max
tgaatctcagaattctctaaaagagatctttttctgctctttgaagaaagaaggggctttgcttgattttggagatgtctctgctctcagatctcatcaaccttaacctctccgataccaccgagaaggtgatcgcagagtacatatggatcggtggatcaggaatggacctgaggagcatagcaaggactctcccatgaccagttagcgacccttcagagcttcccaagtggaactatgatggttccagcacatgtcaagctcctggtgaagacagtgaagtgattta

SEQ ID NO: 260696 - DNA, 366 bp, Glycine max
  unsure (1)..(366): unsure at all n locations
gcgctgccaacacattgatgagtactgctatctcagccttcccatctctcctttcttcctcaaaatccagatttgccaccgcagttcctctttctagctttggtgtcaccaatgcctcttcttctcgcttttctatgagtgctgactggatgccaggccagcctagacctccttaccttgatggttcagcacctggtgactttggattcgaccctcttcgtcttggtgaagtaccagagaatcttgagaggttcaaagagtcagaactcattcactgcagatgggccatgcttgctgttccagggattttggttccagaggcattgggcttaggcaactgggtaaaggctcangaatgggcagcag

SEQ ID NO: 260697 - DNA, 407 bp, Glycine max
cccaacacgacgagactgtcaccaatgacgaaattgctgctgacctcaaagagcatgtgatgaagcgtgtgatcccagagaagtaccttgatgagaagaccattttccacttgaacccttcaggccgttttgtcattggtggccctcatggcgatgctggtctcaccggccgcaagatcattatcgatacttatggaggatggggtgctcatggtggtggtgctttctccgggaaggaccctaccaaggttgataggagtggtgcttacattgtgagacaggctgctaagagcattgtggcaagtggacttgccagaatgtgcattgtgcaagtgtcttatgccattggtgtgcctgagcctttgtctgtgtttggtgacacctatggcactgggaaggatcatgat

SEQ ID NO: 260698 - DNA, 343 bp, Glycine max
cccacgcgtccgcacgcctcagtagaccatggcctcattgggtgggttacaaaatctaagcggcatcaattctcttatcaaaaaagagggtccaaaagtcaatgcgaagttcgagctgaagccgccaccatatccactgaatggtttggagccggtgatgagccatcagacacttgagtttcattgggggaaacaccacaagacatatgtggaaaatctgaaaaaacaaattgttgggacagagcttgatgggaaatcactagaagagattatagtgacatcatataataagggtgacattcttccagctttcaacaatgcagcacaggtatggaaccatgac

SEQ ID NO: 260699 - DNA, 407 bp, Glycine max
ccggggcggccgacgcgtacgcccacgcgtcctcccactcgtccggtccagattagtaccacaaaaatggagaaatagaatagctgaatatcgtatagctcaaaataaaaatttaaccaaatgcaattcatatgaaaaaagccaattaattctttacaaagaacaacaagtaaacgcattaaaaaaaaaaattagaaaacaatatagatacgatcttttatcctataattttatcaattatgcagataagaaagactcatatatttatggatatagatccctatttcaagtaaaaaaaaaccaagtgatttcttctaattacaacacgtataaaaaaaaattattggatatcataaataatctctttatcaagaattatatattcgaagatgccattctagatattg

SEQ ID NO: 260700 - DNA, 465 bp, Glycine max
  unsure (1)..(465): unsure at all n locations
ggaantaccgggccgaccgaggcgtacgcccacgcctccttccaaatcaatcaaattctttgagttgaacacaggggccaagattccttgtcttgtgttatggacttggcaagctgaacctggtgttgtagctgaagctctcaccacagccattcaggttggatacaggcatattgactgtgctagtgcgtataagaatcaagcagagattggttctgctcttaagaagctttttgatgatggtgtggtgaagcgtgaggacttatggatcacttccaaactctggtgttcagatcatgcaccagaagatgtgccaaaagcattggataaaacattacaggaattgcaacttgactatcttgacctctatctgatccactggccagtccgcatgaaaagtggaacatttggactcaataaagaatatcttgagcaaccagacattcccaatacatggagagcaat

SEQ ID NO: 260701 - DNA, 466 bp, Glycine max
  unsure (1)..(466): unsure at all n locations
gaccgagccattcttcctttagcatcaaagataagaggcaaaccggttaggatcagtgcagagagagagaatgggacttggcttgtttttctcttttatccacttggtaacttcggctattgtcgaatccgtaaggcgaaggagagcaatcaaggagggatatcttaacaatgccaatggtgtgttgcatatgtctgcaatgtggcttttcccacaactttgcttgggtggaatagctgaagcattcaatgcaataggccaaaatgagttctattacacagagtttcctaggaccatgtccagtgttgctgcttccctttctggactgggaatggctgcaggaaaactggtgtctagttttgtcttcagcgttgtacaaaatgctacttcaagaggggggaaaagaggttgggttttggataacattaacaagggntcgtatgacaagtactactgggttatttct

SEQ ID NO: 260702 - DNA, 289 bp, Glycine max
  unsure (1)..(289): unsure at all n locations
gcggttaacgatggctctgatgggcggttttgctagaataaacaataatgagatcactgttttagtaagtgatgcggaaaagggtagtgacattgatccacaagaagcacagcaaactcttgaaatagcagaagctaatttgaataaggcggaaggcaagagacaaacaattgaggcaaatctagctcttagacgagctaggacacgagtagaggctatcaatgtgatttcataacaagttgatgcgtccgaatatcggaataactaaaaaaaaaaaaaaaccananna

SEQ ID NO: 260703 - DNA, 338 bp, Glycine max
  unsure (1)..(338): unsure at all n locations
gaattaaaccatggagtgtggcagcaagtgttggaattgtggaggccttgaaagaccgaggcggatgcaggtggaatcatgccttaagatcagctcaacaccatctcaaaaaccatgttggctcattctctcaggctaacaagctttcttcttctgctatgatatccacaacactaaaacatgagaaggcaaatcaatcagaagagtctttgagaactgtcatgtacttaagctgctggggtcccaactagatatcataagcccaacaacaaaatattcttttctcttttcaattctaggaatcaagcaagcttaantagtctcaaatgatgatgagt

SEQ ID NO: 260704 - DNA, 311 bp, Glycine max
  unsure (1)..(311): unsure at all n locations
cccacgcgtccgcccacgcgtccggcttgatgggaaatcactagaagagattatagtgacggcatataataagggtgacattcttccagctttcaacaatgcagcacaggtatggaaccatgacttcttctgggagtgcatgaaaccaggtggaggtggaaagccatccggngagcttctagaactgattgaaagagactntggctcatttgaaaaattccttgatgagttaaaggctgctgctgcaacacaatttggtcaagatgggcttggctggcatatagagcaagcaaatttgatggggaaaatgc

SEQ ID NO: 260705 - DNA, 401 bp, Glycine max
  unsure (1)..(401): unsure at all n locations
gggggcgaccgacgcgtacgctcatatcctcaatcaccccccctctcactctctcttcccttcctctggtggcgagagtggggactcctgctaggaagaggctgatgagagacttcaagaggctgcaacaagacccgcctgcagggatcagtggtgccccccaggataacaacataatgctgtggaatgctgtcatatttggtcctgatgatactccatgggatggaggcacgttcaagttgacactccaatttactgaggactatccaaataaaccaccgactgtacgatttgtgtctcgcatgtttcatccaaatatttatgctgatggaagtatttgtntggatatattacaaaattcagtgaagtcctatttatgatgtggcctgctatactcacat

SEQ ID NO: 260706 - DNA, 325 bp, Glycine max
caagagccttctctttgttccgttccgcgaccatgtctcatgagacatgcccttgcgtaaagaacttccttcttttggattctgatgggaaacgtgtcgcagtcaaatacttctctgaagactgggcaacgaatagtgccaaggaaaattttgagaaagttgtcttcaacaagactcagaagaccaatgcccgcacagaagcggaaatagcaatgtttgagaataacattgttgtttacaagtttgtccaagatcttcacttctttgttaccggtggtgattatgaaaatgagcttatcttagccacagttctgcaggcattttt

SEQ ID NO: 260707 - DNA, 367 bp, Glycine max
cgcgtaaccccacgcgtgcggctggaagaatatggcttcatttgtttctacccactgtatcctgcctagcggggttggatttgtgcatgaccaagatcgttcttgtggtagaactaacactttgcatcttcaaaatgctcctaaaagccctagctctctctcctttttgctctccgtgcgagcttcagaaagtagatcagatgccgttgttgttcagagcaagggtcgatcgtctttttctcaaacagctgctgtgaggcatcttacaggttctgttaccagagcccatggactttcgtttgctgtggttgttgctagatttaaatgaaattgtaccaaaccgctctttgaaagtgctttgggtact

SEQ ID NO: 260708 - DNA, 341 bp, Glycine max
aagaccaaaaactgatacgtttcgtacagtttttaatatcagttcactttaagaatacatctatctctgcttctgcaagagaaacaattggaagggttgcttctggtgctgttgctaagaaaatccttaaagaattttctggaactgagattctggcctatgtctctcaagttcataagattgttcttccagaggacctgattgatcatgacactctgactcttgatcagattgagagtaacattgttcgatgtccagacccggagtatgcagagaagatgatatctgcaattgatgctgtgcgagtgagaggtgattctggtggtggtgttgtgacatgc

SEQ ID NO: 260709 - DNA, 440 bp, Glycine max
cttgagttggaagtcatggcgattggtaatgataatcagccacaacaatctgaaggcaaagggtggaatttgttcaagcttccctttcgccattcaacttcaactcctcacaatcacaatcaagtttccacctccaattctgtttcttcctttgccaaatcgctcctcccctcaccacgtcgtcttaagcttgatccttccaacaagctctacttcccttatgagccgggcaagcagggtaggagtgccatcaggattaaaaacaccagcaaatccaacgtagctttcaagtttcaaacaaatgcacccaagagttgtttcatgcgccctcctgggggcattctggcaccgggcgagagtataattgcaactgtgttcaagtttatagaacatccattgaataatgaaaagccagaaaaaactggactcaaattcaaaat

SEQ ID NO: 260710 - DNA, 263 bp, Glycine max
cccacgcgtccgctagaagcattagcactaggagcagcaacaactagtctcagctggaatgggctcttcagtgatggcatctctggcccttaaacctgcccctttcactgttgagaagtcctcagtgacaggccttccctatctatccaggaactcttcttcattcagagttgtggccagtggcacgaatatcaagactgacagaccttatgcaatcaatggtggcatggctttgacgtatggatctgatgcatctgtcatgt

SEQ ID NO: 260711 - DNA, 361 bp, Glycine max
ctcacgcgtccgttgaaaccaaaatctccaatactagacatgtcaactctaatccggagatggcaatcatatcatacacactatactacttctatgattctggttgaatcctacatactgttaacactcatgaataaccattctgtagagccacgaatccggtctagattctcaactatcagaagagcatgagaaccttctacagcagcgataatgggaattccaattccaattcccattttatctccggtcatgtcgccgtttattgctgctgcggatgagaacaccaacacaaataacatcaacaacaatgggaagacaaagtcaccgaatttgcgcggtagcaacgacgacggaatgc

SEQ ID NO: 260712 - DNA, 378 bp, Glycine max
cacaggaaatagtatcttcgtttgttcaatatgtttggttcatcaggcatggcacaggaatcgggtgtgttcatggttagccagacaattggcagtgttttgtgctgcaaatgtggaattccaatgcaacccaatgctgctaatatgtgtgtcaagtgtctgcgatcggaagttgatattacagaaggactgctgaagcgtcttgtgctggtgcattgccctgagtgtgagagttacttgcagccaccaagaagttgggtcaagctgcagctggaatcaaaggagttgctgacattttgcttgaagaaattgcagaagaatttgaattcgaataaagtgaagttggtgcatgccgagtttatttggactgagccccat

SEQ ID NO: 260713 - DNA, 411 bp, Glycine max
cccacgcgtccgttttatttcaggcacaagcaacaatttgtgtcagcaaggctttgaagtggtggaagaagaccctaaagcctaatatgattgagatccactcggcacaagaactggtccattctttgctcaacgctggtgattcattggttgtggttgatttctattcacctggttgtggaggctgcaaagcccttcatcctaagatctgtcaaatagctgaattgcacccaaatgcaatctttcttaaagtcaactacgaggaactgaaaaccatgtgtcacggtttgcgaattcacgtgttacccttcttcagattctatagaggtgcggagggtcgagtttctagcttcagctgtaccaatgccactatcaagaaatttaaggatgctttgacaaagcatgggaatg

SEQ ID NO: 260714 - DNA, 256 bp, Glycine max
cccacgcgtccggtgaaagcatgtcctcggaggttactttaagggatgtcccaccgggagcttgcaaggctatgcttaactttttatatgatgggcaattgaatgacaaagttatagattctggtgctttgttgctccaactccttctattagctgatcaatttggagtgacttttcttcaacaagaatgctgcaaaatgcttttagaatgtctctcagaggactcagtatgtccactcctccaagtggtttcttc

SEQ ID NO: 260715 - DNA, 345 bp, Glycine max
cccacgcgtccgcccacgcgtccggtgaaaggtaaagcaaacatgcttgatcaggtcgaacaggctacaatcatggacaaggttgctggccagctccatctccggtctggtgtttctggtattaggagttatgaatgagcctactgtcaccccacaatgtaccaaagaccctattttgggaattactcgaatgctgcattgcagtatcctgagatgccctcatgcaaagctactatggatttgtctgctgctgcaacaactggctgctcctgctttggtgctgctccagcagagtaaggccattttcttatagactttctcatgggaggtgtttcaccatctgtc

SEQ ID NO: 260716 - DNA, 332 bp, Glycine max
  unsure (1)..(332): unsure at all n locations
acggttttgtgtttcacatttaaagcaacactgattagaaaggaaagtgaagttgagagggtggtgaggaagaacaagaaatgggggttggttcccaggatgccatcaagcagttccaggcattcattgaccaagttgaggagcctttgcgaacaacgtttcagaatgttcatcaagggtttgtcaccgaaactttaatgcggtttctaaaagcaagggactgggatccttgcaaggcacataaaatgttggttgactgtttaaattggagggtgcaaaatgagattgacaatatattatctaaaccaattgttcctgctganttatacaga

SEQ ID NO: 260717 - DNA, 426 bp, Glycine max
  unsure (1)..(426): unsure at all n locations
gccattgattctgtgttcgatccgctgagagaattcgcaaaggacagcgtgaggctcgtgaagcgcgtgccacaaacccgatcgcaaagaattctccaaggttgccgtccgtactgcaattggtttcgtcgtgatgggattcgtcggtttcttcgtgaagctcattttcattccaattaacaacatcattgtcggatctggttaggatgaagggaactacaattgcctcagaattcaagttgtcaagcaaaaggaggtagacagagttcccacatcaatagatcattttatgcccccaatcttagttctgttttcatttttgttttttcttatatctggaagcgttactttagatgtaaaattttatttatcctttgttagaccttgacacatntgtttgatttaagataaggaggaaaaaacaat

SEQ ID NO: 260718 - DNA, 438 bp, Glycine max
acgcccacgcgtccgagatgatcttgaaagagcagtggatgatggagtgaacacttacaaggccgtgtgcagggatagccgctttgtacctggagctgcagcaactgaaattgagttagctaaaagggtgaaagacttctccttcaaggagacagggttggatcagtatgctatagcaaaatttgctgaaagttttgaaatgattcctagaactttggctgagaatgctgggttgaatgcaatggagatcatatcttctctgtatgcagaacatgcatctggaaatgccaaagttggcattgatttggaagaaggcgtatgtaaggatgtctcaaccttgagcatttgggatctccatgtgactaagttatttgctcttaaatatgctgcagatgctgcatgcactgtactacgtgtggaccagattattatggcaaa

SEQ ID NO: 260719 - DNA, 465 bp, Glycine max
  unsure (1)..(465): unsure at all n locations
ccaagtctcagaaacgtataggaagatgtgtagtttggttttgttgtccgtgttattgctcggtctccaacgtcctctctcatccttctcagccaactccgaaggaaacgctcttcatgctttgagaagcaggctttctgaccccagcaacgtgcttcagagctgggacccaaatctcgttaatgcttgtacttggtttcatgttacctgcgactccaacaatcacgtcattcgcttagacttgggcaattctaagctctccggaactttgggaccagaacttgcccagctaccccacctccaatacctggagctctacaagaataacataagtggcaacattcctcgggaactttctaaattgaagaaccttattagtatggatttgtatgacaaccaatttcatggcaaaatccccaagtctttttgcaaacttgactcactntaatttctacgcctaaaaca

SEQ ID NO: 260720 - DNA, 424 bp, Glycine max
  unsure (1)..(424): unsure at all n locations
gtgtttgcggctgaggattccgaacgagcgaccttcttcgtttctcgcaaagtttaagtcaggatgggtaaggaaaagactcacatcaacattgtcgtcattggacatgtcgactctgggaagtcaactaccactggtcatttgatctacaagcttggaggtattgacaagcgtgtgattgagaggttcgagaaggaggctgctgagatgaacaagaggtcattcaagtatgcctgggtgcttgacaagctcaaggctgagcgcgaaagaggaattaccattgatattgctttgtggaagtttgaaaccaccaagtactactgcacagtcatcgatgcccccggacatcgtgactntatcaagaacatgattactggtacctnccangctgattgtgctgtccttatcattgacttcaccactg

SEQ ID NO: 260721 - DNA, 442 bp, Glycine max
  unsure (1)..(442): unsure at all n locations
acggttttccttccctcacaccatcatcttcggccttgtctttccgatcattatttcttgcgtcctgggcctcgtcgttgggcctgagtagcaatgcgacgaccatctacgaggtcctgagcgagcacgggctgcccatgggcctgttcccgcagggcgtgcgggagttcgcggtgggcgaggatggtagcttctgggtgcgcctcgacgaggcctgcaacgccaagttcgagaacgagctgcattacgagcgcaacgtctccggccacctcagctacggcatgatcgacgccctctccggcctcgaggcccaggatctcttcctctggttccaggtcatgagtatccgcgtcgacgtccccagcaccggcctcatctacttcgacgtcggcgccggcttcaagcgcttncccttgtccctcttcgaaaccccgcccgaatg

SEQ ID NO: 260722 - DNA, 442 bp, Glycine max
ttatcaactcactcatcaatctcgtttggtctcactaactattacttcatcatgtcgtcgagcgcaggtggtcaagtcatcaaatgcaaagctgcggtttcatgggaggcagggaagccacttgtgattgaagaagtagaggtggcaccaccacaagctggtgaagtgcgtttgaagatcctctacacctctctttgccacactgatgtttacttctgggaagccaagggccaaactccattgtttcctcgtatatttggtcatgaagctggagggattgtggagagcgtacgtgagggtgtgactcatctcaaaccatgggaccatgcccttccagtgtttaccggggagtgtggagaatgccctcattgcaagtcacaggagagcaacatgtgtgatcttctcaggatcaacactgataggggtgtcatgatccatgaca

SEQ ID NO: 260723 - DNA, 417 bp, Glycine max
cccacgcgtccgcaagatctatatgataaggcagcttcaaagttcaaagacataaagctttacgacggcttcttgcacgaccttctgtttgagcctgagcgtgaagagatagctcaggacattatcaactggatggaaaagagattatttactatttgaaaatgttagtatatatatatatatatatatatgggggggttaataggaaagggaagacacaagggaagaaaaagggatgccatgtttgtaagtgtagaaaattgaagtcgccctgggaaatggggggaggcggatgcagataggtttattcatcttttcattttagtgttttgaatatatgtattgtgtgaagatctttgttttatcaagaaacttgtacattttatagacttaaatatttcagtagtgtttccattt

SEQ ID NO: 260724 - DNA, 478 bp, Glycine max
acgcccagatctcgggttccaatcgtcgagcgatgtccaaggcacgcgtctacaccgatgtcaatggtctgggccccaaagagtactgggattacgagtccctcaccgttcaatggggtgatcaagatgattatgaggttgtgcgcaaagtgggaaggggaaagtacagtgaggtttttgaaggcataaatgttaatagcaatgagcgttgtgtaatcaagattctcaagcctgtcaagaaaaagaagattaaaagagagataaaaatacttcagaacctttgtggggggccaaatattgtcaagcttcttgatattgtcagagatcagcactctaaaactcctagcttaatatttgagtatgtcaacagtacagattttaaagttttgtatccaaccttgactgattatgacatacgctattacatatatgagcttcttaaagccttagattactgtcattctcaaggcataatgca

SEQ ID NO: 260725 - DNA, 480 bp, Glycine max
gcgtacgctaaacctaaacctaaacataaacggtatgtttaaatcccctgcccaattttcactagaacgtattactcccaaaccaatcttcgatcatggccgccgaatcacaacctcaactaatcgaagagagaagagaggagcaagaacttaagtacctggaatttgtgcaattcgcgaccatccaggccctgatgcgctgcaccatcctctactcctacgccaaggagcgcgcgggtcctctgaagcccggcgtcaacaccgtcgaggaggccgtgaagaccgtcgtggctcctgtctacgacaggttccacctcgtccccggcgaggtcctcaaatacgccgatcgcaaggtcgccgaattggaccgtcacgttccctacaacgtgaagaaggtctacttccaagcccgctccgtcgtctacgaagtcctccgtgatggtgtctacgcctacaccaaaatcgtttactcgaagtatg

SEQ ID NO: 260726 - DNA, 465 bp, Glycine max
cccacgcgtccggaaaaaaggttttagatcgtaaaaactaatcactacgaaaacaagggatagcgaagatggctctgcccaaagctaaggagatcgtgtcgtccaattccgtcgtcgttttcagcaaaacctattgccctttctgcgtcgatgtgaagaagctcttcggtgacctcggtgccaattacaaggccatcgaactcgacactgaatccgatggaaaagagctccaagcagcattagttgagtggacggaccatcgaaccgtgcctaatgtgtttattggtggaaaccacattggtggctgtgactcaacaactgccctgcacactcaggggaagctggttcctctgctgatatctgctggagctgttgccaaatcaactgcttaaaggatctcccatttctaggttatgcagttaaataaaaataaaaacccaagtagttgggtcggttatataattc

SEQ ID NO: 260727 - DNA, 301 bp, Glycine max
acgaagtccttcctcctagagacccactgtgtgcctacttcagagcccgctatgaaaggcttgctgcttcaaaatagtcttatttaaggatatttgttgaacaacttgtgtcttgttgagttattgctgtttgaatttcatgtaaaatgatactagctatatgtaaatcccagaaaaaaaaaaaaaaagaatcctaggatcttgttttcgttttggccatttcagttaataaagaaattatatttttcgaaaaaaaaaaaaaaaacacacataaaaaaagataatgaaaatatacatataa

SEQ ID NO: 260728 - DNA, 472 bp, Glycine max
  unsure (1)..(472): unsure at all n locations
acgcgcccctctttacattcctgccgcgtttggccaagtggaggagttctctccggaatgggtgggtctggtgacgacgctgacatggtaccatgactactggctaagccagcagcacgatgagggagccttctacggcgaggacgacgggtttgatggcaatgatgtcgttgatttgcttcctgattcgtttgatcttgatgctggcgaggatctttttgaagagtttataagatcttctgaatcccaagaagaaactggacccaaagtaactgcatgaggcttagagatgaacccatttaaagaatctacctaccaacctaagagactggacccaaggccttagctttaggtcagttagatgatatgtttgcatcatgttatccgtagcttcaactntctgtaacttcttgtataggcaaaggtttcaaaccttcaatctatccttctcttgcttttgccaaaatgttat

SEQ ID NO: 260729 - DNA, 369 bp, Glycine max
acgcaaacaatggagttcccacactcccttcgatgtcaatacggcatcccttctcaccgtctctttccctacaatttcatccctgaaaaccatgttcactggacagaaacccctgactctcacatattctcagctgacatccctggtgtgaagaaagaggagcttagagtggatgttgaggactcaaagtacctcataatcagaactcaagcagtggataaatccacagaacctgcgaggaagtttgagaggaagtttaggctgccatggagggttgatcttgatggcatctctgcagggtatgaagattgagttttaactattacagttccaagatcacttagtagaagtttctacattgacccttct

SEQ ID NO: 260730 - DNA, 451 bp, Glycine max
cccacgcgtccggtgctgtgtttcagttgcaagccttacgcgctatggtacaggctgatccggaaatattgcagcctatgctacaagagcttggcaaacaaaatcctcatcttatgcgattgattcaagagcatcaagttgacttccttcgcctaattaatgaacctgttgaagggggtgagggaaatatactgggacagctggctggtgccatgccgcaagcagtgactgtcacccctgaggagcggcaagcaattgagcgtctcgaagcaatgggttttgatcgtgcaactgtattggaggtgtactttgcttgtaacaaaaatgaggagctggctgccaactaccttttagatcacatgcatgagtttgatgaataattagatctcctttacaatttgtcaaaatatttgtttaatgtttcctttagaatggtctttgttatgtaatg

SEQ ID NO: 260731 - DNA, 442 bp, Glycine max
tttgaatacttcttatgcaactatagtgaggctgagagattggtccataattaatcaaaatgtgggctatattccacaaagcttttgctcatccacctgaagagctcaacagccctgcatcttacaaaggttccaagaagcctaaggttcccgaggaaactctcaaagatttcctttcccaccatcctcacaacacttgctctatgagctttggtgatgctgctgttctagcttatgtccgtcctgatcaatctttctctcgtcatcaaaggctgttttgtgggatcgatgacatatattgtctcttcttggggagcttgaacaacttgtccctactcaacaagcaatatggattgtcaaagagtactgatgaggcccatgtttgtattgaagcttacaagacactccgtgacccgggtccataccctgcagatcaagttgt

SEQ ID NO: 260732 - DNA, 462 bp, Glycine max
  unsure (1)..(462): unsure at all n locations
acgcccacgcgtccgatttttgttggttcgagtgagcgagggaagatgtactctagagattcatggggtggtccgttggagataaacgcgacggactcggcaacggaggacgagcggagccggaacctgcaggacgtggacagggcggcgctgtcgcgtcccttggacgagacgcagcagagctggctcctaggccccggcgagcagaagaagaagaagtacgtcgatctcggctgcatcatcgtcagccgcaagatcttcaagtggaccctcggcaccctcctcttcgccgccttcctcgccggcctcattgccctcatcgtcaacaccgtcccccgccaccgncacaaacacccccctcccgacaactacacccttcgccttcacaaggccctcatgttcttcaatggccaacgatncgggaagttaccgaagcataacaatgtgtcttggaggggaaac

SEQ ID NO: 260733 - DNA, 410 bp, Glycine max
gctcgtacgattcgtctcagtacttgttctccgaaaccgattcggttccttacatagatctggattactcggccaggtatcctaagacggagcagaaaagttccgccaccgccgacggcgtcgttccggtgcatagcaacttcgagccgttcacctacggttacaagtacaacactactctctcacagtcacagtctcatatgagccagagtgtatcttctccgtcgtcgatggaagttggagttgtgccggacgggaacactatgtcggagatatcgaactgcagctacagcaaagtggcacctgtgacggtgactgcgcatttctcggcggcggataaggaagctagagtgttgaagtacatggagaagaggaagaacctaaagttcgagaagaccattcgttacgca

SEQ ID NO: 260734 - DNA, 441 bp, Glycine max
  unsure (1)..(441): unsure at all n locations
cacacttcctcccactcttccgcctatacttatacccataccttaaaaacctaaagctaagtgttttccatcatccccacattcctcacttcttactcgttaaccttctaaactaaccttatatcctttaccaacaaatgggtttcaaagggtctttcaaagtcaagaactttcaacctttagacgtaattttccttaaagcaactaatcttatactgcatataactcttgtatatttccaccttccacttattatcaaaacattcatctttctacctcaataaggtatgggtcacacatctggatgtcaatggtaatgcattaaccaacatatccagatctactttcnatcttttatcccactcaaatcattcatcccatccatcatttcttgatcaaaatggtcctttagctaaccttattacaaaacattttctggat

SEQ ID NO: 260735 - DNA, 326 bp, Glycine max
acggcgatggacctcggaacctatgaagtgcgagatggagtggacattctaggaagatgcgatgggtagtttgcaaaaatcctcacaaaagacgctttgaaattcgttgctgagctgcaacgtgagttcaggagcgatatcaagcatgcattagagagcataagagaggcaaagaagaagtacaatgaagggactcttccggggtttgatcctgccaccagtcacattagagaccaggagtggctgtgtgcacctgttccaccagctgctgctgataggaaagtggagatcactggccctgtggacagaaaaatggtcatcaatgc

SEQ ID NO: 260736 - DNA, 462 bp, Glycine max
  unsure (1)..(462): unsure at all n locations
cttctccaccatctcttcgcccataacctaattagtgctcaatcacaaatcatcaatttctcgatgggcatgatgatgatgatgggttcaaacacaaaaccccttgtgcacctttctcttctaattttggttctcttttcttcttcaaccgaatccctcagattcgaactccaatctgggcacaccaaatgcatctccgaggacatcaagagcaattccatgaccgtgggcaagtaccaaattgttaactccaacgagggtcagcctcttcccgattcccacagagtcaccgtcagggtgacttcgtcttatgggaacaactatcactacggggatcgcgttcagacggngcattttgcgtttgcggcagtggaggctggagaatacatgactatgctttgtgctgtggatcacaaccctgtggaaacgttgactgtggattttgattggaaaacggtgttg

SEQ ID NO: 260737 - DNA, 442 bp, Glycine max
actgaatgtgctgtgtatctttggacagttttcatgttccattgcaatggttggtgcgtcgcttggacactaacggctgtgtgtggtactaacatatgccttcgccaggtaacagcgaaggcagtgtatggagccattgccaagtataaagtgactcattcttgtgcatcaccagtggttcttaacacactaattaatgccccatctgaggacaccattcttactctaccccatgttgtgcatgtgaatacagctggggctgcacctactccttctgttctttccggcatgtctgaacgtggatttcgtgtcacacacacttatggtctctcagaaacctatggcccctctgtctactgtgcctggaaaccataatgggaatcacttccccctgaaaaccaagcccggctcaatgcaagacaaggtgttaggtacattggct

SEQ ID NO: 260738 - DNA, 385 bp, Glycine max
caagctcccaatatagcaagcagcaaacatgatttcttccgtgtcctttccagcgtgtcttcgcgccgttaacttctccggcaacgccatggcttcgccgtcgtgccgcgtcaaatcccggccaatagtcgccttcgccaccgccactgccaccgctgaagctcgctcttcctggacggagcaaccgagaccttcctatctgaactcctcttgctcttcgctttacgatatcctcggcatccccgctggcgcctctaaccaagaaatcaaggccgcgtaccggcgactagccagagtctgccaccccgacgtggcggccatcgaccggaaaaattcgtccgctgacgaattcatgaagatccacgccgcgtactctactctttct

SEQ ID NO: 260739 - DNA, 277 bp, Glycine max
gactcgaacggtgaagaagcacagggagtagcggcattgaatatgcagatcttcgtgaaaactctggcagcgaagactataaccctggaggtcgcgagcagcgacaccatcgacaatgtcaaggccaaaattcaagacaaggaatgcattcctccggatcagcagagtttgattctcgccggaaagcagcttcaagatggaaggacccttgccaattacaacatccataatgaatcaacccttcatctcgtactcaggcttcgcggtaacatcattg

SEQ ID NO: 260740 - DNA, 338 bp, Glycine max
gttttattgaaaatactactatcttatctttcaagcaggattcccaaatagttcgaaccaacaccgatgcaaaatcctatggataaaaaatacacctattcaaggaccaaataacagaatttcaacatcaggccaggctttcccacaatgtgtctttgatcactgggacatgatgtcttcttacccatttgagactggatcacaatctgcacaacttgtaaccgacatccgcaatatgaatggcttgaaagaacagatgactcctctctacgagtttgaacacaagctttaaattgtttgaactatttaacttacttttgaacttaaccgaatttatt

SEQ ID NO: 260741 - DNA, 405 bp, Glycine max
  unsure (1)..(405): unsure at all n locations
gcccacgcgtncgcagaagttgacttggagacaatagtcttgttcttcagatctctggtttttggtttcctggccatggcggaatcatttctcttcagcattgcagagtcactcctttcaaagcttgcttcgcaggcttatgaagaagcttctcttgtgctgggtttgtacgaccatctcaaaaaccttaaagacaccctatcattagtccaggctgtcctgttggacgctgatcaaaagcaggagaagaaccatgagctgcgggaatggctgaggcagctcaaacgtgtcttctttgatgccgaaaatgttctagatgaatttgaatgccaaacactgcaaaaccaagttatcaaagctcatggtaccaccaaagacaaggtaagtcacttcttatcaacttct

SEQ ID NO: 260742 - DNA, 417 bp, Glycine max
  unsure (1)..(417): unsure at all n locations
cgaccacgcgtggccacgcgtncgccacgcgtccggcacgcataggtcctctgttaccctattggatctggcttttcggaggatatggagtgttcctgaagctttgatcactgctgagatgggtaccatgttccctgaaaacagtggttatgtggtttgggtttcgtctgctttgggtccctattgggggtttcaacaaggttggatgaaatggctgagtggggtgatagacaatgcattatacccagttctatttcttgactatctgaagtcaggaatccctgctttaggtggtggattgccaagagttattgcaacatggggtcttactatagntctcacttacttgaactataggggtatgaccattgtgggatgggttgctgtttgtttaggggttttctcactcctcccttt

SEQ ID NO: 260743 - DNA, 354 bp, Glycine max
  unsure (1)..(354): unsure at all n locations
agggangacaaataccgcttctttatgttcgaagacagtganaaaaacaggaaatgtggatatgttgctcctccaaattatcaccttttcaacaaattatttgatgaaggcagaaccaaggtatggcctccgggttcacttgaagaaaaggtgcatactttagtgaataattgggagatggaaatgttccacaaggaggatttcaaggataacagatcagtggacccagagaaatacactttcagcctaaacggaaagaagcctattagttttgaagagaaaaagaagcttggaagaaggtatatttcactgctgcaaacctctataccaaaaaaactgaagccttacaaccca

SEQ ID NO: 260744 - DNA, 326 bp, Glycine max
  unsure (1)..(326): unsure at all n locations
gntgaggatcatgaatggtggtggaggtctttcctttgtgttggatcaactggcttgttcatggacggctattgcttgtattactactatgcacgatcagatatgtctggttttatgcaaacttcgttcttctttggttacatggcctgtatctgctatggcttcttcctcatgctcggtagcgtaggattccgtgcctccctgctctttgttcgtcacatataccggtccatcaagtgtgagtagctggggtttgaaggtgttggtaaagttcatattatttctgttaggagaagagaaaagggtcntgtattatttttttcttt

SEQ ID NO: 260745 - DNA, 395 bp, Glycine max
gagtctcttgtgattgttgaatacattgatgagacatggaagaacaaccccatcttgccttgtgatccttaccaaagagccttggctcgtttctggtccaaattcattgatgataaggtttttggtgctgcatggaaatccgttttcacagctgatgagaaagagcgtaaaaggaatgttgaggaagcaattgaggctctgcagtttcttgagaatgagataaaggacaagaagttcttggaaggaaaggagattgggttggtagatattgctgctgtctacatagcattttgggtccctatggttcaagaaattgcagggttggagttattcacaagtgagaaatttcctaagctccacaattggagccaagaatttttgaaccatccaattgt

SEQ ID NO: 260746 - DNA, 368 bp, Glycine max
cccacgcgtccgatgatcatgagcgagaagtgtttgaagaagaagaagaagaaggagaagaagagggggaagttggtggagtgagagtggccagtgtagaagaggaaaatgcggcggcgattgcggagattgtgggtgatttttcagggttttctacttcgaatgaagatgattcttctagcactagcactggaccaaggtctaataatatatctcccaatgggagaatcaagcgtgttattaccgcgggtaactggcagaagggtgagcttttggggcgaggttcgtttggttctgtttatgaagggatttctgaagatggattcttttttgcttgtaaagaagtttcactacttgatcaagggaat

SEQ ID NO: 260747 - DNA, 370 bp, Glycine max
  unsure (1)..(370): unsure at all n locations
gcgacgcgtgggcgacgcgtgggcggacgcgtgggcatagtcctcactcttgctgtcacccgcacactgggttggcccttgtacttggctttaaatgtttctggaaggccttatgatagatttgcttgccactatgacccatatggtcccatttactctgatcgtgaacgacttcaaatatatatatcagatgcaggagtacttgcagtatgctatggccttttccgtcttgccatggcaaaaggacttgcctgggtggtgtgtgtttatggagttccattgctagtggtcaatggatttttggtgttgattacattcttgcagcatactcaccctgcattgccacattacacttnctctgagtgggact

SEQ ID NO: 260748 - DNA, 381 bp, Glycine max
  unsure (1)..(381): unsure at all n locations
gcttacaataagaaattggaggggaagaattcagaggaagacgagtctgacaagtcaaagtgtgaagtcaatgacgatgaggaagatgaggaggaggaggatgatgatgacgacgagtgaagatggtgatacaagatgaagcgtaggaggatgtgggaaaagaaaattgttttgcatagtagttgttgggtttagaatttcataggatggttcccaacccacatccctttatgataattagtttctgaatttttattttgtcctcccttactagggttagattagcgcacaatcgtaattagggttcagtatcatgatcatgtacttaaaagtcaatgctatgatacgtttcaattctattctcgaagaanaaaannnaaa

SEQ ID NO: 260749 - DNA, 308 bp, Glycine max
cggacgcgtgggctcctcctcttcgccgccgtggccaccgccgcaatggcggtggccgcgtgcgacgccgacgacatcctgatccgtcaggtggtgccagatgttggcgaagccgaagaggaggacaacctgctgaacgccgagcaccacttcgcgagcttcaaggccaagttcgccaagacctacgccaccaaggaggagcacgatcatcgcttcggcgtcttcaagtccaacctccgcagagccaggctgcacgccaagctcgacccctccgccgtccacggcgtcaccaaattctccgatctaac

SEQ ID NO: 260750 - DNA, 382 bp, Glycine max
ctctgtcctggcttgcttgtggttgaaatcttaattgagttttctgaaattatgtgcgattaggaattttgatgttaaatttgcacacttataaagaattaaagatgatttctgtgatggttggtttgtgacatgcttctgtgccggaagatgttgatttgggtgcccctccttagagtagttccggtcattggcatacttcatgacaagaaagcattcaaacctgttctaaatccagctgaagtggaagcagtatttgatgcacctttggaaatgtttctcaaggataaaaatcggacgcacgatgagagggagtggatgggagagaagtactttgtgcatttctttgactatggcatcgggcataaaaaatatatcatat

SEQ ID NO: 260751 - DNA, 435 bp, Glycine max
  unsure (1)..(435): unsure at all n locations
ggccacgcgtncgaacaacctgaactgcttcaaaaagctgtcagaaagaaacttcaccttgaggattatgtgtgagcagtttcagaacttacttaaaatgggtcccatcagccaggtcttttctatgctaccaggatttagtgctgaattaatgccaaaaggccgtgagaaggaaagccaggcaaaaattaaacgttacatgacaatgatggactcgatgacaaatgaagagttggatagttcaaacccaaagctcatgaatgagtcccgaatgatgcgaatagctcgaggttctggtcgtccagttagggaagtaatggaaatgttagaagagtacanacgtcttgcaaagatatggagcaaaatgaaaggggctaaaatacctaagaaggtgaaatgagcgccttatcccgaaatatgaatgctcaacacatg

SEQ ID NO: 260752 - DNA, 330 bp, Glycine max
  unsure (1)..(330): unsure at all n locations
gcgtcggaaacaccaaatacacaagggattagtacgtataattttaaaatatccaaagaacatgtatatntgtgtataatagaaaaggaatactaattggggctctccgttggtagaaaaaataaggcagtactccccagaattccgatccagagtatacttccatccaccgattaaataaataactatcagaaacgaaataatcctttaattnttggaagtccccttttattttacttacacaaaaaagactaggataagaacgaagaaaaaagtgatcccccttttctggttgtcttatatccatatttatggagatagaattcatgt

SEQ ID NO: 260753 - DNA, 451 bp, Glycine max
  unsure (1)..(451): unsure at all n locations
cgtgcgtctaagcactctanctgttgcatatttctactatttttcaatggcttctgcagatgttgagggccgttgccttgttggtgggcttgcttgggtcaccggcaacgatgccctcgagaaagccttttcaatctacggcgacatcgttgaatcgaaggttatcaacgaccgtgagactggaaggtccagaggattcggatttgtgaccttcgcctcagagcagtcaatgaaagatgcgatcgcaggaatgaacggccaggaccttgacggtcgtaacatcactgtcaacgaagctcagacccgcgccagccgtggtggtggtggaggcggtggtttctgaagtggtggtggatacaaccgcggtagcggtggatatggtggtggtggtggcggcggcggataccgtggtcgtcgtgaaagtggatacaaccgtaatggttggggtgga

SEQ ID NO: 260754 - DNA, 413 bp, Glycine max
  unsure (1)..(413): unsure at all n locations
ggccacgcgtnncgccacgcgtncgccaccattagcgtgcaacaaagaacccccacaaagaaaagcaagccgaagaaaaagaacacccctcacccagtgaaggtagtgtacatatccaaccccatgaagatcaagaccagcgcatccgagtttagggctttggtgcaagagctcaccggccaggacgccgagtccccgccagatcccacccgcttccacggcctaattcaccctgattcctcctcttctgtcgatcacatcaaagaggaggaggacaatgttcacagtgtgaattgtgttgttcctcccgcagtcgccgacgaaaatatgagcctcgccggctgctacgaggaggaacaacaacaacagccttcctcgatggagagtataaataatttcgagccgctggacga

SEQ ID NO: 260755 - DNA, 349 bp, Glycine max
aacccttccatcgtagtttccacatttctcctaccgaatagtcaaaactacccactcacccaggtaggcacaggcagcgatggacgtaggagccggcaacaatcattccccggaagccgtcatatcgcggtggaaattcgcggtgtcgcagcagtaccagcacatgctggacaaaacgacgccgcacgttctccggcggtggatcgggtgcctggtggttgccgccgtgtacgtgctccgcgtgtacttggtccaaggcttctacatcgtctcctacgccctcggcatttacatcctcaacctcctcatcggcttcctctcccctcaggtcgatcccgagattagcgac

SEQ ID NO: 260756 - DNA, 218 bp, Glycine max
  unsure (1)..(218): unsure at all n locations
acggtcgggtgaaggcgaaaaccaaatcaagatgctgagagtgggcgcaaagaggctgttgggagcgacgtctttgggcgttagggttcccccnaggctgtaccacgagagggttgtggatcactacgacaacccccggaacgttggatcgttagacaagaacgacccgagcgtggggacggttttggtgggggcgccggcgtgcggcgacgtgatga

SEQ ID NO: 260757 - DNA, 416 bp, Glycine max
  unsure (1)..(416): unsure at all n locations
ccgaatcccggtcgacnacgcgtcgccacgcgtncgcttgttgttgttgttgttggaagccaaaaccctancagccggcgagaatggcanacgttgaggttgatgtggcggcggcggcggcggcggcggctgcagggcagccaaagaagagaacgttcaagaagttcagcttcaggggggtggatctggacgcgcttctggacatgtccactgacgaactcgtgaagatgttcagtgctcgcgcacgcagaaggttccagagaggtctcaccagaaagcccatggccttgattaaaaagctccgcaaagcgaaaagggaagcaccagcaggtgagaagccagaaccagttcgcacccatctccgcaacatgattattgtgcctgagatgattggtagcatcattggagtctacaat

SEQ ID NO: 260758 - DNA, 410 bp, Glycine max
  unsure (1)..(410): unsure at all n locations
cccggtcgaccacgcgtgggccaggcaagcnccactaaccaccacacctctnctcgttcacgctacccctttctgctcttcttctacgtttcaagttttaaaagtataaagatggcagagacattcctatttacctcagagtcggtgaacgagggacaccctgacaagctctgcgaccaaatctccgatgctgtcctcgacgcttgcctcgagcaggacccagacagcaaagttgcctgcgaaacatgcaccaaaaccaacttggtcatggtcttcggagaaatcacgaccaaggccaacgttgactacgagaagatagtgcgtgacacctgcaggaacatcggcttcgtctcaaatgatgtgggactgggatgccgacacttgcaggtcctcgtcaacattgagcagca

SEQ ID NO: 260759 - DNA, 414 bp, Glycine max
ttcaacgatggctacgaattcgattacctcatcctccttccgattagtaacaacgagaatcgctctctggctcttccgaaaaaccccacctctcctttcattccccacaaaaccctttttctcaaaacccatcaccttccagagacttcaaccaacaccaccaccacaatcatcatcatcatcaacatcagcatcccttcaacccatcgaagacctacctccgaagctccaagaaatcgtgcacctcttccaatccgtccccgaacccaaagccaaatacgaacagctcctcttctacggcaagaacctcaaacccctcgaaccccaattcaaaaccaacgacaacaaggtccaaggctgcgtctcccaggtctgggtccgagcctacctcgacccgaaccgcaacgtcgtcta

SEQ ID NO: 260760 - DNA, 453 bp, Glycine max
atcgatgctcgaatcctggatgccctgtcaaaaagcatgtggaaagggcctctcatgattcgaaagttgtgataactacctatgagggacagcatgatcatgaaatcccccctggaaggaccgtcactcagaatgcagctacaaatgctcgcacaacggccagtaatggcaaggctggaaccaaatctgagggtaatattactgatgatacaggggaacgaagcggcttgggctcagcaagcagattaacagagcaactaaatggcgagtcaattactaagtcaaaggctggtgatatggttgagttttgtgtgatcagcctttctaatgagggtcctgaaattaaattaagtgagcaacaacaacaaaaagataattcagctactaaagacgattctgtcagcaatgatgttataagccattcaagttctgggagtctgtgtagatcaaatg

SEQ ID NO: 260761 - DNA, 483 bp, Glycine max
ccgaatcccgggcgacacgcgtgcatgaattcacgagttttctatggaaacgattccatttatgtgctgcttagacttcatcagagattgtgtgagaggatacaatcagcaaagattaactcatcatctgctgataggaaatggaaggcttcaagtgatacaagctccaccgatcaatatgacaggttcatgaatgccctttacagtttgctggatggttcttctgataatacaaaatttgaggatgattgtcgagctataattggaattcaatcatatgtcttattcacattagacaagttgatatataaacttgttaaacagcttcaagctgttgccgctgatgagatggataccaagcttttacaactatatgcatatgagaaatcgagaaaacccggaaaatttgttgacatggtttatcatgaaaatgcccgtgttcttctccatgatgagaacatatatcgtattgaatattcacct

SEQ ID NO: 260762 - DNA, 393 bp, Glycine max
ttcttagctccagagtgcatgtgcgaaagcacaaccataaactattctcaagcttaactctccgatccttcatgagtctattgctaaagagatcaatgaaaatcctgaggcacgatgggaggctgctataaatcctcatttctccaattatacagttgaacaatttaagcgccttcttggagtcaaaccaacgcctaagaaggaactgagaagtacacctgctatatctcacccaaagtcattgaaattgccaaagaattttgatgcaaggacagcttggtctcaatgtagcactattggaagaattctagatcaaggtcactgtggttcttgttgggcatttggtgctgttgaatcattgtcagatcgcttttgcattcattttgatgtaaa

SEQ ID NO: 260763 - DNA, 392 bp, Glycine max
  unsure (1)..(392): unsure at all n locations
cccacgcgttcnaaaacaaagattaaaaaaatcccttanccaacacaaccatcagggccacctgtgctattcagcaatcagcattcactggtcaaactgctctgaagcagctcaatgagttcgtccgcaagaccggtggcgccggcaaaggtcgcactaacatgcgccgcaccgtcaagagtgctcctcagagcatttggtatggccctgaccgtcccaagtacttgggtccattctcggagcagattccatcatacctgaccggagaattccctggtgactacggatgggacactgctggattatcagctgacccggaaaccttcgccaggaaccgggagctggaggtgattcacagcaaatgggcaatgcttggtgcccttggctgcacc

SEQ ID NO: 260764 - DNA, 220 bp, Glycine max
  unsure (1)..(220): unsure at all n locations
tcttgatgatgcanatgatgatgctgaggatgaacaagaaaatgaaaatgacttagaagtgacagaagaagctgagcctgttctccggaagcctcctgaaccaccagtggttacaaaaagaagctgaaaggcaactttctaagaaagaattaaagaaaaaggggcttgaagaacttgaagcttgtttggctgagctaggatacacaccgaaggaacccac

SEQ ID NO: 260765 - DNA, 406 bp, Glycine max
actagtatggagtgtttagccatttgaacaaaaataccgtaatgaagaggtgcggagaaacattcacacaccaaacaaaaactgttattaaaaaaaccatttggtggtgtggccaccatttaaatcatggaggaagaaagagctccatcggcagcagtatcctgcgagaggccaaattaagaacgattggattcaagcttatgagaatcagagtagaagaccaaactctttatatgtaaaggttaacatggaaggggtagccataagaaagaaaatcaatctgatgcttttcaattcttatcagacacttacaagcagattgatcagcatgtttgctaaataccaaaaatttgaggaagttggaaaaagttacacactcaactttcaaaacgaacaagggattggc

SEQ ID NO: 260766 - DNA, 438 bp, Glycine max
gattttgtgagcccaggtggcttgattcaattaaaccatggtaggcctcagcctctccaatatgtggtcagtgcggcctttttggctgccctatatagtgattatcttgatgctgctgatacacctggatggtattgtggacctaatttcttttcaaccgacgtgctccgtagctttgccaagtcccagattgattacatccttggaaataacccaaggaaaatgagttatgtcgtaggttttggtaatcattacccaaaacacgtccaccatagaggagcatctgtaccgaagaacaagatcaagtatagctgtaaaagtggatggaaatggagggacacttctaagccaaacccaaatacaattgttggtgccatggtttgccgtcctgacaagcatgaatgctttcatgatgttcgtacaaactacaattacaca

SEQ ID NO: 260767 - DNA, 340 bp, Glycine max
agcgaccgaagtatcacatcaaccttatcctgattagggttccggttacttaccctacctgtgacgttgcgaaaccttaaatttggcattaggtctgagcaatctggttggcagaacctttggtcttacagagtcaagtattatgtctggattaaacgatcaaattcatactgccttcgatactttcgctgatgcatatgctgatgactctgctgctgactcaaaggattatgtacatattcacgttcatcagcgaaatgagtagaaaagcctgacgaccggtcagggattgaaacaagaattgagctatgacaagatacttaacgacgttctgaaagac

SEQ ID NO: 260768 - DNA, 446 bp, Glycine max
  unsure (1)..(446): unsure at all n locations
ccacgcgtncgtagggttcacaacttttccttttccttttgcttgcgaatctgaatcaaagagtcaatgatccattcattattcatcatgtcgtcggcgaataaaatcacgctgaagagttcggacggcgaggctttcgaggtggaggaggcggtggcgctggagtcgcagacgataaagcacatgatcgaggacgactgcgccgacagcggcatccctctgccgaacgtgacgagcaagatcctggcgaacgttatcgagtactgcaagaagcacgtcgaggccgcgaatcccgaagacaaaccctccgaggacgatctcaaggcctgggacgctgaattcgtcaaggtcgaccaggccacgctcttcgatctcatccttgctgctaactacttgaacatcaagagcctgcttgaccttacatgtcaaacttgtaccgacatgat

SEQ ID NO: 260769 - DNA, 438 bp, Glycine max
ggtcgggacgcgtgcgcttgtgttctcttgttcattcatctcacttctaattaaggaacaagctttccaccgatttgtgtcaccaatggctcgctctttctccaacctcaaggttctctctgctcttgtcgccgacggattctccaacactctcaccaggcgtgggtacgcagtagcgacacaaagcgcaacaagaggaggagcagcctccatcagcggcaagtcaggggaagacaaggtactaggaggaggtgctgaaaaggtttcgtgggtcccagaccctgtcactggttactacaaaccggagaacatcaaaaaaattgatgttgctgagctgagagccactgttttgggcaaaaaattcaaccactaggctctacttaatttcaataattaacctttttggtctcacgtgaatatgttatatgatatatgaag

SEQ ID NO: 260770 - DNA, 444 bp, Glycine max
gtcgctatgccatggagattagttctgctgcctacaagaacttttggcgctttgacatggagagcctccctgcagatctcatccgcaggggaatggccgtacctgacccaacacagccacatggtctaaagctcatattggaagactacccttatgcagctgatggaatactaatctggtctgcaatagaagactgggttcgaacctatgtgaaccattactaccctcactcaagccttatatgcaatgacaaagagttacaatcttggtactctgagtcaatcaatgtaggccatgctgatctcaggcatgaaagttggtggccaacattgaacaatagtgaggatcttgtgtccattctttccacattgatttggaatgcatctgcacaacatgctgctctcaactttggccagtacccttatggtggctatgtgcctaatc

SEQ ID NO: 260771 - DNA, 383 bp, Glycine max
ctttattgcatactcctttcttcatgagaaatgatataatgtcaaagtgtgctggactagcgcaatttgatgaagaactttataaggtaactggtgaaggagatgacaaatatctgattgcaacagctgagcagccactctgtgcatatcatttagatgattggatccaccctacccagctaccattaagatatgctggatattcatcatgctttcgtaaagaagctggatctcatggtcgagacactctaggaatattccgagtccaccaatttgagaaagtggagcagttttgcctcactagcccaaatgacaatgattcatgggacatgcatgaggaaatgcctaaaaacttttaagatttttacaagcgtttaaccttt

SEQ ID NO: 260772 - DNA, 423 bp, Glycine max
  unsure (1)..(423): unsure at all n locations
gtagggctttacagtgtttctcttccttcttcttcttcttcttcttcttcttcgntgaatcgcgattgttctgtgcgagagaaagaagagagagatcgaaaatggcgttggctttcgacgagttcggaaggccgttcataatcctgaaggagcaggagcagaagagcagactccgaggattggacgctcagaaagccaacatctccgccggcaaagccgtggctcgcatcctccgaacctccctcggccccaaaggcatggacaagatgctccagagccccgacggcgacgtcaccatcacgaacgatggagccacgatccttgaccagatggacgtggacaaccaaatcgcgaagctgatggtggagctctcgcggagccaggactacgaaatcggcgacggaaccaccggcgtcgtcgtca

SEQ ID NO: 260773 - DNA, 402 bp, Glycine max
  unsure (1)..(402): unsure at all n locations
gtatttgctctgctaatttgtatttctttttggtgaattgctgctaactttcattcttgtgttctttgtggtttttagtttcaggatgctggaaattcatgctcacactgagtcctgcagggctgctcgattcatcaacggtggacgtgcgatcttgacaggttctccggattgcttaatactggctacagatgtggaaactggatctacaattgctcgtcttgatgatgctcatgagtgatcaaatttcctgcaattacacctttgtcatgatttgggttacagtagattcacaagtatcttcattgctttagaatttgtttgtggtttttgttgtgatgcanggctgcgataaatagattgataaacttgactgagtcaactgttgccttcggagatgat

SEQ ID NO: 260774 - DNA, 406 bp, Glycine max
cccatttttcacaccaccaacacaagatgtttctccacattgtgttcctcctttgccttctcgcatccacttcccatgccactgtccaagacttctgtgtggcagacctcaaaggtgcagacacccctgcaggctacccctgcaagccacctgctaatgtcacttcagatgactttgtgtacactggcttagctgaagctgcaaatgtcacaaacataatcaatgctgctgtgaccccagcttttgttgctcaattcccaggtctcaatggccttgaactatctgcagcaaggttggaccttggtcctagtggtgttatcccactccacactcatccaggtgccaatgaactactcattgtgcttcaaggtcacatccttgcttgattcatatcttcaggtaacat

SEQ ID NO: 260775 - DNA, 404 bp, Glycine max
  unsure (1)..(404): unsure at all n locations
tcgacccgcgtacgggcatcttcttctggtagtttatacacctctgcaagtgcaaactccttcaccagcttcacctgtctccacacanccctttcatgaccacttctttctctgaccttcttgcttctcccacagacaacaacaaaccaccacatggtggtggtggtggtttgtctgagagaactggctctggtgtccccaaattcaagtccacaccaccaccttctctgcctctctctccccctcccatttctccttcttcctacttttctattcctcctggtttgagccctgctgagcttcttgactcacctgttctccttaactcttccaacattctgccatctccaacaactggagcatttgttgctcggagcttcaattggaagagcagttccgggggg

SEQ ID NO: 260776 - DNA, 365 bp, Glycine max
  unsure (1)..(365): unsure at all n locations
acgcgtcggccacgcgtnncgccacgcgtncgaactttcatcatgggctaagtttgaaaataggaaggctgctgtctattggaaaaccatgaatggcctccctccttcttcaggagaaaaagctaaacttttctataatccagctgcaactcaacttgtccctaatgaagaatttggaattgcttttaatggaggctctaatcagccaattatgtgtggtggtgagccaagggctatgcttagaaaatatcgaggcaaagctgatgccccaatatattccattcagatatgcattcctaagcatgctctgaacttgatcttttcatttacaaatggagtagactgggatgggccatatagactac

SEQ ID NO: 260777 - DNA, 390 bp, Glycine max
  unsure (1)..(390): unsure at all n locations
cacgcgtncgcgacgtcttctacaacaaggacagggtcattgagatcaatgtgcgcaccgatcccaatgcgctggtggatctcaccgaggatgctgaggttcaggccgagtttttgtacacggttaagtggaaggagactaacacgccattcgagaagaggatggacaagtactcgcagtcttcatcgctgccgcatcatttggaaatccactggttctcgattatcaactcctgtgtgacggtgttgctcttgaccgggttcctcgccaccattttgatgagggtgctcaagaatgattttgtcaagtatgcacatgatgaggagtctgcagaggatcaggaagagactgngtggaaatatatncatggggatgtgtttaggttcccca

SEQ ID NO: 260778 - DNA, 423 bp, Glycine max
ctcctctcttgtctgtgcaatcaaaacaacaacattcattcatactgatcacttgcttgcctattgcacattcttcatcacttcattcaacatttctctctcccttagctagtttttaccaatggctgctgcggttagtgctgcagtctcttttccatccaccaagtctacctctctcccaagcaggacctccatcattaccccagagagagttgtattcaagaaggcttcattgcaatacagagatgtttgtagcagtggaagggtagtttccatcagagctcaagtcaccactgaggctccagccaaggttgaaaaagagtccaagaaacaggatgaaggtgtggttgtgaacaagttcaaacccaagaccccttacgttggtagatgcctgctcaacacaaagatcacttgggatgatgc

SEQ ID NO: 260779 - DNA, 419 bp, Glycine max
tccagtccaagtcttgggtcagtagagcacataagtgccactgaaaaactaaagaaagaagaagagaagaaaaggcgtcaactagaagcagagttgaaattaatagaagaagagactgcaaagagagttgaagaagcaatccgtaagagagttgaagaaagcttgaaatctgaggaggttcaggtggagattgaaaggcggttggaagagggacggaagagacttaatgatgaagttgcagctcaacttgaaaaagaaaaggaagctgctattattgaggctaaacagaaggaggagcaagcccgtaaagagaaagaagatcttgaaaggatgcttgaggagaaccggaggaaggttgaagacgctcagagaagggaagctttagagcagcaaagagggaggaagaaagattaaagagc

SEQ ID NO: 260780 - DNA, 402 bp, Glycine max
cttagccgaggtcacgaggagcactagctagtttcacaatttccaaatggctaggggattgaggaagcatctcaagaggctcaatgctcctaagcattggatgcttgacaaactgggtggtgcatttgcgcccaaaccctcatctggaccacacaaatctagggagtgccttcccctcatactcatcctacgaaaccggctaaagtatgctctgacttaccgtgaagtcatcgctattctgatgcagagacatgttcttgttgatggaaaagtcaggactgacaagacttaccctgctggtttcatggatgttgtttcaatcccaaaaaccaatgagaacttccgcctgctctatgacactaaaggccgattccgtctccattctgtcagggatgatgaagc

SEQ ID NO: 260781 - DNA, 433 bp, Glycine max
gaacgattttgcaatggatttgaagaagtgttgagtcagtatagggaaggggttcctaatatgcgacttgcaggtcctacttcatttgcaccaattgttgaaatggccatgacaatagttgagcagagtggaggccagtaccatgttttggtgatagttgcagacggccaggtaacaagaagcattgacactgagcgtgggaggctaagtccacaggagcagaggactgtggatgccattgttgaggccagtaaatttcctctttcaatcatattggttggtgttggggatggtccttgggacatgatgaaagagtttgatgacaatattccaactcgggcctttgataattttcagtttgtgaatttcacggaaattatgtcaaagaatattcctccttctcgaaaagaagcagcatttgcacttgcagcac

SEQ ID NO: 260782 - DNA, 391 bp, Glycine max
atcatagcctttctttcgtagctactactacttgagtttcattaattctttggttcaaaaaagcttagttgttggtagagattgaaaattaggaaaatggtgagtgttgaagagattcgtaaggcacaacgtgcacaaggccctgccaccgtgatggctattggcacggccactcctcccaactgcgtggatcagagtacctatcctgactattatttccgcatcaccaacagtgaccacatgaccgagctcaaagaaaagttcaagcgcatgtgtgataagtcaatgattaagaaacgatacatgtacttaaatgaagagatcctgaatgagaatccgagtgtttgtgcctatatggcaccttcattggatgcaaggcaagacattgtgg

SEQ ID NO: 260783 - DNA, 310 bp, Glycine max
gctacagaactcctgatcctgtcactgggaaaagaaactactcttacatggatgctgttagaggttatcttggttataaaaggacatgtgtagctggcttccttcaatttttgactttgtatggtactagtattgcttatgtactaaccacagcaactagtctgagtgcaattctgagatcaaattgttatcacaagaaagggcatgaagctccttgtaaatatggtggcaatctgtatatggcactgtttggacttgttcagattgtaatgtcattcataccggatctccataacatggcatgggtttc

SEQ ID NO: 260784 - DNA, 323 bp, Glycine max
cccacgcgtccgcccacgcgtccgagcattatcaaaagcaagaagaactgggctaagcagaaggggcctcttcagtgatggcatctgtggccctcaaacctgcccctttcactgatgagaagtcctcagttagaggccttccctccctctcaaggaactcctcttcattcagagttgcggccagtggtggcaagaagatcaagactgacaagccttatggaattaatggtggcatggcttttagggaaggagttgatgcatctggcaggaaaggaaagggaaagggcgtttaccagtttgtaaacaaatacggtgctaatgtc

SEQ ID NO: 260785 - DNA, 242 bp, Glycine max
  unsure (1)..(242): unsure at all n locations
acgcattgatgatggtttacgtgtggagcaaacttaatcctttcattcacatgagcttcctgggtctctttactttcactgctgcctaccttccanttgggtctcttggggttctctgtactcgttggtgctagtgcttgggtggatctactgggaatgattgctggccattcatattattttcttgaagaatgttaatcctcggatgacangtcgtangccacttaaaacaccctcattca

SEQ ID NO: 260786 - DNA, 429 bp, Glycine max
cccacgcgtccgcctcattccagccacacgcttcagaagacatggcctcattgggtgggttacaaaatgtgagcggcatcaattttcttatcaaagagggtccaaaagtcaatgcaaagttcgagctgaagccgccaccatatccactggtaataagacctagagtttgcatgtttacaagagaattcattgtgattttctagtggagctatatttctaatgcacattgaagaaagaatacttagcttttatagttttcaaatttacattctattgaaactttggttagtcttgctttaataaagaaacttaaaaatgaaacgatacatggacataggcatctcaatacatgcatggactaagtactttggttactcttattttctggtcatcatggatccgaagctataatctaacttaacacacaca

SEQ ID NO: 260787 - DNA, 424 bp, Glycine max
gttgaaaagaaaccctagcaagtggagcaatggcagacgttgaagtcgatgtggcggcagcagcagcagcagggctgccgaagaagagaacgttcaagaagttcagttttcgaggcgtggatctcgatgcacttctcgacatgtccaccgatgaactcgtcaagatgttcagtgcccgcgctcgtagaaggttccagagaggcctcaccagaaagcccatggccttgatcaagaagctccgtaaagcgaaaagggaagctccaccaggtgagaagccagaaccagtacgcacccaccttcgcaacatgattattgtgcctgagatgattggtagcattattggagtgtacaatggcaaaacctttaatcaagttgaaatcaaacctgagatgattgggcattatcttgctgagttttctatttc

SEQ ID NO: 260788 - DNA, 360 bp, Glycine max
tctctctctgagactgagaatccgatccttcgtttctgaaattctcccgagatggacgagaacgtgctcgacgatattatccggaggctcctcgcggcgaagaacggtagaacgacgaagcaggtgctgcttaccgaggcggaaattcgtcaactctgtgtttcctccaaagagatctttctcagccaacctaatcttctcgaactcgaggctcctattaagatttgtggagatgttcatggccaatactcagatcttttaaggctgttcgaatatgggggatacccgcctgaagcaaattatttatttctcggagattatgttgatcgtggtaagcagagcatagagacaatatgctta

SEQ ID NO: 260789 - DNA, 313 bp, Glycine max
acgtttcactcctgattatgaacactggaaacgtttaatgtcccagtcttatctagaatctatggtaatttattaatcaaatgtgcgcaatgtcatcgatatgaagtctatctatcgagcatttgctgcagctttgatagatttcaacgtttgggtcataaatgtgcttacaatatactcccctcatacttcttcccattatattttaacgatgtctattcaatatatatcatcattcgtgtgaatcatttaccacctatcctactacctatgatctcctccatgcttatcaatctctttaaaacttaacaaa

SEQ ID NO: 260790 - DNA, 416 bp, Glycine max
cactgacctaaccatttcattatagtcttgaatcaaaggtgacggccttccatggcttccgggggtgcttcctctggaattacagctgctaccatctctacgccaaattccccgcagacgaatggatcatgacgttgtttacttagaggaaagaaattgacggtgaactaggctagagcacctgttgaaggacgatcgattgccactactgtgtcgcgcagttgctgcacctgacagacctctatgagctcccaagcagcacccctcctgcatggcttgatggcactgtaccatgagacttcagctctgaccctcttagtcttggatctgacccgcagagtatccgatggaatgttcacgcagagctagtgcactgcaaatgggccatgtttggtgctgctaacattttcattgca

SEQ ID NO: 260791 - DNA, 420 bp, Glycine max
cccacgcgtccgcacatttttagttgcaactaatgggaactgttgaagctgcaaacaaggatgcaaatggaagccggctagagaaaaatcctacagttgtttttgtgttaggtggcccaggcagtggaaagggtacccagtgtgcaaatattgtcgaaaattttgggtatactcacctcagtgctggtgatcttctgcgagcagaaatcaaatctggttctgaaaatggcacaatgattcagaatatgattaaagaaggaaaaattgttccctctgaggtaacaattaagctcttacaaaaagcaatgcaggaaagtggcaatgacaaatttcttattgatggttttccccgcaatgaagaaaaccgtgcagcatttgaaaaagtgacaggaatagaaccagcatttgtcctattttttg

SEQ ID NO: 260792 - DNA, 459 bp, Glycine max
  unsure (1)..(459): unsure at all n locations
cgaatatcttgttgtttggagcgatccgagaaaaactctgtaaacatgtgggtttaccaggaggtccttacaggtgatgagcttctctctgactccttccgttacaaggaaattgagaatggaatgctgtgggaagttgaggggaagtgggttgttaaaggagcagttgatgtagacattggtgcaaacccttctgctgagggtggaggagaagatgacggagttgatgatgcagctgttaaggttgttgacattgttgacacattcagacttcaggagcaacccgcattcgataagaagcagtttgttaccttcatgaagaggtttatcaagaatttgactcccaagctcgatgcanagcaacaggagttgtttaagaagcacatcgagggagcaactaaatacctgctctctaagataaagatttccaattntttgttggtgagagcatgggtgatg

SEQ ID NO: 260793 - DNA, 477 bp, Glycine max
cccacgcgtccgcccacgcgtccgcccacgcgtccgcccacgcgtccggagaaaaaaaaaggcatgtctctcaaggttgtaacagtggtgtttttgctggcaacaatagtagtagccagtgattacactagtttcacctataatggattccaatcttctcatttgtaccttgatggcagtgctgagttcaccaccaatggcatggttaagctcaccaatcacaccaagcaacaaaagggtcatgctttcttcccaagtccaatagtcttcaagaacaccacaaatggaagtgtgttttctttctccaccacttttgtttttgccataaggtctgagtttcccaatttgagtggccatgggattgcctttgtggtttctccaacaaaagaggttccacattctcttccaagccagtaccttggcctctttgatgacacaaacaacggcaacaacagcaaccatgtttttggggtggag

SEQ ID NO: 260794 - DNA, 469 bp, Glycine max
ctctgatcactctagctgttgcaaatttctactatttttcaatggcttctgcagatgttgggttccgttgctttgttggtgggcttgcttgggtcaccggcaacgatgccctcgagaaagccttttcaatctacggcgacatcgttgaatcgaaggttatcaacgaccgtgagactggaaggtccagaggattcggatttgtgaccttcgcctcagagcagtcaatgaaagatgcgatcgcaggaatgaacggccaggaccttgacggtcgtaacatcactgtcaacgaagctcagacccgcgccagccgtggtggtggtggaagcggtggtttcggaagtggtggtggatacaaccgcggtagcggtggatatggtggtggtggtggctgcggcggatactgtggtcgtcgtgaaggtggatacaaccgtaatggtgggggtggaagtggaggatacggcggtggtag

SEQ ID NO: 260795 - DNA, 406 bp, Glycine max
  unsure (1)..(406): unsure at all n locations
cccacgcgtccgctcaagcattggcaggcagtggaaatggagcagcggttagcaaacacatggagaatgcctcttgacgacaagaaattcatagaaactgctctcctttccgacctccgactcgacggccgtcgcccctccgactaccgcaagctcaccgtcaagctggccaagcaagacggctccgcggaggttcatttgggccaaacccacgttatgaccttcgtcaccgcccaactcgtccgcccctaccgagaccgccccaacgagggctccctctccatcttcaccgagttctctcccatggccgacccctccttcgaccccggcccgccctccgacgccgncgtcgagctcggccgtgtcgtggaccgtggcctncgcgaaagccgtgccatcgacactg

SEQ ID NO: 260796 - DNA, 401 bp, Glycine max
cgggaaggtcgtggtgtacgacccctgaaagatcacatctatctccacttgaatcacttgcccgcagatgtgctcgaagagagacttcctggcatctctgaaactgctgctatttttgctggtgtggatgttacaaaggaacccattcctgttttgccaactgtacattataacatgggcggtattcccacaaaccattatggagaggtggttaccattaaaggtgacaatccagatgcagtggtttctggattgatggctgctgaggaaacggcctgtgcatcagtccatggtgccaataggcttggtgcaaattcacttctcgatattgttgtttttggtagagcttgtgcaaatagagttgcagaaatccgtagaccaggagagaaacaaaagcctct

SEQ ID NO: 260797 - DNA, 401 bp, Glycine max
ggatcatctggcattgatgatggagcttcttgggatgatgcctcgcaagattgcacttggtggatgctattcccgagattttttcaacagatatggagatttgaggcacatccgtcggttgcgtttctggcctcttaataaggtgctgacagagaagtatgatttcagtgaacaagaagcaaataacatgaccgatttccttcttccattacttgattttgtccctgaaaagaggccaactgctgctcaatgccttcagcatccttggttcagtgcaggtccccagactcttgagccctcattgactgctgtgaagcatgatgctattgaaggggaaatatctgaaaaaatgcagaaggaaaaagctgagcaagaggctgtggaagttggcatggggaata

SEQ ID NO: 260798 - DNA, 432 bp, Glycine max
cccacgcgtccggggagatggcccaaaacttgtgagagaacttttcagagttgccgatgatcgtggctccttctattgtattcattgatgaaatcgatgcagttggtacaaaaaggtatgatgctcactcaggtggagaacgtgagattcaaaggaccatgttagagttgctgaaccagttagatggttttgattctagaggagatgtaaaagtgattctggcaaccaacagaattgaaagtcttgatccagctttgctacggcctggtcgaattgacaggaagatagaatttcctcttcctgatatcaaaacaaggagacgcatctttcagatacacacatcgaggatgacattagctgatgatgtcaacttggaagaaatttgtatgactaaagatgaattctctggagctgatatttaaggcatatgta

SEQ ID NO: 260799 - DNA, 413 bp, Glycine max
tggagatgaggtttaccagacaaatatatatcaggatgaacgacccttcattagttctagaagggttttgatggacttggggccacctataagcaaggaagtccagcttatttcttttcactccgtgtcaaaaggttattatggtgaatgtggacagcgaggtggatattttgaaatgaccaacattcctccagagacagttgatgagatctacaaggttgcatcaatatcacttagtccaaatgttccagcacaaatatttatgggagttatgctccatccacctcaacctggagatatttcttatgacaaatttgttagggagagcaccggaatacttgaatcactgagaagaagagcaaggctaatgactgatggattcaacagttgcagaaatggggtttggaatttta

SEQ ID NO: 260800 - DNA, 439 bp, Glycine max
ctgaaaaggaacctgttgttgctgctgctgctaatattgacatcccatggattccagtagagggtaaaactgtccctgtgcaacctttatttgcttcaagtccagaggggagtgttgaggcaaagccgaatgatggaccaaaacgttacaacagctgcaacaagcgagttagtttgacagggtttaatcgtcgatgtggtgaccttttttgtgctgtacatcactactcacacaagcataattgcccatttgattaccgcactgacggtcaagatgctatagctcaagcaaacccatttgtcaaggctgaaaagcttgataagatctaagatttgaagttgaagttccatgccctgaaatgaagctatgcacaatttcatcatgaaatgatccgagtatccttcacattttatacggtgtcatattataatggtatatg

SEQ ID NO: 260801 - DNA, 474 bp, Glycine max
acggtaactgcagcagcgctgagtcgagggcgttcagtgttcaccacagtttacacacgagtacgcattttctcttctcaagttctcagagtgtgcagagaaaatcatggtggacgcagcagaacgtatgtacttggaggatgacgattcatcactcatgaaaactattaagggggcaacaactggtttagttgctggcactatctgggggaccgtagttgccacctggtatgatgtccctcgtgtagagagaaatgttgctcttccacggctgattaggactttcaagatgatgggcaactatggtttgacctttgctgccataggaggagtctacatatgtgtggagcagttggtgcaaaactataggatgaagatggaattagtcaatggagctgttggccgatttgatgctggtgcaactattctgggttacagatgaaggagcatcaaaactgcactttctgctggatc

SEQ ID NO: 260802 - DNA, 444 bp, Glycine max
ttcaggtttcagccttgatgatcccaacacatttgcttcgaggattcacaggatgttgaaggggggtcttagcattgatgaggatgacaatggtggagacgatgttgatatgcccccattggaagaggacggtgctgaggagagcaagatggaggaagtggactaaatgccaaaggtctcgtgttaaatgaattgtggttcgtgtctgttaaatggtggtggatgcagaagtcttttagttttatctttctttttgttttgtttttttgagatatatagggtttttactttttaagtttttgtgatgtgaaaaaaatgtgtctgtcagtctgtgtgttgcatctacctacttttgtcagtaattgttctggatataacatcttttgtcagtaattgttctggatataacatcaatgaaggagaacaagtattacttcctcaaaa

SEQ ID NO: 260803 - DNA, 250 bp, Glycine max
ttcacgcgtccggcatcctgatcggaaaccgtcttctgcggctactgtcgagcatgcatgaacgacgtctttcagggatgggatggtcagaggaagcggctgtgatatagttcaagttgaaggcggtcacattgtgcgctccacaaggcataaggaccgtcacatcaaagtgtgcactctcaaaggccctattgaccgacgagtgaggttatcggcccacaccgccatccaattttacgacgtccaggac

SEQ ID NO: 260804 - DNA, 461 bp, Glycine max
  unsure (1)..(461): unsure at all n locations
cccacgcgtccgaaaacggcgtcgtttctctaactcctctgggttccgtcgtgcttcaagtcagaccgtgaattcggttccgcgtgcgaatggaacttacaccgtttcggatttcatgacaaagaagcaagatttgcatgttgtcaaaaccaccaccaccgttgatgaagctttggaggctcttgtaaacaacagaatcagtggtcttccggtgatcgatgaggactggaatctggttggagttgtttctgattatgacttattggctattgattcgatatcaggaggtcctcaaagtgatgcaaacttgttccccgacgtcgatagtacttggaaaacgttcaatgagttacaaaagctgcttagtaagactaatggccaagttgttggtgacttgatgactccaactccacttgntgttcatgaatcgactagtcttgaggaagctgctaggcttgtac

SEQ ID NO: 260805 - DNA, 435 bp, Glycine max
tgatgaggtctaccttggacagagggacaatccaaattggactgatgacgcaaaggcaattgaggcctttaagaagtttggaaacaagctgaaggaaattgaggacaaaatctcagggaggaacaagaattcaagccttaggaaccgtaatggaccggcgcagatgccctacactgtgcttcttcctaccagtggggaaggccttactttcagaggaattcccaacagcatctctatctaatgagagtgtgtggtgtgtggtagtgtggttttctttccttccaacgtacctctcattgacaaataaacgtgcaaacttatgtgtgcataattttcttatgtatgcttaagttttgtaattggatgctatctagtttttcatatctaatagggtgttgtgtcaaaaaaaatacactagttgttcatgaatataat

SEQ ID NO: 260806 - DNA, 361 bp, Glycine max
cccacgcgtccgcccacgcgtccgcagtctccactttctgagaagagggccaaattagagttggattattagggtttaaccgttcctccccttccttttcaccataatcaacatcaacctcttccaaatcccaatggatccgaccaagaagcgcaagctcgacgagaacggcttcatcaacaacgactcctccgagcccctcaagctctccccctccgacgcccgcaagctcatcgagcgcttcaccactgaccagctcctcgacatcctccaggacacggtggcgcgccaccccgacgtcctcgctgccgtgcgcgctgtctcagaccccgacgtctcccagcgtaagctcttcatccgc

SEQ ID NO: 260807 - DNA, 446 bp, Glycine max
  unsure (1)..(446): unsure at all n locations
acggtgaactgtgaacatcatcatcacaattaatatgagtagtgcaacaagcaaggcttggatggtggcaactagtgttggagccgtggaggctttgaaggaccagctgggtgtgtgcaggtggaactatgttttgagatgtgctcagcagcacatgaaaaaccactttagatccttgtctcaagcaaaaaatgtttcttcttcatctgctcttgttgcaagcaaattaaagggtgatgagaaggctaaaaaggctgaaaagtccttgaggactgtcatgtacttaagctgctgtggtcctaactgatcttaaaggagagagattatcttacatgctggggattaattgtgatttgaaatgaatatngctttgtgtaaatagagatatgatagattgtatgaaaattgtaatgccaaacaatattaattaatatactattcaatga

SEQ ID NO: 260808 - DNA, 418 bp, Glycine max
cagaaaacgccagaaatccaacttaaaaaaaaaagctacaaccaacaactcgcgaatagaaccacgaaattatagctaattagctaattatccattaaacactgtcagagcaatccgaaaggaaaaaaagagaaaaaacatagccaactccgttccgcatgatataaaagtttaatcaacctcctccattttgctgccctcagcatcagcttcagcctcctcctccagtgggggcatatcagcatcagcttcagctgcatcctcgtcgatgctcagtccaagcttcaacattctgtggatcctgtttccaaaagtgttgggttcgtcaaggctgaaaccagaagtgagaagagcagtctcgaacagcaacagaacaaggtccttcacggatttgtccttcttgtcaacatccgcacgc

SEQ ID NO: 260809 - DNA, 389 bp, Glycine max
acggttgctttgtcggtgggctcgcttgggccactgacgaccatgccctcgagagagccttctgtcagtactgcgaaatcgttgaaacgaagattatcaacgatcgtgagactggcagatccaggggttttggatttgtgaccttcgcctcggagcagtccatgaaagatgcgatcggagcgatgaatggacagaacttggacggccgtaatatcactgtcaatgaagctcagtcccgcggtggctgcagcggctgcggcggatgaggaggaggatacaatcgtggtggccgtggatatggtggtcgtagtggcggtagcggtggcggtggtggataccgtatccgtgacagtggttatggctgtggctattgtggtggtggtagtggt

SEQ ID NO: 260810 - DNA, 306 bp, Glycine max
tctacacttacaccatcaaatctaaatgccttctctctcacctacaatgacagaggataacatttcatgattgtttaaaaaataaactgatctaatctcttctgctaaactactctgcaaaattcaaactcataaaaccactgttgaaactgaatatatcgaagaaagttttactgccaaaataatccttgatgatgtcgcaaaagaaattaaagttattgaagtaattgctccaacttttgaaaattaatgtgatattgcaaaattcaaagattaccaaccttcaacatcttaaccaaattaacc

SEQ ID NO: 260811 - DNA, 463 bp, Glycine max
cgctggtggataacgaaatttcttagacaaaatacaaggatcagaaccgttgaatcaagttgaggaagatggcacgagtctctggaggaagatcaacactgaaccctaacgcccctctttacattcctgccgcgtttcgccaagtggaggatttctctccggaatggtggcagctggtgacgacgctgacatggtaccatgactactggctaagccagcagcacgatgagggagccttctacggcgaggacgacgggtttgatggcaatgatgtcgttgatttgcttcctgattcgtttgatcttgatgctggcgaggatctttttgaagagtttataagatcttctgaatcccaagaagaaactggacccaaagtaactgcatgaggcttagagatgaacccatttaaagaatctacctaccaacctaagagactggacccaaagccttagctttaggtcag

SEQ ID NO: 260812 - DNA, 440 bp, Glycine max
cccacgcgtccgaagggatctagctgctgcatttgaaaagcattttttgacatatggaggacgtggacatttgtattaacagtgcggggattagtagttctgtaccattccgtgatgatcaaacggatggcacccgaacatggagatacactgttaatgtgaatttcactgctgttattgattccactcgccttgcgattaaaatcatggaagcttccaaaaggcctggtgtgattatcaacttgggttctgcttctggtctttatccaatggtggctgacccaatttacagtggctctaaaggtggtgttgttatgttttctagatcacttcgtctatacaaacgtcaaggaattcgagtcaatgtgctttgcccttgagtttgtgaaactgagatgggaaattagattgatcccaagatcattaatttgagtgggggc

SEQ ID NO: 260813 - DNA, 412 bp, Glycine max
cccacgcgtccgaatttcatggctattccatctcctaaaattttcctccgcttaacattcttgttctcacattctatagctgtgaagtcctccaatgtttccacaaccccaacattgcatgcaaccttcccatttcctgaagttagcagcttcaattcatctaagctttcaatctcaataaacataaatccaaacatcatcaacacccttcttcagtccctccaagcagcaatatctgaagccacaaaactatctgatctattaaacaacgctggacataacatcatagagaacaaaataggagcagtccaagactgtagagaacttcaacaatccaccttagcttccttaaaaagatcactatcaggaatccgttcccaagacttcagaaaactagttgatgcaagaacct

SEQ ID NO: 260814 - DNA, 409 bp, Glycine max
acgcccacgcgtccggagattaccaccctatggattaagaacctcaagaagcgcggccacgtaaagacccttctataccgtatcggaacgcaccgtatgcaccccgtctgccgatgaaacgccagtcgcatgcatcaccacacgatcctgttcgacaagtaccatccgggcttattcggtaaggtgggaatgaactacttccataagcttcacaataaattctactcccccatcgtcaacgtcgaaaagctatgatctctcataccccaagactcgaatgaaaaagccctaaaatcgaaagacactgaccctctaatcgacgtcacacatcacagctacttcaaggtcctaggaaactgtgctctgccccacaatcagccttttagtgataaagccaagcttatttcca

SEQ ID NO: 260815 - DNA, 368 bp, Glycine max
cccacgcgtccgctgactcgtgggtccgctttatagagtataaaagatgtcgcgtttgatcgacagtttttagtgcgcggtggccgtgctactgtgcgccttagctgtctcttcttgggtggatgaggctgctaacccgatactaatggttgctactgtacaaactgatgttattctcatgatacgtcatttccagcactctctgaagtttgctatgttcatgatcaagttcttgaaaagttaccgaaacgaagaatatatgatgcacatgtactaaatattctcgcaaaaccttacgttcatacgctcccacaacaagaaccgtttgccctacactctctctgataatcattttgcttattgtactt

SEQ ID NO: 260816 - DNA, 480 bp, Glycine max
cgcgtacggtttgaactttcctttcacccatgagaaatctcttctgggacacttaaagttttttccttgaaatcctgatgctgatagctttaagaattggagacaaggtaggactggctttcctttggttgatgcaggaatgagagaactttgggcaactggctggattcacaacagaataagagtaatagtttccagttttgctgtgaaaatgttgcttctaccctggaaatggggaatgaaatatttctgggacacacttcttgatgctgaccttgaaagtgatatcttgggttggcagtatatctcaggaggcttaccagatggccatgagcttgaacgcttggacaatccggagattcaaggggttaaatttgatccacaaggtgaatatgtgagacaatggctacctgagttggcaagaatgccaactgagtggatccatcatccttgggatgcaccgcttactgttcttaaaac

SEQ ID NO: 260817 - DNA, 428 bp, Glycine max
cccacgcgtccgcagatgttgttactgtcaattccactgatggaaacaatcctactaaggtgggttctgtgcctaagttcctcttcatatgtggatcaaatgttgtccaaaaaggccttgctagtggtgtcacaggtatggctggtcttggcagaactaaagtttctcttccttctcaatttgcctcagctttcagctttcatagaaaatttgccatttgcttgagttcttctactatgacaaatggtgtaatgttctttggtgatggcccttacaattttggttatttgaactcggatctctccaaggttctaactttcacccctctcatttcaaaccctgttagcactgctccaagttatttccaaggggagcccttaatggaatactttattggggtgaaatctattaaagtctcagaccaaaat

SEQ ID NO: 260818 - DNA, 464 bp, Glycine max
ggcagtccagctgctcgtgctggtatacatcaaggggatgaattgattgagataaatggtgagaggcttgatggcattgatagtgaaactgcagcacaaaggcttagagggaatgctggaacaactgttacagtaaaggtcaaagactcaggaacaagatcttttatccgagaggtcaaacttcctagggagtatattaagctctctccaatatcaagtgccatcatccctcatagatccccagatggtcatttcacaaaaactggctatgtgaaattgtcagccttctctcagactgctgctgaagacatgaggaatgccattcaggaattggaaaatcaaggagtacactcgtacatattagatctacggaacaatcctggtggtttggtaaaagccggccttgatgttgcacagatgtggttagatggaaatgagactctagtgaacacaatcgatagaga

SEQ ID NO: 260819 - DNA, 438 bp, Glycine max
gagaaaatgaacgcggagtttcctatacttttggtgctgacagggtgacagaattccttcagaagcatgatcttgatttgatttgcagggcgcatcaggttgtagaagacggatatgaattctttgctaacagacaacttgtaactatcttctcggcacctaattactgtggagagtttgacaatgctggtgctatgatgactgttgatgagacacttgtgtgctcttttcaaatattgaagccagtagaaaataaaaagcctagtaagtttggctttgggagcacaactacagttaagcagagtacaacaaaagccaagttccagcaatcattttttggtgctaaagcatgacctgatgagcgcgagtacaattagtaaatgtttggtgcatagccaaagttgacttggaagaaggtgtatcagtgttcgcttcaat

SEQ ID NO: 260820 - DNA, 310 bp, Glycine max
acacttttgagttgcattgttgcatcaccgcaagtccacaacatggctgcgactgccgctgcaggcatagcttccttgttttcttcttctattaacagtgtcaaatgtcttcgttcctccaagaactgctccattatagacccccttataaccacagtgccctcaaaccgtggcatgtttgtgtcacacttggtggaacctttgtccattgggggtgccattaattcgcacaagttgtgggggcctagaatttctgctgctgttgcacaagaagaagctgttagtgtggctgatgatgaagtagatgatg

SEQ ID NO: 260821 - DNA, 477 bp, Glycine max
aaaagttcttatcagtgacagagtaaaggatgcataccgatgacgatggcgatgacggcggcgcagttgcggtgcggttgggggtggaggccaacgccgaatcagcagcagcaacgacgtcgtatggttccggtggtgtgttccatcgctatagagaacgcgaagaacaaagagagagcgaaactgaagaagctcttcgatgaagcgtacgagaggtgccgcactgctcccaccgaaggcgtttccttcactctccaacaattcaccgacgctctcgacaagtacgacttcaacgccgaaatgggcaccaaggttaagggcactgtttttgccacggataacaatggagcttatgttgacattactgctaagtccacggtctacttgcctcttcatgaggcttgcatccacagaattaagaatgtggaagaagcaggcataatttctggcgtgagagaggaatttatgatcattgat

SEQ ID NO: 260822 - DNA, 420 bp, Glycine max
  unsure (1)..(420): unsure at all n locations
gtcaggttctcttttagctaacctgattgggaatctggctttccctttgctcttgattggaggattgttccttctctcgagacgatccggagggatgggaggtcctggtggccctggatttcctcttgcttttggtcaatccaaagccaagtttcaaatggaaccaaacaccggagtgacatttgatgatgttgctggggtggatgaagccaagcaggactttatggaggtggtggagtttttaaagaagcctgagaggtttactgctgttggggctcgcattcctaaaggagttcttcttgttggtcctccaggaactgggaagaccttgttagccaaggctattgctggtgaagctggtgttccatttttctctatatcaggttctgagtttgttgagatgttntgtggtgttggtgc

SEQ ID NO: 260823 - DNA, 455 bp, Glycine max
ggcttgttcttctccctctcactcatatctcacacatcttcctcttcatccctctcaccaaggggatagtgagaagcgcgtggaggacgatgaatcgcgcgttccgattcacatcgtgacggcggcgtcgcaacttcccgtcgaatttctggaaccctcgcctcaatcgaagctcgtcatcggctttgactgcgagggcgttgacttgtgccgcaaaggcactctctgcgtaatgcagcttgcgtttccggatgctgtctacttggttgatgcgattgaagggggagaggagcttatcatagcgtgtaagcctgcacttgagtctaattacatcacacaagtgattcatgattgcaaacgggacagtgaggtctctgatttatttgattgctttcttccttgcttgctctggcccctcttttgtatatgttgaaatttgtggaatgtttattcaa

SEQ ID NO: 260824 - DNA, 391 bp, Glycine max
gcgtaggctacgtcatgctaatactgatctttttatggctgctgctactcctcctaccaatctgtcaatcattccgagagctctaccaagaggaagcttgtaccgaattcttcatcagcctaattgtcagattgatgagacacgaacaattgctatgcctctggatgtggctagccgcatgaattgcttacacaccagcacactctactattgttcatcgagatctaacgtctccaaatcttttaggtgataagaactggaatgataatgtatgtgactactggttgtcacatgtgaagcacagcactgattttgcatacatgtcaactgctggaacgccggaatgcatggctactgaagatctccgcaatgagccctcagatgagaaatg

SEQ ID NO: 260825 - DNA, 463 bp, Glycine max
cccacgcgtccgcaaattataatgcaaagcttgctgatttggggctggcaaaggacagaccggcacgtgagaaaagtcatgtctccaccagggtaatgggaacctatggatatgcagctcctgaatatcaaaccacaggaaatctgagtgccaagagtgatgtcttcagttttggagtagtcctgctggaaatgttatctggcaggagggctgtggacaagaatagaccatcaggacaacacaatttggtggaatgggccaaaccatacttagccaacaaacacaaacttttgcgtgtgttggataatcgccttgaaggccaatatgcattagatgaggcatgtaaggtggctaccctctctctgcgatgccttgcaacagaatccaagttgagaccaaccatggacgaggttgtcacggatttggagcagctgcaggttccccatgtgaatcaaaatcgtct

SEQ ID NO: 260826 - DNA, 454 bp, Glycine max
  unsure (1)..(454): unsure at all n locations
cccacgcgtccggttgccgagcacactgtcagagcccttcagagaaccgtgcctgctgcagtgcctgctgtcgttttcttgtctggtggccagagtgaggaggaggcatccgtcaacctcaacgccattaaccaggtcaatgggaagaagccatggtcactctctttctcctttggaagggcacttcaacagagcacccttaaggcatggggcggaaaagaagagaatgtgaagaaggctcaggaagcccttttggtaagagccaaggctaactcagaggcaactctgggaacctacaagggtaactcacagcttgctgatggtgcctcagagagcctncatgtttcgaactacagctactgatcaatcgaagttggtgttgtttgaagagactaatgcgagtaggaatcggtattatgggtacaacaaccgaatttcttggtgataagtatta

SEQ ID NO: 260827 - DNA, 458 bp, Glycine max
aaaaaagccaattaattctttacaaagaacaacaagtaaacgcattaaagaaaaaaattagaggacaatatagatacgatcttttatcctataattttatcaattatgcagataagaaagactcatatatttatggatatagatccctatttcaagtaaaaaaaaaccaagtgatttcttgtaattacaacacgtataaaaaagaattattggatatcatagataatctctttatcaagaattatatatcggaagatgcgattctagatatggaaaaaaatatgtatagaaagtattttgattggatgggaatcaatagagaaatactaaatcgttccatatcgaatccagaattttggttcttttcaaaatttgtgatattttatgacgcatataggggtaactcgcaggttataccaatcaaattacttcttatgtcttctaatgaaatcaaaatg

SEQ ID NO: 260828 - DNA, 471 bp, Glycine max
acggctctctctctctcgctctttcagctttgactttggtggaaactaaagactagtcaaaatggtgaagttcacagctgaagagctgcgtcgcattatggactataagcataatatccgtaatatgtctgtcattgctcatgttgatcacggaaaatcaaccctgactgattctcttgtggctgctgctggtattattgctcaagaagttgcaggtgatgtccgtatgactgatacccgtgcagatgaagctgagcgtggtattacaatcaagtctacgggtatctcactctactatgaaatgactgatgaagctctcaagagttttaagggagagcgcaatgggaatgagtatcttattaatctcattgactcccctgggcacgttgacttctcttctgaggttactgctgcacttcgtattaccgatggagctcttgttgtggttgattgtgtggaaggagtttgtgt

SEQ ID NO: 260829 - DNA, 481 bp, Glycine max
  unsure (1)..(481): unsure at all n locations
ggaaatagctttcctcggttataaccttcaaggtggaaagaaaaacccacccactatcccgattccaataaataccttgctgtctatattttcgcacaataccctctcacccttcaacgatgagttactacaatcagcagcaaccacccgtcggtgttcctcctccccaaggttacccaccgccggattcttacggaaaggacgcgtaccctccgccagggtacccgccgcaaggaggataccctccgcaagcgtatccagcacaggggtacccttcaccctacgcgcctnctcagtacgctcagcctncgccgcaacaacaccagaattcatctggcccaggttgcttaaaaggatgtttggctgctctctgctgctgctgtctgttggatgcgtgcttctgagaggagaagaggttgctttgcacaaatnggatttgaaactgtgttttgactttgaatatcgtcgttagtttttatta

SEQ ID NO: 260830 - DNA, 486 bp, Glycine max
  unsure (1)..(486): unsure at all n locations
ccacgcgtgcgcacaaattttatgtgattagtcgcggtatttaaaataaaaaatgacagtaggcaaataaaaaaggaaaggagatgtttgaataaaaataattccccttcaagttcttattttttgagaggacaggacaatatgaatgttttattatgctctatcaacacattaaaaagattatatgatatatctgctgtggaagtaggtcaacatttctattggcaaatagggagtttccaagtacatgcccaagtacttattacttcttgggttgtaattgctctcttattggtttcagccattctaattattcgaaatctgcagaccattcccgctttcggtcagaatttctttgaatatgatcttggaattcattcaagacgtgagcaaaactcaaatttgagaagaatatggtcccggggttccttttattggaactttggtactatttatttntggttctaattgggcgggggctctttt

SEQ ID NO: 260831 - DNA, 472 bp, Glycine max
cgcgtcgaccgacgcgtccgaatttgaaggcagaggtggcaaggggagcaaaacttaaatgcagtaaatgtaatctaaagggagctgctcttggttgctatgtcaaatcctgtagaagaacgtatcatgttccttgtgcaatggacatctcagattgccgttggggatcatgaggattttctcttgctctgtcctgtccattcaaatgtcaaatttccatgtgagaaaatcaggtccaagaaaaaggcaacacagaagcatcccactttttctcatctgccatctcatcactcaaatcgtcttgaagcttcccaggatgctagtaaaaaattggtattttgtggatctgctctatcaaatgaagaaaaggtatttttgatcaattatgcaagcaaggttggtgctactgtgaccaagttctggacctcaaatgtcacccatgtaattgcagcaactgatgcacatggagcat

SEQ ID NO: 260832 - DNA, 384 bp, Glycine max
  unsure (1)..(384): unsure at all n locations
tcgaccgactcgtccgcccacgcgtgcgtgggttcactagaaagaggcacaactgttataattgtggacttgtgcacggccattcatgtaggtcgaggaaagcattaagagctgccctggctcctaatcctgngaagccatatcgtgtttgtgattcttgttttgtaaaattgaacaaggttgcagaattgggcaacaataatcggaggaatgctatgcctcgtttgtcaggtgaaaacaaggacagattagagaagcctgagctaagattgaccaagacagcagtcccttctaatatggatttgataaagcaacttgatagtaaggcagctaaacatgggaagaaggctgatacattctctctggttcgcacctgtaaaccac

SEQ ID NO: 260833 - DNA, 427 bp, Glycine max
  unsure (1)..(427): unsure at all n locations
aaaatgtggaagagaacgggttttgaagaagaagcagttcaattgatcaactcagatttcagggacctaagtctagctgctaatagactcgcccatcatgccatcaaacttggtggcattggctttggagcctcttttttcggattgtttgctgccattgctgctatttatctgttgattttggatcgtacaaactggaaaacaaatattctcacagcactactcattccatacattttcttcagcttgccttcattaattttcgacgtcttcaagggagagcttggaaaatggatngctgcagttgctgttgtattacgccttttccttccaagacacttnnctgattggctggaattgcctggtgctctgattcttcttatccgtgtagctccttctctaattgcaagcacctttagagacaaca

SEQ ID NO: 260834 - DNA, 371 bp, Glycine max
cccacgcgtccgatgccacctgatatataggcatattagctagggaggtaggtatagtagtggaagttaattcaggcatggaagacagggatcactgttgttccaacaattcaacgatgatcacaacaacaaagaaaagaacgggtagaagaagtccaacatcggataagctcaagaatcaacaccgcgagaagcagtcgatgaaaccttaccgtggaataaggatgcggaagtgggggaagtgggtggcggagatcagagaacccaacaaaaggtcgaggatatggttgggttcttacacgacacccgtggccggcgcacgtgcctacgacaccgctgtcttttaccttcggggtcccaccgggcgcctt

SEQ ID NO: 260835 - DNA, 390 bp, Glycine max
gcctctccctctacgatatcgccggaactcccggtgtcgccgccgatgtcagccacatcagcgccggatctgaggtagtggggtaccaaggtgacgaagagctcggaaaagctttggagggtgcagatgttgttataattcctgctggtgtgcccagaaagcctggaatgactcgtgatgatctttttaacatcaatgctggcattgttaagacactgtgtactgctattgctaagtactggcctcatgcccttgttaacatgataagcaatcctgtgaactccactgttcctattgctgctgaagttttcaagaaagcaagaacgtatgatgagaagagattgtttggagttaccacccttgaagttgttagggcaaaaactttctatg

SEQ ID NO: 260836 - DNA, 462 bp, Glycine max
  unsure (1)..(462): unsure at all n locations
gcctacgcactgcggagagagaaattgaggtttcgagataaccagttttctctttgattcatgaatggcaactgcgaggaccgtgaaggatgtttcgcctcacgatttcgtgaaggcttatgcttcccacctcaagcgttccggcaagatggagcttcctgagtggaccgatattgtaaaaacagcaaaatttaaggagttggctccatatgatcctgactggtactacattagggctgcctcaatggcaagaaagatctatttgagaggtgggcttggtgttggtgctttccagaggatctatggtggaagcaaaagaaatggaaaccgtcccccacatttctgcaagagcagcggtgcaattgccagacacattctgcaacagttgcaaaacatgagcattngtgagattgatacaaaaggaggtaggaaaaatcacttctaatggtcgaagggatcttg

SEQ ID NO: 260837 - DNA, 437 bp, Glycine max
acgcaaatccgatcaagagaagagaatggcaggagcagaggggctaagcggagaacagtacgtgtaccttgcgaagctgtcggagcaggcggagcggtacgaagagatggtggagttcatgcagaaggtggtggtggggtggacgccggcgtcggagctcacggtggaggagcgcaacctcctctcggtggcctacaagaacgtgatcgggtctctgcgtgccgcgtggcgcatcgtgtcctccatcgaacagaaggaggaagggcgcaagaacgacgaccacgtgtccctcgtgaagcactacagatccaaggtcgagaacgagctcacgcaggtctgcgccagcatcctcaacctcctcgactccaacctcgtaccctccgtcttcggcagcgagtccaaggtcttctacttgaagatgaagggcgattaccacc

SEQ ID NO: 260838 - DNA, 473 bp, Glycine max
cccacgcgtccgcccacgcgtccgcagaatgttagcaagaaaaggacagagaattaggcttgtgtgcaatatttgatggccacttaggccatgatgtagcaagctatttgcagaaccaccttttccaaaacatcttgcaacagcatgacttttggactgagacagaaagcgcagtgaaaaaagcttacgttgaaacagatgagaaaatattggaacaagaacttgtgttggggcgaggagggtcaacagctgtgactgcaatacttattgatggtcagaagcttgtagtagcaaatgttggtgactcaagagctattatctgtgagaatggaaaggcaagacaactatcagtggatcatgaaccaagcaaggaaaaaaaatcgattgagaggcgtgggggttttgtatcaaacattccaggagatgtccctcgaatagatggacagctggcaatagcaagggcttttggtgac

SEQ ID NO: 260839 - DNA, 435 bp, Glycine max
  unsure (1)..(435): unsure at all n locations
gaccgacgcgtccgcccacgcgggggcaacaacacgtgangccgnggcgggagccgnggnggcggaggngccggggccggagaccggagaggggnggnggngaaggcggagaaaggcngnaannnanngganncaggggaanngcagcnatggagagaggagcaagngccnncacactnggagngngggggatgggnncactatgctgacccagcttgaagggcatcagaaggctgagagtgcaattgcctttccctctggtacagataagctgtataccggaagcactgatgagactgcaaggattagggactgccaatctggaaagtgagtaggtgtgatcaatcttggtggtgaagtagagagcatgatcagaggaagccctaggggcagagtagggatacccaattttggcaaggcctagaacacacaaaa

SEQ ID NO: 260840 - DNA, 390 bp, Glycine max
ttgatcttgatgagcctgtagcagatgatttgatggggttttatgagcggatgggtgatagacttgcacatcaggatggtggttctgctgcacacaacaagattttctctgagaggaggggccagtggagagctgcaacacagtctcaggagttttttaggactcttcaacgctattatagcaatgcatacatggatgctatgaaacaggatgcaatcaatgtattcctggggcattttcagccacaacagggcaagcctgctctatgggagttgggttcagatcagctctatgatgcaagaagacatggagatgatgatgcaaggtcatttttcaaaagatccttttgatatggaaacatttttaatgaaagttctacaccgatgtcag

SEQ ID NO: 260841 - DNA, 421 bp, Glycine max
ggccacgcgtccggggcgggtttggttcaggttttaagggctggattgatgagcattcacttgctgctaccaaaccaggagtaggcaagattgttgctgttaagaagcttaaccaagatgggctccagggtcacagagagtggttggctgaaataaactatcttggccaactacagcatcctaaccttgtcaagttaataggatactgctttgaggatgaacatcggcttctggtttatgaatttatgcctaagggtagcatggaaaatcatctattcagaagaggttcttactttcagccattctcttggagtttgcgaatgaaaatagcactaggggctgcaaagggtcttgcttttcttcatagtacagaacataaagtcatataccgtgattttaaaacgtcaaatatcctactcga

SEQ ID NO: 260842 - DNA, 474 bp, Glycine max
  unsure (1)..(474): unsure at all n locations
cgtccggtctgggcagaggttttcttctaccttgctgagaacaatgtcctttttgagggtattctccttgagcctagcatggtgacacctggagccgagtccaaggacaaggccagtcctcagacagttgctgattacaccctcaagctccttcacaggagaattccccctgctgtccctggaattatgtttttgtctggtggacagtctgaggttgaagctaccctcaatttgaatgccatgaaccaatctccaaacccgtggcacgtgtcattctcgtatgccagagccctccaaaacactgccttgaagacatggggaggccgcccagagaacgtgaaggcagcacaagatgcactcgcattccgtgccaagtccaactcactcgctcagcttgngaagtacactggtgagggtgaatccgaggaagccaagaaaggagtgttcgtcaaaagctactcctactaagatgtt

SEQ ID NO: 260843 - DNA, 468 bp, Glycine max
  unsure (1)..(468): unsure at all n locations
cccacgcgtccgcgcagtgactaaaccaaagctctcactcgccgtcgtagggtttctcctttcggttagcaacaacaaggatggttgcagccaagaaaaccaagaagacccatgagagcatcaacaacaggctcgctcttgtcatgaagagtggaaaattcaccctcggttacaagacggttctcaaatcacttaggagctccaaagggaaattgattatcattgctaacaactgcccccctttgaggaaatcagagattgaatactatgctatgttggccaaggttggagttcatcattacaatgggaacaatgtggatttgggcactgcatgtggaaaatattacagagtgtgctgccttagcattattgatcctggtgattctgatatcatcaagacactacctggcgaacagtaaagtattatttgaagttccttgcttgatattntctgtttttagttgattc

SEQ ID NO: 260844 - DNA, 489 bp, Glycine max
gtctgagtggtggaagtgatgctgagggtggcgctgcgatggaactcgatttggaggccaatggcttctctgccactagctcccttcacatgccaaaatctccacacgctaaaccctaggcctcgatgtcgcaccttcaagcttttttgtcgaccttcttcttccgccgtcgcgcacacctcgcctcctctctccggcgacctggaccgctacctccgctgctccatgccgcagaactcgccgctccgagtcgcggttcttgtcagcggaggcgtcgatagcagcgtcgctctccggctgctccacgccgctggccactcctgcaccgctttctacctcaagatatggttccaagaagatttcgagaacttttggtctgagtgcccctgggaagacgatttgaagtatgctaaagatgtttgtaatcaggttgatgtaccgttagaagttgttcatttaaccgatgaatactggaacaatgtggtttct

SEQ ID NO: 260845 - DNA, 490 bp, Glycine max
cggacgcgtgggccgccacagccacagccacagccgacaccagatccttccaccaagctcaggtacaaatgctccgttggcgacaagagcttgccctcttaccaagcgctcggtggacacaaggccagtcaccggaaactcgccgacgccgccgaagaccaaccccccagcaccaccacttcctccgccgccgccaccagctccgcctccggaggtaaggcccatgagtgctccatttgccacaaatccttccccaccggacaggcccttggcggacacaaacgttgtcactacgaaggtaacggtaacggaaataacaacaacagtaacagcgttgtcaccgtcgcctcggaaggcgtggggtccacccacactgtcagtcacggccaccaccgcgacttcgatctcaacatcccggcctttccggatttttcgaccaaggtcggagaagacgaggttgagagccctcaccctgtcatgaagaagcctc

SEQ ID NO: 260846 - DNA, 488 bp, Glycine max
  unsure (1)..(488): unsure at all n locations
tcgaccgacgcgtccgcccacgcgtgcggntngacatgctacgaagacaatctcttcgcccagatcacataaaaatgggtgttttggatgaggctgatgaaatgctttcacgtggtttcaaggaccagatctatgacatcttccagctactgccaggtcaaattcaggttggagtgttctctgctacaatgccacctgaggccctggagattacaaggaagttcatgaataagccagtgagaatcctggtaaagcgtgatgaattgacgcttgagggtatcaagcagttttatgtgaatgttgataaggaagattggaaactggagacattatgcgacctttatgagactttggctatcactcagagtgtcatctttgtgaacaccaggcgcaaggtggactggctcactgacaagatgcgaagcaatgaccatacagtctcagccacccatggagacatggaccaaaacactcgcgatatcatcatg

SEQ ID NO: 260847 - DNA, 451 bp, Glycine max
cacaaacccgtccctcacactctccaaaccctagcggcactacacactagttctatcgctggctccccaagatggggagcgccgatcccgagcacagagaagaggaggaggcacccgccgttggcgacgacgaggacaccggagctcacgtcgctccaatcgtcaagctcgaggaggttgctgtcaccaccggcgaggaggacgaagatgcaatcctggatctcaaatcgaagctttaccggttcgacaaggacgggaaccagtggaaggagcgtggcgccggcactgtgaagttcctgaagcataatgcttccggcaaggttaggcttctcatgaggcaatccaagacgctcaagatctgcgctaatcatctcattatgcctacgatgagtgtgcaagagcacgctggaaacgagaaatcctgcgtttggcatgctagggatttgctgat

SEQ ID NO: 260848 - DNA, 390 bp, Glycine max
agatatctatttagatctcagaaaaacagtgtttcatttcaatgcattcagtcttattattgttagggtttggcgattcagagagaaagagaaatgggagaacgaaaaggaatcccaattgctctggggctcttggcgatgctcctcttcttcattgcttcttcctcttcctctcacctcgttcgtgcttccgatgacgccgacgacgcgatcttctacgagtcattcgacgaggattttgacggacggtggattgtgtccgacaaggaggattacaacggtgtctggaagcatgctaagagtgatgggcatgatgattatggacttcttgttagtgaacaagcccggtaaatatgctatattcaaaaaacttgacgagcctgatagtct

SEQ ID NO: 260849 - DNA, 472 bp, Glycine max
  unsure (1)..(472): unsure at all n locations
gcgtccgctctcttctttttactctctctctgtctctctctacgctttctcgttcgagatccctcaagggatccactaactgaaggagaaatggggttgacattcaccaagcttttcagccggcttttcgccaagaaggaaatgcgaattctgatggtgggtctcgatgcagctggtaagaccaccatcctgtacaagctcaaacttggagagatcgttaccacaattcccaccattgggttcaatgtggagactgtggaatacaagaacattagtttcactgtctgggatgttggtggccaggacaagattcgtcccttgtggaggcactacttccaaaacacacagggtctcatttttgtggttgacagcaacgacagggacagagttgttgaggccagagatgagttgcacaggatgttgaatgacgatgaactganagatgcagtattgctcgtatttgctaacaaac

SEQ ID NO: 260850 - DNA, 413 bp, Glycine max
cgccgagatcgtagtatcatattcaatatcgtttcataccaaacacatggctttggaagctctcaactcaccaacaacaaccgctccatcttttccctgtgacgacccaactattccatgggcgaaacgaaaacgttcaaagcgttctcgcgaccatccttctgaagaagagtacctcgccctctgcctcatcatgctcgctcgcggcggcaccaccaccgtcaacaaccgccacgtcagccctccaccgccacagccacagccacagccgacaccagatccttccaccaagctcagttacaaatgctccgtttgcgacaagagcttcccctcttaccaagcgctcggtggacacaaagccagtcaccggaaactcgccgacgacgccgaagaccaaccccccagcaccacca

SEQ ID NO: 260851 - DNA, 356 bp, Glycine max
  unsure (1)..(356): unsure at all n locations
ggagcttttcggggnggatgatgcttcgagggtgagggatttgtttgagaaggcgaatggggaggcgccgtgcattgttttcattgatgagattgacgccgttgggaggcagagaggggcggggctaggaggtggaaatgatgagagggaacaaactattaatcagcttcttactgagatggatgggttttctggtaattctggtgttattgttatggctgccactaacagaccggatgttcttgattcggcgttgttgaggcctggccggttcgataggcaagttactgtggatagacctgatgttgccggcagagttaaaatccttcaggtgcattctataggaaaagcgcttg

SEQ ID NO: 260852 - DNA, 370 bp, Glycine max
cccacgcgtccggctgtgcctctcctctcgctgcgttttccaatggcggccataacccggggcctaaatcgcacgtcttccctctcttccgtggcgcgtggattctcatctcacgcatcgccgccgcgcaaggaggagaggaatgtccagtgggtgttcctgggttgccccggcgtcggaaaaggcacctacgccagtcgcctctgcaacctcctcggcgtccctcacatcgccaccggcgatctcgtccgccacgagctcgcctccaacggccccctttcttcccagctatcagaaattgttaatcaaggaaaattggtgtcagatgaaatcatcataagtttattgtcaaaaaggctggctgatgggg

SEQ ID NO: 260853 - DNA, 440 bp, Glycine max
  unsure (1)..(440): unsure at all n locations
agattcttcagccaaagtagaagctgctcacagttccagaaccccttctggaatttcaaaggctagtccttcatcggttccttccaacttatctattctgtcatatagtgaagcaagtgatttctcaaatcttccaacaccaaggtctgagggcgaaatcttgtcttccccaaatcttaaggcctttaccttcaatgagctaaagaatgccaccaggaactttcgcccggacagtcttcttggtgaagggggatttggttatgtttacaaggggtggattgatgaacacacatttacagcttcaaaacctggatcaggaatggttgttgctgntaagaaactcaaacctgaatggttacaaggtcataaggagtggttgactgaagtggactaccttggacaactacaccatcagaatctggtaaaattgattggatact

SEQ ID NO: 260854 - DNA, 476 bp, Glycine max
gcgtcagcccacgcgtccgcccacgcgtccgggaatagttagtgatgttagagatcaaggcagctgcggagcatgctggacattgaggacaactggggctttagaagcagcctatgcacaagcatttgggaagagtatctctctttctgagcagcagctagtggattgtgctggccgtttcaacaactttggctgtaatggtgggttgccatcacaagcctttgagtacatcaaatacaatggaggacttgagacagaggaagcatacccctacactggaaaagatggtgtatgcaaattctcagctgaaaatgttgccgttcaagtcattgactcggtcaatatcaccttgggtgctgagaatgaattaaaacatgcagttgcatttgttcggccggttagtgtggcctttcaggtggtgaatgggttccatttctacgagaatggagtttacactaatgacatttgccgtagca

SEQ ID NO: 260855 - DNA, 471 bp, Glycine max
aagaggatgcggcttgcgcagctctcaggcttatttctgaacggccatggccatcgctccaggcttcttttaaaacgcagttccgcggatactcagacccactgagccccgccgagtctgctgcctcaaatcaatgccatgaagacgatgcaaggaaaagtggtatgctccacgaacgacaagacggtcacaacggaactggtcctgctatcccctcacccaaagtacaagacgcgcgtgacgaagaagaagaagtaccaggcccacgatccctataaccaattcaatgtcggctacatcgtccatctccacaagaccaggcccatcagcaagaccaatgcctttctcgcactccacgttcccaacatgtcctccaacaagccctagccccaacccgatgagctttccattcccttcgaatcccagccccaggcctagattccagagttacacctcaatttcaactctcta

SEQ ID NO: 260856 - DNA, 468 bp, Glycine max
tcgacccgcgcgtccggttttggttccgcagaagattctgaattctgatgctctagtgcgattccatgggagaggtggtgatcatgagtggagagaagaagtcagttagagtggagggggtggagaaggaagatagtggtggaagtgggagcaaggctggtgaatttaaggggttgatgaggtgggagaagttcttgcccaagatggttttgagggtgctgttggttgaagcagatgattccacaagacaaattattgccgcgcttctcagaaaatgcagctacaaaggttatgtgatggggatctgggttcaatgaaagtctaaggatctaatggctcctttccacttgctttaagagtcttggcagtctggaaactacaggcttacatgatagtgatacaattattttcttacatgatatgattattttcagttgtctatttgccataaagaatttctattattga

SEQ ID NO: 260857 - DNA, 464 bp, Glycine max
tgaaaagtttgattcttcgataacaaaagactatgattttcaccttcttgatggccgttcaatgagggttcccttcatgacgagcaggaagaatcagtttattagggcttttgatggtttcaaagtccttggtcttccctacaagcaaggtgaagataagcgccaattcaccatgtactttttccttccagaaacaaaagatgggctgttagctttggctgagaagttggcttctgaatctgggttcttggaacgcaagcttcctaataacaaattggaagtaggagacttcaggatcccaagattcaaaatttcttttgggtttgaagcctctaatgtgctgaaggagctgggagtggttttgcctttctccgttggaggtttgacagaaatggtggactctgctgtgggtcaaaacttgtttgtttccgatatatttcataagtcttttatagaaagtaatg

SEQ ID NO: 260858 - DNA, 377 bp, Glycine max
tacagggagaggtctcagtgcaatgattttccttggccctacatattaccaaagactgaaggatatggttgatgataagatccattctcgtggaaggggtccagtgcagatcctcacaaggcaacctgctgagggacgctcacgagatggaggtctccgatttggagagatggaacgagattgcatgatagctcatggagctgctcactttttaaaggaaaggttgtttgatcaaagtgatgcttacagggtccatgtatgtgagcgttgtgggttgatagctattgcaaatctcaaaaagaattcttttgagtgcagggggtgcaagaacaaaactgacattgttcaggtttatattccttatgcttgtaagcttc

SEQ ID NO: 260859 - DNA, 346 bp, Glycine max
cccacgcgtccggtactttggactcatgggtgatggccaacctattggacgatacgatgagatgtgggctggatggtgtgttaaggttatatgtgaccatttgggcttgggagtgaagactggccttccatacatctggcacagcaaagcaagcaacccttttgtcaatctcaaaaaggagtacaagggcatcttctggcaagaagaaatcattccattcttccaaagtgccactctttcaaaagagtgcacgtctgtccaaaaatgttacattgaactttccaagcaagtcaaggagaagcttggggcttgttgatccctacttcatcaagctagcagatgccat

SEQ ID NO: 260860 - DNA, 471 bp, Glycine max
ggaatgggtggtggtggcggtggccatgatccatttgatatctggagttcattctttggtggaagtccgtttgggtcaggtggtagcagtagaggacggaggcagaggcggggagaagatgtggttcatcccctgaaggtctctctggaggatctttacctcggaacttcaaagaaactctctctttcacgaaacgtgttgtgctcaaaatgcaatgggaagggctcaaagtctggggcttcaatgacctgtgctggttgccagggtactggcatgaaggtgtctattaggcaccttggtccttctatgattcagcaaatgcagcattcttgcaatgagtgtaagggtactggagagacaatcaatgacagagacaggtgccaacagtgcaagggagagaaagttgttcaggagaagaaagtacttgaagttgttgtggagaaaggaatgcaaaatggacagaagattaca

SEQ ID NO: 260861 - DNA, 460 bp, Glycine max
  unsure (1)..(460): unsure at all n locations
cgaccgacgcgtccggaagaatacaggcataatatatgagtgtgttcagggcgaacttgaggttgtgaaagagattgctaacaaagtgatctctgataagaaagaagacagtgaaaaccaaaacaatgctgagaaactttcagatggggtgaatgagcgatatgcatttgtcaaagaaacttcaaaaatgccatttctaatgttaggattggacttgccaccacctgctcttttcaaggatgtgatggaaaaaaatataataccacaggttccactctntaacatactaaagaagtttgatggtgaaactgtcacggaggtggtccgtcctcatatagcaaggatgcagtatcgtgttaccagattgcccaagtatatgattctacacatgcgtcggtttactaagagtaatttttttgtcgaaaggaatcctacggtagtcaactttctgtgaagacct

SEQ ID NO: 260862 - DNA, 487 bp, Glycine max
tgaaaatgatgcttctgtagtggatgctttgtctctaaaaagaatcactagaatacacaaggcgttggactcagatgatgttgagcttgttaaacttcttttgaatgaatcagacattactttggatgaagccaatgctctccattatgctgcagcctactgtgaccccaaggttgtttctgaggtacttggtttgggactggctaatgtcaatcttcgaaattctagggggtacacagtgcttcacattgctgccatgcgtaaagagccttccattatagtatccctacttacgaaaggggcttgtgcatcagatttgacttttgatggtcagagtgctgttagtatttggaagaaggttgacaagggccaaagattattatgccaaaacagaacatgggaaagaaacaaaccaagatcgggtttgcatcgatgttcttgaaagagaaatgaagaggaatccaatggctggggatgcctgtatgtc

SEQ ID NO: 260863 - DNA, 470 bp, Glycine max
caagattcagcaagtgcgttttggaagcagagaccgaaatacttcgagatggcccgtacaaagcgaactgctcgtaagtgaactggaggaaaagctcccaggaagcagcttgcaaccaaggctgcacgtaagtctgcaccaacaactggtggtgtgaagaagcctcatcgttatcgccctggaactgttgctcttcgtgagattaggaaataccagaagagcactgagctcctaatcaggaagcttcctttccagaggttggttcgtgaaattgcccaggatttcaagactgatctgcgtttccagagccatgctgtgcttgcattgcaagaggctgctgaggcataccttgttgggctctttgaggacactaacttgtgtgccattcacgccaagcgtgtgactattatgcccaaggatattcagctggcaagaaagattcgtggtgagcgtgcttgagttggtgcgtt

SEQ ID NO: 260864 - DNA, 494 bp, Glycine max
tcgaccggcgcgtccgcttctgtgctgagacaacaatggcgatggctttcaaaatggccactactgggatgtgggtgagggatgagtgcaagggctctttcatggaaatgaagtggaagaaggttcatagatacatagtcttcaagatcgatgagaagtcaaggcttgtcaccgttgataaggtgggtggtcccggcgagagctatggtgatctcgccgcctccttgcccgacgatgattgtagatatgccgtattcgactttgatttcgtcaccgtcgataactgccgcaagagcaagatcttcttcattgcatggtctccaacagcatcaaggataagagcaaagatgctctacgcaacatccaaggatggtctgagaagagctctggatggaatcagctatgaagttcaagccaccgatccagccgagatgggattcgatgtaattcaagacagagccaaatagatgccccctttttttaaagtgggaatc

SEQ ID NO: 260865 - DNA, 355 bp, Glycine max
cccacgcgtggcgccacgcgtccgctgatacttgctctggtcatagtttgctgtttttgtcagtgcttaagttctggcggcgataccattacaccaggccaattcatcagagatcctcacactctcacctcagctaatagtgccttcaagctaggattcttcagccctcaaaattcttcaaatcgctacctgggaatctggtatctctctgactccaatgtcatatgggtagctaacagaaaccagccactaaagaagagctcttccggaactgttcatatttctgaggatggcaatctcgtggtattagatagcaacaaaaaggctgtttggtcaacaaatttgacacataata

SEQ ID NO: 260866 - DNA, 406 bp, Glycine max
gatccactcttcggcctttcagcaggtgctcagctctagctcctcttctctcgtctcggatcttccttcaacgcataagctcctcaaatcggttcgttcggcttccggagaggtcgcttgtttcgtctgtgttgtcaatgtaacttaacgacgctccttggtgaggccactcaacgccgaaccgcaacggaacgattctattgttccttttgcagcaactatcgttgctcctgaggttgagaaagaagagtgagattttgagcaaatagctaaagaccttgaaaatgcatattctcttgaaaatatggatagggccctcgagaaatatgggaactacatcgctattgcatatagtggtgctgaagagttgctttgattgagatgcacatttgacgggtcgacccta

SEQ ID NO: 260867 - DNA, 420 bp, Glycine max
ctcacctttctcctaaaacatctccagtgggttcttcttcttgtattacaacaacgtcgggcaagaccatgaccatggccatggccacgatcctgctcctgttcacggtcttcgcggtttcatcggccctagacatgtcgataatctcgtacgacaacgcccacgccgccacgtcgcgcagcgacgaggagctgatgtccatgtacgagcagtggctagtaaagcacggcaaggtgtacaacgcgctcggagagaaggagaagaggttccagatcttcaaggacaacctgcgattcatcgacgaccacaactcccaagaggaccgaacctacaagctcggactgaaccggttcgcggatctcaccaacgaggagtacagggccaagtacttgggaaccaagatcgatcccaaccggatgc

SEQ ID NO: 260868 - DNA, 471 bp, Glycine max
  unsure (1)..(471): unsure at all n locations
gtgctctctgtgtggtgtggtcgctcagtgtaacaacaacagcaacaacaacgaacgccagcgcanacgcaaacgggaataagagcgagaacattctcttcagctcaacccttttctttttcgatggctaatcggcacacgattattctaatgcagacctcgcagaacagagcaactaggacgttcatggattatgaatccataactcaggccatggatggcatatgtgcactgtatgaaaggaaactgaaggagttgaatccggctatcagaaatctctcttatgacattactgatctctacaacttcatagatggtcttgcggacatgagtgccctagtgtatgatagttcaattcacgcttacttgccgcatgatcgactgtggatcaagcaacgaacattccaacatttgaagaaattagcacactgattaacccctaaactattggcaatttaatgtaaagaaaat

SEQ ID NO: 260869 - DNA, 373 bp, Glycine max
  unsure (1)..(373): unsure at all n locations
aaaagaaaaaggaaagaaacagttttaacatataaagaacataaaaaatccaaatgatctatttntaggagatctgacgtggtttgaattttgctggcgttgatcgccgccgcttggtgtctgttaactccagcgagggcgaattcgacgacaatatatgaagagctccggacgcagggtcttccaatggggcttcttccaaagggaatagcgaagtactcgatgaacgcgactagcggggagttcgaagtgtggatgaacgaagcgtgcaacgctaaattcgagaacgaggtgcactacgactccaatataaagggtgttcttggctacggtcggatcggggaattatcctgtgtgtcggcacaagaactct

SEQ ID NO: 260870 - DNA, 488 bp, Glycine max
  unsure (1)..(488): unsure at all n locations
gtcaggctgggcctggattccagttatttggttctgatgcggatgtgtctgatgcgttggtgcatctgcagcatgggcctatgaattgctcctcgtcactaaatggttatgcattggctcccaatactgctttgggatctggtagtatcttgcaagagtcctctgctggtcggtcagatgctgatttgaatggtggtttggtggacaatcctttggcctttggtggagatgatccctcacttcagatttttctccccacaagaccagcagattcatccatgcacaatgaattgagagatcaagcaagtgtggctaatggtgtctgcactgangaggattggatatccctcagtcttggaggtgggactggtgttaacaatggtgatgctttcactcaaaaagggttgaattctagacatcaaatcccaaccgagaaggtgccacgaatactttggatgatactgcttctttaactcctgggatgaatg

SEQ ID NO: 260871 - DNA, 483 bp, Glycine max
  unsure (1)..(483): unsure at all n locations
gccacgcgtgcgagaaaataagggaaagcttttgcgcttaaggccaacatctgctgatgtagtttatagtgaggtcaaggaaggtgagttaattgatgacaaatcaactcaactcanagatgttggttctgtgtcacccatatctctggcccgaaagaagtttagtggtagatatgctgtctcatctgaagaattcactggtgaaatggttggagctaaatctcgtaatatctcttatttaaaagggaaagtagcttcttggattggaattcctacctcgggtgccataccatttggagttttcgaacatgttctttctgataaaccaaaccaggcagtggctgagagggtcaataatttgaaaaagaagtagattgagggagacttcagtgttctcaaggagattcgtgaaacagttctacaattgaatgcacccatccatttggtagaagagttgaaaactaaaatgaagagttctggaat

SEQ ID NO: 260872 - DNA, 355 bp, Glycine max
gcgtccgcttaccttgcactttgttgcctgggtgtgttatctagactctgggaacgttagactgagagtggaacgtgaggttcttgatagtatcattaataggctgcttgaagtcagaggcagaccatggaagcagaggcaactttctgaggctgagatcatgcagctatgtcttgtctccagggatatcttctggaggcagccctacctcttggaactcgaggcaccaattaagatctgtggagatgtccatggtcaatattccgaccttatgcgactgtatgagtatggtggattgcctcctcgatctaattacttgatagtaggagactatgatgatcgtgggaagcaaagt

SEQ ID NO: 260873 - DNA, 488 bp, Glycine max
gtcgacccgcgcgtccgcccacgcgtacgcccacgcgtccgcggacgcgtgggtttgccttgtgccgtttgcgttgttatgggtacgaacatgagggtggtgtcaggttctggaatctgctcaaagcgcttggtggtggacgcgcgccaccacatgctgggtcgtctagcctccatcgtggcgaatgatcttctgaacggtcagaaagtggaggtcgttcgctgagaagagatttgcatctcggtcgggctgatgatgcagatgatgaaatactcgaggttccttcgcaaacgcatgaacaccagaccctaccatgggcccattcacttccgagccccctccaagatcgtttggcgcaccgttcgtggaatgataccacacaagacaaagcgtggggaagctgctctcgctcgtttgaaggctgatgaaagaatccctacttcatatgacgagaccgagagaatggatgttcctgatgcactcaatgt

SEQ ID NO: 260874 - DNA, 318 bp, Glycine max
gatacattgttcatgaacggacttatatactctataagaagtctttcaacgagcaggtcatacaaatgaggattataaacacacaagtagtgctcttgacacatgactcagaaaactcagctctgaagctgccattgaataaccaattaaaccaccacttaacgttgaacacacccacctcttaattgatggaaaaatcattcatgctactactggcaaaactataccaacgttgtaccccattacacgataagtgatttctcatgctgcttaaggtgaccattaatatgtcgatcgatcaatatcatcttctcgcaa

SEQ ID NO: 260875 - DNA, 466 bp, Glycine max
  unsure (1)..(466): unsure at all n locations
cgcgtacgctaacgcccgaccctgttcccctctcgtatccgtcatgaaaggaggaaagtccaagaccgaagctaagagagccgagggcaaacttgctgtgaataagaagggagccgccaccaaggctaggaaacccgccggcaaggggaaggcagcgaaagaccctaacaagccaaagaggcctccaagtgctttcttcgttttcatggaggagttcaggaaggtattcaacaaagaacatcctgaaaacaaagcagtgtctgctgtgggcaaagctgctggagcaaaatggaagaccatgtctgatgctgaaaaagcaccttatgtggcaaagtctgagaaaaggaaagtggagtacgagaagaacatgagagcctataacaagaaacaggcggaaggtcctactggtggngatgaagaagaatctgagaagtctgtatctgaagtgaatgatgaagatgatgat

SEQ ID NO: 260876 - DNA, 388 bp, Glycine max
  unsure (1)..(388): unsure at all n locations
ccacgcgtncgcacaaattttatgtgattagtcgcggtatttaaaataaaaaatgaaagtagacaaataaaaaaggaaaggagatgtttgaataaaaataattccccttcaagttcttattttttgagaggacaggacaatatgaatgttttattatgctctatcaacacattaaaaagattatatgatatatctgctgtggaagtaggtcaacatttctattggcaaatagggagtttccaagtacatgcccaagtacttattacttcttgggttgtaattgctctcttattggtttcagccattctaattattcgaaatctgcaaaccattcccgctttcggtcagaatttctttgaatatgttcttgaattcattcgagacgtga

SEQ ID NO: 260877 - DNA, 433 bp, Glycine max
aatttgaaggcagaggtggcaaggggagcaaaacttaaatgcagtaaatgtaatctaaagggagctgctcttggttgctatgtcaaatcctgtagaagaacgtatcatgttccttgtgcaatggacatctcagattgccgttgggatcatgaggattttctcttgctctgtcctgtccattcaaatgtcaaatttccatgtgagaaaatcaggtccaagaaaaaggcaacacagaagcatcccactttttctcatctgccatctcatcactcaaatcgtcttgaagcttcccaggatgctagtaaaaaattggtattttgtggatctgctctatcaaatgaagaaaaggtatttttgatcaattatgcaagcaaggttggtgctactgtgaccaagttctggacctcaaatgtcacccatgtaattgcagcaa

SEQ ID NO: 260878 - DNA, 387 bp, Glycine max
cccacgcgtccgtgggttcactagaaagaggcacaactgttataattgtggacttgtgcactgccattcatgtagttctaggaaagcattaagagctgccctggctcctaatcctgggaagccatatcgtgtttgtgattcttgttttgtaaaattgaacaaggttgcagaattgggcaacaataatcggaggaatgctatgcctcgtttgtcaggtgaaaacaaggacagattagagaagcctgagctaagattgaccaagacagcagtcccttctaatatggatttgataaagcaacttgatagtaaggcagctaaacaggggaagaaggctgatacattctctctggttcgcacctctcaaccacagtctttgctacagctcaa

SEQ ID NO: 260879 - DNA, 373 bp, Glycine max
aaaatgtggaagagaacgggttttgtataagaagcagttcaattgatcaactcagatttcagggacctaagtctagctgctaatagactcgcccatcatgccatcaaacttggtggcattggctttggagcctcttttttcggattgtttgctgccattgctgctatttatctgttgattttggatcgtacaaactggaaaacaaatattctcacagcactactcattccatacattttcttcagcttgccttcattaattttcgacgtcttcaggggagagcttggaaaatggattgctgcagttgctgttgtattacgccttttccttccaagacacttccctgattggctggaattgcctggtgctctga

SEQ ID NO: 260880 - DNA, 294 bp, Glycine max
  unsure (1)..(294): unsure at all n locations
tcgcccacgcgtncgatgccacctgatatataggcatattagctagttaggtaggtatagtagtttaagttaattcaaccatggaagacagggatcactgttgttccaacatttcaacgatgatcacaacaccaaagaaaagaacgggtagaagaagtccaacatcggataagctcaagaatcaacaccgcgagaagcagtcgatgaaaccttaccgtggaataaggatgcggaagtgggggaagtgggtggcggagatcatagaacccaccaaaaggtcgaggatatggttgg

SEQ ID NO: 260881 - DNA, 380 bp, Glycine max
acacgcgtccgcacaaattttttgtgtttagtcgcggcatttaaaattaaaaatgagagtagacacataaaaaaggaacggagatgtttgaataaaaataattccccttcaagttcttattttttgagaggacaagacaatatgaatgttttattatgctctatcaacacattataaagattatatgatatatctgctgcggaaagaggtcaacatttctattggcaaatatggagtttgcaagcacatgcccaagtacttattacttcttgggttgtgatagctctcttattggtttcaaccattctaattattctaaatctgctaaccattcccgctttcggtcagaatttatatgaatatgtacttgaattcattcg

SEQ ID NO: 260882 - DNA, 397 bp, Glycine max
gcctctccctctacgatatcgccggaactcccggtgtcgccgccgatgtcagccacatcaacaccggatctgaggtagtggggtaccaaggtgacgaagagctcggaaaagctttggagggtgcagatgttgttataattcctgctggtgtgcccagaaagcctggaatgactcgtgatgatctttttaacatcaatgctggcattgttaagacactgtgtactgctattgctaagtactgccctcatgcccttgttaacatgataagcaatcctgtgaactccactgttcctattgctgctgaagttttcaagaaggcaggaacgtatgatgagaagagattgtttggtgttaccacccttgatgttgttagggcaaaaactttctatgctgggaa

SEQ ID NO: 260883 - DNA, 424 bp, Glycine max
gcctacgcactgcggagagagaaatttattttccgagataaccagttttctggtttgattcatcaatggcaactgcgaggaccgtgaaggatgtttcgcctcacgatttcgtgaaggcttatgcttcccacctcaagcgttccggcaagatggagcttcctgagtggaccgatattgtaaaaacagcaaaatttaaggagttggctccatatgatcctgactggtactacattagggctgcctcaatggcaagaaagatctatttgagaggtggtcttggtgttggtgctttccagaggatctatggtggaagcaaaagaaatggaagccgtcccccacatttctgcaagagcagcggtgcaattgccagacacattctgcaacaattgcaaaacatgagcattgttgagattgatacaaaaag

SEQ ID NO: 260884 - DNA, 360 bp, Glycine max
cgctattctactcgcaagcatttcatatcaagagaagagaatggcaggagcagaggggctaaacagagaacagtacgtgtaccttgcgaagctgtcggagcaggcggagcggtacgaagagatggtggagttcatgcagaaggtggtggtggggtggacgccggcgtcggagctcacggtggaggagcgcaacctcctctcggtggcctacaagaacgtgatcgggtctctgcgtgccgcgtggcgcatcgtgtcctccatcgaacagaaggaggaagggcgcatgaacgacgaccacgtgtccctcgtgaagcactacagatccaaggtcgagaacgagctcacgcatgtctgcgccag

SEQ ID NO: 260885 - DNA, 406 bp, Glycine max
cccacgcgtccgcccacgcgtttgcataatttaagcaagaaaaggacagagaattaggcttgtttgcaatatttgatggccacttaggccatgatgtagcaagctatttgcagaaccaccttttccaaaacatcttgcaacagcatgacttttggactgagacagaaagcgcagtgaaaaaagcttacgttgaaacagatgagaaaatattggaacaagaacttgtgttggggcgaggagggtcaacagctgtgactgcaatacttattgatggtcagaagcttgtagtagcaaatgttggtgactcaagagctattatctgtgagaatggaaaggcaagacaactatcagtggatcatgaaccaagcaaggaaaaaaaatcgattgagaggcgtgggggttttgt

SEQ ID NO: 260886 - DNA, 378 bp, Glycine max
tcggtgatgaccaacaaatacagtgaggggtactttggtgcaagatattatggtggaaatgagtatattgacatggctgaaacactatgccaaaagcgtgccctggaagcgtttagattggatcccgctaaatggggagtgaacgtgcagcctctgtcagggtctcctgcaaatttccatgtctacactgcattgcttaaacctcatgaaagaatcatggcacttgatcttcctcatggtggccatctttctcatggatatcagactgataccaaaaagatatctgctgtctcaatattttttgagacaatgccatatagattgaacgaaagtacgggatacattgactatgaccagatggagaaatcagcaacactt

SEQ ID NO: 260887 - DNA, 362 bp, Glycine max
cccacgcgttcgcaacaacacgtggtgccgtttctggagccgtggtggcggtggtgccggtgccggtgccggtagaggggtggtggtgaaggcggagaaagtctgtaattattggattcaggggaattgtagttatggagagaggtgcaagttccttcacacttggagtgtgggggatgggttttctttgctgacccagcttgaagggcatcagaaggctgtgagtgcaattgcctttccctctggttcagataagctgtataccggaagcactgatgagactgcaaggatttgggactgccaatctggaaagtgtgtaggtgtgatcaatcttggtggtgaagtaagttgtatgatcagtg

SEQ ID NO: 260888 - DNA, 257 bp, Glycine max
tcggtgattaccaacaaatacagttattgtgtccctggtgcaagatattattggggaaaggtttttatggacgtggcgtgagacactattccaaaagcgtgccctgtaagcgtttaaattggatcccgctaaatggcgaatgaacgtgcaacctcttgtcattgtcttctgcaatattccatgtctacactgcattgatttaacctcatgaaataatcatggtacttgatcttcctcatagaggccatatttcttat

SEQ ID NO: 260889 - DNA, 420 bp, Glycine max
ttgatcttgatgagcctgtagcagatgatttgatggggttttatgagcggatgggtgatacacttgcacatcagtatggtggttctgctgcacacaacaagattttctctgagaggaggggccagtggagagctgcaacacagtctcaggagttttttaggactcttcaacgctattatagcaatgcatacatggatgctatgaaacaggatgcaatcaatgtattcctggggcattttcagccacaacagggcaagcctgctctatgggagttgggttcagatcagctctatgatgcaggaagacatggagatgatgatgcaaggtcatttttcaaaagatccttctcagatggaaacattcttaatgaaagttctacaccgatgtcagcccccaatgccaagcacgaaaaaattccca

SEQ ID NO: 260890 - DNA, 421 bp, Glycine max
cccacgcgtccggggcgggtttggttcagtttttaagggctggattgatgagcattcacttgctgctaccaaaccaggaataggcaagattgttgctgttaagaagcttaaccaagatgggctccagggtcacagagagtggttggctgaaataaactatcttggccaactacagcatcctaaccttgtcaagttaataggatactgctttgaggatgaacatcggcttctggtttatgaatttatgcctaagggtagcatggaaaatcatctattcagaagaggttcttactttcagccattctcttggagtttgcgaatgaaaatagcactaggggctgcaaagggtcttgcttttcttcatagtacagaacataaagtcatataccgtgattttaaaacgtcaaatatcctactcgat

SEQ ID NO: 260891 - DNA, 402 bp, Glycine max
gtctgggcagaggttttcttctaccttgctgagaacaatgtcctttttgagggtattctccttaagcctagcatggttacacctggagccgagtccaaggacaaggccagtcctcagacagttgctgattacaccctcaagctccttcacaggagaattccccctgctgtccctggaattatgtttttgtctggtggacagtctgaggttgaagctaccctcaatttgaatgccatgaaccaatctccaaacccgtggcacgtgtcattctcgtatgccagagccctccaaaacactgccttgaagacatggggaggccgcccagagaacgtgaaggcagcacaagatgcactcgcattccgtgccaagtccaactcactcgctcagcttgggaagtacact

SEQ ID NO: 260892 - DNA, 396 bp, Glycine max
cccacgcgtccgcgcagtgactaaaccaaacctctcactcgccgtcgtagggtttctcctttcgtttagcaacaacaacaatggttgcagccaagaaaaccaagaagacccatgagagcatcaacaacaggctcgctcttgtcatgaagagtggaaaattcaccctcggttacaagacggttctcaaatcacttaggagctccaaagggaaattgattatcattgctaacaactgcccccctttgaggaaatcagagattgaatactatgctatgttggccaaggttggagttcatcattacaatgggaacaatgtggatttgggcactgcatgtggaaaatattacagagtgtgctgccttagcattattgatcctggtgattctgatatcatca

SEQ ID NO: 260893 - DNA, 381 bp, Glycine max
cggacgctgggccgccacaccacagtccatccgacaccagatccttccaccaagctcagttacaaatgctccgtttgcgacaagagcttcccctcttaccaagcgctcggtggacacaaggccagtcaccggaaactcgccgccgccgccgaagaccaaccccccagcaccaccactttctccgccgccgccaccagctccgtctccggaggtaaggcccatgagtgctccatttgccacaaatccttccccaccggacaggcccttggcggacacaaacgttgtcactacgaaggtaacggtaacggaaataacaacaacagtaacagcgttgtcaccgtcgcctcggaaggcgtggggtccacccacactgtcagtcac

SEQ ID NO: 260894 - DNA, 393 bp, Glycine max
cccacgcgtccggtttgacatgctactaagacaatctcttcgcccagatcacataaaaatgtttgttttggatgaggctgatgaaatgctttcacgtggtttcaaggaccagatctatgacatcttccagctactgccaggtcaaattcaggttggagtgttctctgctacaatgccacctgaggccctggagattacaaggaagttcatgaataagccagtgagaatcctggtaaagcgtgatgaattgacgcttgagggtatcaagcagttttatgtgaatgttgataaggaagattggaaactggagacattatgcgacctttatgagactttggctatcactcagagtgtcatctttgtgaacaccaggcgcaaggtggactggctcac

SEQ ID NO: 260895 - DNA, 379 bp, Glycine max
cacaaacccgtccctcacactctccataccctagcggcactacacactagttctatcgctatctccccaagatgtcgagcgccgatcccgagcacagagaagaggaggaggcacccgccgttggcgacgacgaggacaccggagctcacgtcgctccaatcgtcaagctcgaggaggttgctgtcaccaccggcgaggaggacgaagatgcaatcctggatctcaaatcgaagctttaccggttcgacaaggacgggaaccagtggaaggagcgtggcgccggcactgtgaagttcctgaagcataaggcttccggcaaggttaggcttctcatgaggcaatccaagacgctcaagatctgcgctaatcatctcatttt

SEQ ID NO: 260896 - DNA, 400 bp, Glycine max
agatatctatttagatctcagaaaaacagtgtttcatttcaattcattcagtcttattattattagggtttggcgattcagagagaaagagaaatgggagaacgaaaaggaatcccaattgctctggggctcttggcgatgctcctcttcttcattgcttcttcctcttcctctcacctcgttcgtgcttccgatgacgccgacgacgcgatcttctacgagtcattcgacgaggattttgacggacggtggattgtgtccgacaaggaggattacaacggtgtctggaagcatgctaagagtgatgggcatgatgattatggacttcttgttagtgaacaagcccggaaatatgctatagtcaaaaaacttgacgagcctgtcagtcttaaggatggaa

SEQ ID NO: 260897 - DNA, 357 bp, Glycine max
  unsure (1)..(357): unsure at all n locations
gtcttttttttactctctctctgtctctctctaccttttcgtcgagatccctcagggatccactaactgaaggagaaatggggttgacattcaccaagcttttcagccggcttttcgccaagaaggaaatgcgaattctgatggggtctcgatgcactggtaagaccaccatcctgtcaagctcaaacttggagagacgntccacaattcccaccattgggttcaatgtggagactgggaatacaagaacattatttactgtctgggatgttggtggccaggacaagattcgtccttgggaggcctacttccaaaacacaagggtctcatttttgtggttgcagcaacgcagggaca

SEQ ID NO: 260898 - DNA, 371 bp, Glycine max
cgagatcatagtatcatattcaatatcatttcataccaaacacatggctttggaagctctcaactcaccaacaacaaccgctccatcttttccctttgacgacccaactattccatgggcgaaacgaaaacgttcaaagcgttctcgcgaccatccttctgaagaagagtacctcgccctctgcctcatcatgctcgctcgcggcggcaccaccaccgtcaacaaccgccacgtcagccctccaccgccacagccacagccacagccgacaccagatccttccaccaagctcagttacaaatgctccgtttgcgacaagagcttcccctcttaccaagcgctcggtggacacaaggccagtcaccggaaac

SEQ ID NO: 260899 - DNA, 422 bp, Glycine max
atagatttgaaccatttcataatctgaagccttttttttttttcttgttgcgatcgaattgtgacggagatggcggcgccgaacaggatcgaacgcgcccaccagatgtaccgcgacggaagttacgaggaggcgttagggttctacacggaagcaatcgccttggccaagaccaaccctcagaagatcgctttgcatagcaaccgagccgcgtgctatctcaagcttcacgatttcaaaaaggcagcagaagagtgtacttcagtgcttgagcttgatcacaagcacagtggggcattgatgctgcgggctcaaacgctagttaccctgaaggagtaccattcagcactttttgatgtcagcagacttttagagttgaatccatcttcagaggtttatcaaaatcttcaagctcgtttgaa

SEQ ID NO: 260900 - DNA, 397 bp, Glycine max
cccacgcgtccggctgtgcctctcctctcgctgcgttttccaatggcggccataacccgcctcctaaatcgcacctcttccctctcttccgtggcgcgtggattctcatctcacgcatcgccgccgcgcaaggaggagaggaatgtccagtgggtgttcctgggttgccccggcgtcggaaaaggcacctacgccagtcgcctctgcaacctcctcggcgtccctcacatcgccaccggcgatctcgtccgccacgagctcgcctccaacggccccctttcttcccagctatcagaaattgttaatcaaggaaaattggtgtcagatgaaatcatcataagtttattgtcaaagaggctggctgatggggaagctaaaggagaatcgggatttattc

SEQ ID NO: 260901 - DNA, 430 bp, Glycine max
agattcttcagccaaagtagaagctgctcacagttccagaaccccttctggaatttcaaaaactagtccttcatctgttccttccaacttatctattctgtcatatagtgaagcaagtgatttctcaaatcttccaacaccaaggtctgagggcgaaatcttgtcttccccaaatcttaaggcctttaccttcaatgagctaaagaatgccaccaggaactttcgcccggacagtcttcttggtgaagggggatttggttatgtttacaaggggtggattgatgaacacacatttacagcttcaaaacctggatcaggaatggttgttgctgttaagaaactcaaacctgaagggttacaaggtcataaggagtggttgactgaagtggactaccttggacaactacaccatcagaatctggttaaattg

SEQ ID NO: 260902 - DNA, 381 bp, Glycine max
cccacgcgtccgcccacgcgttcggttatagtgagtgatgttaaagatcaaggcagctgcggatcatgctggacattcagcacaactggggctttagaagcagcctatgcacaagcatttgggaagagtatctctctttctgagcagcagctagtggattgtgctggccgtttcaacaactttggctgtaatggtgggttgccatcacaagcctttgagtacatcaaatacaatggaggacttgagacagaggaagcatacccctacactggaaaagatggtgtatgcaaattctcagctgaaaatgttgccgttcaagtcattgactcggtcaatatcaccttgggtgctgagaatgaattaaaacatgcagttgcattt

SEQ ID NO: 260903 - DNA, 358 bp, Glycine max
taagaaaatgtggcttgtgcatttcttttccccatttctgaacggccatgggcatggctccagccttctgtgggaacccagttcggcggtgactcatacccactgggccccgccgagtttgctgcctcaaatcaatgcgatgaagacgatgcagggaaaagtggtgtgctccacgaacgacaagacggtggcagtggaggtggtgcggctggcccctcacccaaagtacaagaggcgcgtgaggaagaagaagaagtaccaggcccacgatcccgataaccaattcaatgtcggcgacatcgtccagcttcagaataccaggcccatcatcaagaccaatgcctttcttgcactcccc

SEQ ID NO: 260904 - DNA, 427 bp, Glycine max
gttttggttccgcagaagattctgaattctgatgctctagtgcgattccatgggagaggtggtcatcatgagtggagagaagaagtcagttagagtggagggggtggagaaggaagatagtggtggaagtgggagcaaggctggtgaatttaaggggttgatgaggtgggagaagttcttgcccaagatggttttgagggtgctgttggttgaagcagatgattccacaagacaaattattgccgcgcttctcagaaaatgcagctacaaaggttatgtgatggggatctgggttcaatgaaagtctaaggatctaatggctcctttccacttgctttaagagtcttggcagtctggaaactacaggcttacatgatagtgatacaattattttcttacatgatatgattattttcagttgtctatt

SEQ ID NO: 260905 - DNA, 363 bp, Glycine max
tgaaaagtttgattcttcgataacaaaagactatgattttcaccttcttgatggccgttcaatcagggttcccttcatgacgagcaggaagaatcagtttattagggcttttgatggtttcaaagtccttggtcttccctacaagcaaggtgaagataagcgccaattcaccatgtactttttccttccagaaacaaaagatgggctgttagctttggctgagaagttggcttctgaatctgggttcttggaacgcaagcttcctaataacaaattggaagtaggagacttcaggatcccaagattcaaaatttcttttgggtttgaagcctctaatgtgctgaaggagctgggagtggtttt

SEQ ID NO: 260906 - DNA, 341 bp, Glycine max
tacagggagacgtctcagtgcaatgattttccttggccctacatattaccaaagactgaagcatatggttgatgataagatccattctcgtggaaggggtccagtgcagatcctcacaaggcaacctgctgagggacgctcacgagatggaggtctccgatttggagagatggaacgagattgcatgatagctcatggagctgctcactttttaaaggaaaggttgtttgatcaaagtgatgcttacagggtccatgtatgtgagcgttgtgggttgatagctattgcaaatctcaaaaagaattcttttgagtgcagggggtgcaagaacaaaactgaca

SEQ ID NO: 260907 - DNA, 388 bp, Glycine max
cccacgcgtccggtactttggactcatgggtgatggccaacctattggacgatacgatgatatgtgggctggatggtgtgttaaggttatatgtgaccatttgggcttgggagtgaagactggccttccatacatctggcacagcaaagcaagcaacccttttgtcaatctcaaaaaggagtacaagggcatcttctggcaagaagaaatcattccattcttccaaagtgccactctttcaaaagagtgcacgtctgtccaaaaatgttacattgaactctccaagcaagtcaaggagaagcttggggctgttgatccctacttcatcaagctagcagatgccatggttacttggattgaagcttgggatgagcttaacaacaacaca

SEQ ID NO: 260908 - DNA, 400 bp, Glycine max
ggaatgggtggtggtggcggtggccatgatccatttgatatcttcagttcattctttggtggaagtccgtttgggtcaggtggtagcagtagaggacggaggcagaggcggggagaagatgtggttcatcccctgaaggtctctctggaggatctttacctcggaacttcaaagaaactctctctttcacgaaacgtgttgtgctcaaaatgcaatgggaagggctcaaagtctggggcttcaatgacctgtgctggttgccagggtactggcatgaaggtgtctattaggcaccttggtccttctatgattcagcaaatgcagcatccttgcaatgagtgtaagggtactggagagacaatcaatgacagagacaggtgccaacagtgcaagggagaga

SEQ ID NO: 260909 - DNA, 402 bp, Glycine max
gaagaatacaagcataatatatgagtgttttcagggcgaacttgaggttgtgaaagagattcctaacaaagtgatctctgataagaaagaaaacagtgaaaaccaaaacaatgctgagaaactttcagatggggtgaatgagcgatatgcatttgtcaaagaaacttcaaaaatgccatttctaatgttaggattggacttgccaccacctcctcttttcaaggatgtgatggaaaaaaatataataccacaggttccactctttaacatactaaagaagtttgatggtgaaactgtcacggaggtggtccgtcctcatatagcaaggatgcagtatcgtgttaccagattgcccaagtatatgattctacacatgcgtcggtttactaagaataatttttt

SEQ ID NO: 260910 - DNA, 408 bp, Glycine max
tgaaaatgatgcttctgtagtggatgctttgtctctaaaaagaatcactagaatacacaaggcgttggactcagatgatgttgagcttgttaaacttcttttgaatgaatcagacattactttggatgaagccaatgctctccattatgctgcagcctactgtgaccccaaggttgtttctgaggtacttggtttgggactggctaatgtcaatcttcgaaattctagggggtacacagtgcttcacattgctgccatgcgtaaagagccttccattatagtatccctacttacgaaaggggcttgtgcatcagatttgacttttgatggtcagagtgctgttagtatttgtaggaggttgacaaggccaaaagattatcatgcaaaaacagagcatgggaaagaaac

SEQ ID NO: 260911 - DNA, 351 bp, Glycine max
gaggggcttatagatttagggaatgtgtttactatactagtaataaattgtacaaaaaataaaaatataaataatatgaatataaaaagaacaaacacaaattttatgtgattagtcgcggcatttaaaataaaaaatgaaagtagacaaattaaaaaggaaaggagatgtttgaataaaaataattccccttcaagttcttattttttgagaggacaggacaatatgaatgttttattatgctctatcaacacattaaaaagattatatgatatatctgctgtggaagtaggtcaacatttatattggcaaatacggagttttcaagtacatgcccaagtacttattact

SEQ ID NO: 260912 - DNA, 406 bp, Glycine max
caagattcagcaagtgcgttttggattcagagaccgaaatacttcgagatggcccgtacaaagcaaactgctcgtaagtcaactggaggaaaagctcccaggaagcagcttgcaaccaaggctgcacgtaagtctgcaccaacaactggtggtgtgaagaagcctcatcgttatcgccctggaactgttgctcttcgtgagattaggaaataccagaagagcactgagctcctaatcaggaagcttcctttccagaggttggttcgtgaaattgcccaggatttcaagactgatctgcgtttccagagccatgctgtgcttgcattgcaagaggctgctgaggcataccttgttgggctctttgaggacactaacttgtgtgccattcacgccaagcgtgtgacta

SEQ ID NO: 260913 - DNA, 358 bp, Glycine max
gttcttgtgaacaacatggcgatggctttcaaaatggccactactgggatgtgggtgacggatgagtgcaagaactctttcatggaaatgaagtggaagaaggtcatagatacatatcttcaagatcgatgagaagtcaaggcttgtcaccgtgataaggtgggtggtcccggcgagagctatggtgatctcgccgctccttgcccgacgatgattgtagatatgccgattcgactttgatttcgtcaccgtcgataactgccgcagagcaagatcttttattgcatggtctccaacagcatcaaggatagacaaagatgcttacgcaacatcaagatggtctgagaagactctggat

SEQ ID NO: 260914 - DNA, 401 bp, Glycine max
cccacgcgtccgcccacgcgtccgctgatacttgctctggtcatagtttgctgtttttgtcagtgcttaagttctggcaacgataccattacaccaggccaattcatcagagatcctcacactctcacctcagctaatagtgccttcaagctaggattcttcagccctcaaaattcttcaaatcgctacctgggaatctggtatctctctgactccaatgtcatatgggtagctaacagaaaccagccactaaagaagagctcttccggaactgttcaaatttctgaggatggcaatctcgtggtattagatagcaacaaaagggctgtttggtcaacaaatttgacacataatattgcaaccaattcaactgccaaacttttagagactggaaatctagt

SEQ ID NO: 260915 - DNA, 415 bp, Glycine max
cccacgcgtccgctagatcgttcacggccaccaccaggtaagacgcctcccaacatccccaatttttttttttttttttttcttgatgagcttcttttttgcagtgataaatgagagtttgatttgatagactttcatcacatgtccatgaatataacatttccagtaatttgaatctgactaaagactgttttattaattttcagattattttttaatttatttttaatgaactttagaaaaaaaattagtttattataggaaattttacggtgaatttcagaataaattttcatatgatacgactttattaaataaaaagtatctctatactattttattgctaatttacaaatatctcatttttttatatttatggaaaaaaaattggtttcttattataagaataataatt

SEQ ID NO: 260916 - DNA, 410 bp, Glycine max
ctctcttttttctaccttagattccttctccaacaatggctctcgccgtttccactacttcttcctcttcagcagctgctgcagcttctagctccttcttctctcgtctcggatcttcctccgacgcaaaagctcctcaaatcggttcgtttcggtttccggagaggtcgcttgtttcgtctgttgttgtcaatgtaactcaacgacgctccttggtgaggccactcaacgccgaaccgcaacggaacgattctattgttcctcttgcagcaactatcgttgctcctgaggttgagaaggaagaggaagattttgagcaaatagcgaaagaccttgaaaatgcatctcctcttgaaattatggatagggccctcgagaaatttgggaacgacatcgctattgcatttaat

SEQ ID NO: 260917 - DNA, 341 bp, Glycine max
acttactgtactcttgcaagccaccgtctctaagatcttgtttacaaacaaaggtagtagatcaaggccagtggcgagtggagtgatattcatggatgcattggggagagaacacagggtatacctgaagcagggtcccaagagcgagataattgtctcagctggtgcactgggaagcccacagcttctaatgttgagtggaataggagcagaacgtgagcttaggaaacacaacattgatgtggtgttgaatcagcccttggttggacagggaatgtcggataacccgatgaacgctatctttgtcccgtcccctgtccccgttgaggtatccctcatag

SEQ ID NO: 260918 - DNA, 385 bp, Glycine max
aggttcttcaaaatgatattgatttgctaaatcccccggctgagcttgagaggaggaaacacaggctcaggcgtgttgttcagtcaccaaactctttcttcatggatgttaagtgccagggttgcttcaacataaccactgtctttatccactctcagactgttgttgtatgcggaaattgccagaccgtcttgtgccagccgacaggcggccgggcaaggctaaccgagggatgctcctttatgaagaagggagactgagtggtgtgccatctttttttgtctgtgattggagagtttcaggaatgccttcttttgttttggatatggtatgctaattgtcttaaatttgtaagacttgagtctacatacttatccaagacact

SEQ ID NO: 260919 - DNA, 378 bp, Glycine max
ctcacctttctcctaaaacatctccagtgggttcttcttcttctattacaacaacgtcgtccaagaccatgaccatggccatggccacgatcctgctcctgttcacggtcttcgcggtttcatcggccctagacatgtcgataatctcgtacgacaacgcccacgccgccacgtcgcgcagcgacgaggagctgatgtccatgtacgagcagtggctagtaaagcacggcaaggtgtacaacgcgctcggagagaaggagaagaggttccagatcttcaaggacaacctgcgattcatcgacgaccacaactcccaagaggaccgaacctacaagctcggactgaaccggttcgcggatctcaccaacgaggagtaca

SEQ ID NO: 260920 - DNA, 424 bp, Glycine max
gtgtgctctctgtgtggtgtgttcgttcactgcaacaacaacaacaacaacggcgaacgccaacgcaaacgcgaacgcgaataagagcgagaacattctcttcagctcaacccttttctttttcgatggctaatcggcacacgattattctaatgcagacctcgcagaacagagcaactaggacgttcatggattatgaatccataactcaggccatggatggcatatgtgcactgtatgaaaggaaactgaaggagttgaatccggctatcagaaatctctcttatgacattactgatctctacaacttcatagatggtcttgcggacatgaatgccctagtgtatgatagttcaattcacgcttacttgccgcatgatcgactgtggatcaagcaacgaacatttcaacatttgaagaaatt

SEQ ID NO: 260921 - DNA, 371 bp, Glycine max
aaaaaaagaaaagaaaaaggatttgattcagtcacaacaaaaaaagaacaaaaaaaatccaaatcatcgatgggtggtaaatctggcgtggtttggattttgctggcgttgatcgccgccgcttggtgtctgttaactccagcgagggcgaattcgacgacaatatatgaggagctccgggcgcagggtcttccggtggggcttcttccaaagggaatagcgaagtactcgatgaacgcgacgagcggggagttcgaggtgtggatgaaggaagcgtgcaacgcgaagttcgagaacgaggtgcactacgactccaatataaagggtgttcttggctacggtcggatcggggaattatccggtgtgtcggc

SEQ ID NO: 260922 - DNA, 387 bp, Glycine max
gtcaggctggtcctggattccagttatttggttctgatgcggatgtgtctgatgcgttggtccatctgcagcatggtcctatgaattgctcctcgtcactaaatggttatgcattggctcccaatactgctttgggatctggtagtatcttgcaagagtcctctgctggtcggtcagatgctgatttgaatggtggtttggtggacaatcctttggcctttggtggagatgatccctcacttcagatttttctccccacaagaccagcagattcatccatgcacaatgaattgagagatcaagcaagtgtggctaatggtgtctgcactgaggaggattggatatccctcagtcttggaggtgggactggtggtaacaatggtgatg

SEQ ID NO: 260923 - DNA, 358 bp, Glycine max
ccacgcgtccgaaaaataaaggaatgcttttgcgcttaaagccaacatctgctgatgtagtttatagtgaggtcaaggaagtgagttaattgatgacaaatcaactcaactcaaagatgttggttctgtgtcacccatatctctggcccgaaagaagtttatggtagatatgctgctcatctgaagaattcactgggaaatggtggagctaaatctcgaatatctcttatttaaaagggaagtacttttggattggaattctacctcgtgcatccattggagtttcgaacatgttctttctgataaccaaccaggcaggctgagaggtcaatatttgaaaagaagtaattggggagac

SEQ ID NO: 260924 - DNA, 399 bp, Glycine max
gaaaaacggactgcatcttcaacctctcgcattccaccgcgaccaaagatcgtctctgtttcaaaccagttctgttttgatcctctgcgacttgtttctctgcttctgcgagctagctattgttcggaaaagcaatggcaagtgcgttgagtagcagagttgaatctgttcgaaactctccctcattaagattttctctcaactgcatcagagcccttagctcttcttcttcttcttcttctgctgctgctgcggtttcttctggtgagaaccctaataaatcaaagcgaaggaagaagaagaacttgttcgaggtggctcagttcttacctaactggggaatcggctaccacatggcttagactcactggaatgaagtttcttacgaaatcactaaaa

SEQ ID NO: 260925 - DNA, 387 bp, Glycine max
ctttcctttcactttgttgtttgtttgtgttatcttgacttttgaaacgtgagactgagaatggaacgtggggttcttgatagtatcattaataggctgcttgaagtcagaggcagaccagggaagcaggtgcaactttctgaggctgagatcaagcagctttgtcttgtctccagggatatcttcttgaggcagcccaacctcttggaactcgaggcaccaattaagatctgtggagatgtccatggtcaatattccgaccttctgcgactttttgagtatggtggattgcctcctcgttctaattacttgtttctaggggactatgttgatcgtgggaagcaaagtttggagacaatatgtctccttctggcttataaaataaaa

SEQ ID NO: 260926 - DNA, 400 bp, Glycine max
cccacgcgtccgcccacgcgttcgttgtcgcgtgggtttgccttgtgccgtttgtgttgttttcgggacgaagaagaagatggtgtcaggttctggaatctgcgcaaagcgggtggtggtggacgcgcgccaccacatgctgggtcgtctagcctccatcgtggcgaaggagcttctgaacggccagaaagtggtggtcgttcgctgtgaagagatttgcatctcgggcgggctggtgaggcagaagatgaaatacttgaggttccttcgcaaacgcatgaacaccaaaccctcccatggccccatccacttccgtgccccctccaagatcttctggcgcaccgttcgtggaatgataccacacaagacaaagcgtggggaagctgctcttgctcgtttg

SEQ ID NO: 260927 - DNA, 271 bp, Glycine max
gtatacaatgtgcatgaaatgactgatggactgtataaaaggtagatgagcgagaactcatacaaatgaggattataaacacacaaaaagtgaacttgacacatgactaagaagactaagaactgatgctacaatggaagaaccaagcaaaccaccacttaaagttgaacacacacacctcttaattgacggaaaatttgttgatgctgctactggcaaaactttaccaacgttggaccccaagacaggagatgtgatttctcatgttgct

SEQ ID NO: 260928 - DNA, 330 bp, Glycine max
gaaaaaccaaagaagattgaccttggtttcttcattgaggatctcaaggctgctctgtcgttcttttctttgtgctggcactactactcctttgttttctagaggcggaagtggtgctcttggcgcagggctcagtaaattcagcactgctgctgccattgaagaaccaattaaaccaccacttaaagttgaacacacccagctcttaattgatggaaaatttgttgatgctgctactggcaaaacttttccaacgttggaccccagtacaggagatgtgacttctcatgttggtgagggtgaccatgaagatgttgatcgagcatttgc

SEQ ID NO: 260929 - DNA, 408 bp, Glycine max
ctaactcccgaccctgttcccctctcgtatccgtcatgaaaggaggaaagtccaagaccgaatctaagagagccgatcccaaacttgctgtgaataagaagggagccgccaccaaggctaggaaacccgccggcaaggggaaggcagcgaaagaccctaacaagccaaagaggcctccaagtgctttcttcgttttcatggaggagttcaggaaggtattcaacaaagaacatcctgaaaacaaagcagtgtctgctgtgggcaaagctgctggagcaaaatggaagaccatgtctgatgctgaaaaagcaccttatgtggcaaagtctgagaaaaggaaagtggagtacgagaagaacatgagagcctataacaagaaacaagcggaaggtcctactggtggggatg

SEQ ID NO: 260930 - DNA, 465 bp, Glycine max
tgtatatatataggtgcacataccattggtactacagcttgccagttcttcagtaacagattgtacaacttcaccgcgaatggtcctgacccttccatcgacccttcatttctttcccaactacaatcactatgccctcaaaacggtgacggttcaaaacgagtagcgctagatacgggtagtcaaaccaaatttgatttatcttactatagtaatttgaggaattctcgtggaattctgcaatctgatcaagcactatggagtgatgcttccacaaagacaactgttcagaggtacttgggcttaataagagggttacttggattaacattcaacgtggaatttgggaagtctatggtgaaaatgggcaacattgagttgaaaaccggtaccgatggtgaaattcgcaagatatgttctgccatcaactagatatatagccacttcaaacaattaataattaaa

SEQ ID NO: 260931 - DNA, 407 bp, Glycine max
agcacagacacagaaaaatggctttaacacttagctcttcaatttgccttgtcgaccagaaagaaaccaaactcccaaatgccaaagacgaggttcccaccaaagtgttatactttggaaaaaccaacccatctttccgtctcagagcaaagagttgcatgcaacaaacacacgtcacacgaaacaacagctttaactccgaagtcacgatgatgaacgagaaaagggagaaggtttacgctccatcggttgcacatagccacaatgattcaatgagagtgccagtgtttgtgatgctgccattggacactgtcactatgggagggactctgaataagccgagagcaatgaatgctagtttgatggaccttgaaagtgcatgagtggaaagagtgatggtggatgct

SEQ ID NO: 260932 - DNA, 413 bp, Glycine max
  unsure (1)..(413): unsure at all n locations
gaaaggctagttaaggccagtttttttgttcacgagacctatggtgcctataggagcattgaagacttctgggatggtgaactctgagcaatatgcatctttgagacgttgaaaaatacattgctcctagagcaaatttattctgccttatacccactagttgtagtgattcaagtgagattttgagaagtgttactattgatggtaacaccgaataagtagccaagagttatttttcatttaatgattgtatcttttattcaatataataaagtgagttgagtgaanaaaaaaaaaaaaaaaaaaaaaaaaaaaaaaaaaaaaaaaaaaaaaaaaaaaaaaaaaaaaaaaaaaaaacaaataaaaaacaaaaaaaaaannnaggggcggccgttttaaaggatccaagttta

SEQ ID NO: 260933 - DNA, 409 bp, Glycine max
cccacgcgtccgcttttctgatcatctcttatgggtttgaatgatgcatgtaaaatgttgtaggaaagagagggacctgtgagtgtcacaaacatgggagaggagaatgttaaacaaccgttgttggagaggaagtactacaaggactgcccaggttgtaaagtggatcaagccaaagagttgagtgagggaaagggtgtacctgttaaaaatctttttatcatgtggatggtggtgctgtgtgctgcactgcctatatcatctctctttccattcctctatttcatggtaagggatttcaatattgcaaaaacagaagctgatattagttcttatgctggttatgttggctcttcattcatgcttggcagatgtttgacatctgtattatggggaattgtagccgatc

SEQ ID NO: 260934 - DNA, 410 bp, Glycine max
cccacgcgtccgaacaacacaggcgcagacgcaaacgcaaacgcaaacgcaaacgcaaacgcagagcgtgatccattgacgaagatggtgcaacgtgtcacctaccgaaagcggcacagctatgccaccaagtacaaccaacacagggtcgtcaaaacccctggtgggaagctcgtttatcagactaccaagaagagggccagcggacccaaatgccccgttactggcaagaggattcatgggatttcacacttgaggcctgcagagtacaagatgtcaaggttacacagaaaccgtaggactgtcaaccgtgcatatggtggagttttatctggaagtgccgtcagggagaggattatccgagccttcttagatgaagagcaaaagaatgtgaagaaggtgttgaagat

SEQ ID NO: 260935 - DNA, 376 bp, Glycine max
ataagggttgaaataaaactgcattatcttaattcttaggtagtaataagctacattgaaacaacaaatctagttgacgacacaacagcagcaaataaaagaatacacatgtagatactaattatgacaaatcatgaatcataaaaaatgtccaacaagatgaagatccatgtcaatttttaagtgggttcattctctccctcagatagtagagtttggcccttctcactctcttcttgtcaagcacctttatctcctttatgttaggtgaatacagagggaataaagatttaattccaaccccagccacctgcctcctaattttgaatgtagtattgagtccaacattacgccttgcaataacaatgccttttat

SEQ ID NO: 260936 - DNA, 459 bp, Glycine max
  unsure (1)..(459): unsure at all n locations
agaaatttaagtgaggagctagagaatgatgatgaagtctgctatgtgtgcagtggtggttgtagcacttcttcttctggcggaggtggggcccatggctgaggctgtgacatgcaccccaacagagttgagtccgtgtcttccagcaatcacttccggtgctaaaccttccaatgcttgttgcacgaagctgaagcagcaaaaaccatgcttatgtggctacctcaaaaacgctagcttgaagcagtatgttaactctcctaatgcccgaaaaaccgttgcttcttgtgggattccctttccaacttgttaattaattaagccttcttataattaaagtgtgggatatatatatatatatagataaacagtttaatttatacacactntgatcctacaaagcatcttgacacaagcattcaataagatttcaccactttatcgcaacattttaacatg

SEQ ID NO: 260937 - DNA, 442 bp, Glycine max
caggacccagacagcaaggttgcctgcgaaacatgcaccaaaaccaacttggtcatggtctgcggagaaatcacgaccaaggccaatgttgactacgagaagatagtgcgtgacacctgcaggaacatatgttttgtctcaaacgatgtgggactggatgccgacaactgcaaggtcctagtcaacattgaacaccagagccctgatattgctcagggtgtacacggccacctcaccaaaaaacctgaagaaattggtgctggtgaccagagtcacatgtttggctatgccactgatgaaacccctgaattgatgccattgagccatgttcttgcaacaaaactcggtgctcgtctcaccgaggttcgcaagaacagaacctgcccttggatgaggcctgatgggaagacccaagtgaccgttgagtattacaatgacaatg

SEQ ID NO: 260938 - DNA, 456 bp, Glycine max
ttccaactccatttacgatttcactgtcaaggacatcagtggaaatgatgtgagtctgaatgattacagcgggaaggttctactgattgtgaatgtcgcctctcaatgtggtttgacacagacaaattacaaagaattgaatgtattgtacgagaagtacaagaatcaaggatttgaaatcttggcatttccgtgcaaccagtttgctggacaggaaccaggaaacaatgaagaaattcaggaagtagtttgcacaaggttcaaggctgaatttcctatctttgataaggttgaagtcaatgggaagaatgcagtgccactttacaagtttttaaaggagaagaaagggggaatatttggcgatggtatcaagtggaacttcacaaagttcttagtaaacaaagaaaaggaggttgtggacagatatgcacctaccacctcacctctgaaaatcga

SEQ ID NO: 260939 - DNA, 425 bp, Glycine max
atggcaactatgactggtgtgagcctttcatgccccagggttttcttcaacgcatcagcctcaccgcaaaacgcgcatgctgtaaagttctcacttccacccagccaagcagtgcgaccgggtagtatcaagttgggtcgcgtgatgaggatccgacccgttcgcgctgcgcctgagcgcatatcggagaaggtggaggagagcataaagaacgcgcaggaggcgtgcgccggcgatccgacgagcggcgagtgcgtggcggcgtgggacgaggtggaagagctgagcgcggcggcgagccacgccagggacaagcaaaaggaaaaggactccgacccgctcgagaattactgcaaggacaacccggagaccattgagtgcaaaactttcgaagactgagcatgcatgcttcgttcgtacgtgag

SEQ ID NO: 260940 - DNA, 418 bp, Glycine max
aacactctctctcctccttccacctagcagtggtgacaaccaaaccaagtgtcccctcctttctcttgttaacaggtagcagagttagtgagtaatggcaggaggacaactaggagtgcttaatgcactcgatgtggcaaaaacacaatggtaccacttcactgctattgtgatagctggaatgggattcttcactgatgcctatgatcttttctgcatttcccttgtgaccaagttgttggggaggttatattacacagacataacgaacccgaagcctggtgttcttcctcctaatgtgcaagctgctgtgactggtgttgctctatgtggcactttagccggccaacttttctttggatggcttggtgacaagttgggaaggaaaagggtttatggcttaactcttatgcttatg

SEQ ID NO: 260941 - DNA, 457 bp, Glycine max
ataatatcaggatagcagagacttaacatcaaataatccaagtgtaagtttggctagcacgtcacgaggcatttgttctcctgacatttctgtgactcttccaaatacttcaccaaagtcctttcggtctgacaatacaatttctgaaaggtcacatgcgccaccagacccaacaaacatgcaagtgaaaggatctgcttcagatgtatttcgtgtcagtgtttccagtgccccaagtacatctagtcatggatctgcacctgatgactgtgatgctttgggggatgtatacatatggggagaggttacctgtgaaaatgttaaagttggtgctgataaaaatgtaaattatgtcagccccagggcagatgtacttctccccagaccactggaatccagcgtagttttagatgtacatcatatagcatgtggtgttagacatgcttctctagtcact

SEQ ID NO: 260942 - DNA, 433 bp, Glycine max
ctttggaatgcagcatctaagcttctaatggctgtaggttacatactccggggcatgactatgccagggtccctatacatagggtctattttagttggcatgtgctatggaatgaggcttgccattacagtcccaacaacctcaaatttatttgcactcaaatattatggtctcatatacaacattctcattcttaaccttcccttgggatctatcattttctatggtatgcttgctggcatactctatgatatctatgcaactacaacaaagggaggaggcaacaccttttattgtacgacaatgttacaggctaacctatgttgtcatgactggagcttgcattgttggcttcttcttatacaatttgttgtgaatcatttactagaactattacacaaagatttccataatcaataaatccttagcaaca

SEQ ID NO: 260943 - DNA, 456 bp, Glycine max
cccacgcgtccgcccacgcgtccgcccacgcgtccggtcctcttttctcggctccctttttctctctgtctctctctctcggtctcgctcttcttctcatcaagcacagagttacagactcaccgatcttccgattctctttcgtcttggtttatgagctcgaaggagagacccactcttggtggcacgcggattaagacccgcaaacgaaatattgctgcgccgctggaccctgcagcattctcggatgcagtggtccagatttatttggataatgctggtgatctggaacttattgctaagagtattgaatcttcagaccttaacttttcaagatacggtgacaccttttttgaagttgctttcactgggggtcgtacacaacctggaactaccaagcctgatgagggggaccgccacccatactctataatagagtgtgagcctaagcgtgaa

SEQ ID NO: 260944 - DNA, 457 bp, Glycine max
agaagattgaacttaaacaaaaacaacacgaaagaaagaaagaaagaagatgggaattgcagtgggaggtgttgatttgctgagtgaaaaagcggcgatgatgagagagtgtctgcagaagagtgaaaccatcacagacaacgtcgtcaccattctcggttccttcgaccaccgtctctccgccctcgaaaccgccatgcgtccaactcagattagaactcactctattaggaaggctcatgagaatattgataggactttgaaggctgcggaggttatattggctcacttcgatcaatatcgtcaggcagaggcaaaaatacttaaagggccacatgaagacttggaaaactatcttgaagcaattgataagttgagaagcaacattcagttttttggtagtaagaagggtttcaagagtagtgatggcattgtcgtgcatgctaataatttgcta

SEQ ID NO: 260945 - DNA, 457 bp, Glycine max
  unsure (1)..(457): unsure at all n locations
ccggnccggaccacgcgggccgacacacgcgtgcggttgaatacctatgggaacacacggcactggctgcattgctgtgaaggggaacactctgggtggttgtgtgcatacttgatgtgcttcccatactaatacctgagcgtacactggagtgcttaaaccacgtgatcggataatgggtctggactagcctcacggacgacatgtgactcatggcttcatgacacccactgctgcgtgcgtctggcccgtcaatttatcatgcagctatggctcatcgacttgatgaatcaacaagtcttattgattatgatatgcgggagaaaactgctactgtggttcattcaacactcattgctgccggtgctagtgcttatcctcgcgacatagactacactgctctgagataaattgcagctgaagtacgtgctcttcttatgatggatatggcttatat

SEQ ID NO: 260946 - DNA, 448 bp, Glycine max
tttcattcacccttggtgtgaaacagatgatttgctgctgtaacaaaatggatgctactacacccaagtattccaaggccaggtatgatgaaattgtgaaggaagtctcttcctacttgaagaaagtaggatacaaccctgacaagattccttttgttcctatctctggttttgagggagacaacatgattgagaggtccacaaaccttgactggtacaagggtccaactctgcttgatgcacttgaccagattagtgagcccaagaggccctctgacaagcccctcaggcttccccttcaggatgtgtacaagattggaggtattggaactgtgccagtgggacgtgttgagaccggtgtcttgaagcctggaatggtggtgacttttgcaccaactggactgacaactgaagtcaagtctgtggagatgcaccatgaatctcttac

SEQ ID NO: 260947 - DNA, 461 bp, Glycine max
gtccctttttacagagtcatgactatggctggagctttgagtctctcccaattcccagttcgtgggtctgtttctttgcccaaaagaagaatacccagaagaagcttttgcattaagggcatgtcagaaatctcttccactttttctgtgagcacccaacaagaagaaccaacttctaatgcttcgtcagtgacaattgcacctccccccaacttcaagccccctgagcctaaacgctttgcaatcagacctgacaagaccagtgaagtatttggagctttgcttcctttgctctttcgctttgctaccggagttttcgtttctgggtattctttttcaattgtttctaaggatgaaattcctccagatgaatatgctttggaacttaatggcgttaccataaaagaaacagcaaaattaggccctcgcccagagaagcctattgagatatatgaatttga

SEQ ID NO: 260948 - DNA, 458 bp, Glycine max
  unsure (1)..(458): unsure at all n locations
agaaaacagcatcgaacccgtcgtagcagaaaaacttgtcaccatggtttcttccgacaaggatccacgagaggatgtccttcaagcctggtacatggatgatagtgatgaagatcaaagactcccccaccacaaagaacccaaggagtttgtctcgttggaccaacttgctgaacttggagtccttagctggaaactagatgctgataaccatgaaaatgatccagagctgaagaagattcgtgaagagcgtggttacacctacatggatgtttgtgaggtctgcccanaaaagttgccaaattatgaacagaaaatcaaaagcttctttgaagagcatcttcacactgatgaggagatccgcttttgtgctgctggaagtggctattttgatgttagggatcgcaatgaagcttggattcgtgtgtgggtcaagaaaggaggaatgatcatcttac

SEQ ID NO: 260949 - DNA, 466 bp, Glycine max
cccacgcgtccgtgctactctttacaaggccctagttacagatgccgacaacgtcatcccaaaggctcttgattccttcaagagtgttgaaaacgttgagggaaatggtggcccaggaaccatcaagaagatcactttccttgaggatggagaaaccaagtttgtgctgcacaaaatagaaagcattgatgaggcgaacttgggatacagctacagcgtggttgggggtgctgcattgccagacacggcggagaagatcacattcgactccaaattggttgctggtcccaatggagggtctgctgggaagctcactgtcaaatacgaaacaaaaggagatgctgagcccaaccaagacgaactcaaaactggaaaagccaaggctgatgctctcttcaaggccattgaggcttaccttttggcccatcccgattacaactaatcctcttcaacttacttgttatca

SEQ ID NO: 260950 - DNA, 269 bp, Glycine max
tttagcggggaaaaaaaagggacacaaaaaaaaaaaaaaaaaaaaaaaaaaataaaaaaaaaaaacggggcgggcgacttaaaaagaaaaactgtaagtaccctggcatggaagaaagaaaagatgaagtcgtgaacgcaaatgcaagagaatgagcggaagaatacaaaagaggaactggaaaaacagctgagagacagaactgaaagggaggaaaacataaagcgcgaactacagatggcgtaatagagaaaaggcccggaccaaga

SEQ ID NO: 260951 - DNA, 345 bp, Glycine max
ctctctatgttctatcataccttttctttgtggatacaaatgttcgcgaagaccatcacagatatgatcatcataatttaggtaaaaagctctggcaccatacaataaaccatggcaaagacccatgacatgaaaagaattaccaagaatcagcaattgtgaatcttaacggctagcattttaaatacactcagaccctcgacaactacctcatacagaacgattaaacgcttgaacttatgattcgcgtactacatagcatgcagatcatggtaaacactgtcactgcgacaaacattactctatatttccaaagctcagagactatagacaacctcaaggaca

SEQ ID NO: 260952 - DNA, 446 bp, Glycine max
  unsure (1)..(446): unsure at all n locations
cccacgcgtccggnggacatgcccgcgaaacagaagggcgaaggggcaaacacaactttgggggggcgaaggagagcgagagagaaaaaaacggcggggatcttcagcagttccgaggtgtcgccgccggaggagctggtggctgccggcagcagaacgccgtcgccgaagacgacggcggggaagctgctgaaccggttcgtggagaacaaggcgtcggcggtgtcgctgcaggtgggagaacacgtgcagttggcttacacgcaccacaacgagtcaccgtggcatcccagatcatttgctgttaaggatgagatattctgcttgtttgagggggctatagacaatttgggcagcctgagacaacagtatggactggccaagtcagccaatgaagtggttttggtgattgaagcttacaaagctttacgtgatcgagcaccata

SEQ ID NO: 260953 - DNA, 411 bp, Glycine max
atcgactcgtacctcgttgctggtaccgatggcgtgggaacgaacgtgatgcttgccttcgaaactggaatccacgatactattgggattgacctggttgcgatgagtgtgaatgacattgttacttcgggggcgaagcctttgtttttccttgattactttgccactgggcaccttgacgtggacgttgctgaaaaggttataaaaggcattgttgatggttgtaagcaatctgattgtgttcttttaggaggagagactgcagagatgcctggtctctataaagaaggtgagtatgatcttagtggctgtgcagttggcattgtgaagaaagattctgtaatcaatgggtcaaacattgttgctggtgatgttattattgggcttccatctagtggagttcactctaat

SEQ ID NO: 260954 - DNA, 455 bp, Glycine max
cccacgcgtccgcccaactcaatttttctctcaaccggcccaatttagcataagcccagcatggccaccgcaacagcagcagccacctcgtccttcatggggacgcgcctcctggaggcccactccggggcggggcgggtgcaggcccggttcgggtttggcaagaagaaagccgccgccccgaagaaagtttccagggggtcgggctctagctccgataggcccctgtggtatccgggcgccaaggcgcccgagtacctggatgggagccttgtcggagactacggattcgacccatttgggctagggaagcccgccgagtacctgcagttcgagttggactcgctggaccagaaccttgcgaagaacgtggctggggacatcattgggaccaggaccgagctcgcggacgtgaagtccacgccgttccagccctacaacgaggtgttcgggct

SEQ ID NO: 260955 - DNA, 464 bp, Glycine max
ggagggggcagggaatttcaattatatgtatctggtgtattcacggggagatgtggcacagcactagatcatggtgtcgtggctgttgggtatggaacagctaaaggtcatgattattggatcgtaaggaattcatggggttctagctggggagaggatggctacatcagattagaaagaaatcttgctaacagcagatcaggcaagtgtggaattgcaattgagccatcttatccccttaagaatggtccaaatccccctaatcctggaccatcacccccttcacctgtgaagccgccaaatgtctgtgacaactactacagctgtgctgatagtgctacttgttgctgtatttttgagttcggaaatgcttgcttcgagtggggttgctgtcctcttgagggtgcttcctgctgtgatgaccactacagttgctgccctgcagactatcccatctgcaacac

SEQ ID NO: 260956 - DNA, 406 bp, Glycine max
gcgcttgtgttgtttttgtgtctcataaatcccacactcagtcactattgctccagcctccacctgctgaaagaaactcctaattgtcaattgttgtaaagaaaagaactgaaaacactgacactgttattctctgaattttctcaccatctacaactgaagttttaaccaatatggaaactgaaaagtctaatgtttcaaaggctgaagaatttaaactccttgccaatgaagtgttcaatgctcgaaaatactcccaagccattgatctatatacacaagcaattgagctgaacagtcaaaatgcagtttacttttctaatcgggcctttgcccatcttcggcttgaggaatatggtagtgcaatacaagatgccacaaaggctattgaaattgatcctaaata

SEQ ID NO: 260957 - DNA, 432 bp, Glycine max
taaaattctagggttccgaaatggacgctgacggaaagatcaagaagggcgccggcggaagaaagggcggcggcccaaagaagaagccggtttcaaggtccgtcaaagccggtctccaattccccgtcggaagaattggccgttatttgaagaaaggaaggtacgctcagcgtgtcggtaccggtgctcccgtatacttggctgcagttctcgaatacctagctgccgaggtgcttgagttggctgggaatgcaccacgtgacaacaagaagaacaggattattccaagacacgtgcttttggcagtgaggaacgatgaggagttggggaaattgcttgctggagtgacaattgcacatggtggcgtgcttccaaacattaaccctgttttgttgcctaagaagtctgagagggcttcaaggaacctaaatc

SEQ ID NO: 260958 - DNA, 461 bp, Glycine max
atcactggtaaagaatatgcaagaaacagtgtattattagaaagtacataaaattactgtatcatttaatcataaatcagtcacatttgataacttttataaaagcaactttcaaaaattatttttgaggataatttctgatttatggataatgtaaaactttttacaataaaagtgtatgaaaaataaactcctacaatgataaaaaaaaatgtgcaaggagtgtattattagagactctgttgcatttctcatcatatatataatatatataagtaaaaataatttcatattaattaaaaaaagcaattaacataatttacttttactaatcttaagtaaaaaaaaagttatttttaaaatgtctttcattataaagtactttatatcatgaataaaaaagtcattgaaaataggattagaattaaatgaaaaatattttaagaataataacattaaat

SEQ ID NO: 260959 - DNA, 472 bp, Glycine max
  unsure (1)..(472): unsure at all n locations
cccacgcgtccgggaacaccgggcggtctgaaccggcagggtcttccgggggaccggaagccggacggcggcgacaagaaggagaagaagttcgagccggcggcgccgccggcccgcgtgggccgtaagcagcgtaagcagaagggcccggaggcggcggcgcggctgccgacggtgacgccgctgtcgaagtgcaagctaaagctgctgaagctggagcgcataaaggactacctcttgatggaggaggagttcgtggcgaaccangagaggctgaagccgcangaggagaaggccgaggaagacagatccaaggtcgatgatctccgaggttctcctatgagcgttggtaacctagaggaactcattgacgagagtcatgccatagtttcgtcctcggtggggcccgagtactatgttggtatcttgtcttttcgtcgataagatcagctcgagcctggatgcgctattt

SEQ ID NO: 260960 - DNA, 461 bp, Glycine max
ctttagtggaacttggtttaagcaaatgcgttggagtgaccaacaagggaattgtgcagctagtatctggctgtggctatttgaagatacttgatttgacttgttgtcgcttcatatctgatgcagcaatctctactatagcagactcttgtccagaccttgtctgtctgaagctagaatcttgtgatatggtgactgagaattgtctttatcaacttggattaaattgctcgcttctcaaagagcttgatcttactgattgctctggtgttgatgacatagctctaagatatctatcaagatgttcagaacttgtaagattgaaattaggattatgcacaaacatatcagacataggattggcacacattgcttgtaactgcccaaaaatgactgaacttgatctctatcgatgtgtacgtattggagatgatgggctagcggcactaacgagtggatgc

SEQ ID NO: 260961 - DNA, 468 bp, Glycine max
  unsure (1)..(468): unsure at all n locations
gggcacagaaatatggattgaaaatcatccttgatcttcatgctgcacccggttctcaaaatggttttgagcacagctcttcaagagatggttcacaagaatggggaaaaacagatgaaaccattcaacaaacagttcatgttatagacttcctaactgcaaggtacgcaaaatgccaaagcctttatgctgttgagctaataaatgagcctctctcacctggtgtgacactagaggccttgaacaagtactataaggctggttatgaagcagtgcgcaagcactcttccacagcttatgtggtgttatcaaataggataggaccctcaaatcctanggaactcttccctcttgcaaatggccttatgcgatctgtgattgatgttcactactacaacctctttcaagatgtatttaatgacatgactgtccaacagaacattgatttcatctacaacaatcgctcat

SEQ ID NO: 260962 - DNA, 468 bp, Glycine max
ttgacattgataagcactctgaatggctgctatggcattccctgggttcattacaagggtcggcaaggagatttctacattttggtcatggacatgcttgggcccagtctttgggatgtatggaattctgttggtcaacaaatgtcaccaaatatggttgcgtgcattgcaatagaggcaatatcaattcttgagaagctccacttgaaagggtttgtgcatggagatgtgaaacctgaaaactttttgcttggtcaacctggatcagctgaagataagacgctatatcttattgatcttggtctggcttctaaatggaaggatgcatcatctggtctacatgttgattatgatcaaagacctgatatattcaggggaacaataaagtatgctagtgtacatgcacatttatgtaggactggaagtcgaaaggatgaccttgagtcactggcatacacactaatattt

SEQ ID NO: 260963 - DNA, 465 bp, Glycine max
gtctctgccgtcacaaaaaagagaaaagtctccgtgtcgtcgtgactaggagggtgagtgagtgtttgtgtaaatcggagaaattgttgggctattcaagagatcggcagcggcgtcatgggtggagatggagccacggcaaacgcggaggcgcagtacgccacggcgaacatatcggtgtggtgggacatcgagaactgccacgtccccaagggttcggatccgcacgcgatcgcgcagaacatcaattccgccctcgttcgcatgaactactgcggccccgtctacatctccgcctacggcgacaccactcgcatccccgcctctgtgcagcacgcgctctccagcaccggtatgtccctcaaccacgttcccgccggcgtgaaagacgcaagtgacaagaagattcttgttgatatgctgttctgggcagtggacaatcctgcacctgctaattttttatta

SEQ ID NO: 260964 - DNA, 465 bp, Glycine max
caaagctttgacagttgttcatcgattatggtctgaggtgcctggaaagctgaaagattacatatgtcgtcccaagttcaatggatatcaatctctgcatactgttgagatgggtgaaggcaaggttccccttgaagtacaaattcggaccaaagatatgcatttacaagcagaatttggatttgctgctcattggagatacaaggaagatgattgtcagcattcttcatttgtgcttcacatggttgagtgggctcgatgggttgtcacctggcagtgcgaagcaatgagtagagattggtcatctgttggatatgctgattcagtcaatcccccatgcaagttcccttcccatgctgatgattgcccatattcttacaagcctgattgtggtcagaatgggcctgtgtttgttatcatgattgagaatgataagatgtctgtccaagaatttagcgcaaactc

SEQ ID NO: 260965 - DNA, 466 bp, Glycine max
cccacgcgtccggcttgaaatcctatgtcaacaaagggcactggctgcatttcatgtagatgaaaacaaatggggtgttaatgttcaaactttatctggttcccctgctaattttgcagtatacactgcagttcttaaaccacatgatcggataatgggtttggacttgcctcacggaggacatttgtctcatggattcatgacacccaaaaaaacgtgtatcagccacatcaatttattttgaatctatgccttatcgacttgatgaatcaacaggtcttattgattatgatatgctggagaaaactgctactctgtttcgtccaaaactcattgttgctggtgctagtgcttatcctcgggacattgactaccctcgtatgagaaaaattgcagatgaagtaggtgcttttcttatgatggatatggctcatataagtgggcttggtgctgcatctgtactttc

SEQ ID NO: 260966 - DNA, 434 bp, Glycine max
  unsure (1)..(434): unsure at all n locations
gaggagggtgtgtttctggtttttggaaatttcagcccccatcgaaaaacaagaagccccaacgatagtaatcatcgaaggaatttgaaaggtcgaaacttgagcatctgggatcgcgaaattggggattttggttaaaagggtataatcttcggaactgattgatggcaaaactgtacgtgaaggcggtgccaccggcggatctgaacaggaacacggattggttcacgtaccctggcgtttggaccagatacatcctcatccttttcttttcttggatcctcgtactctctgtcttcggntgttctcctggcatcgcttggaccatcgttaatctcgcacactttgctgtaacatatgacttttttcactggaagaaaggaactccatttgcagaggaccaagggatctacaatagattgacttggtgggag

SEQ ID NO: 260967 - DNA, 425 bp, Glycine max
gaggagggtgtgttactggcttttggaaatttcagcccccatttaaaaacaaaaagccccagggatagtaatcggggaacgaatatgaaaggtcccatcttgagcatctgggatcgcaaaattggcgattttggttaaaaaggtataatcttcggaactgattgatggcaaaactgtacgtgaaggcggtgccacctgcggatctgaacaggaacaccgattggttcacgtaccctggcgcttggaccaaatacatcctcatccttttcttttcttggatcctcgaactatatgtcttcggttgttctcctggcatcgcttggaccataattaatctcgcacactgtgttgtaacatatgacttttttcactggatgaaaggaactacatttgcagaggaccaagggatctacaatagattgact

SEQ ID NO: 260968 - DNA, 455 bp, Glycine max
cccacgcgtacgcccacgcgtccgggacttggcctggcaatttgtagggcgttcgtaaatcgtatggaagggcatatttgggttgaaagcgaacgtattggtaaaggatgtacagtcacttttattgtaaaacttggaatcccagaccgatcaaatgaatttaagctaccttttgtacctaaagtaccaggaaatcatggatctacaaactttgctgggctcaaagttcttgtcatggatgacaatggggttagcaggacagtaacaaaaggacttcttatgcatttaggatgtgatgtaacaactgcaagctcaagtgaagaatgtctgcgtgttgtttctctggaacatgaagtggtcttcatggatgtttgtacagggttagatggttattaacttgcagttcgtatacatgagaagtttacgaagcatcaagatagaccactgatagttgc

SEQ ID NO: 260969 - DNA, 382 bp, Glycine max
gacaaaccctaacatagcattatgctaagagtctatcaccatcgtactgggggtccgacacatgcttctccccctgaatactttgacctccaagggaacacaacttataaagacgatctatatttaaggaaaatgacagggatgcatcggtggctttgatgcacatgtcatgtggaacattcttacccatcaaatgaaaatgatcacctgtaaagcccactgaattatggtgatggaaatcaaaaaggctcaaaggtgtcaactactgtcaagcctgaaacacaaaaggcacctccacctatcgaagctccagtcatatctttagatgaactgaaggagaagacagacacatgaggtgcaaatgcattaatatgtgaaagat

SEQ ID NO: 260970 - DNA, 455 bp, Glycine max
cccacgcgtccggtttgggattggagggattgacgctgcgtctcttcctgggctctttcgatccatccctcattcctaatcctccaatccaaccacctcagcctcacactcacatatacacatatctgaacgcgtatcgtccctcctatggcttcaaagcgcatcctcaaggagctcaaggacttgcagaaagacccaccaacttcttgcagcgctggtccagtagctgaggacatgttccattggcaagcaacaataatgggtcctgctgatagtccttatgctggaggtgtattcctagtcactattcacttccctccggattatcctttcaagcctcctaaggttgcctttaggactaaggtgtttcacccgaacatcaatagcaatggtagcatttgtcttgatatcctgaatgagcagtggagccctgcactcaccatctctaaggtact

SEQ ID NO: 260971 - DNA, 447 bp, Glycine max
aaaacattctcatcattcacccaacaaaatggctctgcttctgatagtacgcatttcactggtaaccctctggctcggttacaccctataccagcggctacgcttcaagctccctcctggcccacggccctggccggtagtcggtaacctctacgacataaaacccgtccggttccggtgcttcgctgagtgggcgcagtcttacggccctatcatatcggtctggttcggttcgaccctaaacgtcatcgtttcaaactcggagttggccaaggaggttctgaaggagcacgatcagcagctggcggaccggcaccggagccggtcggcggcgaagttcagccgcgacgggaaggatctcatttgggccgattatgggccgcactacgtgaaagtgaagaaggtttgcacgctcgagcttttcacgccgaagcgcctcgagtccct

SEQ ID NO: 260972 - DNA, 430 bp, Glycine max
  unsure (1)..(430): unsure at all n locations
cccacgcgtncgttccaaccaagcccatggtggttgaaactttctctgagtatcctccccttggtcgttttgctgtgagggacatgcgtcaaactgtggctgtcggagtcatcaagagtgttgagaagaaagaccccaccggagccaaggtcaccaaggccgctgccaagaagaagtgattgcatttgggcaattttgctagcacatgtgatcatcatcgtggttactcctttatagtagttttatccttgcagagtcttaagtgttttgtttaagttatatttttaagtttctgccgatttcatgtagccgtaactttcaaaactaggttcttgatcggcggtggtcaattttcattgctggttgtttttgatgagtactgttttttgttttgatgggtaagaagagtctgagatatttcgaatttcac

SEQ ID NO: 260973 - DNA, 422 bp, Glycine max
ctctaccctcccttccctccactttcctccctcttcttcttttgcttctgtttttgaggcgaagaacgatggaattgtaatgctgggaatataattggagaattgggggaggagtaagggaggaaatcatacacaatgcccgagttccccttgagctcgaggttggaaagggtgcaaaatagcttgagagagaatggttctctggtgtatctcaatgtgtatgatcttacacctgccaacaattatctttacgcctttggggttggaatctttcattcgggcatagaagtgcatggtatggaatatggctttggagcacatgaatacccaacaagtggtatatttgaggtcgaacccagaagctgtcctggcttcatcttcaaatgttcagtattgttaggcacgaatgatatgtcttattc

SEQ ID NO: 260974 - DNA, 440 bp, Glycine max
  unsure (1)..(440): unsure at all n locations
ctctaccgtcccttccctccactttcgtacctcttattcttttgcttctgtttttgacgcgaagaatgatggatttgtaatgctgggaatataattggagaattgggggaggagtaagggaggaaatcatacacaatgcccgagttccccttgagctcgaggttggaaaggatgcaaaatcgcttgagagagaatggttctctggtgtatctcaatgtgtatgatcttacacctgccaacaattatctttacgcctttggggttggaatctttcattcgggcatacaagtgcatggtatggaatatggctttggagcacatgaatacccgacaagtggtatatttgaggtctgacccagaagctgtcctggcttcatatgcaaatgttcnagattgtgaggcaagaatgatatgtcttattcagaatgtcgttctttcat

SEQ ID NO: 260975 - DNA, 435 bp, Glycine max
  unsure (1)..(435): unsure at all n locations
caaagattggtgtctcgaacactccttcatggtactcagctggagagctggaatacttgacggacactactaccctgttcatagttgagctctttttcattggctgggccgagggtagaagatgggctgacataatcaagccaggctgtgtcaacactgaccccatctttcccaacaacaagctcaccggaaccgatgtgggttaccctggtggcctttggtttgacccccttggatggggaaccggttctcctcagaagatcaaggacttgagaactaaggatatcaagaatggcaaactggacatgcttgctgtcatgggtgcatggttccagcacatctacactgccaccggtcctattgacaacctctttgcccaccttgcagatactggccatgctaccatntgtgctgctttcacccctaagtgaaaag

SEQ ID NO: 260976 - DNA, 460 bp, Glycine max
  unsure (1)..(460): unsure at all n locations
cccacgcgtccgcccacgcgtncgcttcacaactttgctttttctctcttgcaatgtcctcttcttccttctcccccgccactctcaccaccgagcaggagctttccgtcatcgttgccgcccttaccaacgtcgtcgccggctccacctccgcctccagctccttctccctccccgaattccgccttccacagacctctgatcctctcgccgccgcctgcctaatgccgccgccgccgccgccgagcatggacacttgtcgcgagtgcaacatcgcaggatgcctgggatgcaactttttcccggaggagaaaaagaagcagaagagggccaagaagaagtacagaggcgtgaggcagaggccctggggaaagtgggccgcggagattcgtgaccctcgtcgtgctgcccgggtctggctcggcacgttcggaaccgccgaggatgccgcccgggccta

SEQ ID NO: 260977 - DNA, 426 bp, Glycine max
  unsure (1)..(426): unsure at all n locations
gacccacgcgnccgatcacctataaaanggccgccactgctncactctgcgccacttccaaagcgtctttctcatgagcgaagcccgccccgagaagaagctgcttcatcgcgcttcccaaaatcgcgtttcccaagctccatatcaaacccgtcgctatggctacgctcggcgctcgcatggtggccgacgcacccaccgtcactccaccggcctcgctcgacttcgaaacctccgatttcaagaaagagaagattaacctcgctggacacgacgagtacatcgtgaaaggagggagggatttgttccctctgttgcagggtgctttcaaggggattaagcagattggcgtcattggatggggttcgcagggacctgctcaagcacagaatctgcgggactcgcttgctgatgcaaagtctgata

SEQ ID NO: 260978 - DNA, 458 bp, Glycine max
cccacgcgtccggaggaaagaaagatgttttttaacggatatgggtatcaagggacatcatcatttgagcagacatttcgatgttactctgcttcgtttattgaaaagcccgaaattgaaaatggtgataaaattataatgcctccttcagtccttgaccgtctagcatttctacgtatggattatccaatgatgtttgaactcagaaatggtgcttctgagagggtttctcattgtggggttctggagttcattgcagatgaaggaactatatatatgccatactggatgatgcagaatctgcttttgcaagagggagacatcgtaagagtgaaattcgtatcacttccaaagggaacatatgttaaattacagccacacacaaaggacttttttgatatttccaatccaaaagctatcttagagaccactttgagaaaattttcctgcttgactac

SEQ ID NO: 260979 - DNA, 420 bp, Glycine max
gtgatctccaaaatgcagagcacagttttctctctctccccttccctctctctcccaaaacaacctctcaaacgctctgtctctgtttccacttccaaactcaacgtcattctcactccctcttcattcccatgtcaaccatgttctcttgcttattctccatctttcaaactcgctccctcacactttcaccccttccatgccagagcaacctccgtgccggagagcagcgccggcaacactctgctcaatactctggaacttggagccctgtttgggctctggatcctcttcaacatctacttcaacatctacaacaaacaggtcttaaaggtctaccatttccctttaaccgtaagcacccttcagttcgctgtggggtctctcttcgtagcattcatgtggagtttcaatctctat

SEQ ID NO: 260980 - DNA, 293 bp, Glycine max
ctcacgcgtgcgaacgaaaaaaaaaagaagagcaattttccctcaccaaagaagaagaagcgggctatggccgatcaacttaccgttgatcagatttacaaggtcaaggaagccttcggtttgttcgacaaggacggcgatggggcgttctatgtctctctctctcaagttatgcgtataagagctgatttgatttatagcgtcgaggtttttgcagatcggagatcctttttgtgataatggaataggaaaattagatgaattctgattctatatcacaatgctttttttgt

SEQ ID NO: 260981 - DNA, 376 bp, Glycine max
tgtatatatataggtgcacataccattggtactacagcttgccagttcttcagtaacagattgtacaacttcaccgcgaatggtcctgacccttccatcgacccttcatttctttcccaactacaatcactatgccctcaaaacggtgacggttcaaaacgagtagcgctagatacgggtagtcaaaccaaatttgatttatcttactatagtaatttgaggaattctcgtggaattctgcaatctgatcaagcactatggagtgatgcttccacaaagacaactgttcagaggtacttgggcttaataagagggttacttggattaacattcaacgtggaatttgggaagtctatggtgaaaatgggcaacattg

SEQ ID NO: 260982 - DNA, 405 bp, Glycine max
  unsure (1)..(405): unsure at all n locations
agcacagacacagaaaaatggctctattacttcgttcttcaatttcccttgtcaaccagaaagaaaccaaactcccaaaagccaaagacgaggttcccaccaaagtgttttactttggaaaaaccaacccatctttccgtctcagagcaaagagttccatgcaacaaacacacgtcacacgaaacaacagctttaactccgaagtaacgatgataaacgagaaaagggagaaggttcacgctccatcggttgcacatagccacaatgattcaatgagagtgccagtgtttgtgatgctgccattggacactgtaactatgggagggactttgaataagccgagagcaatgaatgctagtttgatggccctgaaaagtgcangagtggaaggagtgatggtggatg

SEQ ID NO: 260983 - DNA, 289 bp, Glycine max
gaaaggctagttaaggccagtttttttgttcacttattacctatggtgcctataggagcattgaagacttctgggatggtgaactctgagcaatatgcatctttgagacgttgaaaaatacattgctcctagagcaaatttattctgccttatacccactagttgtagtgattcaagtgagattttgagaagtgttactattgatggtaacaccgaataagtagccaagagttatttttcatttaatgattgtatcttttattcaatataataaagtgagttgagtgaa

SEQ ID NO: 260984 - DNA, 409 bp, Glycine max
  unsure (1)..(409): unsure at all n locations
cccacgcgtccgcttttctgatcatctcttatgggtttgaatgatgcatgtaaaatgttgtaggaaagagagggacctgtgagtgtcacaaacatgggagaggagaatgttaaacaaccgttgttggagaggaagtactacaaggactgcccaggttgtaaagtggatcaagccaaagagttgagtgagggaaagggtgtacctgttaaaaatctttttatcatgtggatggtggtgctgtgtgctgcactgcctatatcatctctctttccattcctctatttcatggtaagggatttcaatattgcaaaaacagaagctgatattagttcttatgctggntatgttggctcttcattcatgcttggcagatgtttgacatctgtattatggggaattgtaaccgatc

SEQ ID NO: 260985 - DNA, 339 bp, Glycine max
cccagcgtccgaacaacacaggcgcttagcaaacgcaaacgcaaacgcaaacgcaaacgcagagcgtgatccattgacgaagatggtgcagcgtctcacctaccgaagcggacagctatgccaccaagtccaaccaaacagggtcgtcaaaacccctggtgggaagctcgttatcagactaccaagaagagggccagcggacccaatgccccgtcactggcaagaggattaagggattcacacttgaggcctcagagtacaagaggtcaaggttacccagaaaccgtatgactgtcaaccgtgcatatggtggagttttatctggaagtgccgtcaggg

SEQ ID NO: 260986 - DNA, 311 bp, Glycine max
  unsure (1)..(311): unsure at all n locations
aaaggggggaaataaaactgcattgtgttaattcttangtaataataagctacattgaaacaacaaatctagttgacgacacaacagcagcaaataaaagaatacacatgtagatactaattatgacaaatcatgaatcataaaaaatgtccaacaagatgaagatccatgtcaatttttaagtgggttcattctctccctcaaatagtaaagtttggcccttctcactctctttttgtcaagcacctttatctcctttatgttaggtgaatacagagggaataaaaatttaattccaaccccagccacct

SEQ ID NO: 260987 - DNA, 412 bp, Glycine max
  unsure (1)..(412): unsure at all n locations
agaaattaagtgaggagttgagattgatgatgaagtctgctatgtgtgcagtggtggttgtagcactgcttcttctggcggaggtggggcccatggctgaggctgtgacatgcaccccaacagagttgagtccgtgtcttccagcaatcacttccggtgctaaaccttccaatgcttgttgcacgaagctgaagcagcaaaaaccatgcttatgtggctacctcaaaaacgctagcttgaagcagtatgttaactctcctaatgcccgaaaaaccgntgcttcttgtgggattccctttccaacttggtaattaattaaaccttcttataattaaaagtgggggatatatatatatatatagataaacagtttaatttatacacactgtgatcctacaaagcattttgacac

SEQ ID NO: 260988 - DNA, 394 bp, Glycine max
  unsure (1)..(394): unsure at all n locations
caggacccagacagcattgttgcctgtgntaacatgcaccaaaaccaacggggtcatggtcttgggagaggtgacgaccaatgccaatgttgactacgagaagatagtgcgtgacacctgcaggaacatcggctttgtctcaaacgatgtgggactggatgccgacaactgcaaggtcctcgtcaacattgagcagcagagccctgatattgctcagggtgtacacggccacctcaccaaaaaacctgaagaaattggtgctggtgaccagggtcacatgtttggctatgccactgatgaaacccctgaattgatgccattgagccatgttcttgcaacaaaacttggtgctcgtctcaccgaggttcgcaagaacgggaccttgccttggctg

SEQ ID NO: 260989 - DNA, 384 bp, Glycine max
ttccaactccatttacgatttcactgtcaaggacatcagtggaaatgatgtgagtctgaatgattacagcgggaaggttctactgattgtgaatgtcgcctctcaatgtggtttgacacagacaaattacaaagaattgaatgtattgtacgagaagtacaagaatcaaggatttgaaatcttggcatttccgtgcaaccagtttgctggacaggaaccaggaaacaatgaagaaattcaggaagtagtttgcacaaggttcaaggctgaatttcctatctttgataaggttgaagtcaatgggaagaatgcagtgccactttacaagtttttaaaggagaagaaagggggaatatttggcgatggtatcaagtgggacttcac

SEQ ID NO: 260990 - DNA, 290 bp, Glycine max
  unsure (1)..(290): unsure at all n locations
atggcaactatgactggtgtgagcctttcatgccccacggttttcttcaacgcatcagcctcaccgcaaaacgcgcatgctgtaaagttctcacttccacccagccaagcagtgcgaccgggtagtatcaagttgggtcgcgtgatgaggatccgacccgttcgcgctgcgcctgagcgcatatcggagaaggtggaggagagcataaagaacgcgcangaggcgtgcgccggcgatccgactagcggcgagtgcgtggcggcgtgggacgaggtggaggagctgagcgc

SEQ ID NO: 260991 - DNA, 416 bp, Glycine max
aacactctctctcctccttcacctatattggtttcaaccaaaccaagtgtcccctcctttctcttgttaacagggggcagagttagtgagtaatggcaggaggacaactaggagtgcttaatgcactcgatgtggcaaaaacacaatggtaccacttcactgctattgtgatagctggaatgggattcttcactgatgcctatgatcttttctgcatttcccttgtgaccaagttgttggggaggttatattacacagacataacgaacccgaagcctggtgttcttcctcctaatgtgcaagctgctgtgactggtgttgctctatgtggcactttaaccggccaacttttctttggatggcttggtgacaagttgggaaagaaaagggtttatggcttaactcttatgcttatg

SEQ ID NO: 260992 - DNA, 428 bp, Glycine max
ataatatcaggatagcagagacttaacatcaaataatccaagtgtaagtttggctagcacgtcacgaggcatttgttctcctgacatttctgtgactcttccaaatacttcaccaaagtcctttcggtctgacaatacaatttctgaaaggtcacatgcgccaccagacccaacaaacatgcaagtgaaaggatctgcttcagatgtatttcgtgtcagtgtttccagtgccccaagtacatctagtcatggatctgcacctgatgactgtgatgctttgggggatgtatacatatggggagaggttacctgtgaaaatgttaaagttggtgctgataaaaatgtaaattatgtcagccccagggcagatgtacttctccccagaccactggaatccagcgtagttttagatgtacatcatatagcat

SEQ ID NO: 260993 - DNA, 424 bp, Glycine max
cccacgcgtccgcccacgcgtccgccctacgcgtccggtcctcttttctcggctccctttttctctctggcgctctctctcggtctcgctcttcttctcatcaagcacagagttacagactcaccgatcttccgattctctttcgtcttggtttatgagctcgaaggagagacccactcttggtggcacgcggattaagacccgcaaacgaaatattgctgcgccgctggaccctgcagcattctcggatgcagtggtccagatttatttggataatgctggtgatctggaacttattgctaagagtattgaatcttcagaccttaacttttcaagatacggtgacaccttttttgaggttgctttcactgggggtcgtacacaacctggaactaccaaacctgatgagggggaccgccaccca

SEQ ID NO: 260994 - DNA, 397 bp, Glycine max
agaagattgaacttaaacttattcatcttgaaagaaagaaagaaagaagatgggaattgcagtgggaggtgttgatttgctgagtgaaaaagcggcgatgatgagagagtgtctgcagaagagtgaaaccatcacagacaacgtcgtcaccattctcggttccttcgaccaccgtctctccgccctcgaaaccgccatgcgtccaactcagattagaactcactctattaggaaggctcatgagaatattgataggactttgaaggctgcggaggttatattggctcacttcgatcaatatcgtcaggcagaagcaaaaatacttaaagggccacatgaagacttggaaaactatcttgaagcaattggtaagttgagaaacaacattcaatttttt

SEQ ID NO: 260995 - DNA, 422 bp, Glycine max
gaagaaaacaaaatggattatacagtttctgcgttgaggtctttgatgggttctcactctccggcgctgggtgccttactggtgccctctgaagattatcacctgagcgaatatgtgtctgcacgagacaagcgccgcgaattcgtttccggcttcactggaagtgccggcttggcacttataacaaagaaagaagcactgctgtggacggatggacggtattttttgcaggctgagaaagaacttagtgctgggtggaagctaatgcgaattggtgaagatcctgctgtagatatctggatggccgataatttgccaaaagaagcatccgttggggttgatccctggtgcatttcaattgatactgctcaaagatgggaacgtgcttttgccgaaaaacaacaaaaacttgttccaacctt

SEQ ID NO: 260996 - DNA, 421 bp, Glycine max
tttcattcacccttggtgtgaaacagatgatttgctgctgtaacaaaatggatgctactacacccaagtattccaaggccaggtatgatgaaattgtgaaggaagtctcttcctacttgaagaaagtaggatacaaccctgacaagattccttttgttcctatctctggttttgagggagacaacatgattgagaggtccacaaaccttgactggtacaagggtccaactctgcttgatgcacttgaccagattagtgagcccaagaggccctctgacaagcccctcaggcttccccttcaggatgtgtacaagattggaggtattggaactgtgccagtgggacgtgttgagaccggtgtctttgagcctggaatggtggtgacttttgcaccaactggactgacaactgaagtcaagtc

SEQ ID NO: 260997 - DNA, 424 bp, Glycine max
  unsure (1)..(424): unsure at all n locations
agaaaacagcatcgaacccgtcgtagcagaaaaacttgtcaccatggtttcttccgacaaggatccacgagaggatgtccttcaagcctggtacatggatgatagtgatgaagatcaaagactcccccaccacaaagaacccaaggagtttgtctcgttggaccaacttgctgaacttggagtccttagctggaaactagatgctgataaccatgaaaatgatccagagctgaagaagattcgtgaagagcgtggttacacctacatggatgtttgtgaagtctgcccanaaaagttgccaaattatgaacagaaaatcaaaagcttctttgaagagcatcttcacactgatgaggagatccgcttttgtgctgctggaagtggctattttgatgttagggatcgcaatgaagcttggattcgt

SEQ ID NO: 260998 - DNA, 343 bp, Glycine max
cccacgcgtccgtgctactctttactttgtcctatttacagatgccgacaacgtcatcccaaaggctcttgattccggcaagagtgttgaaaacgttgagggaaatggtggcccaggaaccatcaagaagatcactttccttgaggatggagaaaccaagtttgtgctgcacaaaatagaaagcattgatgaggcgaacttgggatacagctacagcgtggttgggggtgctgcattgccagacacggcggagaagatcacattcgactccaaattggttgctggtcccaatggaaggtctgctgggaagctcacttgtcaatacgaaacaaaaggagatgct

SEQ ID NO: 260999 - DNA, 330 bp, Glycine max
gacccagcgtccttgcaatcaaatattgtttctctttctcaaaccctaccctactggcaaagcaaatcttggtcggaccctcaccacaaaaccatcacccttgagtggaaagcttgacaccatcgacaacgtcaaggccaagatccatgacaaggaatgaattcccccggatcaacaacgtctcatctttgccggaaagcaactcgaggacggccgtaccctctccgactacaacatccagaaggagtcaaccctttaccttgtccttcgtcttcgaggtggccatgcaaatcttcgtcaagactctcactggcaaaaccataaccctat

SEQ ID NO: 261000 - DNA, 432 bp, Glycine max
ctccaaagtttcggtgctttcggatataacactacctattcagccgccatgcacactctcctccgatccactctcaggaccaagactgcttcatctttagcatatgctgtggtttccagaagtgctcacgaaaatctccttcaggctcccttattgtctagatcaaatagcactgaggcttcattggcaaaggataattcctctaatgatgtaaaaaatggtcaagggtacaaaggtcatagtatgcttgctcctttcacggctgggtggcagtcttctgatttgcaccctctgatcatagaaaagtcagagggaagctatgtatatgacattaatgggaagaaatatcttgatgcacttgctggtctatgggccacttctttagggggaagtgagccacgcctttgtgatgctgccgttgcacaactaaag

SEQ ID NO: 261001 - DNA, 422 bp, Glycine max
  unsure (1)..(422): unsure at all n locations
gcccacgcgtcgggtactttcttgctaaacagaaggcgaagggcagacacactttttgttttttgggaagcgagaaaaaaaaatgttggggatcttcacagttccgggtgtctgccccggagagctggtggctgccggcacanaacgccgtcgccgaagacgacggcggggaagctgctgaaccggttcgtggagaacaaggcgtcggcggtgtcgctgaggtgggagaacacgtgcagttggcttacacgcaccacaacgagtcaccgtggcatcccagatcatttgctggtaaggatgaaatattctgcttggttgagggggctctaaacaattgggcagcctgagacaaccgtatggactggcccaagtcagccaatgaagtggttttggggattgaagcttacaaagctttacgggat

SEQ ID NO: 261002 - DNA, 298 bp, Glycine max
  unsure (1)..(298): unsure at all n locations
aaaaaaagctccaccaatggcgggttacagagccgacgacgactacgactacctcttcaaggtggtcctgatcggcgattccggcgtgggcaagtccaacctcctctctcgcttcaccaagaacgagttcaacttggagtccaagtccaccattggcgtcgagttcgccacccgcaccttgaacgtcgattccaaagtcatcaaggcccagatctgggacaccgcangccaagaaaggtatcgtgccatcaccagtgcatactatcgtggggcagtcggtgcacttctcgtgtatgat

SEQ ID NO: 261003 - DNA, 358 bp, Glycine max
atcgactcgtacctcgttgctggtaccgatggcgtgggaacgaaggtgatgcttgccttcgaaactggaatccacgatactattgggattgacctggttgcgatgagtgtgaatgacattgttacttcgggggcgaagcctttgtttttccttgattactttgccactgggcaccttgacgtggacgttgctgaaaaggttataaaaggcattgttgatggttgtaagcaatctgattgtgttcttttaggaggagagactgcagagatgcctggtctctataaagaaggtgagtatgatcttagtggctgtgcaagtggcattgtgaagaaagattctgtaatcaatgggtcaaaca

SEQ ID NO: 261004 - DNA, 305 bp, Glycine max
cccacgcgtccgcccaactcaatttttctctcatccggcccaatttagcataagccgagcatggccaccgcaacagcagcagccacctcgtccttcatggggacgcgcctcctggaggcccactccggggcggggcgggtgcaggcccggttcgggtttggcaagaagaaagccgccgccccgaagaaagtttccagggggtcgggctctagctccgataggcccctgtggtatccgggcgccaaggcgcccgagtacctggatgggagccttgtcggagactacggattcgacccatttgggct

SEQ ID NO: 261005 - DNA, 385 bp, Glycine max
ggagggggcagggaatttcaattatatgtatctggtgtattcacggggagatgtggcacagcactagatcatggtgtcgtggctgttgggtatggaacagctaaaggtcatgattattggatcgtaaggaattcatggggttctagctggggagaggatggctacatcagattagaaagaaatcttgctaacagcagatcaggcaagtgtggaattgcaattgagccatcttatccccttaagaatggtccaaatccccctaatcctggaccatcacccccttcacctgtgaagccgccaaatgtctgtgacaactactacaactgtgctgatagtgctacttgttgctgtatttttgagttcggaaatgcttgcttcgagtggg

SEQ ID NO: 261006 - DNA, 410 bp, Glycine max
gcgcttgtgttgtttttgtgtctcattaatcccacactcagtcactattgctccagcctccacctgctgaaagaaactcctaattgtcaattgttgtaaagaaaagaactgaaaacactgacactgttattctctgaattttctcaccatctacaactgaagttttaaccaatatggaaactgaaaagtctaatgtttcaaaggctgaagaatttaaactccttgccaatgaagtgttcaatgctcgaaaatactcccaagccattgatctatatacacaagcaattgagctgaacagtcaaaatgcagtttacttttctaatcgtgcctttgcccatcttcggcttgaggaatatggtagtgcaatacaagatgccacaaaagctattgaaattgatcctaaatattcg

SEQ ID NO: 261007 - DNA, 380 bp, Glycine max
  unsure (1)..(380): unsure at all n locations
taaaattctagggttccgaaatggacgctgacggaaagatcaagaagggcgccggcggaagaaagggcggcggcccaaagaagaagccggtttcaaggtccgtcaaagccggtctccaattccccgtcggaagaattggccgttatttgaagaaaggaaggtacgctcagcgtgtcggtaccggtgctcccgtatacttggctgcagttctcgaatacctanctgccgaggtgcttgagttggctgggaatgcagcacgtgacaacaagaagaacaggattattccaagacacgtgcttttggcagtgaggaacgatgaggagttggggaaattgcttgctggagtgacaattgcacatggtggcgtgcttccaaacatt

SEQ ID NO: 261008 - DNA, 265 bp, Glycine max
gggcgacccacgcgtccgcgttcttctacagcaatttttaaattttttgaagaaagagaaaaaacaggggattgcacatgtgaaagcgtggctgcgcactcaactgacgttgctgaaactcctacaattgcagcaacagctgcggaggctgcaagatgtacccagacttgatctacaccgagtcaaccaccaccgacaccttggtcatgggaatggtaccaattaacgctcaattcgagagtgctgaaatgggtgttcccgccta

SEQ ID NO: 261009 - DNA, 373 bp, Glycine max
gtgagagtctgagatcgcttttctctctttcgatcttccttttccgcatttctcaacaatcgtttccaatcccacgctaatggcaaatagtgagacttgttgttcaactcagcttattgatggagatggtacattcaatgtttttggggttgaaaatttcatgaaggaggtgaagttggctgaatgtgggctttcatatgccgtagtttctataatgggtcctcaaagtagtggcaagagcacactgttaaatcatttgtttggtaccaacttcagagagatggatgctttttaaggaaagtctcaaacaaccaaaaggaatctggatggctagatgggctggcatagaaccttgtacacttgggatggattt

SEQ ID NO: 261010 - DNA, 260 bp, Glycine max
  unsure (1)..(260): unsure at all n locations
cccacgcgtccgggaacaccgggcggtctgaaccggcagggtcttccgggggaccggaagccggacggcggcgacaagaaggagaagaagttcgagccggcggcgccgccggcccgcgtgggccgtaagcagcgtaagcaganaggcccggaggcggcggcgcggctgccgacggtgacgccgctgtcgaagtgcaagctaaggctgctgaagctggagcgcataaaagactacctcttgatggaggaggagttcgtggc

SEQ ID NO: 261011 - DNA, 418 bp, Glycine max
  unsure (1)..(418): unsure at all n locations
ctttagtggaacttggtttaagcaaatgcgttggagtgaccaacaagggaattgtgcagctagtatctggctgtggctatttgaagatacttgatttgacttgttgtcgcttcatatctgatgcagcaatctctactatagcagactcttgtccagaccttgtctgtctgaagctagaatcttgtgatatggtgactgagaattgtctttatcaacttggattaaattgctcgcttctcaaagagcttgatcttactgattgctctggtgttgatgacatanctctaagatatctatcaagatgttcagaacttgtaagattgaaattaggattatgcacaaacatatcagacataggattggcacacattgcttgtaactgcccaaaaatgactgaactngatctctatcgatgtgt

SEQ ID NO: 261012 - DNA, 428 bp, Glycine max
  unsure (1)..(428): unsure at all n locations
gggcacagaaatatggattgaaaatcatccttgatcttcatgctgcacccggttctcaaaatggttttgagcacagctcttcaagagatggttcacaagaatggggaaaaacagatgaaaccattcaacaaacagttcatgttatagacttcctaactgcaaggtacgcaaaatgccaaagcctttatgctgttgagctaataaatgagcctctctcacctggtgtgacactagaggccttgaacaagtactataaggctggttatgaagcagtgcgcaagcactcttccacagcttatgtggtgttatcaaataggataggacccttcaatcnctaggaactcttcccttttgcaaatggccttatgcgatctgtgattgatgttcactaatacaacctcttttcaagatgtatttaatgacatgac

SEQ ID NO: 261013 - DNA, 444 bp, Glycine max
  unsure (1)..(444): unsure at all n locations
ttgacattgataagcactctgaatggttgttatttcattccctgggttcattacaagggtcggcaaggagatttctgcattttggtcatggacatgcttgggcccagtctttgggatgtatggaattctgttggtcaacaaatgtcaccaaatatggttgcgtgcattgcagtagaggcaatatcaattcttgagaagctccacttgaaagggtttgtgcatggagatgtgaaacctgaaaactttttgcttggtcaacctggatcagctgaagataagaaggtatatcttattgatcttggtctggcttctaaatggaaggatgcatcatctgggctacatgttgattatgatcaaaaacctgatttatttaagggaacaataaagtatgctagtggacatgcacatttangtaggactggaagtcgaagggatgaccttgat

SEQ ID NO: 261014 - DNA, 370 bp, Glycine max
gcgaatacagcctcactgacttcatctggcctttgaagtatctcaaggttggaaagtatgagaagaggattgatgacatcttgaacaagttcgaccctgtcgttgaaagggtcatcaagaagcgccgtgagatcgtcagaaggagaaagaacggagaagttgttgagggcgaggccagcggcgtcttcctcgacactttgcttgaattcgctgaggacgagaccatggagatcaaaattaccaaggagcaaatcaagggccttgttgtcgactttttctctgcagggacagattccacagcggtggccttctctagtttggttgaatttattaatcatgtgcacttcaatttgaatgaattccaataata

SEQ ID NO: 261015 - DNA, 433 bp, Glycine max
caaagctttgacagttgttcatcgattatggtctgaggtgcctggaaagctgaaagattacatatgtcgtcccaagttcaatggatatcaatctctgcatactgttgtgatgggtgaaggcaaggttccccttgaagtacaaattcggaccaaagatatgcatttacaagcagaatttggatttgctgctcattggagatacaaggaagatgattgtcagcattcttcatttgtgcttcaaatggttgagtgggctcgatgggttgtcacctggcagtgcgaagcaatgagtagagattgttcatctgttggatatgctgattcagtcaatcccccatgcaagttcccttcccatgctgatgattgcccatattcttacaagcctgattgtggtcaaaatgggcctgtgtttgttatcatgattgagaatgat

SEQ ID NO: 261016 - DNA, 313 bp, Glycine max
cccacgcgtccggcttgaaatcctatgtcaacattaggcactggctgcatttcatgtagatgaaaacaaatggggtgttaatgttcaaactttatctggttcccctgctaattttgcagtatacactgcagttcttaaaccacatgatcggataatgggtttggacttgcctcacggaggacatttgtctcatggattcatgacacccaaaaaaacgtgtatcagccacatcaatttattttgaatctatgccttatcgacttgatgaatcaacaggtcttattgattatgatatgctggagaaaactgctac

SEQ ID NO: 261017 - DNA, 386 bp, Glycine max
  unsure (1)..(386): unsure at all n locations
cccggggcgacccacgctccggaggagggtgnnctggnnnngttatttttcnccccacgaaaaacaagagcgcccaacgatagtgatcatgggaggaatttgaaaggtcgaaacttgagcatctgggatcgcgaaattggggattttggttaaaagggtataatcttcggaactgattgatggcaaaactgtacgtgaaggcggtgccaccggcggatctgaacaggaacacggattggttcacgtaccctggcgtttggaccagttacatcctcatccttttcttttcttggatcctcgtactctctgtctttcggtgttctcctggcatcgcttggaccaatcgtaatctcgcacactttgctggaacatatgactttttttac

SEQ ID NO: 261018 - DNA, 400 bp, Glycine max
  unsure (1)..(400): unsure at all n locations
gacaaaccctaacatattttatccttgtatctatcaccatcgtcctggtcctccggcacatgcttctgcgcctgaatactttgtcctccaggggaacacaacttataaagacgatctatatttaaggaagaggacagggatgcgtcggtggctttgttgcacatgtcaggtggaagagtcttacccatcaaatgaaaatgagcacctgaaaagcccaaggaattatggagatggaaatcaaaaaggctcaaaggtgtcagctcctgtcaagcctgaaacacanaaggcaccttcacctattgaagctccagccttatctttagatgagctgaaggagaagacagacaactttggttcaaaggcattaatatgttaaggaacgtatggaagggtgtattat

SEQ ID NO: 261019 - DNA, 415 bp, Glycine max
cccacgcgtccggtttgggtattggagtgattgacgctgcgtctcttcctcttctctttcgatccatcccggattcctaatcctccaatccaaccacctcagcctcacactcacatatacacatatctgaacgcgtatcgtccctcctatggcttcaaagcgcatcctcaaggagctcaaggacttgcagaaagacccaccaacttcttgcagcgctggtccagtagctgaggacatgttccattggcaagcaacaataatgggtcctgctgatagtccttatgctggaggtgtattcctagtcactattcacttccctccggattatcctttcaagcctcctaaggttgcctttaggactaaggtgtttcacccgaacatcaatagcaatggtagcatttgtcttgatatcctg

SEQ ID NO: 261020 - DNA, 310 bp, Glycine max
aaaacattctcatcatttttccaacttaatggctctgcttctgatagtacccatttcactggtaaccctctggctcggttacaccctataccagcggctacgcttcaagctccctcctggcccacggccctggccggtagtcggtaacctctacgacataaaacccgtccggttccggtgcttcgctgagtgggcgcagtcttacggccctatcatatcggtctggttcggttcgaccctaaacgtcatcgtttcaaactcggagttggccaaggaggttctgaaggagcacgatcagcagctggcggga

SEQ ID NO: 261021 - DNA, 428 bp, Glycine max
  unsure (1)..(428): unsure at all n locations
cccacgcgtccgttccaaccaagcccatggtggttgaaactttctctgagtatcctccccttggtcgttttgctgtgagggacatgcgtcaaactgtggctgtcggagtcatcaagagtgttgagaagaaagaccccaccggagccaaggtcaccaaggccgctgccaagaagaagtgattgcatttgggcaattttgctagcacatgtgatcatcatcgtggttactcctttatagtagttttatccttgcagagtcttaagtgttttgtttaagttatatttttaagtttctgccgatttcatgtagccgtaactttcaaaactaggttcttgatcggcggnggncaattttcattgctgggttgttttgatgagtacctgtttttggtttgatggtaagaagagtctgaaatatttcgatttcac

SEQ ID NO: 261022 - DNA, 344 bp, Glycine max
ctctaccctcccttccctccactttcctccctcttcttcttttgcttctgtttttgaggcgaagaacgatggaattgtaatgctgggaatataattggagaattgggggaggagtaagggaggaaatcatacacaatgcccgagttccccttgagctcgaggttggaaagggtgcaaaatagcttgagagagaatggttctctggtgtatctcaatgtgtatgatcttacacctgccaacaattatctttacgcctttggggttggaatctttcattcgggcataaaagtgcatggtatggaatatggctttggagcacatgaatacccaacaagtggtatatt

SEQ ID NO: 261023 - DNA, 228 bp, Glycine max
  unsure (1)..(228): unsure at all n locations
gagagcagaaaacggaacgggcacttttacctggtatggcgccanctctaanacattggctgggccgagggtagaagatgggctgacataatcaagccaggctgtgtcaacactgaccccatctttcccaacaacaagctcaccggaaccgatgtgggttaccctggtggcctttggtttgacccccttggttggggaaccggttctcctcataagatcaaggacttg

SEQ ID NO: 261024 - DNA, 422 bp, Glycine max
cccacgcgtccggaggaaagaaagatgttttttaacggatatgggtatcaagggacatcatcatttgagcagacatttcgatgttactctgcttcgtttattgaaaagcccgaaattgaaaatggtgataaaattataatgcctccttcagtccttgaccgtctagcatttctacgtatggattatccaatgatgtttgaactcagaaatggtgcttctgagagggtttctcattgtggggttctggagttcattgcagatgaaggaactatatatatgccatactggatgatgcagaatctgcttttgcaagaaggagacatcgtaagagtgaaattcgtatcacttccaaagggaacatatgttaaattacagccacacacaaaggacttttttgatatttccaatccaaaagctatctt

SEQ ID NO: 261025 - DNA, 434 bp, Glycine max
gtgatctccaaaatgcagagcacagttttctctctctccccttccctctctctcccaaaacaacctctcaaacgctctgtctctgtttccacttccaaactcaacgtcattctcactccctcttcattcccatgtcaaccatgttctcttgcttattctccatctttcaaactcgctccctcacactttcaccccttccatgccagagcaacctccgtgccggagagcagcgccggcaacactctgctcaatactctggaacttggagccctgtttgggctctggatcctcttcaacatctacttcaacatctacaacaaacaggtcttaaaggtctaccatttccctttaaccgtaagcacccttcagttcgctgtggggtctctcttcgtagcattcatgtggagtttcaatctctataagagacctaaagt

SEQ ID NO: 261026 - DNA, 262 bp, Glycine max
cccacgcgtccgaacgattaaaaaagtattagcagttttccctcaccaaagaagaagaagcaaacaatgggcgatcagcttaccgatgaacagatctccgagttcaaggaagccttcagcttgttcgacaaggacggcgatggtttgttctctctctatctctctcacgttttgtgtatttgatttgatttgatttatgcgttcgcggtttttgcagatcggggttcctttttgtgataatggattacgaaaattagatgaa

SEQ ID NO: 261027 - DNA, 442 bp, Glycine max
ctagtcccaaagagctaacaagagattcaagaccggcatggctaatgaagaggaacagaaaaaccacctcttcggcatcaaagatctcggtcacaagactctccttcagagtgatgcactctatcagtatatacttgaaaccagtgtctatccaagagagcacgagtgcttgaaagagatacgcaagatgactgcaaaacacccactgaacatcatggcaacaccagcagacgaaggacaacttctgagcatgcttgttaagctcacgaattcaaagaacgccttggaaattggtgtattcactggttactctctgctctccactgccctggctcttccccctgatggaaagatcttggctttggatgtgaatcgcgaatactatgagttaggattgccaataattcaaaaagctggagtggctcacaagattgatttcaga

SEQ ID NO: 261028 - DNA, 443 bp, Glycine max
cgttctccctcttttctctcaccatcagaaagcgcttttttttttttttttttcttctacctccgtttctccgtctccacatttctccttcacgaactcccgatttttcttcctcttcaatctcgtccctctctgtctctccatccttaaatatacacaacatcttctaaggagaaaggggttccgaaagttacgataaaataaaaatggatccaaacgcggtgaagtccactctctccaatctggcgtttggaaacgtaatggcggcagctgcccgtgattatcagaaggaattgcatgctcaagagaagacacatgcatcaagttcagtacatcaggaggttgaccttgacgagttaatggatgatcctgagttggaaaaattgcatgcagataggattgcagctcttaagaaagaagcagagaaacgggaggaatggaag

SEQ ID NO: 261029 - DNA, 451 bp, Glycine max
cccacgcgtacgaatttttccatataaatatgcacatgcacaaacgcaggggtctcttcttcagcagatagattgtaacggagcatgtgctgcgaggtgccgtttatcatctcgtccacgcctctgccaaagagcttgtggaacttgttgtagacgctgtaactgcgtgccacctggcactgctggaaaccaagaagtgtgtccctgctatgcaagtttgactactcatggtggcaaacgcaagtgcccttagacttaattggaccactatcctatgcatgcctttgatttatattataaaataaaaataatactatatataacatgttaattgcttaatatgtgctttaagagtaaagaataacatcgtgaaatcaaattacccctttttcaatacgtgttgaatcatcgatcttggtttgtaatttggttgtatattcacaaaattaat

SEQ ID NO: 261030 - DNA, 421 bp, Glycine max
gaaccaacacaaagatggaatggaagggaataccgttcttgtgcaggttgatggatagatagggatgttggggggaataatagagcgggaaaataaaaagacaacatacataacgctctctcacagcggttgctttataccattgtctatatcataagacgggagttcgtctacactgatcacttgttagagcatgaattcacaatgcccataatttgttcactaaaaaacgatgaacgtgtacgaaccgagccaccaaatcagtatgagggagagaacgcttttgaagtaatggtaatttaagtgcacccatgcctctaattgatgagacagacatgaagtgtgatagtcagccagaggatgcttgtcatgcgatactacgagaggcctagaattatgatcaagaagctaacaaacctac

SEQ ID NO: 261031 - DNA, 459 bp, Glycine max
cccacgcgtccgcccacgcgtccggagaaattcctccatcatttaacaacctcacattcttgtcaaagttcagtgtggcacataatcgcttagagggaccaattccaactggagggcagtttttaagcttccctagttcaagttttgagggcaacctggggctttgtagggaaattgattctccttgcaaaattgtcaacaatacaagtcccaacaattcttctggttcttccaaaaaacgtggtagaagcaatgtccttggcataacaatcagtatagggatagggcttgcactgcttcttgcaattattctgctaaaaatgtcaaagagggatgatgataagcctatggataactttgatgaggaactcaatggtaggccacgcaggttatccgaagcacttgcttcctcaaagttggtgctttttcagaattcagattgcaaggatcttacagttg

SEQ ID NO: 261032 - DNA, 432 bp, Glycine max
ctcaaatctgtgaagaaaatctcaatttctaaattgtaattcttagcactactgctagtagtagtaaaaaaaaacaattagaaagtagtagagtgtttttttttctttttttcgtttgttttacttttaagatgggtgagaagagcaacgttggcggcgacgcgattaacacgacactgcttcacgggaagtacgagctgggccggctgttaggccacggaaccttcgcgaaggtgtaccacgcgcgccacctgaagacgggaaagagcgtggcgatgaaggtggtgggcaaagagaaggtggtgaaggtaggcatgatggagcatatcaagagagagatctcagccatgaacatggtgaagcacccaaacatcgtgcagcttcacgaggtcatggcgagcaagtccaagatctacatcgccatggagctcg

SEQ ID NO: 261033 - DNA, 439 bp, Glycine max
atttgtattggtttagaggaacatagtccgaggaacagccaacacatgtatggtagggagttccaatcgatgttggacggactcgacgaggaagggtgtgttgaagaaccggggtatcaatctgagaagaagcgtcgtctaagtgtggatcaagtgaaggctttggagaagaactttgaggttgaaaacaagcttgaacctgagaggaaggtgaagcttgcccaagaacttgggttgcaacctagacaggtagccgtatggttccaaaaccgtcgagccagatggaaaaccaaacaattggagagagattatggtgtactcaaagccaattatgatgctcttaagcttaactttgacaccctcgatcaggacaacgaagccttacgaaagcaggtagaataatactccttccaaaatataaacaaatttcgattattta

SEQ ID NO: 261034 - DNA, 449 bp, Glycine max
  unsure (1)..(449): unsure at all n locations
caaactccaacatggaagtggtgaaagtgggggtggaatattggggttggtaggtggtcttgcacaagagtttctcaagcaaaagcttgatgacaatgatgagggatatgcaaagcctgcattggagacaaaagtggaaagtaagcaagaggcatatgctggaccaaccaaacgtggccttccggatggtgggatattgatgagtggatgtcagaccgaccaaacttctgccgatgcaagtcctgcaggaagcgctgccagtgcttatggagcttttagcaatgcaatacaggctataattgaggagactgatggtgcaatcacaaaccaagaacttgttcaaagggcaagagagaagctgaagaactccggtttcactcaaaaaccgggactctattgcagngatcatcatgttgatgctccttttgtgtgttgatctgttctcatct

SEQ ID NO: 261035 - DNA, 447 bp, Glycine max
ggcttctcaaggccatggtttcataatgtgtctgcaatggaatggctttctttcaggttgaatttactttcaaattttgtttttgccttctcactggtcatgctagtgagcctccctgaaggaataatcaatccaagtattgccgggttggcagtaacatatgggatcaatctgaatgtgttgcaagcttcagttatatggaacatatgcaatgcagaaaacaagatgatatcagttgaaaggatccttcaatatacaaatataacaagtgaagcacctcttgtgattgaagacagcaggccgccaagcaactggccagatactggaacaatatgtttcaaaaatttgcagatacgttatgccgaacatctaccatctgtattgaaaaacatcacttgcacatttcctggaaggaagaaagttggtgttgtaggacgtaccggtagt

SEQ ID NO: 261036 - DNA, 445 bp, Glycine max
gtgaattacgtttgaaaatgcacggtcggcctcgcaaagcgttgaagcaagaagatgaagccgcttcagcagccaaagctgaaaagcttcgttcactccaagctcagttcctcgccaatcaccacaatcacatttatagcaaggaagcgttagatgtgagcgcgaagcttctagaagtgaatccagagtgctacacagcttggaattacagaaagctcgccgttcaacatcttctctctaactccgattccgatcctcactctatcttcgatgacgagctcaaactcgtggagattgcgctgaggaagaatttcaagtcttacggcgcgtggcatcatagaaaatgggtactcagcaaggggcattcgtccatagacaacgaaatgcgccttctgaatggttttcagaagatggatcctcggaattttcacgcctggaattaccg

SEQ ID NO: 261037 - DNA, 446 bp, Glycine max
ccctttctctctctcattctcttctccatcgcgcgtaagaaacacattttagttgctactaatgggaactgttgaagctgcaaacaaggatgcaaatggaagtctcctagagaaaaatccttcagttgtttttgtgttaggtggcccaggaagtggaaagggtacccaatgtgcaaatattgtccaaaattttgggtatactcatctcagcgctggtgatcttctgcgagcagaaatcaaatctggttctgaaaatggtacaatgattcagaatatgattaaagaaggaaaaattgttccctctgaggtaacaattaagctcttacaaaaagcaatgcaggaaagtggcaatgacaaatttcttattgatggttttccccgcaatgaggaaaaccgggcagcatttgagaaagtgacaggaatagagccagcatttgtcttatttt

SEQ ID NO: 261038 - DNA, 451 bp, Glycine max
aaaaattcttaaggatggccacagcagaagaaatttcaactttgaaactgttgcgccaatatctcttgggggatatttcagacccttttctcaccaatctcattccagtaaaacttgaagacccctcatcaggacttgatatgggttcaaacttctcagaacaaagcagcttctgcaagtttctggagtgctttgattttgaagcagaagtggtaggtctcacttctcatcataaggtccaaagctccattgcaacaagtccaccccagaatttcaattttccagaagaaccaatggtgtcaatgaaaaaggaagcaacatgttatgcaacaaggcattacagaggagtgaggagaaggccatgggggaagtttgcggcagagattcgcgaccccaaaaagaaagggagcagggtgtggcttggcacatttgacactgagattgatgctgc

SEQ ID NO: 261039 - DNA, 412 bp, Glycine max
  unsure (1)..(412): unsure at all n locations
cccacgcgtncgcctagattcagccacagttggaaaaaaaaaaaaagttgttcgagatggcacgtacgaagcaaactgctcgtaagtccacaggaggaaaggcacctaggaagcagctcgcaaccaaggctgcacgtaagtctgcaccaactactggtggtgtgaagaagccacatcgttatcgtcctggtaccgttgctcttcgtgagattaggaaataccagaagagtaccgagcttttgatcaggaagctccccttccagaggctggttcgtgaaattgctcaggacttcaagactgatctgcgtttccagagccatgctgtgcttgcattgcaagaagctgctgaggcataccttgttggactctttgaggatactaatctgtgtgccattcacgctaagcgtgtaac

SEQ ID NO: 261040 - DNA, 442 bp, Glycine max
gcttgcttgagttgccaactttaagtttgtcaatttccgtgctgcttggttggttgcaattgcaagtgaacaattggctagtgtgtactagttttgaatcacaatggcagaggatgatggttacacgaaagatggaacagtcgattactgtggaaatccagctaataaaaaggaaactggaacctggaaagcctgcccctatatcttaggaaacgaatgttgtgagagattggcttattatgggatgagcacaaacctggtgctttatttcaagaaccggctaaatcagcatagtgctactgcttccaagaatgtctctaattggagtggaacttgctatatcacaccattgattggggcatatttggctgattcctaccttggaagatattggacaattgctgttttttcaataatttatgctattggaatgacactcttg

SEQ ID NO: 261041 - DNA, 442 bp, Glycine max
  unsure (1)..(442): unsure at all n locations
gggaagaagaactgagctacaagctaaggaaggancaaagagaanggctcaagcaacggcatcaaagactagcttacgtggttcctctcaggctgtgttggaaggtagccttggctccacacgcttgaatgtggggagtggaagcagggtggcctcagtcacacgtgcagggttcacagttagagcacagcaacaacaagtgaatggtggtgaggtacaaagtagccgtagggcagtgctttcacttgatgctgctggtttgaccactggctcttttgttcaagctgtgcttgctgatgccaaacctatcaaagttggaccacctcccccaccttctggcggattacctggaacattgaactcagatgaaccaagagaccttaagctgccattgaaagataggttcttccttcaaccattgtctccaactgatgctgcacaa

SEQ ID NO: 261042 - DNA, 443 bp, Glycine max
gccatgtcttcctctctcgctcttccttccactcccttcttcgccaatggaacaagaatcttcgctctcaagcactctctccctcgctctagggtttccatgagcgtctccgctggatctcaggcttccgttcaccaggctttgttcgccgattacaaggcctccacttcattcctcttcccgggccagggtgctcaagctgttggaatggggaaagaagctcaaaatgtgcctgctgctgcggttttgttcaacaaggcaaatgacattttggggtttgatcttcttgatatatgcatcaatgggccaaaagaaaagttagattccaccgttattagccagcctgctatttatgtcacaagtcttgctgctatagagctacttcgtgcacgtgaaggaggtcagcagattattgactcagttgatgttacatgtggtttaag

SEQ ID NO: 261043 - DNA, 450 bp, Glycine max
cccacgcgtccggtttcgcttctcagacacgcggagaggccgttgatcgtgttcggaaaaggagctgcgtatgcacgtgcagagcacgtgctcacaaagctggtgaattccactgggattccttttctcccaactccgatggggaaaggaattttacctgacacccacgcacttgcggctactgcagcaaggtcactagcgattgggaagtgtgatgtggcgcttgtggtgggagcgagactcaactggcttctacacttcggtgaaccaccgaaatggtctaaggacgtgaaattcatcttggtggatgtgagcgaagaggagattgagctgaggaagcctcacttagggttaattggtgatgccaaacacgtgattgaggttttgaacaaggagattaaggacgatccgttttgcttggggagcacgcatccttgggtggaggcgatt

SEQ ID NO: 261044 - DNA, 431 bp, Glycine max
gtttcggagctatggcgcaagaagcagtctgatgttatgagattcttgcagcgggtgaggtgctgggagtaccgccagcaaccttctattgtccgtttgacaaggtctactcgcccagacaaggctcgccgcttgggtttcaaggctaagcagggttatgtgatttaccgtgttcgtgtacgaaggggtggccggaagagaccagttccaaaaggtattgtttatggtaagcccaccaaccaaggtgttactcaactgaaatttcagcgcagcaagaggtctgttgccgaggagcgagctggaaggaagttgggtggcctcagggttctcaattcatactgggtgaatgaggactcgacttacaaatattttgaggtcattctggtggatgttgcccacagcgctgttagaaatgatccaagaatcaactg

SEQ ID NO: 261045 - DNA, 449 bp, Glycine max
agggttttagcgcagcttcttctagatttaaggaagatgggtaaggaaaaggttcacatcagtattgtggttattggccatgttgactctgggaagtccactaccactggccacctgatctacaagcttggaggcattgacaagcgtgttattgagagatttgagaaggaagctgctgagatgaacaagaggtctttcaagtatgcctgggtgcttgataagcttaaggctgagcgtgaaagaggaatcacaattgatattgccttgtggaagtttgaaaccaccaagtactattgcacagtcattgatgcccctggacacagggatttcatcaagaacatgatcactgggacatcccaagctgactgtgctgttcttatcattgattccactactggtggttttgaagctggaatttcaaaggatggacagactcgtgaacatgctct

SEQ ID NO: 261046 - DNA, 453 bp, Glycine max
ctcagaaacctagcatctagccaagacaatgcaaacaaatgggtgcaagacaacatcaaaaactatgccaacaatgtcagattcagatacgtttcagtgggaaatgaagtgaaacccgaacactcatttgcacaatttctagtgcctgcattggaaaacattcagagggccatttctaatgctggccttggaaaccaagtaaaagtttccactgccattgatactggtgccttggcagaatcattcccaccatcaaagggttccttcaaatctgattatagaggagcatatcttgatggtgtcatcagatttctagtgaacaataatgccccattaatggttaatgtgtactcttacttcgcttacactgcaaaccctaaggacattagtcttgactatgcactttttaggtctccttcggtggtagtgcaagatggttcacttggttaccgt

SEQ ID NO: 261047 - DNA, 448 bp, Glycine max
  unsure (1)..(448): unsure at all n locations
cccacgcgtccggacaaatcctagagtttctcctttggttgaaagagagggacctgtgagtgtcacaaacatgggagaggagaatgttaaacaaccgttgttggagaggaagtactacaaggactgcccaggttgtaaagtggatcaagccaaagagttgagtgagggaaagggtgtacctgttaaaaatctttttatcatgtggatggtggtgctgtgtgctgcactgcctatatcatctctctttccattcctctatttcatggtaagggatttcaatattgcgaaaacagaagctgatattagttcttatgctggttatgttggctcttcattcatgcttggcagatgtttgacatctgtattatggggaattgtagccgatcgctatggccgaaaacctgttatagttatggngattattgcagttgtcattttcaacacatta

SEQ ID NO: 261048 - DNA, 452 bp, Glycine max
cccacgcgtccgcggacgcgtgggctgcaccatcgtcctgcatgtcagaggtccagagggtgaggttatcacacacactttctctctctctctctctcacccagatcttgtagcaatggcgagcgctcccactccacgcgaagagttcgtgtacatggcgaagctggcggagcaggccgagcgctacgaggagatggtggagttcatggagaaggtctccgcctccgccgagagcgaggagctgaccgtggaggagcgtaacctcctctccgtcgcctacaagaacgtgatcggcgctcgccgcgcctcctggcgcatcatctcctcaatcgagcagaaggaggagagccgcggcaacgaggaccacgtcgccgtcatccgcgactaccgctccaagatcgaggccgagctctccaacatctgcgacggaattctcaaactcctcgacacgc

SEQ ID NO: 261049 - DNA, 445 bp, Glycine max
cccacgcgtccgcccacgcgtccgtaggcacccagagaggtattcaatatgaaaggaagggttgacgaaatttgcatcgatgagctgaaatatttaaaatcagttgtcaaagagacactaaggttacacccaccagctccacttttacttccaagagaatgtggacaggcatgtgagattaatgggtatcatataccagtcaaaagtaaggtaattgtgaatgcttgggcaattggaagagatccaaagtactggagtgaagcagagaggttttatccagagagattcattgatagctctattgactacaaagggactaattttgagtacattccatttggtgctggaagaagaatatgccctggcagcacttttggtttgatcaatgttgaggtggcacttgcatttttgttgtatcactttgattggaagcttccaaacggaa

SEQ ID NO: 261050 - DNA, 449 bp, Glycine max
gttactcaccaggaaactcttgagtcaaaggttaacgagtccaaggccatggttaaatttcaacttaagaaggtgctctgcatgggagtagctgtggggaatgttagtatggaggaaaagcaaatcttccaaaatgttcaactgagtgttaatttccttgtctctttgttgaaaaagaactggcaaaatgtgagtagtagtccactatcaatattttgttaagtcattgcttctggtgccttcttttttgatgtgattttcttaaagttatatgttcttgtttctgttttattattggtgtaattaaaaagctctgctactataagaatagtctttgatatcagatgtggcatggattgaatccatgcttatcacaggttttatcttctgcttatatggttatgtagatgatgacaagattcttttgtacatgtctcttctttctgttt

SEQ ID NO: 261051 - DNA, 447 bp, Glycine max
  unsure (1)..(447): unsure at all n locations
ggtgaagtcaacaaagaaagaaaaaaagctttctccgagaaagcttctgttcacgtcagggtccggggtaggcttcttcattgagattgggttggtgttcagtgtgaatgcatttccagtgagataagagaaaaggaacgaggggaagaagcgacttatattaagaaatattaatatacttaatttaatattaatgttcgggtacccccctccggctcgtagttgagaagagctttcgtttaggaaagggctaaatgggtgcgatccctctcgttgagagtcaagggtctcctggagtagaaggcacatcctggatctattaagccggcaagggttcagcattggctttcacgaccgcaaaggggccatctctcagtcggagtagataagatagatatacttaatttaatatctnttattatatattttaatataataaagaaaatc

SEQ ID NO: 261052 - DNA, 423 bp, Glycine max
caaacccaaccctagattgagagaaaaatccccaaaaacaaaacacacatctctttcattctctccctcaccaaaccctagattgaaagaaaccctaacacaccatgggaacacccgagacatcgcgcgaaccctgccccgatcgcatcctcgacgacataggcggcgccttcggcatgggagcggtgggtggctccgccttccattttctcaagggtctctacaattcccccaagggcgatcgcttcgtcggcgccacccaggccgtgcgcctcaacgccccccgcgtcggcggcagcttcgccgtctggggcggcctcttctccgccttcgactgcaccatggtctacgcgcgccagaaggaggacccctggaactccatcgtcgccggcgccgccaccggcggctttctctccatgcgcc

SEQ ID NO: 261053 - DNA, 449 bp, Glycine max
gttgttgaggcggggctagataaatcaaagggaccattcgcttcatttattgtgcagaatggcaccctcagacggggagatatagtagtttgtggagaagcttttggaaaggtgcgggctttatttgatgatggtggaaagcgggttgatgaagctacaccctctatacctgtacaggttattggattgaataatgttccaattgctggtgatgaatttgaggttattgaatcccttgatactgcacgtgaaagggcagaaactcgtgctgagtcattgcgtaatgagcgtatttcagcaaaggcaggggatggaaaggtcaccctttcttctttagcttcagcagtttcgtcaggaaagctgtctggactagatttgcatcaactaaatattattttgaaggttgatcttcagggatctattgaagctgtcagaaaagctctggagat

SEQ ID NO: 261054 - DNA, 451 bp, Glycine max
ctctaatagaaatatttctggacgtgaatgaaatatgatccagtatttcttataaacaaccttttattatacccaccactgcctccatttttgtgccttttaaatcagtgtaacaaaactgtggaccttcttgttatactctgttggccttgacaaccatctacaagttttcaaggaaaagattcactatattgccctatctcatgccaatttctgaatcattgtgtggctattttttatgtgcatgatgtttgcataaagagatataatatgattctaagctgcatgagtctattatgtctacaatatcttctttttgcaggatggagaggcttatgcttacttgcttaatgctcttgccccagaagtggcaggcccatctgccctaaacacaagtgatccaacagaaagggcaaacatggttcttgagcaggcagagagattagattgc

SEQ ID NO: 261055 - DNA, 455 bp, Glycine max
ctgaccgggaaaagaaaaaccagctttcttcaagcacctagatttcctctctctctaaatggcgttctcttcttttctcggcagagtcctcttcgcctccgttttcatcctctccgcttaccaagaatttaattcttatggagttgatgggggacccgcagcaaaagcactcagaccgaagtttgatgcctttgcacatcaagtacattctaaagttggctttcaacttccagatattgatatgaaatttttagtggctggggctattgctctcaagggccttggagggattcttttcatactcagcagctcttttggagctttccttttgcttttgcatcaagtgatcactactccaatactgtatgatttctacaattatcacagtgaggacaaagaatttatccaacttttcatcaaatttactcagaatatggctctcttcggggcattgg

SEQ ID NO: 261056 - DNA, 451 bp, Glycine max
ctcaagcttcttgaaagtcagttggagcctttaaccgagcaacaattgatgggcatctacaacttgcagcagtcatcccagcaggctgaagatgctctttcccaagggatggatgcattgcagcaatcactgtctgagacattggctaatggttcacccagcacatcaggctcctcgggaaatgtggcaagttacatggggcaaatggctatggccatgggaaagcttggtactcttgatgggtttcttcgccaggctgacaatctgcggcagcagacattacaacaaatgcttcgaatattaacgaccaggcaatcagctcgagctcttctcgccatcagtgattatttctcacggctgcgagctctgagttctttgtggcttgctaggccaagggagtgaagcatttcacagctccattagtggacttctttcatacctgaccccctta

SEQ ID NO: 261057 - DNA, 446 bp, Glycine max
caaaaactaagttcatttcttgtgctttgctttattcctcaaaaccaaacatgtcgaacacatgcggcaactgtgactgcgctgacaagactaactgcaccaagggaaacagctatggtgttatagtagagactgagaagagctacatcgagactgttgacatggatgttccagcagctgagcatgatgggaagtgcaagtgtggcactaactgcacttgcacggactgcacttgtggccattaaggaatatgtatgaaaatgtaattgccatgtgtttggcaatacaaatctccaaataatgtaatcttcgtatgaataaatgtgtgctgttatcctacttcagggtctgtgtagtcatgcagtctgaatcatgtccagttcctgtcatagttattaacagccatggttgtggcattctatatatggttttatagtagataaaaa

SEQ ID NO: 261058 - DNA, 442 bp, Glycine max
cacgattctgtccactctcatgtgtgcccctcgttctgtttattcctgggacattgtcgtccagcgtgtcggaaacaagcttttctttgataagcgcgatgggtcgcagctcgatttgctctctgttcatgaaacctcgcaggagccattgcctgagtcgaaggatgatattaactctgcccattcgttgagcgttgaggctgcttatatcaaccagaatttctctcagcaggtgcttattagggatgggaataaggttacttttgatgaggctaacccttttgctaatgaaggtgaggaggttgcttctgtcgcttataggtataggaggtggaagcttgatgatgatatgtatcttgttgcgaggtgtgaggttcatagtgttgttgacgtgaacaagcagaggtcgttccttactttgaatgcgttgaatgagtttgat

SEQ ID NO: 261059 - DNA, 383 bp, Glycine max
attttcttactttcctctcacgctctgccacaaaactccgtctccgcaataacggaataaaaaaacaagtttaattactattatggcgccgagggatcataagacaagcaacgctaaggctaacggtaacggtaacagcggggtgaaggaggtgcattttcgtggagtgagaaagaggccgtgggggagatacgccgcggagatcagagatcccggcaagaagagccgcgtctggctcggaaccttcgacacggcggaggaggcagcgcgtgcctacgacgccgcagcacgagagtttcgcggccctaaggccaagacaaacttccctctccctttggaaaatgttaagaactcgagccccagccagagcagcaccgtcgagt

SEQ ID NO: 261060 - DNA, 446 bp, Glycine max
cccacgcgtccgcccacgcgtccggaaattatcatgaatccaattatttctgctgcttctgttattgctgctgggttggccgtagggcttgcttctattggacctggggttggtcaaggcactgctgcagggcaagctgtagaagggattgcacgacaaccggaggcagagggaaaaatacgaggtactttattgcttagtttggcttttatggaagctttaacaatttatggactggttgtagcattagcacttttatttgctaatccttttgtttaatcctaaaaaaatagaaatacatatccttttttccgtggacttgctttaccggtcttgctttttcgaattctatttatattaatatttcactcctataattctttatccgttcggacaagaacacaggggaaggactaattgaaaggtgaagaattcacatactgatt

SEQ ID NO: 261061 - DNA, 455 bp, Glycine max
cccacgcgtccgcaagctaagatctgggctttggcttaaaggaatattccgtggggtgatcatagtttttaccctgttcttatgatgggtgactcagaggtggcaaagttcggcttaaaagtcgggaagaatgagaaaaatgggttcccaaggggactagatcctgcaatatccaagttttttgtgcagctccaaagtgttgttaagtctcgacttagtagattagcaaaacaggatggaatgagtttgatgagttctgtccaaagaaaaggggataagtctttcagttactctgaagctgaactaaatgagcaactgcaagcatggagagaaaatccatcttgggttgacaagcctccactaataaaggtcactgctcccaaaggttctctttgcaaccttgatgtagaagttgatgttggcctaccccctgatgcagtatataatatagtgat

SEQ ID NO: 261062 - DNA, 449 bp, Glycine max
gatcaagaggtggatgaggaggaagcctccctctttgacatgctctggttactacttgcaagtgttgtatttgtgccaatatttcaaaagattcctggaggcagtcctgttcttggctacttggctgctggtatcttgattgggccttatggtctctccatcattcgtcatgttcatggaacaaaagcaatagccgagtttggagttgttttcctgttattcaatattggcctggagctctctgttgaaaggcttagttcaatgaagaaatatgtctttggattaggctctgctcaggttttggtgactgctgtagttgttggcttggtggctcattatatttgtggtcaagctggccctgctgctattgtcattgggaatggcttggcattatcatcaactgctgttgttctgcaggttttacaggagagaggtgagagcacatcacg

SEQ ID NO: 261063 - DNA, 456 bp, Glycine max
atttctaactaattattgtgcttattattattgttgagaaagaaaagaatggcaaagttaataaaattctttgagttgaacacaggggccaagattccttctgttgggttaggcacttggcaagctgagcctggtgttgtagccaaagctgtcaccacagccattctggttggatacaggcatattgattgtgctcaagcgtataacaatcaagcagagattggttctgctcttaagaagctttttgatgatggtgtggtgaagcgtgaggacttatggatcacctccaaactctggtgttcagatcatgcttcagaagatgtgcccaaagcattggataaaacattgcaggatttgcaacttgattaccttgacctctatctgatccactggccagtgcgcatgaaaagcggatcagttggattcaagaaggaatatctcgatcaaccggacatt

SEQ ID NO: 261064 - DNA, 456 bp, Glycine max
gcaaacatcaaccagcgctctatggaaggaacaagggacaccgagattgcaatgggtgcgtaccaacctcatcatacctgggcaagaagccagtatcatcctcgtgggcaaatccatggatataggatgtcactttgggctgaacatacgggtacgattgaagactgcttcttacaaccagagagccttgaatgtgttagtaggattagaacaatgggtgagctgaactggaagcaatttgcatcaaatgatgtaacagaaatgacagggcatctgctcaagtacccggtagaagtcgatcgaaagggtaaggtaagatccctcccgggccacgaagagtttccggatgtgggaggaaagattgtaggatcattcattgccattcaggagaatctaaccatttgattacttttttacattcactttgctggccattaggataggaataggatgaat

SEQ ID NO: 261065 - DNA, 456 bp, Glycine max
cccacgcgtccggaaaaagaaaaaagcgatcatagtttcacttcggccttatccagtttagggtttcggttctctaccctatctttcacgtatcgaaaccttaaatttacgatcaggtctgagcaatctggttggtagaacctttggtcttagtgagtcaagttttatgtctgaattagacgatcaaattcctactgccttcgatccttttgctgatgcaaatgctgatgactcgggtgctgggtcaaaggagtatgtgcatattcgtgtacagcagcgaaatggtaggaaaagcctgacaaccgttcagggattgaaaaaggaattcagctataacaagatacttaaagacgtcaagaaagagttctgttgcaatggaacagttgttcaggacccagaactaggacaggttattcaacttcaaggtgatcagaggaagaatgtttctaccttcct

SEQ ID NO: 261066 - DNA, 449 bp, Glycine max
catccctttcatttcgatctccattctccctgacactcctctctctgtatccgagttctagggttttggggatagaaagcataaatcacgtacacgacgtcgtttgatttgagggcggcgcaagatgccggggcaccgctcgaagtcggagaagcacgacgtcgacggcggcggcggtgagaagcagctccggcgggacccctacgaggtcctcggcgtctcgcgcaactccacggatcaggaaatcaaaaccgcgtaccgcaaaatggcgctcaaatatcatccggacaagaatgctaatgatcctaaagcagctgatatgtttaaagaggttaccttctcttataatatcctgtcagatcctgataaacggcgtcaatacgactcagctggctttgaggctgttgaatcagacaaccaagagttggagttagatctttcaagtctgg

SEQ ID NO: 261067 - DNA, 447 bp, Glycine max
gtctctgccgtcacaaaaaagagaaaagtctccgtgtcgtcgtgactaacagtgtgagtgagtgtttgtgtaaatcggggaaattgttgggctattcaagagatcggcagcggcgtcatgggtggagatggagccacggcaaacgcggaggcgcagtacgccacggcgaagatatcggtgtggtgggacatcgagaactgccacgtccccaagggttcggatccgcacgcgatcgcgcagaacatcagttccgccctcgttcgcatgaactactgcggccccgtctccatctccgcctacggcgacaccactcgcatccccgcctctgtgcagcacgcgctctccagcaccggtatctccctcaaccacgtccccgccggcgtgaaagacgcaagtgacaagaagattcttgttgatatgctgttctgggcagtggacaatcctgca

SEQ ID NO: 261068 - DNA, 453 bp, Glycine max
  unsure (1)..(453): unsure at all n locations
ggcgtcgagaccagaggtgattgcgccgcctgagattttctacgacgatgccgaagctcgcaagtacacctcttcttcccgtattgttcaaattcaggcgacgctgtcagagagagctcttgaactacttgctttgcctgatgacggcgttcctaaattactccttgatatcggttgtggatcgggacttagcggtgagacaatctcggagaatggacaccattggattgggcttgatatttcagcatcaatgcttaatgttgcggtggagcgagaggttgagggtgaccttttacttggtgacatgggccagggtataggaattcgtcctggagttatggatggggccatcagtatatctgctgttcagtggttatgcaatgctgataaatcctctcacaaccctcgattaagattgaaggcctttnttacatctctatataaatgcttatc

SEQ ID NO: 261069 - DNA, 364 bp, Glycine max
taaagaaagaaagttccgagttcataaaaaattaaaaaaaataaaaagaaaaaaaaataaaaagagaaaaaaagaaaaaataataaaaaaagtaaaaaaaataaaaaaaaaaaaggacataaaaaagcgccaagtggtcgtcataaggagaaagttcggtgaacttgctgagggctaggcctgaggtgtcttattgagggctacgctagaattatctaatgaccaggaccttggatatgaaaattatttaagagccaatgatggtccttgttgaggactttttgtctgcagggacaaattccacagcggaggccttctctaatatggctgaatcttattaattatgtgcacttcgatttgaatg

SEQ ID NO: 261070 - DNA, 455 bp, Glycine max
cccacgcgtccgctgtaattcatcagaggattcaaggcaactctgacatgttacctgagcatcaagtaaccagtttaggtagacattttgaaagtgaccatgattcagcaccttctcctgtcaatgcgtctgttgacaaaaatatgaaagattccaaagaactggttactgttcctgaaatggatgaggaactagctatggtacctgtacaccagaagccaaagcgatctgagatcgtccagcgtcgaatacgcaggcctttttctgtagatgaagtagaagcactggttcaagcagttgaaaaactaggaactggaaggtggcgtgatgttaagctttgtgcttttgataatgcaaagcatcggacatatgtggatttgaaggataaatggaaaacactggtgcacacggcaagaatatcccctcagcaaaggaggggtgaacctgttccccaa

SEQ ID NO: 261071 - DNA, 445 bp, Glycine max
cccacgcgtccgctctccttcttttctcttctttcttcttcttccatctctttttttctgcttaaggtctacaaaagttctcttcttcttctcctcctattgaactttggtcatcacacgagaaaacccacgtctggatcttctggtgtaaaggccattagaagccttttagaaattttcaaattgagttggtgtatagtgttgaagggggtgaaatttggagcccagtttgttacttcatttgaaaggtcatagtttgaaccctctttttctggagatttacctgggaaaagatgatgatgtttgaagatatgggattctgtggcgatttggatatgttatgtggttctcttggggatggggatattgctgtgagacaaactgaaccggatcctgtagttgaggatgactacagtgatgaagaaattgatgtggatgaactcga

SEQ ID NO: 261072 - DNA, 444 bp, Glycine max
agaaaagttagggttcacaacttttccttttccttttgcttgcgaatctgaatcaaataatcaatcatccattcattattcatcatgtcgtcggcgaagaaaatcacgctgaagagttcggacggcgaggctttcgaggtggaggaggcggtggcgctggagtcgcagacgataaagcacatgatcgaggacgactgcgccgacagcggcatccctctgccgaacgtgacgagcaagatcctggcgaaggttatcgagtactgcaagaagcacgtcgaggccgcgaatcccgaagacaaaccctccgaggacgatctcaaggcctgggacgctgaattcgtcaaggtcgaccaggccacgctcttcgatctcatcctggctgctaactacttgaacatcaagagcctgctggaccttacatgtcaaactgtagccgacatgatc

SEQ ID NO: 261073 - DNA, 451 bp, Glycine max
tcgcccacgcgtccgcccacgcgtccgggacttggcctggcaatttgtaggaggttcgtaaatcttatggaagggcatatttgggttgaaagcgaaggtattggtaaaggatgtacagtcacttttattgtaaaacttggaatcccagaccgatcaaatgaatttaagctaccttttgtacctaaagtaccaggaaatcatggatctacaaactttgctgggctcaaagttcttgtcatggatgacaatggggttagcaggacagtaacaaaaggacttcttatgcatttaggatgtgatgtaacaactgcaagctcaagtgaagaatgtctgcgtgttgtttctctggaacatgaagtggtcttcatggatgtttgtacagggttagatggttatgaacttgcagtccgtatacatgagaagtttacgaagcatcaagatagaccactga

SEQ ID NO: 261074 - DNA, 454 bp, Glycine max
cccacgcgtccgggcatttgtccactggtatgtgggtgaaggaatggaagaaggtgaattctctgaagcccgggaggatcttgctgcccttgaaaaggactacgaagaggttggagcagaaggcgaagaagaagaagaagaacccgatgattactcaaagtagtcaatcattcatcaccagctaccttacctacatctaccttctttcctctgtctaatgtctatccttgtccattgaattttaagcatctttctgttgtgtgctagctctgttagtgttgggtgagataattgctttcctcatgagaagcagtggtttatttgtcagtttgaatcacttttaagtttcagtgaaagagcaaaataaaggatagcgtaggagtgctgcagtttccattacttaaaagaaatcagatgtttattttatcttttgcaataatatgtttaaaatata

SEQ ID NO: 261075 - DNA, 454 bp, Glycine max
cccacgcgtccgggaaatgaagtcttctttaacagcacagttaacagacgaggctgatacatctgaagtcattgagactgtgaagctgcgagttagagatgctaaattgccggacattgaggtggtgcggatcttgtgggatgttttaatggatgctgttcagtggtctggaaaaaatcagcaacagaatgccaatgcagcccttcgtcaggtaaaaacttgggcagaattgttgaatacattctgcaccactgggaaacttgagctggaactgatgtacaaagtacagatgcaatgctatgaggatgctaaactgatgaagctgttccctgagattgttagatctctttatgaccaggatgtgctggctgaagataccattcttcattggttccgaaaaggaacaaactccaagggcaggcaaacctttgtgaaggcgctcgaaccctttgtt

SEQ ID NO: 261076 - DNA, 457 bp, Glycine max
cccacgcgtccggcactctcttcattactacaggaaacagatttgacagctgagcaacgactgatggtggagacaatattgaaaagcagcaatttgttggctaccctcatcaatgacgttttggatctttcacggcttgaagatggcagtcttcaacttgaagcagcaacatttaacctccattctttgttcagagaggtccttaacttgattaagcctgttgcatctgttaaaaagttatcactcacttcacatgtagcctcagatttgccaatgtatgccattggtgatgaaaaacgtctcatgcaaactattctgaatgttgttggtaatgctgtgaagttctcaaaagagggttgcatttccatcactgctttcgttgcaaagcctgaatcctttagagatgctagaattcctgactttcttccagtgccaagtgataaccacttttatttgc

SEQ ID NO: 261077 - DNA, 411 bp, Glycine max
gcgcttgagctattttatcattatcacctccattgccaattcttctctatagcttgtgtgagtatggaaataagagatggaagacagagcgagcggatcttgccacctcttaatggctccataccccaggcagggtcacataaacacaatgctccaattcagcaagcgcttgagcaccaaaggagtgagagtcactatgggcacaaccattttcatttccaagttcatgcatcttcaatcttcttccttgttaggaaatgttcaacttgatttcatatcagatggctgtgatcaaagaggttttggtcaagcatgtagtgtgtcaatctatttatctcgcatgcaaaaaataggtgccaataactcgagggaacttataaaaaaatacaactcttcagatcaccctattga

SEQ ID NO: 261078 - DNA, 450 bp, Glycine max
  unsure (1)..(450): unsure at all n locations
cccacgcgtacgcccacgcgtccgctacacaactaagctttntctctctttcggggtcctctgggacattgtgacccgccactctcaccaccgagcaggagctttccgtcatcgttgccgcccttaccaacgtcgtcgccggctccacctccgcctgcagctccttctccctccccgaattccgccttccacagacctctgatcctctcgccgccgcctgcctaatgccgccgccgccgccgactagcatggacactcgtcgcgagagcaacatcgcacgatgcctgggatgcaactttttcccggaggagaaaaagaagcagaagagggccaagaagaagtacagaggcgtgaggcagaggccctgnggaaagtgggccgcggagattcgtgaccctcgtcgtgctgcccgggtctggctcggcacgttcggaaccgccgaagatgccc

SEQ ID NO: 261079 - DNA, 401 bp, Glycine max
  unsure (1)..(401): unsure at all n locations
atagggttttccccggcgggatacagtcccgtaatcccttcttcatcctgttttcctaaaaaattgagagtccagccgcaacgggccttgagctctgacccctacgttctggaactcgccgaaaccctagaagactccttcccctcctctccctccaccccactccctctccagaacctccgcctctcctcctcccaatccctcctctccactccatggccctcccgccgcgacgagcccttccgcttcaccgacctctccttcatccgccaatcccgcatcctccccgtctcccccaccatctccctcctcactcccacctcccacctncccaacgacgtctacgtcggctccctctcctcctcctccccctctctcctccaacgagtctcccatttcat

SEQ ID NO: 261080 - DNA, 444 bp, Glycine max
cccacgcgtccgaactacatggtctcttgaaaacgacccgtttcctccctcgcacggatccacccgaaatctgagattccttcgaattgttaactctctttcagtttcaagttggaaactttttcgattttcgctttctggaggtgtgaattgttgtttgaaagtcacaagcaatggtgaaggacactgcgtattatgacatattaggtgtcaattatgatgcatctgctgcagagatcaagaaagcttattatgtcaaggctagaattgttcaccccgataaaaatcctgaggatcctaaggccgcagaaaactttcagaaacttggtgaggcttaccaggttttaagtgatcctgggaagcgtgcggcatatgatgagcatggaaaggagggagtaccacaagattccatgatggaccctacaactgtatttggaatgattt

SEQ ID NO: 261081 - DNA, 461 bp, Glycine max
ggccatataatttttttttatttgaaataatgtccgggatcatccacaagattgaggagaccctccatgtgggagggcacaagaaagaggagcacaaaggagaacaccatggtgagcacaaaggtgaacacaaaggagaacaccatggtgagcacaaaggtgaacacaaaggagaacaacaccatggggagcacaaggagggacttgtggataagatcaaggacaagatccatggtgatggccatgacaagggtgagaaaaagaagaagaaggacaagaagaagaaggagcatggacatgaccatcatggtcatagcagcagcagtgacagtgattagatcttatatgttaagcaggtgtacggtacgatggtagtgaggagccagaatccctcttcctgctttatgatataatacaaataaaatagcgattccggaaatcatgtctgtagctgctctttt

SEQ ID NO: 261082 - DNA, 442 bp, Glycine max
agaacacaaaaccatggtgtcaccaatttcacacttagtaactttaatcctcttattatcagtttcattggcagcttcagcttcacttgaagaaaactttgtccaatgtctcagcttctattcagacaaagcagctccattttatgcatcaatttacactccacaaaatgcatcattcaacaagatccttgaatcctctgcacagaacctaaggtatttggtgccttcagcgccaaaacctgagcttatattcacacccttgactgattcccatgtccaagtggcagtgacttgctcaaagaagcttggtattcatctgagaattcggagtggtggccatgactatgaaggactctcatatgtttctgaagttgagtccccttttcataattgttgatttgtccaagcttcgtgccatcgacgttgatatagaagacaacac

SEQ ID NO: 261083 - DNA, 462 bp, Glycine max
  unsure (1)..(462): unsure at all n locations
gcctacttcttttgagaaatttgccaatggggtcaagcagcaggcaaatatcaagggagtggacaggctaactgctaaggtgggagtggtggagataggaaagggtgtccgtggaactagtccaaccgggaagagaatttccgtgggaaacccgatcagaaatttggttcagggaattgagcttggagctaaggcgctgcgtaagagctgggaagggaatatggaagtcaagaagaaagatacatccaaattaagggccgccaagtgtgatcctaagccagagactcctaggagaagtacttcaagtgaaaagtttccctctaaagaagagagcaagatgcaaccgcagacaaagtcctccaaagaagagcacaagactcaaacatctataaagagagttattgtcagtggaacaatggangaacaagaataaccaagtaagcaaagagtttctgttggaaa

SEQ ID NO: 261084 - DNA, 455 bp, Glycine max
  unsure (1)..(455): unsure at all n locations
atccagttgtggcataaattgcataagaatatggtccctggtgactaccaccttgtcatgcttcagagtttaaagataagtgtcattgtataatgaaaattgctcctagttgggttggtatgatgtattaaataagttagaagttgctgtaaatcacgtaagaatatcatggcctgaattgtgtgtatcacagacataaataacgatcatatattgatagttcatagttacatattgtattgtnaaaaaaaaaaaaaaaaaaaaaaaaaaaaaaaaaaaaaaaaaaaaaaaaaaaaaaaaaaaaaaaaaaaaaaaaaaaaaaaaaaaaaaaaaaaaaaaataaaaaaataaaaaaaaaaaaataaaaaaaaaaaaaaaaaaaaaaaaataattggggggggcccctttaaagaaaccaagtttaactcttttgaatggttacacgtttttttttt

SEQ ID NO: 261085 - DNA, 446 bp, Glycine max
caccatcgggcccagcaccaaaccccttcccctctcccccaaattagggtttctctctgggaatgtgattcagcgcgcggcagcatcaatggcggagaagagattcggcgtgatagggtacgctctggcgccgaagaagcagaacagcttcatccgcgactcgctggtgagcctagcgaaatcgcgagggattgagctcgtgcgcgtggactccgacaaccccctcgcggatcagggccccttcgactgcgtcctccacaagctctacggcgacgactggaagcgccagctccaggaattccacaccctctacccaaacgccgtcatcctcgacgcccccgaggcgatcgagcgcctccacaaccgaatctcgatgctgcaggtcgtgtcggagctccgaattgaggaccgacccgagacctttgggatccccaagcagattgtga

SEQ ID NO: 261086 - DNA, 439 bp, Glycine max
  unsure (1)..(439): unsure at all n locations
gcgtgcgagaacacaaaaccatggagncaccaattgcacactnaggaactgcaaacctctaattatcagggtcattgggggcttcagcttcacttgaagaaaactttgtccaatgtctcagcttctattcagacaaagcagctccattttatgcatcaatttacactccacaaaatgcatcattcaacaagatccttgaatcctctgcacagaacctaaggtatttggtgccttcagcgccaaaacctgagcttatattcacacccttgactgattcccatgtccaagtggcagtgacttgctcaaagaagcttggtattcatctgagaattcggagtggtggccatgactatgaaggactctcatatgtttctgaagttgagtccccttttcataattgttgatttggccaagcttcgtgccatcgacgttgatatag

SEQ ID NO: 261087 - DNA, 400 bp, Glycine max
ctcgcctataaaatgtccgccactgcttcactctgcgccacttccagaacaactttctcatcatcgaagcccgtcgcgagaagaagctgcttcgtcgcggttcccaaaatcgcgtttcccaagctccgtttcaaacccgtcgctatggctacgctcggcgctcgcatggtggccgccgcacccaccgtcactccgccggcctcgctcgacttcgaaacctccgttttcaagaaggagaagattaacctcgctggacacgacgagtacatcgtgaaaggagggagggatttgttccctctgttgcagggtgctttcaaggggattaagcagattggcgtcattggatggggttcgcagggacctgctcaggcacagaatttgcgggactcgcttgctgatg

SEQ ID NO: 261088 - DNA, 417 bp, Glycine max
ctagtcccaaagagctaacaagagatttaagaccggcatggctaatgaagaggaacagaaaaaccacctcttcggcatcaaagatctcggtcacaagactctccttcagagtgatgcactctatcagtatatacttgaaaccagtgtctatccaagagagcacgagtgcttgaaagagatacgcaagatgactgcaaaacacccactgaacatcatggcaacaccagcagacgaaggacaacttctgagcatgcttgttaagctcacgaattcaaagaacgccttggaaattggtgtattcactggttactctctgctctccactgccctggctcttccccctgatggaaagatcttggctttggatgtgaatcgcgaatactatgagttaggattgccaataattcaaaaagctga

SEQ ID NO: 261089 - DNA, 400 bp, Glycine max
cgttctccctcttttctctcaccatcttaaagcgcttttttttttttttttttcttctacctccgtttctccgtctccacatttctccttcacgaactcccgatttttcttcctcttcaatctcgtccctctctgtctctccatccttaaatatacacaacatcttctaaggagaaaggggttccgaaagttacgataaaataaaaatggatccaaacgcggtgaagtccactctctccaatctggcgtttggaaacgtaatggcggcagctgcccgtgattatcagaaggaattgcatgctcaagagaagacacatgcatcaagttcagtacatcaggaggttgaccttgacgagttaatggatgatcctgagttggaaaaattgcatgcagataggat

SEQ ID NO: 261090 - DNA, 395 bp, Glycine max
aggccaaatgtagtgaatactatttattttctcatgcgcaaacgcaagggtctcttcttcagcagatagattgtaacggagcatgtgctgcgaggtgccgtttatcatctcgtccacgcctctgccaaagagcttgtggaacttgttgtagacgctgtaactgcgtgccacctggcactgctggaaaccaagaagtgtgtccctgctatgcaagtttgactactcatggtggcaaacgcaagtgcccttagacttaattggaccactatcctatgcatgcctttgatttatattataaaataaaaataatactatatataacatgttaattgcttaatatgtgctttaagagtaaagaataacatcgtgaaatcaaattacccctttttcaatac

SEQ ID NO: 261091 - DNA, 393 bp, Glycine max
  unsure (1)..(393): unsure at all n locations
gaaccaacacaaagannggaaggaagtggtttgttttcnncngcggnnngananaagagcggctttgttggcaggagagatgtgagcacacaaaataataagacaacatacataacgttttctcaaagaggttattttattttattttttttatcataagacggcagtttgcctgcactgatcagttcttagagcatgaattcagcatccccgcagtttgttttctcaagaaagatgaatgtgtacgatccgatccaccaaattagtatgtggggagaacgcttcaaaagtaatggaaatttaagtgcaaccatgcctttaattgatgagacagacatgaactttgataatcagtcataagatgcttttaatggtatactgggagaacctaat

SEQ ID NO: 261092 - DNA, 380 bp, Glycine max
  unsure (1)..(380): unsure at all n locations
cccacgcgtccgcccacgcgnccggagatannttctccatcattnaacaacctcacaggctggtttaagttgagggtggcgcataatcgcttagagggaccaattccaactggagggcagtttttaagcttccctagttcaagttttgagggcaacctggggctttgtagggaaattgattctccttgcaaaattgtcaacaatacaagtcccaacaattcttctggttcttccaaaaaacgtggtagaagcaatgtccttggcataacaatcagtatagggatagggcttgcactgcttcttgcaattattctgctaaaaatgtcaaagagggatgatgataagcctatggataactntgatgaggaactcaatggtag

SEQ ID NO: 261093 - DNA, 399 bp, Glycine max
ctcaaatctgtgaagaaaatcttattttctaaattgtaattcttagcactactgctagtagtagtaaaaaaaaacaattagaaagtagtagagtgtttttttttctttttttcgtttgttttacttttaagatgggtgagaagagcaacgttggcggcgacgcgattaacacgacactgcttcacgggaagtacgagctgggccggctgttaggccacggaaccttcgcgaaggtgtaccacgcgcgccacctgaagacgggaaagagcgtggcgatgaaggtggtgggcaaagagaaggtggtgaaggtaggcatgatggagcagatcaagagagagatctcagccatgaacatggtgaagcacccaaacatcgtgcagcttcacgaggtcatggcga

SEQ ID NO: 261094 - DNA, 404 bp, Glycine max
atttgtattggtttagaggaacatagttcgaggaacagccaacacatgtatggtagggagttccaatcgatgttggacggactcgacgaggaagggtgtgttgaagaaccggggtatcaatctgagaagaagcgtcgtctaagtgtggatcaagtgaaggctttggagaagaactttgaggttgaaaacaagcttgaacctgagaggaaggtgaagcttgcccaagaacttgggttgcaacctagacaggtagccgtatggttccaaaaccgtcgagccagatggaaaaccaaacaattggagagagattatggtgtactcaaagccaattatgatgctcttaagcttaactttgacaccctcgatcaggacaacgaagccttacgaaagcaggtagaataata

SEQ ID NO: 261095 - DNA, 362 bp, Glycine max
caaactccaacatggaagtggtgtaaagtgggggtggaatattggggttggtaggtggtcttgcacaagagtttctcaagcaaaagcttgatgacaatgatgagggatatgcaaagcctgcattggagacaaaagtggaaagtaagcaagaggcatatgctggaccaaccaaacgtggccttccggatggtgggatattgatgagtggatgtcagaccgaccaaacttctgccgatgcaagtcctgcaggaagcgctgccagtgcttatggagcttttagcaatgcaatacaggctataattgaggagactgatggtgcaatcacaaaccaagaacttgttcaaaaggcaagagagaagctg

SEQ ID NO: 261096 - DNA, 402 bp, Glycine max
ggcttctcaaggccatggtttcataatgtgtctgcaatggaatggctttctttcaggttgaatttactttcaaattttgtttttgccttctcactggtcatgctagtgagcctccctgaaggaataatcaatccaagtattgccgggttggcagtaacatatgggatcaatctgaatgtgttgcaagcttcagttatatggaacatatgcaatgcagaaaacaagatgatatcagttgaaaggatccttcaatatacaaatataacaagtgaagcacctcttgtgattgaagacagcaggccgccaagcaactggccagatactggaacaatatgtttcaaaaatttgcagatacgttatgccgaacatctaccatctgtattgaaaaacatcacttgcaca

SEQ ID NO: 261097 - DNA, 397 bp, Glycine max
gtgaattacgtttgaaaatgcacggtcggcctcgcaaagcgttgaagcaagaagatgaagccgcttcagcagccaaagctgaaaagcttcgttcactccaagctcagttcctcgccaatcaccacaatcacatttatagcaaggaagcgttagatgtgagcgcgaagcttctagaagtgaatccagagtgctacacagcttggaattacagaaagctcgccgttcaacatcttctctctaactccgattccgatcctcactctatcttcgatgacgagctcaaactcgtggagattgcgctgaggaagaatttcaagtcttacggcgcgtggcatcatagaaaatgggtactcagcaaggggcattcgtccatagacaacgaaatgcgccttctgaa

SEQ ID NO: 261098 - DNA, 387 bp, Glycine max
ccctttctctctctcattctcttctccatttcgcgtaagaaacacattttagttgctactaatgggaactgttgaagctgcaaacaaggatgcaaatggaagtctcctagagaaaaatccttcagttgtttttgtgttaggtggcccaggaagtggaaagggtacccaatgtgcaaatattgtccaaaattttgggtatactcatctcagcgctggtgatcttctgcgagcagaaatcaaatctggttctgaaaatggtacaatgattcagaatatgattaaagaaggaaaaattgttccctctgaggtaacaattaagctcttacaaaaagcaatgcaggaaagtggcaatgacaaatttcttattgatggttttccccgcaatga

SEQ ID NO: 261099 - DNA, 384 bp, Glycine max
cccacgcgtccgcctagattcagccacagttggaaaaaaaaaaaaagttgttcgagatggcacgtacgaagcaaactgctcgtaagtccacaggaggaaaggcacctaggaagcagctcgcaaccaaggctgcacgtaagtctgcaccaactactggtggtgtgaagaagccacatcgttatcgtcctggtaccgttgctcttcgtgagattaggaaataccagaagagtaccgagcttttgatcaggaagctccccttccagaggctggttcgtgaaattgctcaggacttcaagactgatctgcgtttccagagccatgctgtgcttgcattgcaagaagctgctgaggcataccttgttggactctttgaggatactaatc

SEQ ID NO: 261100 - DNA, 389 bp, Glycine max
gcttgcttgagttgccaactttaagtttgtcaatttccgtgctgcttggttggttgcaattgcaagtgaacaattggctagtgtgtactagttttgaatcacaatggcagaggatgatggttacacgaaagatggaacagtcgattactgtggaaatccagctaataaaaaggaaactggaacctggaaagcctgcccctatatcttaggaaacgaatgttgtgagagattggcttattatgggatgagcacaaacctggtgctttatttcaagaaccggctaaatcagcatagtgctactgcttccaagaatgtctctaattggagtggaacttgctatatcacaccattgattggggcatatttggctgattcctaccttggaagat

SEQ ID NO: 261101 - DNA, 398 bp, Glycine max
gggaagaagaacttagctacaagctattgaaggatcaaagagaatggctcaagcaatggcatcaatgactagcttacgtggttcctctcaggctgtgttggaaggtagccttggctccacacgcttgaatgtggggagtggaagcagggtggcctcagtcacacgtgcagggttcacagttagagcacagcaacaacaagtgaatggtggtgaggtacaaagtagccgtagggcagtgctttcacttgttgctgctggtttgaccactggctcttttgttcaagctgtgcttgctgatgccaaacctatcaaagttggaccacctcccccaccttctggcggattacctggaacattgaactcagatgaaccaagagaccttaagctgccattgaaag

SEQ ID NO: 261102 - DNA, 396 bp, Glycine max
gccatgtcttcctctctcgctcttccttccactcccttcttcgccaatggaacaagaatcttcgctctcaagcactctctccctcgctctagggtttccatgagcgtctccgctggatctcaggcttccgttcaccaggctttgttcgccgattacaaggcctccacttcattcctcttcccgggccagggtgctcaagctgttggaatggggaaagaagctcaaaatgtgcctgctgctgcggttttgttcaacaaggcaaatgacattttggggtttgatcttcttgatatatgcatcaatgggccaaaagaaaagttagattccaccgttattagccagcctgctatttatgtcacaagtcttgctgctatagagctacttcgtgcacgtgaa

SEQ ID NO: 261103 - DNA, 379 bp, Glycine max
  unsure (1)..(379): unsure at all n locations
cccacgcgtccggntncgcttttttattattcttagaggccgnngatcgngtgcgggaaatgttctgcgggtgcacgggcacagcacgtgctcacaaagctggtgaattccactgggattccttttctcccaactccgatggggaaaggaattttacctgacacccacgcacttgcggctactgcagcaaggtcactagcgattgggaagtgtgatgtggcgcttgtggtgggagcgagactcaactggcttctacacttcggtgaaccaccgaaatggtctaaggacgtgaaattcatcttggtggatgtgagcgaagaggagattgagctgaggaagcctcacttaaggttaattggtgatgccaaacacgtgattg

SEQ ID NO: 261104 - DNA, 373 bp, Glycine max
gtttcggagctatggcgcaagttgcattctgatgttatgagattcttgcagcgggtgaggtgctgggagtaccgccagcaaccttctattgtccgtttgacaaggtctactcgcccagacaaggctcgccgcttgggtttcaaggctaagcagggttatgtgatttaccgtgttcgtgtacgaaggggtggccggaagagaccagttccaaaaggtattgtttatggtaagcccaccaaccaaggtgttactcaactgaaatttcagcgcagcaagaggtctgttgccgaggagcgagctggaaggaagttgggtggcctcagggttctcaattcatactgggtgaatgaggactcgacttacaaatattttg

SEQ ID NO: 261105 - DNA, 419 bp, Glycine max
agggttttagcgcagcttcttctagatttaaggaagatgggtaaggaaaaggttcacatcagtattgtggttattggccatgttgactctgggaagtccactaccactggccacctgatctacaagcttggaggcattgacaagcgtgttattgagagatttgagaaggaagctgctgagatgaacaagaggtctttcaagtatgcctgggtgcttgataagcttaaggctgagcgtgaaagaggaatcacaattgatattgccttgtggaagtttgaaaccaccaagtactattgcacagtcattgatgcccctggacacagggatttcatcaagaacatgatcactgggacatcccaagctgactgtgctgttcttatcattgattccactactggtggttttgaagctggaatttc

SEQ ID NO: 261106 - DNA, 403 bp, Glycine max
ctcagaaacctagcatctagccaagacaatgcaaacaaatgggtgcaagacaacatcaaaaactatgccaacaatgtcagattcagatacgtttcagtgggaaatgaagtgaaacccgaacactcatttgcacaatttctagtgcctgcattggaaaacattcagagggccatttctaatgctggccttggaaaccaagtaaaagtttccactgccattgatactggtgccttggcagaatcattcccaccatcaaagggttccttcaaatctgattatagaggagcatatcttgatggtgtcatcagatttctagtgaacaataatgccccattaatggttaatgtgtactcttacttcgcttacactgcaaaccctaaggacattagtcttgactatgcac

SEQ ID NO: 261107 - DNA, 390 bp, Glycine max
cccacgcgtccggacaaatcctagagtttttcctttggttgaaagagagggacctgggagggtcacaaacatgggagaggagaatgttaaacaaccgttgttggagaggaagtactacaaggactgcccaggttgtaaagtggatcaagccaaagagttgagtgagggaaagggtgtacctgttaaaaatctttttatcatgtggatggtggtgctgtgtgctgcactgcctatatcatctctctttccattcctctatttcatggtaagggatttcaatattgcgaaaacagaagctgatattagttcttatgctggttatgttggctcttcattcatgcttggcagatgtttgacatctgtattatggggaattgtagccgatcgcta

SEQ ID NO: 261108 - DNA, 387 bp, Glycine max
cccacgcgtccgcggacgcgtgggctgcaccatcgtcctgcatgtcagaggtccagagggtgaggttatcacacacactttctctctctctctctctcacccagatcttgtagcaatggcgagcgctcccactccacgcgaagagttcgtgtacatggcgaagctggcggagcaggccgagcgctacgaggagatggtggagttcatggagaaggtctccgcctccgccgagagcgaggagctgaccgtggaggagcgtaacctcctctccgtcgcctacaagaacgtgatcggcgctcgccgcgcctcctggcgcatcatctcctcaatcgagcagaaagaggagagccgcggcaacgaggaccacgtcgccgtcatccgcgacta

SEQ ID NO: 261109 - DNA, 387 bp, Glycine max
cccacgcgtccgcccacgcgtccgtaggcacccagagaggtattcaatatgaaaggaagggttgacgaaatttgcatcgatgagctgaaatatttaaaatcagttgtcaaagagacactaaggttacacccaccagctccacttttacttccaagagaatgtggacaggcatgtgagattaatgggtatcatataccagtcaaaagtaaggtaattgtgaatgcttgggcaattggaagagatccaaagtactggagtgaagcagagaggttttatccagagagattcattgatagctctattgactacaaagggactaattttgagtacattccatttggtgctggaagaagaatatgccctggcagcacttttggtttgatcaat

SEQ ID NO: 261110 - DNA, 431 bp, Glycine max
  unsure (1)..(431): unsure at all n locations
gaaaacccggcggcgacccacgcgnccgggtacttaccaggaaacncnngtgggtagttttacgagaccaaggccanggggaagggncattttaagggggggctgtgcatgccgagtagctgtggggaatgttagtatggaggaaaagcaaatcttccaaaatgttcaactgagtgttaatttccttgtctctttgttgaaaaagaactggcaaaatgtgagtagtagtccactatcaatattttgttaagtcattgcttctggtgccttcttttttgatgtgattttcttaaaggtatatgttcttggttctgttttattattggggtaattaaaaaactctgctactataagaatagtctttgatatcagatgtggcatggattgaatccatgcttattacaggctttatcttttgcttatatggttat

SEQ ID NO: 261111 - DNA, 419 bp, Glycine max
ggtgaagtcaacaaagaaagaattataagctttctccgagaaagcttctgttcacgtcagggtccggggtaggcttcttcattgagattgggttggtgttcagtgtgaatgcatttccagtgagataagagaaaaggaacgaggggaagaagcgacttatattaagaaatattaatatacttaatttaatattaatgttcgggtacccccctccggctcgtagttgagaagagctttcgtttaggaaagggctaaatgggtgcgatccctctcgttgagagtcaagggtctcctggagtagaaggcacatcctggatctattaagccggcaagggttcagcattggctttcacgaccgcaaaggggccatctctcagtcggagtagataagatagatatacttaatttaatatctttta

SEQ ID NO: 261112 - DNA, 376 bp, Glycine max
caaacccaaccctagattgagagtaaatatccccaaaaacaaaacacacatctctttcattctctccctcaccaaaccctagattgaaagaaaccctaacacaccatgggaacacccgagacatcgcgcgaaccctgccccgatcgcatcctcgacgacataggcggcgccttcggcatgggagcggtgggtggctccgccttccattttctcaagggtctctacaattcccccaagggcgatcgcttcgtcggcgccacccaggccgtgcgcctcaacgccccccgcgtcggcggcagcttcgccgtctggggcggcctcttctccgccttcgactgcaccatggtctacgcgcgccagaaggaggacccctgga

SEQ ID NO: 261113 - DNA, 409 bp, Glycine max
gttgttgaggcggggctagataaatcaaagggaccattcgcttcatttattgtgcagaatggcaccctcagacggggagatatagtagtttgtggagaagcttttggaaaggtgcgggctttatttgatgatggtggaaagcgggttgatgaagctacaccctctatacctgtacaggttattggattgaataatgttccaattgctggtgatgaatttgaggttattgaatcccttgatactgcacgtgaaagggcagaaactcgtgctgagtcattgcgtaatgagcgtatttcagcaaaggcaggggatggaaaggtcaccctttcttctttagcttcagcagtttcgtcaggaaagctgtctggactagatttgcatcaactaaatattattttgaggttgatct

SEQ ID NO: 261114 - DNA, 418 bp, Glycine max
ctgaccgggaaaagaaaaaccagctttcttcaagcacctagatttcctctctctctaaatggcgttctcttcttttctcggcagagtcctcttcgcctccgttttcatcctctccgcttaccaagaatttaattcttatggagttgatgggggacccgcagcaaaagcactcagaccgaagtttgatgcctttgcacatcaagtacattctaaagttggctttcaacttccagatattgatatgaaatttttagtggctggggctattgctctcaagggccttggagggattcttttcatactcagcagctcttttggagctttccttttgcttttgcatcaagtgatcactactccaatactgtatgatttctacaattatcacagtgaggacaaagaatttatccaacttttcatc

SEQ ID NO: 261115 - DNA, 413 bp, Glycine max
ctcaagcttcttgaaagtcagttggttcctttaaccgagcaacaattgatgggcatctacaacttgcagcagtcatcccagcaggctgaagatgctctttcccaagggatggatgcattgcagcaatcactgtctgagacattggctaatggttcacccagcacatcaggctcctcgggaaatgtggcaagttacatggggcaaatggctatggccatgggaaagcttggtactcttgatgggtttcttcgccaggctgacaatctgcggcagcagacattacaacaaatgcttcgaatattaacgaccaggcaatcagctcgagctcttctcgccatcagtgattatttctcacggctgcgagctctgagttctttgtggcttgctaggccaagggagtgaagcatttcaca

SEQ ID NO: 261116 - DNA, 376 bp, Glycine max
caaaaactaagttcatttcttgtgctttgctttattcctcaaaaccaaacatgtcgaacacatgcggcaactgtgactgcgctgacaagactaactgcaccaagggaaacagctatggtgttatagtagagactgagaagagctacatcgagactgttgacatggatgttccagcagctgagcatgatgggaagtgcaagtgtggcactaactgcacttgcacggactgcacttgtggccattaaggaatatgtatgaaaatgtaattgccatgtgtttggcaatacaaatctccaaataatgtaatcttcgtatgaataaatgtgtgctgttatcctacttcagggtctgtgtagtcatgcagtctgaatcatgt

SEQ ID NO: 261117 - DNA, 356 bp, Glycine max
cacgattctgtccactctcatgtgtgcccctcgttctgtttattcctgggacattgtcgtccagcgtgtcggaaacaagcttttctttgataagcgcgatgggtcgcagctcgatttgctctctgttcatgaaacctcgcaggagccattgcctgagtcgaaggatgatattaactctgcccattcgttgagcgttgaggctgcttatatcaaccagaatttctctcagcaggtgcttattagggatgggaataaggttacttttgatgaggctaacccttttgctaatgaaggtgaggaggttgcttctgtcgcttataggtataggaggtggaagcttgatgatgatatgtatc

SEQ ID NO: 261118 - DNA, 293 bp, Glycine max
atttcttactttcctctcacgctctgtccaaaactccgtctccgcaataacggaataaaaaaacaagtttaattactattatggcgccgagggatcataagacaagcacgctaagctaacggaacggtacagcggggtgaaggaggtgcattttctggagtgagaaaaagccggggggagatacgccgcggagatcagagatcccggcaagaagagccgcgtctggctcggaaccttcgacacggcggaggagcagcgcgtgcctacgacccgcacacgagagttcgcggcct

SEQ ID NO: 261119 - DNA, 317 bp, Glycine max
  unsure (1)..(317): unsure at all n locations
cccacgcgttcaaccacgcttacagccacgcgtttgnataatttatcaatccaattattnctggtgcttcttttatggctgcgtgggctggccctaagacttgcttctattggacctggggttggtcaaagcactgcttgtctgaaacattggctaatggttcacccaccacatcaggctcctcgaaaaatacgacaagctacattgcgcaaatggcttttgacataagctatcacaatactttggctgggtgtctcattacacactgacatttcctaatcctttacattactcctaaagctatagaaattcatatc

SEQ ID NO: 261120 - DNA, 393 bp, Glycine max
cccacgcgtccgcccacgcgtctgcctactcgtccggtcggaacagccctgcatactacagtcctccgcggcgaggatacggcggtggtggccgaggaggaggaggaggaggaggaggaggagggtccggcaggagggggttcggtggaggcaggcgcagggacagcaatgggagcctcttggttcgtaacattcccctcgattgcagacccgaggagcttcgcgtccctttcgagcgatttggacctgttcgtgacgtttacatacccaaggattattactctggagaacctcgaggctttgcctttgtgcagtttgtggatccttatgatgcctcagaggcacagtaccatatgaacagacagatttttgctggaagggaaatatctgtag

SEQ ID NO: 261121 - DNA, 397 bp, Glycine max
  unsure (1)..(397): unsure at all n locations
gggttttggcttaaaggaatattccgtggggtgatcatagtttttaccctgttcttatgatgggtgactcagaggtggcaaagttcggcttaaaagtcgggaagaatgagaaaaatgggttcccaaggggactagatcctgcaatatccaagttttttgtgcagctccaaagtgttgttaagtctcgacttagtagattagcaaaacaggatggaatgagtttgatgagttctgtccaaagaaaaggggataagtctttcagttactctgaagctgaactaaatgagcaactgcaagcatggagagaaaatccatcttgggttgacaagcctccactaataaaggtcactgctcccaaaggttctcttttgcaccttgatgtanaagttgatgttgg

SEQ ID NO: 261122 - DNA, 402 bp, Glycine max
gatcaagaggtggatgaggaggaagcctccctctttgacatgctctggttactacttgcaagtgttgtatttgtgccaatatttcaaaagattcctggaggcagtcctgttcttggctacttggctgctggtatcttgattgggccttatggtctctccatcattcgtcatgttcatggaacaaaagcaatagccgagtttggagttgttttcctgttattcaatattggcctggagctctctgttgaaaggcttagttcaatgaagaaatatgtctttggattaggctctgctcacgttttggtgactgctgtagttgttggcttggtggctcattatatttgtggtcaagctggccctgctgctattgtcattgggaatggcttggcattatcatcaact

SEQ ID NO: 261123 - DNA, 416 bp, Glycine max
atttctaactaattattgtgcttattattattgttgagaaagaaaagaatggcaaaggtaataaaattctttgagttgaacacaggggccaagattccttctgttgggttaggcacttggcaagctgagcctggtgttgtagccaaagctgtcaccacagccattctggttggatacaggcatattgattgtgctcaagcgtataacaatcaagcagagattggttctgctcttaagaagctttttgatgatggtgtggtgaagcgtgaggacttatggatcacctccaaactctggtgttcagatcatgcttcagaagatgtgcccaaagcattggataaaacattgcaggatttgcaacttgattaccttgacctctatctgatccactggccagtgcgcatgaaaaagcgatc

SEQ ID NO: 261124 - DNA, 425 bp, Glycine max
  unsure (1)..(425): unsure at all n locations
gcaaacatcaaccagcgctctatggtttgtttaagggacaccgagattgcaatgggtgcgtaccaacctcatcatacctgggcaagaagccagtatcatcctcgtgggcaaatccatggatataggatgtcactttgggctgaacatacgggtacgattgaagactgcttcttacaaccagagagccttgaatgtgttagtaggattagaacaatgggtgagctgaactggaagcaatttgcatcaaatgatgtaacagaaatgacagggcatctgctcaagtacccggtagaagtcgatcgaaagggtaaggtaagatccctcccgggccacgaagagtttccggatgtgggaggaaagattgtaggatcattcattgccattcangagaatctaaccatttgattacttttttacattcactt

SEQ ID NO: 261125 - DNA, 368 bp, Glycine max
cccacgcgtccggaaaaagaaaaaagtgattatagtttcacttcggccttatccagtttagggtttcgggtctctaccctatctttcacgtatcgaaaccttaaatttacgatcaggtctgagcaatctggttggtagaacctttggtcttagtgagtcaagttttatgtctgaattagacgatcaaattcctactgccttcgatccttttgctgatgcaaatgctgatgactcgggtgctgggtcaaaggagtatgtgcatattcgtgtacagcagcgaaatggtaggaaaagcctgacaaccgttcagggattgaaaaaggaattcagctataacaagatacttaaagacgtcaagaaagagttct

SEQ ID NO: 261126 - DNA, 387 bp, Glycine max
catccctttcatttcgatctccattctccctgacactcctctctctgtatccgagttctagggttttggggatagaaagcataaatcacgtacacgacgtcgtttgatttgagggcggcgcaagatgccggggcaccgctcgaagtcggagaagcacgacgtcgacggcggcggcggtgagaagcagctccggcgggacccctacgaggtcctcggcgtctcgcgcaactccacggatcaggaaatcaaaaccgcgtaccgcaaaatggcgctcaaatatcatccggacaagaatgctaatgatcctaaagcagctgatatgtttaaagaggttaccttctcttataatatcctgtcagatcctgataaacggcgtcaatacgactc

SEQ ID NO: 261127 - DNA, 422 bp, Glycine max
gtctctgccgtcacaaaaaagataaatgtctccgtgtcgtcgtgactaacagtgtgagtgagtgtttgtgtaaatcggggaaattgttgggctattcaagagatcggcagcggcgtcatgggtggagatggagccacggcaaacgcggaggcgcagtacgccacggcgaagatatcggtgtggtgggacatcgagaactgccacgtccccaagggttcggatccgcacgcgatcgcgcagaacatcagttccgccctcgttcgcatgaactactgcggccccgtctccatctccgcctacggcgacaccactcgcatccccgcctctgtgcagcacgcgctctccagcaccggtatcttcctcaaccacgtccccgccggcgtgaaagacgcaagtgacaagaaaatcttggtgatatgctg

SEQ ID NO: 261128 - DNA, 400 bp, Glycine max
ggcgtcgagaccagaggtgattgcgccgcctgagattttctacgacgatgccgaagctcgcaagtacacctcttcttcccgtattgttcaaattcaggcgacgctgtcagagagagctcttgaactacttgctttgcctgatgacggcgttcctaaattactccttgatatcggttgtggatcgggacttagcggtgagacaatctcggagaatggacaccattggattgggcttgatatttcagcatcaatgcttaatgttgcggtggagcgagaggttgagggtgaccttttacttggtgacatgggccagggtataggaattcgtcctggagttatggatggggccatcagtatatctgctgttcagtggttatgcaatgctgataaaacctctcac

SEQ ID NO: 261129 - DNA, 337 bp, Glycine max
taaagaaagaaagttccgagttcaaatatataataaaaaaaaaaaaaaaaaaaaaaaaaaaaaaaaaaaaaaaaaaaaagagggggaaaaaaaaaaaaaaaaaaaaaaaaaaaaaaaaaaaaaaaacaacaaattggagtgtcattaaaagggagaaaaatagaatttcctatgatatcaaataaaaaaaaaataaaaagaggggaacaaaaatttaattaaattgggggggccttataaaaaagaaaactttgaaaacccggcggataacaaaaaaaaacctccctaaccgatactcccattataaaaaacagccaaatggcaaaaaacccccccc

SEQ ID NO: 261130 - DNA, 413 bp, Glycine max
cggccggattcccggggaaaggataaagggttggttcttagagttgggctcctcagttgttgttttggagcatgttgcaatcaaaggggttatgacccattgtggatggaactccactttggaaagtgtgtgtgctggtgtgccaatgattacgtggcctctctcggccgagcaattttcgaacgagaagttgataactgatgttttgaagattggtgttcaagtggggagcacggagtggtggtcgtggaattcagaatggaaagatttggtgggaagagagaaggttgaatcaccagtgaggaaattgatggtggagagtgaagaggcagaggaaatgacaacaagagccaaagagattgcagataaagcaagaagagctgtggaaaaaggtggaacatcttacgctgatg

SEQ ID NO: 261131 - DNA, 379 bp, Glycine max
cccacgcgtccgctgtaattcatcagttgattcaaggcaactctgacatgttacctgagcatcaagtaaccagtttaggtagacattttgaaagtgaccatgattcagcaccttctcctgtcaatgcgtctgttgacaaaaatatgaaagattccaaagaactggttactgttcctgaaatggatgaggaactagctatggtacctgtacaccagaagccaaagcgatctgagatcgtccagcgtcgaatacgcaggcctttttctgtagatgaagtagaagcactggttcaagcagttgaaaaactaggaactggaaggtggcgtgatgttaagctttgtgcttttgataatgcaaagcatcggacatatgtggattt

SEQ ID NO: 261132 - DNA, 397 bp, Glycine max
  unsure (1)..(397): unsure at all n locations
agaaaagttagggttcacaacttttttttttccttttgcttgcgaatctgaatcaaataatcaatcatccattcgttattcatcatgtcgtcggcgaagaaaatcacgctgaagagttcggacggcgaggctttcgaggtggaggaggcggtggcgctggagtcgcagacgataaagcacatgatcgaggacgactgcgccgacagcggcatccctctgccgaacgtgacgagcaagatcctggcgaaggttatcgagtactgcaagaagcacgtcgaggccgcgaatcccgaagacaaaccctccgaggacgatctcaaggcctgggacgctgaattcgtcaaggtcgaccaggccacgctcttcgatctcatnctggctgctaactacttgaaca

SEQ ID NO: 261133 - DNA, 416 bp, Glycine max
cccacgcgtccgcccacgcgtttggttcttggcctggcaatttgtaggaggttcgtaaatcttatggaagggcatatttgggttgaaagcgaaggtattggtaaaggatgtacagtcacttttattgtaaaacttggaatcccagaccgatcaaatgaatttaagctaccttttgtacctaaagtaccaggaaatcatggatctacaaactttgctgggctcaaagttcttgtcatggatgacaatggggttagcaggacagtaacaaaaggacttcttatgcatttaggatgtgatgtaacaactgcaagctcaagtgaagaatgtctgcgtgttgtttctctggaacatgaagtggtcttcatggatgtttgtacagggttagatggttatgaacttgcagtccgtatacatga

SEQ ID NO: 261134 - DNA, 403 bp, Glycine max
  unsure (1)..(403): unsure at all n locations
cccacgcgtccgggcatttgtccactggtatttgggtgaaggaatggaagaaggtgaattctctgaagcccgggaggatcttgctgcccttgaaaaggactacgaagaggttggagcagaaggcgaagaagaagaagaagaacccgatgattactcaaagtagtcaatcattcatcaccagctaccttacctacatctaccttctttcctctgtctaatgtctatccttgtccattgaattttaagcatctttctgttgtgtgctagctctgttagtgttgggtgagataattgctttcctcatgagaagcagtggtttatttgtcagtttgaatcacttttaagtttcagtgaaagagcaaaataaaggatagcgtangagtgctgcagtttccattactta

SEQ ID NO: 261135 - DNA, 404 bp, Glycine max
cccacgcgtccgggaaatgaagtcttctttaacagcacagttaacagacgaggctgatacatctgaagtcattgagactgtgaagctgcgagttagagatgctaaattgccggacattgaggtggtgcggatcttgtgggatgttttaatggatgctgttcagtggtctggaaaaaatcagcaacagaatgccaatgcagcccttcgtcaggtaaaaacttgggcagaattgttgaatacattctgcaccactgggaaacttgagctggaactgatgtacaaagtacagatgcaatgctatgaggatgctaaactgatgaagctgttccctgagattgttagatctctttatgaccaggatgtgctggctgaaaataccattcttcattggttccgaaaaggaa

SEQ ID NO: 261136 - DNA, 384 bp, Glycine max
  unsure (1)..(384): unsure at all n locations
cccacgcgtccggcactctcttcnatttttcttgaaacagatttgacagctgagcaacgactgatggtggagacaatattgaaaagcagcaatttgttggctaccctcatcaatgacgttttggatctttcacggcttgaagatggcagtcttcaacttgaagcagcaacatttaacctccattctttgttcagagaggtccttaacttgattaagcctgttgcatctgttaaaaagttatcactcacttcacatgtagcctcagatttgccaatgtatgccattggtgatgaaaaacgtctcatgcaaactattttgaatgttgttggtaatgctgtgaagttctcaaaagagggttgcatttccatcactgctttcggtgca

SEQ ID NO: 261137 - DNA, 375 bp, Glycine max
cttgagctattttatcattatcaccgtcattgccaattctcctctatagcttgtgtgagtatagaaataagagatggaagagagagtgagtggatgtagccacgtcttaatggttccatacccaagtcagggtcacataaacccaatgctccaattcagcaagcgcttgagcaccaaaggagtgagagtcactatggtcacaaccattttcatttccaagtccatgcatcttcaatcttcttccttgttaggaaatgttcaacttgatttcatatcagatggctgtgatcaaggtggttttggtcaagctggtagtgtgtcaacctatttatctcgcatgcaagaaataggtttcaataactttgaggaactcat

SEQ ID NO: 261138 - DNA, 392 bp, Glycine max
cccacgcgtccgggaaatgaagtctttttttttagcacagttaacagacgaggctggggcatctgaagtcattgagactgtgaagctgctagttaaagatgctaaattgccggacattgaggtggtgcggatcttgtgggatgttttaatggatgctgttcagtggtctggaaaaaatcagcaacagaatgccaatgcagcccttcgtcaggtaaaaacttgggcagaattgttgaatacattctgcaccactgggaaacttgagctggaactgatgtacaaagtacagatgcaatgctatgaggatgctaaactgatgaagctgttccctgagattgttagatctctttatgaccaggatgtgctggctgaagataccattcttcattggt

SEQ ID NO: 261139 - DNA, 384 bp, Glycine max
atagggttttccccggcgggatcagtcccgtaatcccttcttcatcctgttttcctaaaaaattgagagtccagccgcaacgggccttgagctctgacccctacgttctggaactcgccgaaaccctagaagactccttcccctcctctccctccaccccactcgctctccagaacctgcgactctcctactgccaatccctcctctacactccatggccctcccgccgagacgagcccttccgcttcaccgacctctccttcatccgccaatcccgcatcctccccggctgccccaccatcttcctcctcactcccacctgccaccttcccaacgacgtctacgtcggctccctctcctgctgcttcccctctctcctccaac

SEQ ID NO: 261140 - DNA, 415 bp, Glycine max
  unsure (1)..(415): unsure at all n locations
cccacgcgtccgaactacatggtctcttgaaaacgacccgtttcctccctcgcacggatccacccgaaatctgagattccttcgaattgttaactctctttcagtttcaagttggaaactttttcgattttcgctttctggaggtgtgaattgttgtttgaaagtcacaagcaatggtgaaggacactgcgtattatgacatattaggtgtcaattatgatgcatctgctgcagagatcaagaaagcttattatgtcaaggctagaattgttcaccccgataaaaatcctgaggatcctaaggccgcagaaaactttcagaaacttggtgaggcttaccaggttttaagtgatcctgggaagcgtgcggcatatgatgagcatgngaaggagggagtaccacaagattccatgat

SEQ ID NO: 261141 - DNA, 414 bp, Glycine max
ggccatataatttttttttatttgaattaatgtccgggatcatccacaagattgaggagaccctccatgtgggagggcgcaagaaagaggagcacaaaggagaacaccatggtgagcacaaaggtgaacacaaaggagaacaccatggtgagcacaaaggtgaacacaaaggagaacaacaccatggggagcacaaggagggacttgtggataagatcaaggacaagatccatggtgatggccatgacaagggtgagaaaaagaagaagaaggacaagaagaagaaggagcatggacatgaccatcatggtcatagcagcagcagtgacagtgattagatcttatatgttaagcaggtgtacggtacgatggtagtgaggagccagaatccctcttcctgctttatgatataat

SEQ ID NO: 261142 - DNA, 386 bp, Glycine max
agaacacaaaaccatggtgtcaccattttctctcttagtaactttaatcctcttatgatcagtttcattggcagctgcagcttcacttgaagaaaactttgtccaatgtctcagcttctattcagacaaagcagctccattttatgcatcaatttacactccacaaaatgcatcattcaacaagatccttgaatcctctgcacagaacctaaggtatttggtgccttcagcgccaaaacctgagcttatattcacacccttgactgattcccatgtccaagtggcagtgacttgctcaaagaagcttggtattcatctgagaattcggagtggtggccatgactatgaaagactctcatatgtttctgaagttgagtccccctttt

SEQ ID NO: 261143 - DNA, 411 bp, Glycine max
  unsure (1)..(411): unsure at all n locations
ctcgcctataaaatgtccgccactgtttcactctgcgccacttccagaacaactttctcatcatcgaagcccgtcgcgagaagaagctgcttcgtcgcggttcccaaaatcgcgtttcccaagctccgtttcaaacccgtcgctatggctacgctcggcgctcgcatggtggccgccgcacccaccgtcactccgccggcctcgctcgacttcgaaacctccgttttcaagaaggagaagattaacctcgctggacacgacgagtacatcgtgaaaggagggagggatttgttccctctgttgcagggtgctttcaaggggattaagcagattggcgtcattggatggggttcgcagggacctgctcaggcacagaanttgcgggactcgcttgctgatgcnaagtctgat

SEQ ID NO: 261144 - DNA, 354 bp, Glycine max
caccatcgggcccagcaccaattccttttccctctcccccaaattagggtttctctctgggaatgtgattcagcgcgcggcagcatcaatggcggagaagagattcggcgtgatagggtacgctctggcgccgaagaagcagaacagcttcatccgcgactcgctggtgagcctagcgaaatcgcgagggattgagctcgtgcgcgtggactccgacaaccccctcgcggatcagggccccttcgactgcgtcctccacaagctctacggcgacgactggaagcgccagctccaggaattccacaccctctacccaaacgccgtcatcctcgacgcccccgaagcgatcgagcg

SEQ ID NO: 261145 - DNA, 397 bp, Glycine max
ctcgcctataaaatgtccgccactgtttcactctgcgccacttccagaacaactttggcatcatcgaagcccgtcgcgagaagaagctgcttcgtcgcggttcccaaaatcgcgtttcccaagctccgtttcaaacccgtcgctatggctacgctcggcgctcgcatggtggccgccgcacccaccgtcactccgccggcctcgctcgacttcgaaacctccgttttcaagaaggagaagattaacctcgctggacacgacgagtacatcgtgaaaggagggagggatttgttccctctggtgcagggtgctttcaaggggattaagcagattggcgtcattggatggggttcggagggacctgctcaggcacagaatttgcgggactcgcttgctg

SEQ ID NO: 261146 - DNA, 237 bp, Glycine max
caaggaagaacatgatttgatgatgagaagattcttgcgggctcgtagtttggatgtggagaaggcttcggcaaggttccttaagtacttgaaatggaagcgttgatttgttccaaatggttgcatatcaccgtcagagattgccgaagatattgcacaggacatggggtttacgcgaggactcgacaagataggtcgacctatagctggtacctttagtgcacaacatcttcaaag

SEQ ID NO: 261147 - DNA, 447 bp, Glycine max
  unsure (1)..(447): unsure at all n locations
cccacgcgtccgctctctctcaccaaagccttcctagaacgaaaaaaaaaagaagagcaattttccctcaccaaagaagaagaagcaaacaatggccgatcaacttaccgatgaacagatctccgagttcaaggaagccttcagcttgttcgacaaggacggcgatggttgcatgacaaccaaggagcttggaactgttatgcgttcattggggcaaaacccaactgaggcagagctccaggacatgatcaatgaagtggatgctgatgggaatggtaccattgacttccctgagttcctaaatctcatggccaggaagatgaaggacactgattctgaagaggagctgaaagaggcattccgggttttcgacaaggaccagaatgggttcatctctgctgctgagctccgncatgtgatgaccaacctcggggagaagctcaccga

SEQ ID NO: 261148 - DNA, 447 bp, Glycine max
atggcctcagccgcatcctccaccactttctctctcctcatactccacgcacacctacgggtccccctccccctcgcgcgtgcaactcacctcctccctccgcgcccgcccgctgcgccgactgggcttcgccgcggcggacccgctgctcgcgacgagtgtagcgtcgcgcgtggcagctgcgagaggaggaagaaagggcgcgaggggaatagcgtcgatggcgaagaagagcatgctatacctgatcgcggacgacctgaatgcgaagaaggacttcgtcaggaccgacctcaacgtcccgctcgacgacaaccagaacatcaccgacgacaccagaatccgcgccgccattcccaccatcaaacatctcatccaaaacggcgccaaagtcattctctccagccactagaagcggccgaagggtgtcactcccaaatacagctt

SEQ ID NO: 261149 - DNA, 474 bp, Glycine max
cccacgcgtccgtcaacccccaaacgcccaaacgatgttagctgcaaacgccaccttaaaaatcgaagctttatgatcaccaccctagtgttgtgttggtgatgaatcctaggagcagcttgtgttcttctctgttcatgttcatcaccttgttggggcttcatgtgtacttcgcttcgtcgcaggtcgaagactacgtgagatgtctacggggcatcgaggacactgtctccgaccctcaggctcggctcgccacgtggaggttcgacaacacaacctccggtttcatctgcgacttcgagggcgtgtcatgctggggccgaagggagaaccgtgtcttaggtttggacctccgagatacgaagctttcgggtaataagatccctgaggctttgaagtactgtggaaagagcattcaaaggttggatcttgcttcagattcttttacttcgaagatcccacgtgagatatgca

SEQ ID NO: 261150 - DNA, 346 bp, Glycine max
acggtggcttgccaactaattttgattctacttactgctatgcattgggttatggtgctgcagccctccttcaaagtgggtagactggattaatatcatcgattgagaatttatgggctcctgttgaagaatggactgttggtggaactgcactcactggattgatggacgcgtagaggagacatggtctattcaagcctgtgatcaagatggcaatggtagagcttgaacgggcaccctttcaaaagggtgcctacttgagggatgagtgggccctaaaaaattgctacattagtccaggtccaattcaatacactggtccaagatcttgtgcagttaatcacac

SEQ ID NO: 261151 - DNA, 344 bp, Glycine max
aaacagaggctacgtacgatcaaattaattaagatggcggaagtgaggaacaaacaagtggttctgagggactatgtgagtggttttcctaaggaatccgacatgaacatagttgaaggaaccacaatattgaagcttccacaaggttccaatgatgtgcttctaaaaaatctctacctttcctgtgacccttacatgagaatgctcatgaccaatgtggaaggcctcgacgtgtttggcacctatacacctggctctccattaacagggtatggagtgtccacagtcctagaatctggacacccagattacaggaaaggggatttagtgtggggatctacaaa

SEQ ID NO: 261152 - DNA, 256 bp, Glycine max
acgcccacgcgttcggtttcgaatagattatgctaagtctttgggaatagtgctgcaatggcttgcagtcaggaggaggtgacccttttgggagctactggaagcgcgtttgtgtgcagggttcatattgccctcaagttgaagggagttcaatacaaatatgtcggagaaaatttgaggatcaagagtgaactgcttctcaaatccaacccagttgacaatgaggttccagtgcttattcacaatgagaagccca

SEQ ID NO: 261153 - DNA, 385 bp, Glycine max
cttggatcttaccctcttgtttgctaatattctcattcttctgtctctgcttcttctccttgtaagttgtctcgctcgctctctccgcctgctactgctacttgtggactgtaagagctgaactaagagatggggttgtctttcaccaagctttttagccggctctatgctaggaaagagatgcgtattctcatggtaggtcttgatgctgctggtaagactaccatcttgtacatgctcaagctgtgagaaattgtcacaaccattcgcacaattggattcaatgtggagactgtggaatataagaatattagctgtactgtatgggatgtggatggccaagataagatccgatgcttatggggacactacttgcaaaacactc

SEQ ID NO: 261154 - DNA, 425 bp, Glycine max
cttgatcggatgggagcagatccatggaaagtgttaaatcaggctagatctaagcttcggcatcataatgctgccatacaagttccaataggattggaagatgattgtaagggactagttgatcttgtgcagttaaaggccttctatttccatggttcaaatggtgaaaatgttgtcactgaagaagtgcctgcagatatggaagccttggttgcagagaaaagacgtgaactcatagaaaccgtgttagacgatgacgatgaacttgctgaagcttttcttggtgatgagaccatatcagctgctgatcttgaggaagcagtttgtagggctaccatagcccagaaatttatatcaggattcatgggtagagctttcaaaaataagggggttcagccacttttggatggtgtaattagttattt

SEQ ID NO: 261155 - DNA, 459 bp, Glycine max
ttccactttccgggttttttattcgatatttcttgttccaatgatcgagcacttttttgggttccttgaccgtctcgcgcgccctgtccccgatgatccccttgctcacactgctcatttgccttccgaaccatctccacctccggcctccatggattccgacgcctcctacagctccttcacctcaccatccaatgattgctactactacgtcctcgactaagacgatccgctgatccatatagcatactgcctcatctgccactattaggatatcatttccaactttcataccccctgctcctttaactacattcttaactatgcttacaaaaagtgtgtccagcattgctgtcatgataaatgagacatatcttgtcatatatttcatcatccatatcaaccttcatatactgccctcccacctcattctaatcccttataaactaccattgatat

SEQ ID NO: 261156 - DNA, 317 bp, Glycine max
tatacaattttccccttctttatacaatcccttaatcccttcttaatactgtcttttttaaaaatcttgagtcccttcacaactttccttaaactcttacccctactctctctaacttacctaaaccctataatactccttcccctcctcttcctacaccctactccctcttcataacctctcacttttctactaccaatccctcatatccactccatttccctctttactctactatcctctttctcttcacctacctattcttcatctctcaatccctcattcttcccattttccccaccatctttctccttact

SEQ ID NO: 261157 - DNA, 471 bp, Glycine max
attctttaggttgtgctgatgctttgagcatccataatttgcaaacaagcggttctatggtatcaaatcatgttatcaaccctggtagcaccttgaagtcatcacaaagtatatgtctgccacatgcagttgctgatactaagttagtttctagaactgaagagcattcacattatagtacaaaaggtgggaataatggcatcctatctggcactgctacttcaaattctaaaaatgacctgaaaacatctgttctaaaagtttctggtcaacttataggatcaaggttgtctaaaccctttccatcagctgttgggagttatattactggaaaatacagtgataagggtctttttccatatgatttgattgtcaagctttataattggaacagagaggagttggaaccatttggccttataaactgcggaaacagctgttatgctaatgctgtactccagtgcttggcat

SEQ ID NO: 261158 - DNA, 325 bp, Glycine max
cccacgcgtccgattttctctctcacttttcaagaatcgtaagctatgggaaagtcttacccaactgtgagtgctgattaccagaaggccgttgagaaggcgatgaagaagctcagaggcttcatcgctgagaagagatgcgctcctctaatgctccgtttggcatgggactctgcttgaacctttgacaagggcacgaagaccggtggacccttcgagaccatcaagcaccctgccgaactggctcacagcgctgtcgacggtcttgacatcggtgttaggcttttggagccactcaaggcggagttccctattttgagctacg

SEQ ID NO: 261159 - DNA, 349 bp, Glycine max
gggtttttggctacggttcactggtgtggaaccctggattcgattacaatgagaagattataggtttcattaaggactacagacgcgtgtttgatttagcgtgcattgatcaccggggaacacctgaaaacccagcaagaacttgcacgttggaggagaaggaaggggctatttgctggggagctgcttattgtgttcgaggaggccctgaaaaggataaactggctatgcagtatttggagcgacgggaatgtgaatatgacagatagactcttggaaacttcttcaaggaaagagattcactgcaccctactttaactgatgtaatagtattcacatctactccaga

SEQ ID NO: 261160 - DNA, 326 bp, Glycine max
aacaacttctgctacttcctactccaaccgcacttctgctccgcaattatcatgggcaaggtcaagatcggaatcaacggatttggaagaattggccgtttggtagccagagtggctctgcagagagacgatgttgaactcgttgccgttaacgaccctttcatcaccaccgattacatgacatacatgtttaaatacgacagtgttcatggacactggaagcatcacgatgtcaccgtttaggacgagaagacccttctcttctgggacaagccagtcactatttttggacacagaaacccttgagaagatccatgggggtcaac

SEQ ID NO: 261161 - DNA, 326 bp, Glycine max
cccacgcgtccggccacgcgtccggtctggggcttcaatgacctgtgctggttgccagggtactggcatgaaggtgtctattaggcaccttggtccttctatgatgcagcagatgcagcatccttgcaatgagtgtaagggtactggagagacaatcaatgactgagacaggtgccaactgtgcaaaggagagaaagttgttcaggagaagaaagtacgagaagttgttgtggagaagggaatgcagaatggacagagtgatacattgcctggtgaagctgatgaagcagtatgttgagctttgataccaacaccgtgctggatta

SEQ ID NO: 261162 - DNA, 343 bp, Glycine max
ctccatattaccaactcaactattggcattgaactgaagacaactaatggtagaggtggttatatgaataacatcttcatttctgacgcaaaattggttgatatttacttgggtatcagcatgacgggaagctctgtctcccatccagatgacaagtactatcctaatgcagtgccggatgttgggaatgttacttttgagaatgttgattggttcaaatattgctattgctgcgaagttttcacgaataattgaatcgccgattactactatctgtcttttgaacgcgacctttttcttgcagatctgagtcatcatctacttcatggtcttgttctgacat

SEQ ID NO: 261163 - DNA, 460 bp, Glycine max
ggattttcagttcctcacaggcacttcttgtgaagccagtgaagaggcggatgatggggaagagcaagggattgagaattgcatgccaagccaccagcatttccgctgatagagtccctgacatgggcaaaagacagctcatgaatcttcttcttcttggtgccatttcactccccactgctggaatgcttattccctacacctacttctttgtccctccaggttcaggttcttcagctggcggtactgttgccaaggatgccgttggaaatgatgtaattgccgagaattggctcaaggcacatggacctggtgaccgaacccttacacaaggattgaagggagatcctacctatcttgttgtggagaaagacagaacccttgcaacatttgcaattaatgccgtgtgcactcatcttggatgtgtcgtgccatggaatcaagcggagaacaagttcat

SEQ ID NO: 261164 - DNA, 430 bp, Glycine max
aaggaccttattgcgaatgcacagggtttcacgcctgtgatgtttgatgacaagatccatgatgaaaacaattcactctacaatacccctccttgttatgggatttacatgtgtgggttggtgtttgaggacttgttgtagcaaggtgggttgatggaggttgagaggaagaatcacaagaaagctgatattctctacagtgcaattgatggcagcaaagggttctataaatgccctgttgagaagtctgtgagatctttgatgaatgtgcctttcactctggagaaatcagagctggagggtgagtttatcaaggaggctgctaaagataaaatggtgcagcttatgggacatagatcagtgtgaggtatgacggcttctatttacaatgccatgcccttggctggtgttgagaagttggtggctttca

SEQ ID NO: 261165 - DNA, 229 bp, Glycine max
cccacgcgtccgggatggtttgcgaacaaaagataaagagcgtatacttgttcttgcggctacaaatagaccttttgatcttgatgaggctgttattaggagacttccactaagattgatggttaatttgcccgatgctccaaacagagaaaaaatggttagggtaatttaagcaaatgaggaattgccacctgatgttgatttcgaaccattagcaattttgactgat

SEQ ID NO: 261166 - DNA, 369 bp, Glycine max
cccacgcgtccgtgaaatctgggggcaggcaggattcttttgaagatgaaccatctcaaaatggcagtttggcatatactgctcaaaatgggggactaaatacacctcatacagtagtcaatcaaactatgtctatcatacctatctctgcaggtggtgctcctggagctgttcctggtcccacgacaaacttaaatataggaatggattattggggtacaccagcttcatccaacattcctgcacttggcagaaaggttccatctactgcagttgctggagggatggttaccgttggatctcgggatagggctaagtcacaactttggctacaggatgaaagagagcttaaaaggcaaaggcggaagc

SEQ ID NO: 261167 - DNA, 245 bp, Glycine max
tcaagacacactttgctagaccaaattggcgcagtgttttcaaacacactgcactcaaacaccctgggaaaagagttggtgttttctactgtggtgctgtctcattggttggagaacttacgaggctttctcttgactttttccaggaaaaccaacatgtagttggattttcattattagtattatgaaattcttgtatcatagtttgtatttatgtttccaactgtaacgtatgtatttgaggg

SEQ ID NO: 261168 - DNA, 358 bp, Glycine max
cagggaagagaaaggactagagacagaggaagcatatccctacacaggaaaagatggtgtctgcaaattctcagctgaaaatgttgctgttcaagtcctggactctgtgaatatcaccttgggtgctgaagatgaactaaaacatgcagttgcatttgttcagccagttagtgttgcctttcaggtggtgaatgggttccatttctacgagaatgtagttttcactagtgacacttgtgttagcacttcccatgatgtgaaccatgccgtgctagctgttggatatggagttgaaaatggtgtcccatattggctcatataatattcattgcgagaaagctggggtgaaaatggctac

SEQ ID NO: 261169 - DNA, 460 bp, Glycine max
aaattccaaacacatgtttcggtgtgccgcctcattggaccagcccagagcctcacctaaccgacacccttctctcttttcctctcttctcttctattcctaaattgtacttctgttttgccagtgattgaagctagttagaacaagatgttgcagctactctacactgcgattttctccgaaatgcttttgattctcacgctcgtcttcaaaaccccactgataaaactcgtcatcgattccctcgatagtgtaaaacgcggtcgcggtcccgtggtcgtttccaccgtgggcgccacattgatggtggttctcgcttcgagcctctacagcatggccaagatccaacaacgcaccctcgatgccgtcatagtcaaccccaccgaccaaatccttatgtccaagcacatgctcaaagcttctctcatggggtttctgctgatcctctctctgatgattg

SEQ ID NO: 261170 - DNA, 467 bp, Glycine max
ataaaagaaacccaaaatctctctctctctctcgttcgctttccgtagcgatatatatcccaaaccctaccgttaggttccccaattcttcaacaccccgtggaccggtgctctgcttcttagtagttcgtacggtttttccgtcgattgcctccgaaacgatgtcgtatcgcccaagcgggaactccatgaccgaggtccgccggaaccggtacaaggtggcggtttactcggaggaaggtcgtagacggcgagaggacacgatggtggagatccgcatgaaccgcatagaatagagtttgcagaataagaggcgcaaagggctccaacctcagcagatgcctgcgtccgttcactctagattggttgagaagaagttggaacatctaccatcgatggttactggtgtttggactgatgataataacctgcagctcgaagcgacgacgcagtttcggaagctgctt

SEQ ID NO: 261171 - DNA, 245 bp, Glycine max
cggacgcgtgggcggctccgttaggttttccttccgcgtgtttgctcggaactactcctccactcatcgtttaaaatgtctgacgtggaagagtttcgatgctgcattggtggccttgcatggtcaacgtctgatagaaagttaaaggatacatttgaaaaggtttgcaagcttattgaggcagaggtggttgttgacaagttctctgggcgttctcgtggttttggatttgtcacatttgatga

SEQ ID NO: 261172 - DNA, 255 bp, Glycine max
acgcccacgcgtccggaacaatttaagcgccttcttggagtcaaaccaacgcctaagacggaactgagaagtacacctgctatatctcagccaaagtcattgaaatttgcacagaattttgatgcaaggacagcttggtctcagtgaagcactattggaagaattatggatcagggtaactgtggttcttgatgggcatttggcgctgttgaattattgtcgtgtcgcttttgcattcattttgatgtaaatatc

SEQ ID NO: 261173 - DNA, 456 bp, Glycine max
  unsure (1)..(456): unsure at all n locations
ctagcttggactatgggttcaagggagctgaaattgccatggcttcttactgctctgaactccaatatcttgcaaatccagtaactagccatgtccaaagtgctgagcagcataaccaggatgtgaactctttgggtttaatttcatccagaaagacaaatgaagctatcgagatccttaagctcatgtcttccacattcttgattgcactttgccaagcgattgacttgaggcatttggaggagaatntgaaaaactcggtcaagaacactgtgagccaagtttccaaaaggattcttaccacaggtgtcaatggagaactccatccttcaagattttgtgaaaaggatctgctaaaagtggttgatagggagtacgtattttcctacattgatgacctctgcagtgctacatacccattgatgcaaaaacttaggcaagtgcttgtagatcatg

SEQ ID NO: 261174 - DNA, 419 bp, Glycine max
catcaactttacctagctttaaaaaacaacttcaactacacacctattggaatctttatacacctatgtatacatatatatatatatattacttcatctccacacatattcaattccattaatatctaataaacataactacaataagaaactacttatatttagaaatattacctactataataaatactaatttaccagatccctcctcctactattcgaccataacaactaacatctattaacgaactcaataactccaacccctctacaatccattcacaggactaactataatcaaatcacacacttaatctacttatattacaaaaccccataatcttctatcaatatccaaattcttatctcatcacactaccatctcacacacatataccaacttcaatatccaccatcta

SEQ ID NO: 261175 - DNA, 465 bp, Glycine max
cccacgcgtccgcccactcttccgcttcctcttcctcttcctctgtgaagagggtttctggcttttttaacaacaatttcgaatcgattcgattgggtctctcaaagttttgattgcacagtttgcgaagatgcctcgtcccaaaagaaaagctgccccaccaatcacttcctctgatgttgattcttctcttcgcaccgaaccaaagaaatcaactataaagcaatttgatcgaatagataacttatttgagtcatatgcaaataagtcattgggattaattgacccatacgggattgaagcactttgtaaagatgtgcatgtggaccacacagatgttagaatgctcatacttgcttggaaattgacagctgacaaacaaggttatttttccaaggatgactggcgaacagggctcaaatgtttaggggctgacactctaccaaaattaacaaaggctattaa

SEQ ID NO: 261176 - DNA, 373 bp, Glycine max
cccacgcgtccggaagatgttgatcgagcagttgcagctgctcgcaaagccttcgaccgcggaccttggccaaagatgacagcctatgaaagacaaaggatattgctgcgcgctgctgatctgtttgaaaagcacaatgatgaccttgctgcactcgagacttgggataatgggaagccatatgaacagtctgctcaaatcgaaattccaatgctggttcgcctatttcgatactatgctggttgggcagataagattcatggtctcacagttccagctgatgggccatatcatgtgcaaacattgcatgaacccattggtgttgccggtcagatcattccgtggaacttccctcttgtcatgtttggctgga

SEQ ID NO: 261177 - DNA, 415 bp, Glycine max
aagagaatggttgggatttctgacatggatagtctcattaagaaaccgggcgttttatcagttcacataggcagtaaaatacctgtgtctgaatctacaaggcaggaatttttggatattgatagcattgcatatatgctgcgtaaggaaattgaattactagagagcatagatcttatccggtgtaaaagctgttacgtaatcattgtctaaccaaagccccacagtttttcactttttatttccttgtaataaatttataggcaatttttgattattcaattctgtttcaactttcatcaaatgcagaaaatactgatacttcctctttttttaccttaataattgcagactataattgtacaaataagtgattattttatcatgtcaagtcatggtcctcttaaagcatatt

SEQ ID NO: 261178 - DNA, 465 bp, Glycine max
attcaacacgccataattgcaccccgttgaaaacttgtaacgttgattaaatgatggcttgcgtttctaaaccttgtcacggaaaaaagatgattttggctacgaatttcaagacgattctagaatgagattagtagcatcggcagcagagacagtgtgattgtgctctccctcgtatgttaccaccagcatagctggatcatccaaagctctttgcacatgttttcgcgctggacaccctctcacactactgcacttgtagtaacccctgcaattatcattcccaaaaccaaaaaattaacacccatgaccactcctcagattcaataggttctcagaaacagcatataagaaacaaattaattgggtccactttaaattttgaaatcaagtgagagacatataaaggtaaatggatgattttaaagaaaaaaaatgttacgggattcgatccactttactaat

SEQ ID NO: 261179 - DNA, 470 bp, Glycine max
  unsure (1)..(470): unsure at all n locations
gggagttgaaagaaagaatggaaggatgggagtgacaccgaaaattgcgccttcgatgctctcttccgacttcgccaatttggcttccgaggctcagcgcatgctccacttcggcgccgattggctccacatggacatcatggatgggcattttgtccccaatttaactattggcgctccagttattgaaagtttgagaaagcacacaaagggatatttggattgtcaccttatggttacaaatcctcttgattatgttgagcccttggcaaaagctggtgcttctggttttacatttcatgtagagacatcaaaagataactgggaagaacttatccaaagaatcaagtcacatggcatgactcctggtgtagcattaaagcctgngacccccattgaagaggtttatcctctggtggaagccggaaatcctgtggaaatggttcttgtgatgactgtagaaccgggat

SEQ ID NO: 261180 - DNA, 365 bp, Glycine max
caaggaagaaaatgatttgatgatgataagattcttgcgggctcgtagtttggatgtggagaaggcttcggcaatgttccttaagtacttgaaatggaagcgttcatttgttccaaatggttgcatatcaccgtcagagattgccgaagatattgcacaggacaaggtgtttacgcaaggactcgacaagaagggtcgacctatagttgttacctttgctgcaaaacattttcaaagcaaaaatggtgccgatggtttcaaacggtatgtggtgtttgttcttgagaagctttgttcaaggatgccaccggggcaagaaaagtttcttgccattgcagacattaaaggatgggcatacgtaaaca

SEQ ID NO: 261181 - DNA, 325 bp, Glycine max
ctcgctttcgggctccccatgttctgtcagattgcgggtgtcgggttcgaccttgtcgtaatgggcgggtgggacccagattcgtggaaagcgtcgaattcggtttttatatacaacttcctgtcggccaaatggcgccgtggggccgacatgccgggtgggccccgcacgtttttcgcctgcgcgtcggatcagaatcgcacggtttacgtcgcgggcggacacgacgaggagaagaacgcgctgaggtcagcgcttgcgtatgacgtggccatggacgtgtgggtcccgctccccgacatgtcgcgtgagcgagacgagtgca

SEQ ID NO: 261182 - DNA, 349 bp, Glycine max
cccacgcgtccgctctctctcaccaatgccttcctagaacgaaaaaaaaaagaagagcaattttccctcaccaaagaagaagaagcaaacaatggccgatcaacttaccgatgaacagatctccgagttcaaggaagccttcagcttgttcgacaaggacggcgatggttgcatcacaaccaaggagcttggaactgttatgcgttcattggggcaaaacccaactgaggcagagctccaggacatgatcaatgaagtggatgctgatgggaatggtaccattgacttccctgagttcctaaatctcatggccaggaagatgaaggacactgattctgaggaggagctg

SEQ ID NO: 261183 - DNA, 382 bp, Glycine max
gggagttgaaagaaagaaagtaaggatgggagtgacaccgaaaattgctcgttcgatgctctcttccgacttcgccaatttggcttccgaggctcagcgcatgctccacttcggcgccgattggctccacatggacatcatggatgggcattttgtccccaatttaactattggcgctccagttattgaaagtttgagaaagcacacaaagggatatttggattgtcaccttatggttacaaatcctcttgattatgttgagcccttggcaaaagctggtgcttctggttttacatttcatgtagagacatcaaaagataactgggaagaacttatccaaagaatcaagtcacatggcatgactcctggtgtagcattaaag

SEQ ID NO: 261184 - DNA, 373 bp, Glycine max
gtggcttgccaactaattttgattctacttactgctatgcattgggttatggtgctgcagccctccttcaaagtgggaagactggattaatatcatcggttggtaatttatgtgctcctgtagaagaatggactgttggtggaactgcactcacttcattgatggacgtggagaggagacatggtaaattcaagcctgtgatcaagaaggcaatggtggagcttgaaggggcacccttcaaaaagtttgcctccttgagggatgagtgggccctaaaaaattgctacattagtccaggtccaattcaattcactggcccaggatctgatgcaattaatcacactttactcttggagcttggtgcacaagctta

SEQ ID NO: 261185 - DNA, 426 bp, Glycine max
aaacagaggctacgtacgatcaaattaattaatatggcggaagtgaggaacaaacaagtggttctgagggactatgtgagtggttttcctaaggaatccgacatgaacatagttgaaggaaccacaatattgaagcttccacaaggttccaatgatgtgcttctaaaaaatctctacctttcctgtgacccttacatgagaatgctcatgaccaaggtggaaggcctcgacgtgtttggcacctatacacctggctctccattaacagggtatggagtgtccaaagtcctagaatctggacacccagattacaagaaaggtgatttagtgtggggatctacaaaatgggaagaattcagcttggtgtccccaactcaaatacttttcaaaattgagcacaccgatgttccgctttcatattatact

SEQ ID NO: 261186 - DNA, 353 bp, Glycine max
cccacgcgtccggtttcgaatagattatcctaagtctttgggaatagtgctgcaatggcttcaagtcaggaggaggtgacccttttgggagctactggaagcccatttgtgtgcagggttcatattgccctcaagttgaagggagttcaatacaaatatgtcgaagaaaatttgaggaacaagagtgaactgcttctcaaatccaacccagttcacaagaaggttccagtgtttattcacaatgagaagcccatagcagagtctcttgtgattgttgaatacattgatgagacatggaagaacaaccccatcttgccttctgatccttaccaaagagccttggctcgtttctg

SEQ ID NO: 261187 - DNA, 394 bp, Glycine max
cttggatcttaccctcttgtttgctaatattctcattcttctgtctctgcttcttctccttgtaagttctctcgctcgctctctccgcctgtttcttctccttgtggactgtaagagctgaactaagagatggggttgtctttcaccaagctttttagccggctctttgctaagaaagagatgcgtattctcatggtaggtcttgatgctgctggtaagactaccatcttgtacaagctcaagctgggagaaattgtcacaaccattcccacaattggattcaatgtggagactgtggaatataagaatattagctttactgtatgggatgtgggtggccaagataagatccgtcctttatggagacactacttccaaaacactcaggggctta

SEQ ID NO: 261188 - DNA, 392 bp, Glycine max
cttgatcggatgggagcagatccatggaaagtgttaaatcaggctagatctaagcttcggcatcatagtgctgccatacaagttccaataggattggaagatgattttaagggactagttgatcttgtgcagttaaaggccttctatttccatggttcaaatggtgaaaatgttgtcactgaagaagtgcctgcagatatggaagccttggtggcagagaaaagacgtgaactcatagaaaccgtgtcagaggttgacgataaacttgctgaagcttttcttggtgatgagaccatatcagctgctgatcttgaggaagcagttcgtagggctaccatagcccagaaatttataccagtattcatgggtagtgctttcaaaaataaaggggt

SEQ ID NO: 261189 - DNA, 366 bp, Glycine max
aagagaatggttgggatgcctgacatggatagtctcattaagaagcctgacgttttatcatttcacatagccagtaaaatacctgtgtctgagtctacaaggcaggaatttttggatattgatagcattgcatataggctgcgtagggaaattgaattactagagagcattgatcttatccggtgtaaaagctgtgaggtaatcattgtctaaccaaagccccacagttttgcacttcttattgcttgtgaataaatatagaggcaatttgggattgtacaattctgtttcaactttcatcaaatgcagaaaatactgtttcttcctctttttttaccttaaaatttgcagactataattgcaaaa

SEQ ID NO: 261190 - DNA, 372 bp, Glycine max
cccacgcgtccgattttctctctcacttttcaagaatcgtaagctatgggaaagtcttacccaactgtgagtgctgattaccagaaggccgttgagaaggcgaagaagaagctcagaggcttcatcgctgagaagagatgcgctcctctaatgctccgtttggcatggcactctgctggaacctttgacaagggcacgaagaccggtggacccttcggaaccatcaagcaccctgccgaactggctcacagcgctaacaacggtcttgacatcgctgttaggcttttggagccactcaaggcggagttccctattttgagctacgccgatttctaccagttggctggcgttgttgccgttgaggtcacgggt

SEQ ID NO: 261191 - DNA, 377 bp, Glycine max
gggtttttggctacggttcactggtgtggaaccctggattcgattacaatgagaagattataggtttcattaaggactacagacgcgtgtttgatttagcgtgcattgatcaccggggaacacctgaaaacccagcaagaacttgcacgttggaggagaaggaaggggctatttgctggggagctgcttattgtgttcgaggaggccctgaaaaggaaaaactggctatgcagtatttggagcgacgggaatgtgaatatgacagaaagactcttgtaaacttcttcaaggaaggagattcactgcaccctactttaactgatgtaatagtattcacatctactccagacaaagtgaacaacaaatactacctggga

SEQ ID NO: 261192 - DNA, 361 bp, Glycine max
aacaacttctgctacttcctactccaaccgcacttctgctccgcaattatcatgggcaaggtcaagatcggaatcaacggatttggaagaattggccgtttggtagccagagtggctctgcagagagacgatgttgaactcgttgccgttaacgaccctttcatcaccaccgattacatgacatacatgtttaaatacgacagtgttcatggacactggaagcatcacgatgtcaccgttaaggacgagaagacccttctcttcggtgacaagccagtcactatttttggacacagaaaccctgaagagatcccatgggggtcaactggagctgacatcattgttgagtccaccggagttt

SEQ ID NO: 261193 - DNA, 362 bp, Glycine max
cccacgcgtccgcccacgcgtccggtctggggcttcaatgacctgtgctggttgccagggtactggcatgaaggtgtctattaggcaccttggtccttctatgattcagcagatgcagcatccttgcaatgagtgtaagggtactggagagacaatcaatgacagagacaggtgccaacagtgcaaaggagagaaagttgttcaggagaagaaagtacttgaagttgttgtggagaagggaatgcagaatggacagaagattacattccctggtgaagctgatgaagcagtatgttgagctttgataccaacaccgtgctggattatggaaattaggctgaccttgatcttttttttgtttg

SEQ ID NO: 261194 - DNA, 420 bp, Glycine max
cccacgcgtccgccgaaatctcatatctggaaaaactgccgctgagagtttggacattaactttaaagtgagctctgctttggtggaaatagtgaaaagaataactacaaaacctcgctatataattgcaaagggtggtattacgtcttcagatcttgctacaaaagcccttggtgcaagatgtgcgaaaatagttggtcaagcacttgctggtattcccttgtggcaattaggccctgaaagtagacaccctggagttccttacattgtcttcccaggtaatgttggtaacagcacagcattggcagaagttgtaaagtcctggactagtccaatcagacttacattaacaaaagaaattcttaataatgcaaaaaaaggtggatatgctggtggagcatttaattgatataattttga

SEQ ID NO: 261195 - DNA, 406 bp, Glycine max
  unsure (1)..(406): unsure at all n locations
ctccatattaccaactcaactattggcattgaactgaagacaactaagggtagaggtggttatatgaaaaacatcttcatttctgacgcaaaattggaaaatatttacttgggtatcagcatgacgggaagctctggctcccatccagatgacaagtacgatcctaatgcagttccggatgttggtaatgttacttttgagaatgtgattggtacaaatattgctattgctgggaatttttcaggaatagttgattcgcctttcactcctatctgtcttttgaacgcgaccttttcttccagttctgagtcatcatctccttcatggttttgntctgacataatgggaatctccgaggaagtgtttcctgagccatgtccctgactgcagaacacgtattcaaact

SEQ ID NO: 261196 - DNA, 403 bp, Glycine max
cccacgcgtccgagcattttgtggttcgcattccagatagattaccacttgatgctgctgcacctcttctttgtgctggcatcactgtgtatagccctctcagatattatggacttgacaagcctggtctgcatgtgggtgtggttggtcttggtggactaggccatatggctgtcaagtttgccaaagcttttggtgctaaggtcacagtaataagtacttcaccaaacaaaaaggaagaagcaatacaaaatcttggagctgattcctttctaataagccgggaccaagatcagatgcaggctgcaatgggtactttggatggtattattgacacagtttctgccgttcatcctctcttacctctcattggtttgctcaagtctcatggaaagcttgtaat

SEQ ID NO: 261197 - DNA, 374 bp, Glycine max
cccacgcgtccgcccacgcgttcgcttacgcgtgggctagcctgcacatcaaggcttctgctgaacagttctatgatgttttttgcaacaagccacacactattgccaacatttcaccagaaaatattcagtcagttgaagttcataaaggtgaatggggcaaagagggatcaatcgtctcctggaactatttacatgagggaacagtttgtgtagccaagcaagtgcttgaaggcatagacaaggaaaataacaaaatgacaatgaaggtcatagagggtgacgtgctgggactctacaagagcttcaagtctaatttgcaagttacttcaaaaggaaaaggcagcgtaatgctttgggcaatggaatacgag

SEQ ID NO: 261198 - DNA, 314 bp, Glycine max
cccacgcgtccgctttggattccctttcagacacttcatctggggtcacccgaccaattttcaaagaatggggcggctcaacagccctcttagattggctcgaatcacccactgcccacatcttaaaaattaacgttccaggattcagcaaggaagacataaaggtgcatattgaggatgggaatattcttcacatcaaaggggaagtttggagagaggagcctcaagcaaaggagaaggatactgtttggcatgtggctgagagaggcactgggaagggagggttctcatgggaaattgaattgccagagaat

SEQ ID NO: 261199 - DNA, 389 bp, Glycine max
cccacgcgtccgggatggtttgcgaacaaaagataaagagcgtatacttgttcttgcggctacaaatagaccttttgatcttgatgaggctgttattaggagacttccacgaagattgatggttaatttgcccgatgctccaaacagagaaaaaattgttagtgttattttagcaaaagaagaattggcacctgatgttgatttcgaagcaatagcaaatatgactgatggatattctgggagtgacctaaagaatctatgtgtcacagcagctcactgtccaataagagagatcttggagaaggaaaagaaggagagaagcttagcattgactgagaaccaaccattacctcagttgtgtagcagtaccgacattcgtcccttaaaga

SEQ ID NO: 261200 - DNA, 375 bp, Glycine max
cccacgcgtccgtgaaatctgggggctggcaggattcttttgaagatgaaccatctcaaaatggcagtttggcatatactgctcaaaatgggggactaaatacacctcatacagtagtcaatcaaactatgtctatcatacctatctctgcaggtggtgctcctggagctgttcctggtcccacgacaaacttaaatataggaatggattattggggtacaccagcttcatccaacattcctgcacttggcagaaaggttccatctactgcagttgctggagggatggttaccgttggatctcgggatagtgctcagtcacaactttggctacaggatgaaagagagcttaaaaagcaaaagcggaagcagtcta

SEQ ID NO: 261201 - DNA, 362 bp, Glycine max
gggcggtatactttctgcgcttcttggcggcgacgcggcggcggcggcgtcttcgccggagagttctacttctagagtctcctccttccactcgtcgccgcgctggcagctctacttcaacgagatcaaagataccgataagctcgtaaatccctagatctcgattttcccccaattttttctctatgcgctggatctgaatattttccttgaaaactaggttgtgatagatttctcggcgtcgtggtgcggtccttgcaaattcatagagccagcgattcacgccatggccgacaagttcaacgacgttgacttcgtcaagatcgacgtcgacgaattacctgatgtggcgcaggagtttc

SEQ ID NO: 261202 - DNA, 387 bp, Glycine max
tcaagacacactttgctagaccaaattggcgcagtgttttcaaacacactgcactcaaacaccctgggaaaagagttggtgttttctactgtggggcgcacacattggttggagaacttaagaggctttctcttgacttttccaggaaaaccaacaccaagtttgattttcataaagagaatttttaaattcttttatcatagttcgtatttttttttccaactgtaacgtatgtagttgagggaaagtttctagttatatatagtttgttggggtttttttctttggtactagagctaggtagataagcagctagctgcattcaattagagttgtatacatgtataaaaaaattcattttgatataaatgaaatggttacgttggt

SEQ ID NO: 261203 - DNA, 377 bp, Glycine max
cagggaagagaaaggactagagacagaggaagcatatccctacacaggaaaagatggtgtctgcaaattctcagctgaaaatgttgctgttcaagtccttgactctgtgaatatcaccttgggtgctgaagatgaactaaaacatgcagttgcatttgttcggccagttagtgtggcctttcaggtggtgaatgggttccatttctacgagaatggagttttcactagtgacacttgtggtagcacttcccaggatgtgaaccatgccgttcttgctgttggatatggagttgaaaatggtgtcccatattggctcataaaaaattcatggggagaaagctggggtgaaaatggctacttcaagatggaattgggga

SEQ ID NO: 261204 - DNA, 324 bp, Glycine max
ataaaagaaacccaaaatctttctctttctctcgttcgctttccgtatccatatatatcccaaaccctaccggtaggttccccaattcttcaacaccccgtggaccggtgctctgcttcttagtagttcgtacggtttttccgtcgattgcctccgaaacgatgtcgtatcgcccaagcgggaactccaggaccgaggtccgccggaaccggtacaaggtggcggtggacgcggaggaaggtcggagacggcgagaggacacgatggtggagatccgcaagaaccgcagagaagagagtttgcagaagaagaggcgcgaggggc

SEQ ID NO: 261205 - DNA, 358 bp, Glycine max
aaattccaaacacatgtaattgtgtgccgcctcattggaccagcccagaccctcaccgaaccgacacccttgtctcttttcctctcttctcttctattcctaaattgtagttctgttttgccagtgattgaagctagttagaacaagatgttgcagctactctacactgcgattttctccgaaatgcttttgattctcacgctcgtcttcaaaaccccactgagaaaactcgtcatcgtttccctcgatagtgtgaagcgcggtcgcggtcccgtggtggtttccaccgtgggcgccacattgatggtggttctcgctttgagcctctacagcatggccaagaaccagcaacgcaccc

SEQ ID NO: 261206 - DNA, 354 bp, Glycine max
gcaagtgccattttattttgccctacctcctcgattctagggtttcaacaatggcgctgttccttctctacgaatccgcttcgggctacagcctgttcgaggttcacggcgtcgatgaaatcggccagaacaccgaagcggttcggaactccgtttcggacctcaacaggttcggcaaagtcgttaagcttcgctccttcaaccctttcacttccgctctcgatgctctcaaacagtgcaacgccgtctccgaaggcatattaactgatgagctgaggactgtcttggagaccaacttgcctaaagtgaaggaaggtaagaagtccaagttcagtttaggtgtgtccgatccta

SEQ ID NO: 261207 - DNA, 378 bp, Glycine max
caacacctttgccttgctgcagttcgcaactgcaactgcactcaaatataaatatatatacatatatatatatatatatatatatgtattacttcatggtcacacatagttaagtttattaattactaggtagctggttttgaatagggtagttggtagttatagttgttgtcccagatatggaagaagcaggtttaggagattgttgttcctcgaattcgacgattacgaggaagagcgataagcgaaagcagcaacaccaacaacaagagaagccatacagaggaataaggatgaggaagtggggcaagtgggtggcggagattagagaacccaataagcgttcgaggatctggctgggttcttacgccacccccg

SEQ ID NO: 261208 - DNA, 400 bp, Glycine max
cccacgcgtccgtaccaatatgaacttaatctcctctcgacacctttgctttgctgcagctcgcaactgcaacttcccacaaatataaatatatattacttcatggtcacacatagttaattttattaattactactaggtagctggtttttaataggtagtaggtaggtgtaatcgttgtcttcctgcagatatggaagaagcgggtttaggagattgttgttcctctaatacgactattacgaggaaaagcgagaagcgaaagcagcagcaccaacaacaagagaagccatacagaggaataaggatgaggaagtggggcaagtgggtggcggagattagagaacccaacaagaggtcgaggatctggttgggttcttacgccacccccgttggcggc

SEQ ID NO: 261209 - DNA, 368 bp, Glycine max
gtatgttggaaaagcccagataaaatttgagcgtgaacaagaactgaaaggacgatttgagcagagcataaaggaagctgctgacaaatatccaggtttgaacttgtatctcaagaacttggatgatacaatcagtgatgaaaaacttaaggaaatgtttgccgactatggtacaataacttcttgcaaggttatgcgagacccgactggaatcagcagaggatcaggatttgttgcattttcaactcctgaggaagcaactcgagctcttggtgagatgaatggtaaaatgtttgctggaaaacctctgtatgttgcccttgcccagagaaaagaagagagaagagcaaggttacaggcacaatttt

SEQ ID NO: 261210 - DNA, 390 bp, Glycine max
  unsure (1)..(390): unsure at all n locations
ggtgatcttatggatagtttttgtgtgtattgatgaacatttcaatgaagagctaaagtatgtttcatgattatgcatgtcactattgtattgtatatatgcacatgtgtctatgagcgtctcaatttagcttctctcccattgatgtctttcttagacaggtagaaaaataagcaggagagagttgaatgtgtaataatcaagcagaggtaatgactctcagttaattacctgtgtgtccttatgctttttctgtttatgcatgcttcgatatgtatggatattaagatattttcaggtggtatagattctaccatttttattttttttaaaaaaaaatatntccttaattttattacttattatattttatatatttatcattatata

SEQ ID NO: 261211 - DNA, 361 bp, Glycine max
cggacgcgtgggcggctccgttaggttttcctttcgcgtgtttgctcggaactactcctccactcatcgtttaaaatgtctgacgtggaagagtttcgttgcttcattggtggccttgcatggtcaacgtctgatagaaagttaaaggatacatttgaaaagtttggcaagcttattgaggcaaaggtggttgttgacaagttctctgggcgttctcgtggttttggatttgtcacatttgatgacaagaaagcaatggacgaggctattgatgctatgaatgggatagatttagacgggcgaactattactgttgatagagctcagcctcaacaaggatcaactagagatgatggtgatc

SEQ ID NO: 261212 - DNA, 383 bp, Glycine max
ctagcttggactatgggttcaagggtgctgattttgccatggcttcttactgctctgaactccaatatcttgcaaatccagtaactagccatgtccaaagtgctgagcagcataaccaggatgtgaactctttgggtttaatttcatccagaaagacaaatgaagctatcgagatccttaagctcatgtcttccacattcttgattgcactttgccaagcgattgacttgaggcatttggaggagaatttgaaaaactcggtcaagaacactgtgagccaagtttccaaaaggattcttaccacaggtgtcaatggagaactccatccttcaagattttgtgaaaaggatctgctaaaagtgggtgatagggagtacgtattt

SEQ ID NO: 261213 - DNA, 350 bp, Glycine max
cggaccgtgggcgcatctagcgtgtataaagaaagatgatgagttaaggtggagtgtactcgtaatggtcacgttcctgtttctctgttttggcttggacccctgcaagtcaaagcctctaattctgtttccgccttcgtcaaaacgccatctactcaacagaatcgcgttttctccaaatcctattgcccctactgtttgcgcgccaaacgcttgcttgctgaactcaatgaaaacttttgtggtggagctcgatttgcgagatgatgggtttcaaattcagagtgttcttctggattgaaggtagaaggacagcccgaagtgtttggaatggcagcatattggggatc

SEQ ID NO: 261214 - DNA, 386 bp, Glycine max
cccacgcgtccgatcgtcttttgcatattatttgcgccatcgtcgagagaagcgtgagagacttctcgtttatgatgagagctaagatagtttagttgtcaagtcataaatcagtatcatcactttaaatttcattagaagctgtcaaaatgtcacggaagggtttgatggagcaagacctgagtaagttggatgtaacaaagttgcatccactttctccagaagtcatatctcggcaggctactattaatatcggcactataggtcacgtggcccatggcaagtcaacagttgtgaaagcaatatcaggtgtccagactgtgcgtttcaaaaatgagttggagcgtaacattacaatcaagcttggctatgcaaatgcaaaaata

SEQ ID NO: 261215 - DNA, 358 bp, Glycine max
aggaccttattgggaatgtctagggtttcacgcctgtgatgtttgattacaagatccatgatgaaaacaagtcactctacaatacccctccttgttatgggatttacatgtgtgggttggtgtttgaggacttgttggagcaaggtgggttgggggaggttgagaggaagaatcagaagaaagctgagattctctacagtgcaattgatggcagcaaagggttctataaatgccctgttgagaagtctgtgagatctttgatgaatgtgcctttcactttggagaaatcagagctggagggtgagtttatcaaggaggctgctaaagagaagatggtgcagctcaagggacataaatc

SEQ ID NO: 261216 - DNA, 347 bp, Glycine max
ggattttcagttcctcacatgcactttttgtgaagccagtgaagaggcagatgatggggaagagcaagggattgagaattgcatgccaagccaccagcatttccgctgatagagtccctgacatgggcaaaagacagctcatgaatcttcttcttcttggagccatttcactccccactgctggaatgcttattccctacacctacttctttgtccctccaggttcacgttcttcagctggcggtactgttgccaaggatgccgatggaaatgatgtaattgccgagaattggctcatggcacatggacctggtgaccgaacccttacacaaggattgaaaggagat

SEQ ID NO: 261217 - DNA, 316 bp, Glycine max
cccacgcgtccggaagatgttgatctagcagttgcagctgctcgcaaagccttcgaccgcggaccttggccaaagatgacagcctatgaaagacaaaggatattgctgcgcgctgctgatctgtttgaaaagcacaatgatgaccttgctgcactcgagacttgggataatgggaagccatatgaacagtctgctcaaatcgaaattccaatgctggttcgcctatttcgatactatgctggttgggcagataagattcatggtctcacagttccagctgatgggccatatcatgtgcaaacattgcatgaaccca

SEQ ID NO: 261218 - DNA, 202 bp, Glycine max
cctaagggacccgggaagccagactgataccgctctttgcgcacaatctgaacgtgaatccggctagaatgcctgcaccggcacgagctccgtgacctcaccgttagaggattgcgacacctagggcggcgaccaggaagaacctatgtttcatatggcacagcgtcgcatctctcaaaacgaggaaggcgtatgcaacttg

SEQ ID NO: 261219 - DNA, 323 bp, Glycine max
cccacgcgtccggtttccaatattatgggtgttgatccaaaaccctttgatcctaaaacatatgtggaagaggatacttttgtaactgatgaatctggaaccagaaaacgcatacgtttggagaacaatattgtacgctggaggactactagaaatcctgatggcacaacatcttgtgaaagcaacgctcgctttgtgagatggtctgatggcagcctgcagctattaattgggaatgaagttcttgacatatcagtacaagatgcacagcatgatcaagcacatcttttccttagacatggaaagggaatcctccaatcaca

SEQ ID NO: 261220 - DNA, 340 bp, Glycine max
aggaattcaggaaggtgttcaacaaggaacattccgacaacaaagcagtgtctgctgtgggcaaagctgctggagcaaaatggaagacgatgtctgatgctgaaaaagcaccttatgtggcaaagtctgagaaaaggaaagtggagtacgagaagaacatgagagcttataacaagaaacaggcggaaggtcctactggtggggatgaagaagaatctgagaagtctgtatctgaggtgaatgatgaggatgatgacgaggaaagcagtggcgaggaggaggatgacgattagagaatggactgatgataatagcatttatgtaagttctgatgattttg

SEQ ID NO: 261221 - DNA, 360 bp, Glycine max
cgcagagccgctttctttgtttttggtactgagagattaccaaaacaaacccacgaatttttggtgtggcagatcacgattcctcagaaaactgtaatggcttttatgtcggaggtcaacatgagcttctctcactacatggatgatgaatatgagaaactcttccggagaatgaaccctcccagggttgtaatcgataatgaagcctgcaagaatgccaccgttatacgggttgatagtgcaaacaagcatggaatacttcttgaagttgtacaaatcctcactgatctaaacctcatcataactaaggcttacatttcttctgatggtggatggttcatggatgtttttaatgttact

SEQ ID NO: 261222 - DNA, 423 bp, Glycine max
attcaacacgccataattgcacccttttgaaaacttgtaacgttgattaaatgatggcttgcgtttctaaaccttgtcacggaaaaaagatgattttggctacgaatttcaagacgattctagaatgagattagtagcatcggcagcagagacagtgtgattgtgctctccctcgtatgttaccaccagcatagctggatcatccaaagctctttccacatgttttcgcgctggacaccctctcacactactgcacttgtagtaacccctgcaattatcattcccaaaaccaaaaaattaacacccatgaccacttctcaaattcaataggtacttcagaaacgcataaaagaaaccaaataattgggtccacctttaattttggaattcaatgagaaacctttaaggtaaatgggttgtttt

SEQ ID NO: 261223 - DNA, 277 bp, Glycine max
gttattagtactgaaggcttttgcttgatagaactgagagggctaatcagagacatcctatgaagatacatgcactgcattattctgacatacttgcgccgcgtgatatgctcactccataggaaggatcaagggatcttatacaggaactgaacaatcatctgatacctctactatacaatattatagaatactattggattgatatgaaagaattatatgggattgaccggtacaagacaaatgagatctaatgtgacgcgactgatgagttcta

SEQ ID NO: 261224 - DNA, 390 bp, Glycine max
caacactcatatccttatcctgtttctttcaatggaagtcatttctgcttctagcttgaatcccaacgctccgatgttcgtgccactcgcctatcggacggtggaggatttctccgaccagtggtgggacctcgttcactcctccccctggttccgcgactactggctccgcgagtgcttccaagatccccagttccaaaacgacgacgctttcgacttcgactttgacctagatctccaagatgaagatgaaagggaacgaaaggaagggaaggaggtggtgtcgttggggctgctgaaatggcgaatctgtggaggaggatgggcccatgcgccgaggtatgtggaaaaggcccccaagtttgtgaagcccaaggtgagcccacgggc

SEQ ID NO: 261225 - DNA, 427 bp, Glycine max
acgaatatcttgttgtttggagcgatccgagaaaaactctgtaaacatgttggtttaccaggacctccttacaggtgatgagcttctctctgactccttccgttacaaggaaattgagaatggaatgctgtgggaagttgaggggaagtgggttgttaaaggagcagttgatgtagacattggtgcaaacccttctgctgagggtggaggagaagatgagggagttgatgatgcagctgttaaggttgttgacattgttgacacattcagacttcaggagcaacccgcattcgataagaagcagtttgttaccttcatgaagaggtttatcaagaatttgactcccaagctcgatgcagagcaacaggagttgtttaagaagcacatcgagggagcaactaaatacctgctctctaagattaaagat

SEQ ID NO: 261226 - DNA, 438 bp, Glycine max
cccacgcgtccggtgagtgtgtgctttgcggcagcaagaggagatgacttgttgttacatcaattactcaaacggggcatggatccaaatgaatccgacaacaatcgaaggacagctttgcatatagcggcatctcaaggaaaagagaactgtgtttcgcttctgttagattatggggcggatcccaacattagaggttgttctacgtgcagatttggaaggtaatgtgccactatgggaggctatagtggaaggacatgagtcaatgagcaagctgttatcagagaatggagcaaacttgcaatgcggggatgtgggtcaatttgcatgtaatgccgttgaacaaaacagtctcaacttgctgaaggaaataatgcgctatggaggagatatcacgcttccaaacagcaacacatggaccacagccttgcacgttgc

SEQ ID NO: 261227 - DNA, 251 bp, Glycine max
atgagttccatacatagttgacacgaacagatatcatcaagtgtatacaatctgagaaagtaaggtttcgaggggttaatctttccggccttgacctctctaaactggatttatcttatgttgatttcagctatgcttgtcttaaaaacgtgtttttttcacgagcaaaccttcaatgtgcaaaatttcaaaatttttatgccaagggctccatcttttacaatgcaactttgcgtgaaatggaatttact

SEQ ID NO: 261228 - DNA, 439 bp, Glycine max
cccacgcgtccggaagaacgcagaagccacgatgagtggcagagccattatctcctgtttctctcctccttcaacaactccatgctctgcccccattccagtactctcgcgccgaaaccacctcctccatgcaactccaccttcgccacacctcctctcgcggcggagccacctcgttgttgccggcggcggcggcgggaagacgtgggcaaatgtgaagtccgagaagaacgtgtccgagtcccccaagtacgaggatgatgccgtggttcagaaggcacgtgatttggataacgtggaagaggaagccaggtggtggcaagtgttccccaagagatgggtcattgtggttctctgcttctcagcttttcttctatgtaacatggatagggtaaatatgagcattgctatacttcctatgtctgcagagtacaactgg

SEQ ID NO: 261229 - DNA, 439 bp, Glycine max
cccactcgtccgcccactcgtccgtgaagatgatgatgcccctttgttgacagctgatgacaacataaaacttgaggttaaagaatgtgtaaacagactactttcccggtttaacgactcattaacagctttgttctgtggttccacagaatcactctctgaggctggaaatattcagttgtttaaatcctatttgactgatttgtcatgggcttgtcagatattgagtaagttggaaattatgagggagtttgttgagtattggtttgatgcatcggataagattgtcaaggtgcttgaacaaggaagttctacaactgaagtaattgagataaaattaagagctattgaggtgacatcaaaggttttagaggcaattgggtatggcactgttatattgccaactgcaaaacgccttcaggtcttgaaagtgtggctt

SEQ ID NO: 261230 - DNA, 317 bp, Glycine max
ggctttctttattttctccttcctcttccttcttctcgtttcatcttccactgcttgtgatcgctgcttgcaccaatccaaggcttgctatttctccaaagcttctgctctttcatctggggcatgtgggtatggctctttggcactagacataagtggcggacaccttgcagctggtgtggcttctctcttcaaagatggagcagtttgtggtgcctgctttcagataagatgcaagaacccaactctatgcagcaaagaaggtaccagagtggtattgactgatcttaatcacaataatcaaactgattttgtgc

SEQ ID NO: 261231 - DNA, 438 bp, Glycine max
gtgaagagaagaaggaaaagaaagataaagagaaggagaagaaaaaggaaaagaaggataaagatgaagaaacagacacattaaaggaaaagggaaaaaatgatgaaggtgaggatgatgaaggaaataagaaaaagaaaaaggataagaaggagaaagagaaggatcacaaaaaggaaaagaaggataaagaggagggtgagaaagaggatagcaaggttgaagtttctgttagggatattgatatagaagaaataaaaaaagaaggtgaaaaagaagataaaggaaaggatggtgggaaggaagtgaaagagaagaagaaaaaagaagacaaagacaagaaggagaagaagaaaaaagttactggaaaggacaagaccaaggatcttagcactctgaagcagaagcttgaaaaaattaaacggaaaatacaaccac

SEQ ID NO: 261232 - DNA, 446 bp, Glycine max
ggattctcaccaaccagtggccccaaaactctcctcgctttagggaaacattgcaggagtatgctcgagaagtggaaaagctagcttacaagttgttggagctgatttcactgagcttgggtttggatgctgaaaaattccatggctgtttcatgaaccaactcagcatggtgaggctcaattactatcccacatgccctttccctgatttggcacttggtgttggtcgccacaaggactccagtgctttaactgtgcttgcccaagatgatgttggaggattacaagttaaaagaaaatcagatggagaatggattccagttaaacccaccccaaatgcatttattatcaatgtgggggatatagttcaggtttggagcaatgacaagtatgagagcgtggagcacatggtggtggtgaatacagagagggaaaggttttcaatt

SEQ ID NO: 261233 - DNA, 448 bp, Glycine max
gcagtttcaaagagaggatttgggattgggaaggcgagggattgcgctgcgtctcttcctcttctctttcgattcatccctcattcataatcttccaatccaacaacctcagcctcacactcacacatacacacatctgaacgcgtatcgtccctcccatggcttcaaagcgcatcctcaaggagctcaaggacttgcagaaagacccaccaacttcttgcagcgctggtccagtagctgaggacatgttccattggcaagcaacgattatgggtcctgctgatagtccttatgctggaggtgtattcctagtcactattcactttcctgcggattatcctttcaaacctcccaaggttgcctttaggactaaggtgtttcatgcgaacatcaacagcaatggtagcatttgtcttgatatccttaaggagcagtggagccctgcact

SEQ ID NO: 261234 - DNA, 413 bp, Glycine max
ctataattgaaatagataacccggccagtgtcaaaaggcaattggcgcagctgtttgacttgtctctgagggcaactgtgcccgatgagccagatgttgtgccgttaattgatgcttgtgctgctaaaggtggcgtaaaatttggtgattatcaatgtaataatgcaatgggtatatggtctaagatgaagggaaagcagacaggatttaggggtcccccagcaattggtcaggctatcgttaacaatcttcctccatctgaaatgatagattcgcgctctgtagctggtcctggatttgtcaatgttgtattgtcaaagaagtggatagctgagagcctacagagaatgctaattgatggtatcaattcatgggcacctcgacttccagtcaaagaggctgtgattgatttt

SEQ ID NO: 261235 - DNA, 433 bp, Glycine max
ctgaccgagtccgagaggcatcatggcgacactggattccgacgtgaccgtgtttccggccggcgaagcctccagcagcgccggtccttcttcgtccaccaagaagccgaagcgtttcgagatcaagaagtggaatgcggtttccctctgggcttgggatattgtcgtggataattgcgctatttgtcggaaccatatcatggatctctgtattgagtgccaggccaaccaggctagcgccactagcgaggaatgcactgtagcttggggagtttgtaaccatgcttttcacttccattgcataagccgatggctcaagacccgtcaagtatgtcctctagataatagcgagtgggaatttcagaaatacggtcactagaactttgatgcggctgagctacttccaacttggacatttggattgtagcatttc

SEQ ID NO: 261236 - DNA, 425 bp, Glycine max
gtgaactgatttcgttatcagaacaagaattggtggattgtgatacaggatataacgaaggatgcaatggaggacttatggactatgcatttgagttcattatcaacaatggcggcattgattctgaagaggattacccttaccgtggtgttgatggtagatgtgacacatataggaaaaatgctaaggttgtttctattgatgactacgaagatgttcctgcctatgatgagttagctttgaaaaaggctgttgcaaatcagcccgtcagtgtagctattgaaggagggggcagggaatttcaattatatgtatctggtgtattcactgggagatgtggcacagcactagatcatggtgtcgtggctgttgggtatggtacaactaatggtcatgattattggatcgtaaggaattcatggggt

SEQ ID NO: 261237 - DNA, 433 bp, Glycine max
ggcatcttcttctggtagtttagacacctctgcaagtgcaaactccttcaccaacttcaccttctccacacaccctttcatgaccacttctttctctgaccttcttgcttctcccacagacaacaacaaaccaccacatggtggtggtggtggtttgtctgagagaactggctctggtgtccccaaattcaagtccacaccaccaccttctctgcctctctctccccctcccatttctccttcttcctacttttctattcctcctggtttgagccctgctgagcttcttgactcacctgttctccttaactcttccaacattctgccatctccaacaactggagcatttgttgctcggagcttcaattggaagagcagttccggggggaaccagcgaattgtcaaagaagaagacaaaggcttctcaaatttc

SEQ ID NO: 261238 - DNA, 428 bp, Glycine max
tgcttctgtcctctccacatgagtctttttggctacttttagatactgggagacaaggcagtcaaatccagtgcacacacagcaactcccagagcgctgctatgctatgacagtgagacatcctctgatggttgttggcactgctgatagaaatcttattgtttacaacttgcaaaaccctcaggttgaattcaagagaattgtttcacccttgaagtatcaaacaaggtgccttgctgcattccctgaccaacaaggtttcttggttggatcaatagaaggaagagttggggtgcatcatttggacgatagtcagcatggtaaaaacttcacttttaaatgccatagagagggcaatgaaatatactcagtcaactttttaaactttcatcctgtacaccacacatttgcaacttctggttctgatg

SEQ ID NO: 261239 - DNA, 394 bp, Glycine max
  unsure (1)..(394): unsure at all n locations
tcgtccacgcgttcgcccacgcgtncggattcttaatttttatttattaattgttactgtgttactttacaggattggctacttatggagagaaagagtggtacttcttttcaccacgggaccggaaatacccaaacggttcgaggccgaaccgggcggctggcaccggttactggaaggcaaccggggcggataagcccattggtcagcccaaaccggttgggattaaaaaagctttggtgttttacgcaaggaaagctcctaggggacaaaagcaattggatcatgcacgagtatcgtctcgcagacgtagatcgctccgttcgcaaaaagaacaccctaaggttggatgattgggtgctttgccgtatttacaacaagaaaggcacgatcg

SEQ ID NO: 261240 - DNA, 425 bp, Glycine max
cccacgcgtccgggggtttatttaagtggttcttctcagggatagaggactgtggattcgaacagttccctaccttcggattgcaagcttggaagcaaacattctacttcgattttagtatgacttttgtgggagcagggatgatttgctcccatcttgtgaactgttctttgctccttggagctgtgctctcttttggggtcatgtatccgctcattgatcggcttaaaggagactggttccctgacaatttagaagaaactaacatgaagggcttatacggttacaagttttttgtttccattgctcttatcctgggtgatggcatatacaatttcaccaagattctaatttctacagtcctcaatgttaatgaaagaatgaggagcgagaataataaaaatgtagctgctgatcggcacgag

SEQ ID NO: 261241 - DNA, 459 bp, Glycine max
atatctgagtctcaattttatgccaacatcctaggtttgctgctgtaaacatctgatcagagttcatatatatggcgaataaactgaatataaggctaggagaaccaactctggtgccaccagcagaagaaacggaaaagggtctttactacttcctttcaaaccttgaccagaacatagcacatccagttcgaacggtttacttttataataagtctgcatgtatagggaacgaggaagcagcacaagtaataaaggatgcttcgtcgaaggttcttgttcactattaccctatggctggaagattggccataagttcagaagggaaactgatcatagagtgcacaagcgagggtgttgtgtttgttgaggctgaagaagcaaactgtgtgataaaagacctgggagatttgacaaaacaacctgaccttgaaactcttggaaaactggtttatgata

SEQ ID NO: 261242 - DNA, 408 bp, Glycine max
aaccctacttctacttcccccctttgctctcaaaccttatcacctaatccgtatcctcccaaaccagaaaaccatgtctacctccgcagcttccctcgcactcccaaccctcactctccgaacccgacaacctctatgttctccccaatgcttctcctcgtccctctccctcacacccaacaacaaacccatttccatttctgctgtttttctcaaaccaacaactctgtcgtcgtctcgcttcgttccccacgtcgtggtgtcgtcggatttggggcaggaggaggacaccttcagtgacggagacggccccagcttctcccccgaccttaagctctttgtcgggaatcttccgttcaacgtcgacagcgcgcagctcgcggagctctttgagagtgccgggaatgt

SEQ ID NO: 261243 - DNA, 439 bp, Glycine max
cttaaaagaaacaaatgtttctctttctctctctctgtgtttgaagaacaaaacacacttcttctcaatttcttctttcttctgagagagaaagaaagtgagggacttggagagaatttctgtcataacagcacattgagtcaccaatcaaccatgtctctggggtatgccgagaagctttcctacatagaagatgtgggcaacgttggaatggtcgaatatttcgacccatcccatgttttgcgagagaaaatagatcaacttgctatcatgataaaaaagagtaagcatctagtggtgtttactggtgcaggaatatcaacttcttgtggtatacctgattttcgaggtcccaagggaatttggacacttcagcgtgaatgtaaagccctgcctgaagcatcactgccatttcatcgtgcatcgccaagcatgacac

SEQ ID NO: 261244 - DNA, 402 bp, Glycine max
cccacgcgtccgttcaaactcctatggtagaggatacctgcctaaccagggttctagctttggaggcacttccatttccaatcttaatgataggagttttgcttctcttgaaaatagcaggcggcaagggagaccaactgcttctctttgcaactgtaatggtactcttgatatccttagtgagcagaaccgatgaccaagggcctcgaagttgaaaaatcaaatttcaactgaaaataattctgtggatagtagtaaaaatagtgcatctactgccaagttccaaaatgaatcactcaatcggtcagattttgccacagattacaaggatgccaaattttttgtcatcaaatcttacagtgaagataatgttcacaagagcattaaatatggtgtctgggc

SEQ ID NO: 261245 - DNA, 449 bp, Glycine max
cccacgcgtccggttccgaagtctgaaccagaatcctacgaatgacatgaagagatgagggaacaaagttttggagataagatgcatggaataacaactctcgctctcactgcaactgcaaacacaaacacattcctttcttgtcctctaagatctcttctaccacttacccctccatcgaattgttgcatacccacttgtaaatttagctatggaattcgtttcaaccattctcagtggaagcaccaaaaaacagaaagatggatcaacagaaatagaacgatggttgtgagagcaaggcgtatcgagtctccgtatgaagttttgggcgtgtctccatccgcaaccgtcgaccaaataaaaaaggcctatcggaaacttgctctcaagtatcatcccgatgtcaataaagaggataaggcacaggagaaagttatgaggataaaaca

SEQ ID NO: 261246 - DNA, 450 bp, Glycine max
cggacgcgtgggcggacgcgtggggcagtgaccaactttgagccaagtacttatgaaggagaaatgaaatctgcagccattaatgaaggtggcggtcagaatcttgatctcaatttgggcatagcaaccccaggacctggtcccaaggaaaattgggggcaacttcacttcccctccatcccttacaacacacatggtggaagaagttcaaagatggaaaccaatgttaattctggaattggtaatccatctttgaaaaggatggttgtaactgaagatcgtccttcattatggaatggcatgtctcctaatttctttcccaatggggaaagagcagagagaatcggcattgatccttcaaaaggactccccaattgggcgtggcaaacacatggccaggtcaatgctaccccagtaccatcgttctctgctgcagcatcatcaggattc

SEQ ID NO: 261247 - DNA, 415 bp, Glycine max
cccacgcgtccgcttttttgttgttgtggtgtttcatttgtgaaactaacaacaacacaaggccatcatcatggcagctgcttccccaatggcaagccaactcaagtccaccttcactaggactcttgtagctcccaagggcctctctgcctcttcaccacttcacctcgtgccttctagaaggcaatttagcttcactgttaaggccatccaatcagagaagccaacctatcaagtgattcagccaatcaacggtgacccattcattggaagcctggaaaccccagttacatccagccctttgatcgcatggtacttgtccaacctgcccgcatacagaaccgcagtgagcccactactaagagggatcgaggtgggcctggcccacggataccttctggtgggcccattcgtg

SEQ ID NO: 261248 - DNA, 406 bp, Glycine max
  unsure (1)..(406): unsure at all n locations
aataacaccaacgaaagccgnggcactcncaagggaaagagagaaagangcggccaatatcaagagactacttgaggaaggggacttggtgatttgccctgaatgcacaacttgtatagagcctttcctcttgaggttcagtacactatttgctgaactcactgataggattgtcccagttgctattaacacaaagcaaagtgtgttctacagaaccacggtttgcggacacaagttgttggacccgtactttgtgttcatgaatccaatgccaacatatgagatcacttttttgaaccatctttccaaggagctcacattgcatggaaggaaatcagctattgaagttgcaaactacattcatagggctcttgcacggacttttggatttgagtgcacaaatttt

SEQ ID NO: 261249 - DNA, 437 bp, Glycine max
cggacgcgtgggtgtagactggagggctggtttgctgcagacactgatgctatttcactgaaaggatgggaccaggaggtactgctccctggtggtcatggtcttatggtccgtggctacttgcctgttgtaaatagcctagccaagggtcttgatattcgattggggcacagggtcacaaaagtagttaggcgatataatggagtaaaggtaactgtggaaaatgggaaaacgttttttgctgatgctgctgttattgctgtcccacttggggtgcttaaggcgaagaaaatattgtttgagccaaagcttccagactggaaggaagctgccattgctgatcttgggattggacttgagaataaaatcattttacactttgaaaatgtgttttggcctaatgtggagttcttgggagtagttgcagatacacctta

SEQ ID NO: 261250 - DNA, 366 bp, Glycine max
cacgaatatagtgttgtttggagcgatccgagaaaaactcggctaacatgtgggtataccaggacctacttacaggtgatgagcttctctctgactcctttggttacaaggaaattgagaatggaatgcttgaggaaagcgatgggaagcgtgttgttaaatgagcaactgatgtagacatcggtgcaaacccttctgctgagggtggaagttaagacgagggacttgatgacgcagctttcaaagtcacagacatctatgacacattaatacttcatgatcaaccgctattcaatatgaaacagattagaacctccctgaagaggagtatcaaaaacttgactcccaaactggatgcagaacaac

SEQ ID NO: 261251 - DNA, 409 bp, Glycine max
tcgtccacgcgttcgcgattctccaccactattcccttcaccccaatcacactttccggtagttgttgctattagtgtagaagatgagtacgctggatgcaacaagggctgaacttggtcttcttgttttatatttgggcaaggctgaagcaagggacaaaatatgcagggcaatacaatatggttccaaatttttgagtaatggggaacctggtactgctcagaatgtagacaaaacaaccagcttggcacgaaaagtcttccgtctctttaagtttgtcaatgacctacatgctttgataagtccaacaccacatgggacacccctccccctagctctgttgggaaagtccaagaatgctctactctccactttcttgtttcttgatcaatttgggtggcttggcag

SEQ ID NO: 261252 - DNA, 452 bp, Glycine max
gagatatacaacatggctatatctacatcagaaagaatggcatcagtctcgaaaaggattacccttaccgtggtgacgagggtaaatgtgactcaaataagaaaaatgctattgttactattgatggccacggatgggttcctacccaacttgaggaagccttgaaacagggcattgcaaatcagccagtggccgtacctattccagcagacgactatgaatttcaatattatacatcaggtgtattcaaagggaaatgcggtacagaattaaatcatgctctcctgcttgtggggtatggtacagaaaaagatggagattattggatagcaaagaattcatatagtgataaatggggagagaatggctatatcagaatacaaagaaaactgagcacttgtaaatttggaaacgggggttactatcccattataaaagtcaccgatcaacaa

SEQ ID NO: 261253 - DNA, 432 bp, Glycine max
gtttcgacggcgagtactgtcgcaacctcttctactctcgcgtgggcaaaaccacctggccttactgctccggcgtctggagcaaaaaagaatgggtcctccccgagatccacgacgacgatatcgtctccgccttcgagggtaactccaacctcttctgggccgagcgtttcggcaaacagttcctcggcatgaacgatttgtgggtcaaacactgcggaatcagccacaccggcagcttcaaagatctcggcatgaccgtcctcgtcagccaggtcaatcgcttgagaaaaatgaaccgccccgtcgtcggtgttggttgcgcctccaccggtgacacatcggccgctttatccgcctattgcgcttccgctgccattccttccattgtgtttttgcctgctaataaaatctctcttgcccaacttgttc

SEQ ID NO: 261254 - DNA, 438 bp, Glycine max
gaacacacagtttgatcgatgatggaaacgttggccacatcttcttctgcaactcttccatcttcttcttctcccttttccattttcccttcaagaagaacttccctttatcctcccaagactctccaatttcgtttaccctcctccaagcgtgatgatgctttcgattcagactccaaagaaaaaaacaagcttccaattcttagtgatcgctgcctctctctttcccctctttccaaagatgctgcgatggggctggtgctgagtgctgcgacgggcagaggatggaccacgggttcagggatggaaggcccctctgttcctgcagttggtagggatagcgaatcggggacggggaacatctccactttcccttggtctctcttcacaaaatcccctaggagaaggatgctggtggctttcacctgtaccatctgt

SEQ ID NO: 261255 - DNA, 434 bp, Glycine max
cccactcgtccgcccactcgtccgtaggcacccagagaggtattcaatatgaaaggaagggttgacgaaatttgcatcgatgagctgaaatatttaaaatcagttgtcaaagagacactaaggttacacccaccagctccacttttacttccaagagaatgtggacaggcatgtgagattaatgggtatcatataccagtcaaaagtaaggtaattgtgaatgcttgggcaattggaagagatccaaagtactggagtgaagcagagaggttttatccagagagattcattgatagctctattgactacaaagggactaattttgagtacattccatttggtgctggaagaagaatatgccctggcagcacttttggtttgatcaatgttgaggtggcacttgcatttttgttgtatcactttgattggaagct

SEQ ID NO: 261256 - DNA, 442 bp, Glycine max
cataactagcaaaaaaatggaccttctcctaaattgcctaaaccttaacaccattgctattgcatcaatcctttctctaatcttcttatgtttgtttctatatcgtaaaaattctcgtgggaaagatgctccagtagtgtctggtgcatggccaatacttggtcacctctcattgctgaatggttcacaaacaccacataaagtgttgggtgctttggctgacaagtatggacccttattcaccatcaagctcggtatgaaaccggctttggtactcagcaactgggaaatgtctaaggaattgttcaccacaaacgaccttgccgtttcatctcgccctaaactcgtcgccgttgaagtcatgtcttacaaccaagcctttgttggcttggcaccgtatggaccctattggcgcgagttacgtataattgtcacgttcgag

SEQ ID NO: 261257 - DNA, 405 bp, Glycine max
ctcaaacgtatcgagccagcctcacaagcttgggttcttcaccgcgctccacccttcttccctgttccttcgtcccctccaattggaatgtgtttgtgacttcatatgctggtagttgacattttgaaattgctactgcggtgggagcaataatatattttgacatcatcatggagatacagacttgtggcatgcctattgactccttgctagagaaagcgctttgcatgaatattctgtcgtctgattactctaaggagctctatcgattgaaaacgtatcacgaagttattgatgagatctacaatcaagtttatcacgtgcagccattgatgactgggaactgtcgcggtccttcaacctcattttgtctcctgtacaagttctttactatgaagcttaccg

SEQ ID NO: 261258 - DNA, 433 bp, Glycine max
atgatagtgacaagagaatccctgacatgaccataataaacaggcagcttggatggaatcccaagacttcactttgggacctgcttgagtccactctgacatatcatcacaggacatatgctgaagccgttaagaaagtcattgcaaaacccgttgcaagttaagctttttacagtgatggtgatgtgctacctttgagaagggtgttcttgtcttgcccaagtgttctgccatattatactggttgattttatataaaatcgtaaattttcctcctattggtttcgttagcctgtaggcaatatagcccccacatggagaagtaggaatttatacaagggcaatctgtgctctatgtaattttaatgtagagaccatgcgctgctaaacatgttgagacactttatatattacctagggaaagactttttct

SEQ ID NO: 261259 - DNA, 438 bp, Glycine max
ctttggtgagctgctacgggatcaaagatctgaacttggtgttgccaacagtatctccatgtgaatcacttcggtctttatctatcagtaattgccctggatttggcaatgcctccctctctgtattgggaaagctgtgccctcagcttcagcatgttgaattgagtggactcgagggagtgacagatgcagggcttcttccactccttgagagttccgaggctggtttggttaaagtgaaccttagtggttgcacaaacgttaccaataaagtagtttcgtccttggccaatctgcatggttggactcttgagaatctaaaccttgatggttgcaaaaacatcagtgatgctagcttgatggcaattgctgaaaactgtgcattgctatgtgatctcgatgtctccaagtgtgctataaccgatgctgggattgaaa

SEQ ID NO: 261260 - DNA, 446 bp, Glycine max
gcgttttgctgctgttattatgaggatcagggaaccaaaaactactgcactcatttttgcatctggcaagatggtctgcactggagctaagagtgagcaacagtctaaattggcggcaaggaagtatgctagaattatccaaaagcttggtttcccagctaaatttaaggattttaagattcagaacattgttggctcttgtgatgtcaagttccccattcgacttgagggtcttgcctattcccatagtgctttctcaagttatgaaccagagctgtttcccggactaatctatcgcatgaagcaacccaagatagtcttgcttatatttgtctccggaaaaattgttctgacaggagccaaggttagagatgagacttacacagcttttgagaacatatatccagtgcttactgagttcatgaaaaaccaacaatgattactac

SEQ ID NO: 261261 - DNA, 395 bp, Glycine max
cccacgcgtccgggcatatatagtaggggagcatggggatagttcggtggcgttatggtctagcattagcattgggggtgttccggttctgagctttttggagaatcaacagattgtgtatgagaaagagacgttggagaacatacacaagtcagtgatagacagtgcgtatgaagtgatcaagctgaaagggtacacttcatgggccattgggtactctgtggctaacctggcccggtcctttatcaggaaccagaggaagattcaccctgtgtctgttctggctaaaggcttttatgggatcgatggagaagtgttcctgagtttgcctgcaatgattggtagaggagggatactgggtgtgaccaatgtgcacttgaatgaagaggagacac

SEQ ID NO: 261262 - DNA, 413 bp, Glycine max
cgctctcatgctcaagattttaggcagcatggatccaagattagtgagaaagatgtggttccaaaacatgaagataaagctaattgttctgggtatcataattgccttgattctcattattgttctttccgtttgtggtggcttcaactgtggtaaatgagtcttcccacatcctgacttcaactgtggtatttgtctcctcacttgataagattgtcgctagcagattgccattgcctctactgtcaacatactgcttttgactttttgggatttacattcttccgacttctccgatgatgaatattatatggcattgcttgtatagtgcgaattatttagcctttatcatcttgcctccatagcataatgctcatctgacattctctataattcaggtgggagtttcatca

SEQ ID NO: 261263 - DNA, 308 bp, Glycine max
ccctcactcgcaagcaaatagattgaatccctggcgaggagaaagatggaggggatggaacaggatgtgtcgatgggagcgaacaagttccgacttagacagcccatggtgacggcggcgctgagcacaagacgtctgcagggactaccacgatccgtggcgggctccgctggttgacccaaccgagtttacggaacgggcgttttacacatcagggattgcatagtttgcggccacttttctgtttctctacatcaccgtctgaaccgtgatgggagtcgccggggctaagactatacagagtaccg

SEQ ID NO: 261264 - DNA, 306 bp, Glycine max
tttcgttcagatcgttacaatctgaaccaggaggttctagaagctggttgagttcgttcggaggcgagcgcgagaggccggtgtaggagcgcaaaggatggtccataacggttcacgatctttcctgttcaccggtggccgcagcttccatggtcacgcctttcgtcgcttcgcccggttcggaccgggtgagctgctccaaccccggctcgaggctcattcttcgtcctatcgacggcacgtggaagccctgtgggaggctcgaggcgtggcgcgaacgcggcggctcctacagcctcggctacc

SEQ ID NO: 261265 - DNA, 437 bp, Glycine max
cctcactccagccacacgcctcagtagaccatggcctcattgggtgggttacaaaatctaagcggcgtcaattttcttatcaaaaaagagggtccaaaagtcaatgcgaagttcgagctgaagccgccaccatatccactgtatggtttggagccggtgatgagccagcatacacttgagtttcattgggggaaacaccacaagacatatgtggaaaatctgaaaaaacaaattgctgggacagagcttgatgggaaatcactagaagagactatagtgacatcatataataagggtgacattcttgcagctatcaacaatgcatcacaggtatggaaccatgacttcttctgggagtgcatgaaaccaagtggaggtggaaagccattcgggtagcttctaaaactgattgaaagaaactttggctcatttgaaaa

SEQ ID NO: 261266 - DNA, 376 bp, Glycine max
cgcttcttctattcactctgttacggtgcaacctatcagcctgcaaatccaatggcttcagagaagaaactttcgaacccaatgagggagataaaagtgcagaagctcgtcctcaatatctctgttggcgagagtggagatcgtctcaccagatccgccatggtgttggaacaacttattggccaaaccccagtgttttccaaagcaaggtacactgttcgttcctttgggattagaagaaatgagaagattgcatgctatgtcactgtcagaggtgacaaggcaatgcaacttttggagagtggtttgaaggtgaaggaatatgaacttctcaaaaggaatttcagcgatactggttgctttggctttggtattc

SEQ ID NO: 261267 - DNA, 389 bp, Glycine max
gctttagccatcactaacactcagtctctgtattggggctgagggcttcgggtaacgtttagggttcacgagtttaagatatcatgggtaaagagaaggttcacattaacattgtggtcattggccatgttgactctgggaagtcaaccaccactggccacttgatttacaagcttggaggtattgacaagcgtgttattgagaggtttgagaaagaagctgctgagatgaacaagaggtcattcacatacgcctgggtgcttgacaagcttaatgctgtacgtgagagaggaattaccattgatattgcattatggaagtttgtaaccaccaaatactactgcactgtcatttatgctccagaacattttgatttcatcaagaacatg

SEQ ID NO: 261268 - DNA, 418 bp, Glycine max
cttgacgatataaatcatttgaaaaataaacgtattcgttcggtagcagatctattacaagatcaatttggattggccctggttcgcttagaaaatatggttagaggaactatatgtggagcaattagacataaattgataccgactcctcagaatttggtgacttcaactccattaacaactacttatgaatctttttttggattacatccattatctcaagttttggatcaaactaatccattgacccaaatagttcatgggagaaaattgagttatttgggccctggaggattgacggtgcgaactgctagttttcggatacgagatatccaccctagtcactatggacgcatttgtccaattgacacgtcggaaggaatcaatgttggacttattggatctctagcaattcatg

SEQ ID NO: 261269 - DNA, 396 bp, Glycine max
  unsure (1)..(396): unsure at all n locations
ctttgaatgaggatgctgctaataatgatcaattggatgcctggacagcccacaagactgaagcaggaattatatactattataatgctgtgacaggagaatcaacatatcataaaccttctggctttaaaggggagtctcaccaagtttctgctcagcccactccagtttcaatgattgatttgcctggtactgattggcggttggtctccactagtgatggaaaaaaatattactacaacaatctaaccaagactagctgctggcaaatcccaaatgaggtggctgaattgaaaaagaagcangatggtgatgttaaaaaagatcatttaatgtcagtttcaaatactaatgtattgnctgatagagggtctggaatggttactctgaaatgct

SEQ ID NO: 261270 - DNA, 441 bp, Glycine max
  unsure (1)..(441): unsure at all n locations
tttcatttctcagagagtcttcccgtctcttcctcttcacttcttataccgtcgcccccaaacgacgccgttttctgttctcttatgtaaacgccgttcgagaacaaaccaaaaaaagaaaagaaaatcagttattgccgttgttgttttgtttccggttcggtttatttcaatggatcgggcggcgttgacggttggaccgggcatggacatgccgatcatgcacgacagcgaccgttacgatctggtacgcgacatcgggtccggaaatttcggcgtggcgaggctgatgcatgataaacaaaccaaggaactggtcgccgtcaagtacatcgaaaggggtgataagattgatgaaaatgtaaagagggaaatcattaatcacaggtctctgaggcatcctaacatngttagatttaaagaggtaattttaacacctac

SEQ ID NO: 261271 - DNA, 300 bp, Glycine max
gaaataatgtccgggatcatccacaagattgaggagaccctccatgtgggagggcacaagaaagaggagcacaaaggagaacaccatggtgagcacaaaggtgaacacaaaggagaacaccatggtgagcacaaaggtgaacacaaaggagaacaacaccatgtggagcacaaggagggacttgtggataagatcaaggacaagatccatggtgatggccatgacaagaatgaaaagaaaaaataaaaaccaataaatgctaaaacacaaaaagccatggccatggccaaaggagaatta

SEQ ID NO: 261272 - DNA, 425 bp, Glycine max
gagcagagtaccttgtgaatacaaaaaacagaatttagccgttcgtgttgaagaatcaagcaagaagccagaatacttagcaattaaatttttgtatcaagggggacaaacggagatagtagccgttgatgtggctcaggttgggtcttcaaactggagcttcatgagcagaatcgacggtgcagtgtgggacacaagcagggtaccccaaggtgcattgcaatttaggttagtggtaacggcagggtatgatggcaagtggatttgggcaaagaaggtcctacctgctgattggaaaaatggacttatatatgattctggccttcagataacagacattgcacaagagggttgctccccctgcgacgatggaacctggtcatgattcattgctttgctgctgaagaataactcacatatacaca

SEQ ID NO: 261273 - DNA, 231 bp, Glycine max
ccgggttggaattacgcgttcgaacattcgttcatttacacttatgtccacttatcatccacaatattgaggagaccctccatgggggatggcacgcgaaagaggatcaccaccgccctcaccatggttagctcataaatgatcacaaaagataacaccatggtgtgcacaaatgtgaacacataggagaacttcaccttttcgagcacaaggagggacttgtggattaca

SEQ ID NO: 261274 - DNA, 409 bp, Glycine max
gattgacatcccttacgcatcttcagaagacttgctgcgatatcatctaggcctgaccaattgtcaccacatgcaagggaaagatgaacctcacatactccaaccttcgaccccttgaagtgttcatgtgcagcattgtgcgcaagatggggtatggtgaaggcttccagtggctaatccaatacatcaagtagagtccttattcattcttagttcccctttctcttgtcaactagccctgtctgcagttacatcagaagataattgacctttgtttttgcttttgatgatttttgattggattatttgatacaactgcagtgatattacatgataaaatttgtatcttcaaagattttttggggggaatgttcttctttgaaatacttaattctcctttaagattgtt

SEQ ID NO: 261275 - DNA, 334 bp, Glycine max
cccacgcgtccggtgagtgtgtgctttgcggctgcaagaggagatgacttgttgttacatcaattactcaaacggggcatggatgcaaatgaatccgacaacaatcgaaggacagctttgcatatagcggcatctcaaggaaaagagaactgtgtttcgcttctgttagattatggggcggatcccaacattagaggttgttctacgtgcagatttggaaggtaatgtgccactatgggaggctatagtggaaggacatgagtcaatgagcaagctgttatcagagaatggagcaaacttgcaatgcggggatgtgggtcaatttgcatgtaat

SEQ ID NO: 261276 - DNA, 304 bp, Glycine max
caacactcatatccttatcctgtttctttcaatggaagtcatttctgcttctagcttgaatgccaacgctccgatgttcgtgccactcgcctatctgacggtggaggatttctccgaccagtggtgggacctcgttcactcctccccctggttccgcgactactggctccgcgagtgcttccaagatccccagttccaaaacgacgacgctttcgacttcgactttgacctatatctccaagatgaagatgaaagggtacgaaaggaatggaaggaggtggtgtctttggtgctgctgaaatgg

SEQ ID NO: 261277 - DNA, 227 bp, Glycine max
tcgaccatgcgtccgacgtatatctagtcgtttggagcgacccgagttacactctgtgtgacatgttggtttaccaggagctccttacaggtgatgagcctctatgcgactccttccgttacaaggaaattgagaatggaatgctgtgggaagttgatgggaagtgggtcgcctaaggagcaggtgatgtcaacattgtggcaaacccttctgctgagggtagacga

SEQ ID NO: 261278 - DNA, 444 bp, Glycine max
ctgaccgagtccgagaggcatcatggcgactctggattccgacgtgaccgtgtttccggccggcgaatcctccagcggcgccggtccttcttcgtccaccaagaagccgaagcgtttcgagatcaagaagtggaatgcggtttccctctgggcttgggatattgtcgtggataattgcgctatttgtcggaaccatatcatggatctctgtattgagtgccaggccaaccaggctagcgccactagcgaggaatgcactgtagcttggggagtttgtaaccatgcttttcacttccattgcataagccgatggctcaagacccgtcaagtatgtcctctagataatagcgagtgggaatttcagaaatacggtcactagaactttgatgcggctgatctactttcaacttggacattgggattgtagcatttttatcaaattta

SEQ ID NO: 261279 - DNA, 412 bp, Glycine max
ggattctcaccaaccagtggccccaaaactcttctcgctttagggaaacattgcaggagtatgctcgagaagtggaaaagctagcttacaagttgttggagctgatttcactgagcttgggtttggatgctgaaaaattccatggctgtttcatgaaccaactcagcatggtgaggctcaattactatcccacatgccctttccctgatttggcacttggtgttggtcgccacaaggactccagtgctttaactgtgcttgcccaagatgatgttggaggattacaagttaaaagaaaatcagatggagaatggattccagttaaacccaccccaaatgcatttattatcaatgtgggggatatagttcaaggttggagcaatgacaagttttaaagcgtggagcacaaggt

SEQ ID NO: 261280 - DNA, 329 bp, Glycine max
gcagtttcaaagagaggatttgggattgggtttgcgagggattgcgctgcgtctcttcctcgggtctttcgattcatgcctcaggcataaggttccaatccaacaacctcagcctcacactcacacatacactcatctgaacgcgtatcgtccctcccatggcttcaaagcgcatcctcaaggagctcaaggacttgcagaaagacccaccaacttcttgcagcgctggtccagtttctgacgacatgttccattggctagcaacgattatgggtcctgccgatagtccttatgctggaggtgtattcctagtcactattcactttcct

SEQ ID NO: 261281 - DNA, 397 bp, Glycine max
  unsure (1)..(397): unsure at all n locations
gcgctataattgaaatagataacccggccagtgtctaaaggttattggcgcagctgtttgacttggctctgagggcaactgtgccggatgagcgagatnttttgccgttaattgatgcttgtgctgttaaaggtggcgtataatttggtgattatcaatgtaataatgcaatgggtattttttctaagatgaagggaaagcatactggttttaggggttccccatcatttgttcatgctatcgttaacaatcttccttcatttgtaatgatttaattcttgctcttataattttcctgtatattttaattttttattgtgtcaataaattttttgcttgatttcttatatataattgcttatttaattgtattcaaatttttgtgcactttttattt

SEQ ID NO: 261282 - DNA, 439 bp, Glycine max
gtgaagagaagaaggaaaagaaagataaagagaaggagattaaaaaggaaaagaaggataaagatgaagaaacagacacattaaaggaaaagggaaaaaatgatgaaggtgaggatgatgaaggaaataagaaaaagaaaaaggataagaaggagaaagagaaggatcacaaaaaggaaaagaaggataaagaggagggtgagaaagaggatagcaaggttgaagtttctgttagggatattgatatagaagaaataaaaaaagaaggtgaaaaagaagataaaggaaaggatggtgggaaggaagtgaaagagaagaagaaaaaagaagacaaagacaagaaggagaagaagaaaaaagttactggaaaggacaagaccaaggatcttagcactctgaagcaaaaacttgaaaaaaataacggaaaaatacaaccact

SEQ ID NO: 261283 - DNA, 274 bp, Glycine max
gtgaactgatttcgttatcagaacttgaattgttggattgtgatacaggatataacgaatggtgcaatggaggacgtatggactatgcatttgagttcattatcaacaatggcggcattgattctgaagaggattacccttaccgtggtgttgatggtagatgtgacacatataggaaaaatgctaaggttgtttctattgatgactacgaagatgttcctgcctatgatgagttagctttgaaaaaggctgttgcaaatcatcccgttagtgt

SEQ ID NO: 261284 - DNA, 227 bp, Glycine max
aataagcggggcgaccgacgcgtccgttcttctgtcctctccacatgagtttttttttctacttaaagatacttgtatacagggcattggtattcagtgcacgcacaggagctcccatatctcttctattctattacagttagacatcctcttatggttgttgtcactgctgatataaatcttattgtttacaacttgcaaaaccctcaatttgattttaagagtat

SEQ ID NO: 261285 - DNA, 315 bp, Glycine max
ggtcgaccacgcgtgcgccactcgttcgccacgcgttcggattctttatttttatttattaattgttactgtgttactgtacaggattggctacttatggagagaaagagtggtacttcttttcaccacgggaccggttttacccaaacggttcgaggccgaaccgggcggctggcaccggttacttggttgcaaccggcgcggattagcccattgtgtatcccaaaccggttgggattaaaaaagctttggtgttttacgcaaggaaagcttctatgggacaaatacattttgttcatgcacgtgtatcgtttt

SEQ ID NO: 261286 - DNA, 309 bp, Glycine max
  unsure (1)..(309): unsure at all n locations
cccacgcgtccggnggtttatttaagtggttcttctcatggatagaggactgtggattcgaacagttccctaccttcggattgcaagcttggaagcaaacattctacttcgattttagtatgacttttgtgggagcagggatgatttgctcccatcttgtgaaccggtctttgctccttggagctgtgctctcttttggggtcatgtatccgctcattgatcggcttaaaggagactggttccctgacaatttataagaaactaacatgaagggcttatacggttacaagttttttgtttccattgctc

SEQ ID NO: 261287 - DNA, 430 bp, Glycine max
tgaattcccgggatatctgtgtatcaattttctctcaacatcctatgtttgctgctgtttacatctgatcagagttcatatatatggcgaataaactgaatataaggctaggagaaccaactctggtgccaccagcagaagaaacggaaaagggtctttactacttcctttcaaaccttgaccagaacatagcacatccagttcgaacggtttacttttataataagtctgcatgtagagggaacgaggaagcagcacaagtaataaaggatgctttgtcgaaggttcttgttcactattaccctatggctggaagattggccataagttcagaagggaaactgatcatagagtgcacaggtgagggtgttgtgtttgttgaggctgaagaaacaaactgtgtgataaaagacctgggagaattgacaaa

SEQ ID NO: 261288 - DNA, 381 bp, Glycine max
aaccctacttatacttacccccttttctctcttaccttatcacctaatccttatcctgccagaccatattaccatgtgggcctgcgcatcttccctcgcactcccaaccctcactctccgaacccgacaacctctatgttctccccaatgcttctcctcgtccctctccctcacacccaacaacaaacccatttccatttctgctgtttttctcaaaccaacaactctgtcgtcgtctcgcttcgttccccacgtcgtggtgtcgtcggatttggggcaggaggaggacaccttcagtgacggagactgccccagctttttccccgaccttaagctctttgtcgggaatttttcgtttaacgtctacagcgctcagctcgc

SEQ ID NO: 261289 - DNA, 409 bp, Glycine max
gaaaaaaaaaactcatacaccttcatgtacttttatctttctttgttagtatttggtgctacgattttacattcttgggatctctacatatttcattagtcatggcacctcaagcagtttccttcaagtccttcgccgttgctcttattgtggcgcttttcttctccgccttcgctctggacttaatttcggggcaatcgccggtgccctctcctttctcctttacctttttctttttttctatttttctggtccccttttttgtggtattttgttcattcttttttattttctttggtttcattgttcttttcttctatttaatttttataaatatttgttcttatttctttttttttattattttttttttttccttatcgttcatttatttcgctttttttttttt

SEQ ID NO: 261290 - DNA, 371 bp, Glycine max
cccacgcgtccgcttttttgttgttgtggtgtttcatttgtgaaactaacaacaacacaagggcatcatcatggcagctgcttgcccaatggcaagccaactcaagtccaccttcactaggactcttgtagctcccaagggcctctctgcctcttcaccacttcacctcgtgccttctagaaagcaatttagcttcactgttaaggccatccaatcagagaagccaacctatcaagtgattcagccaatcaacggtgacccattcattggaagcctggaaaccccagttacatccagccctttgatcgcatggtacttgtccaacctgcccgcatacaaaaccgcagtgagcccactactaaaagggatcg

SEQ ID NO: 261291 - DNA, 389 bp, Glycine max
gtttcgacggcgagtactgtcgcaacctcttctactcgcgcgtgggcaaaaccacctggccgtactgctccggcgtgtggagcggaaaagaatgggtcctccccgagatccacgacgacgatatcgtctccgccttcgagggtaactccaacctcttctgggccgagcgtttcggcaaacagttcctcggcatgaacgatttgtgggtcaaacactgcggaatcagccacaccggcagcttcaaggatctcggcatgaccgtcctcgtcagccaggtcaatcgctttgagaaaaatgaaccgccccgtcgtctgtgttgggtgcgcctccaccggtgacacatcgggcggtttattcgcctattgcgctttcgctgccattcctttcat

SEQ ID NO: 261292 - DNA, 398 bp, Glycine max
gagatatacaacatggctatatctacatcagaaagaatggcatcagtctcgaaaaggattacccttaccgtggtgacgagggtaaatgtgactcaaataagaaaaatgctattgttactattgatggccacggatgggttcctacccaacttgaggaagccttgaaacagggcattgcaaatcagccagtggccgtacctattccagcagacgactatgaatttcaatattatacatcaggtgtattcaaagggaaatgcggtacagaattaaatcatgctctcctgcttgtggggtatggtacagaaaaagatggagattattggatagcaaagaattcatatagtgataaatggggagagaatggctatatcagaatacaaagaaaactgagcact

SEQ ID NO: 261293 - DNA, 441 bp, Glycine max
atgatagtgacaagagaatccctgacatgaccataataaacaggcagcttggatggaatcccaagactgcactttgggacctgcttgagtccactctgacatatcagcacaggacatatgctgaagccgttaagaaagtcattgcaaaacccgttgcaagttaagctttttacagtgatggtgatgtgctacctttgagaagggtgttcttgtcttgcccaagtgttctgccatattatactggttgattttatataaaatcgtaaattttcctcctattggtttcgttagcctgtaggcaatatatcccccacatggagaagtaggaatttatacaagggcaatctgtgctctatgtaattttaatgtagagaccatgcgctgcttaacatgttgagacactttatttattacccaaggaagacttttttctgtgttttt

SEQ ID NO: 261294 - DNA, 366 bp, Glycine max
cataactagcaaaaaaatggaccttctcctattttgccttaaccttaacaccattgctattgcatcaatcctttctgtaatcggcgttatgtgtgtttctatatcgtaaaaattctcgtgggaaagatgctccagtagtgtctggtgcatggccaatacttggtcacctctcattgctgaatggttcacaaacaccacataaagtgttgggtgctttggctgacaagtatggacccttattcaccatcaagctcggtatgaaaccggctttggtactcatcaactgggaaatgtctaaggaattgttcaccacaaacgaccttgccgtttcatcttgccctataactcttttccgttgaattaatt

SEQ ID NO: 261295 - DNA, 378 bp, Glycine max
ctttggtgagctgctacgggatctaagatcttaacttggtgttgccaacagtatctccatgggaatcacttcggggggtatctgtcattaattgccctggatttggcaatgcctccctctctgtattgggaaagctgtgccctcagcttcagcatgttgaattgagtggactcgagggagtgacagatgcatggcttcttccactccttgagagttccgaggctggtttggttaaagtgaaccttagtggttgctcaaacgttaccaataaagtagtttcgtccttggccaattctgatggttggactcttgagaatcttaaccttgttggttgcaaaaacattatttgatgctagcttgatggcaattgctgaaaac

SEQ ID NO: 261296 - DNA, 431 bp, Glycine max
cccactcgttcgcccactcgtccgtccacgctttcgataccttaacaatcctccaggcagagtcctcactcttgctgtcaccctcacacttggttggcccttgtacttggctttaaatgtttctggaaggccttatgatagatttgcttgccactatgacccatatggtcccatttactctgatcgtgaacgacttcaaatatatatatcatatgcaggagtacttgcagtatgctatggccttttccgtcttgccatggcaaaaggacttgcctgggtggtgtgtgtttatggagttccattgctagtggtcaatggatttttggtgttgattacattcttgcagcatactcaccctgcattgccacattacaacttctctgagtgggacctggttgagaggagctttataccacagtggatagagatta

SEQ ID NO: 261297 - DNA, 330 bp, Glycine max
cgctctcatgctcaagatttcaggcagcattttaccaatattaggtgaaagatgtggttccggaacatgaagataaagctaatggttctgggtatcataattgccttgattctcattattgttctttccgtttgtggtggcttcaactgtggttaatgagtcttcccacatcctggcttcaactgtggtatttgtctcctcactttataagattgttgctagcagattgccattgcctctactgtcaacatagtgcttttgactttttgggttttacattcttcccacttctccgatgatgaatattatatggcattgcttgtttagtgt

SEQ ID NO: 261298 - DNA, 354 bp, Glycine max
gcgttttgctgctgttattatgaggatcagggaaccaattactactgcactcatttttgcatgtggcaagatggtctgcactggagctaagagtgagcaacagtctaaattggcggcaaggaagtatgctagaattatccaaaagcttggtttcccagctaaatttaaggattttaagattcagaacattgttggctcttgtgatgtcaagttccccattcgacttgagggtcttgcctattcccatagtgctttctcaagttatgaaccagagctgtttcccggactaatctatcgcatgaagcaacccaagatagtcttgcttatatttgtcttcggaaaaattgttctgac

SEQ ID NO: 261299 - DNA, 339 bp, Glycine max
cccacgcgtccgggcatatatagtaggggagcatggggatagttcggtggcgttatggtctagcattagcattgggggtgttgcggttctgagctttttggagaatcaacagattgtgtatgagaaagagacgttggagaacatacacaagtcagtgatagacagtgcgtatgaagtgatcaagctgaaagggtacacttcatgggccattgggtactctgtggctaacctggcccggtcctttatcaggaaccagaggaagattcaccctgtgtctgttctggcttaaggcttttatgggatcgatggagaagtgttcctgagtttgcctgcaatgat

SEQ ID NO: 261300 - DNA, 275 bp, Glycine max
gagcagagtaccttgtgtatacataaaacagtttttagccgttcgtgttgaagaatcaagcaggaagccagaatactgagcaattaaatttttgtatcaagggggacaaacggagatagtagccgttgatgtggctcatgttgggtcttcaaactggagcttcatgagcagaatcgactgggcagtgtgggacacaagcagggttccccaaggtgcatttgcaatttaagttagtggtaacggcagggtatgatggctagtggatttgggcaaaa

SEQ ID NO: 261301 - DNA, 318 bp, Glycine max
tagtaagccgcaatggtgaagtactcaagggggcctgacaatccgagtaagtgttgcaaggctagaggcgccgaccttagggttcattttaagaacacaagggaaactgcctttgcaatcaggaagttgcccttggtcaaggctaaaaggtacttggaagatgttcttgcccacaagcaggctattccattcatacgtttttgtcgaggtgttggaaggacagcccatgctatgaatagacactctaatggccaatgacggtggcctgtcaagtcatcataattcattcttgatttgctcaaaaatgctgatagcaat

SEQ ID NO: 261302 - DNA, 301 bp, Glycine max
gaaataatgtccgggatcatccacaagattgaggagaccctccatgtgggagggcacaagaaagaggagcacaaaggagaacaccatggtgagcacataggtgaacacaaaggagaacaccatggtgagcacaaaggtgaacacaaaggagaacaacaccatggggagcacaaggagggacttgtggataagatcaaggacaagatccatggtgatggccatgacaagaatgaaatgaaaaaattataataatataaataaaataataaataaaaaaatatttatattttttaaaaaatta

SEQ ID NO: 261303 - DNA, 382 bp, Glycine max
tttcatttctcagagagtcttcccgtctctttctcttcacttcttataccgtcgcccccaaacgacgccgttttctgttctctgatgtaaacgccgttcgagaacaaaccaaaaaaagaaaagaaaatcagttattgccgttgttgttttgtttccggttcggtttatttcaatggatcgggcggcgttgactgttggaccgggcatggacatgcctatcatgcacgacagcgaccgttacgatctggttcgcgacatcgtgtccggaaatttctgcgtggcgaggctgattcatgattaacaaaccaaggaactggtcgccggcaagtacattctaaaggggtgataagattgatgaaaatgtaaagaggggaatcattta

SEQ ID NO: 261304 - DNA, 418 bp, Glycine max
  unsure (1)..(418): unsure at all n locations
tccacgcgtncgtccacgcgttcgtccacgcgttcggtcggaacagccctgcatactacagtcctccgcggcgaggatactgcggtggtggccgangaggatgaggaggaggaggaggaggagggtccggcaggagggggttcggtggaggcaggcgcatggacagcaatgggagcctcttggttcgtaacattcccctcgattgcagacccgaggagcttcgcgttcctttcgagcgatttggacctgttcgtgacgtttacatacccaaagattattactctggagaacctcgaggctttgcctttgtgcagtttgtggatccttatgatgcctcataagcacagtaccatatgaacagacagatttttgctggaaaggaaatatctgtaattgtggctgaagagacgagaaaaag

SEQ ID NO: 261305 - DNA, 431 bp, Glycine max
aaatggtgtcgctgaaactgcagaagcggctggccgcaagcgtgctcaagtgtggcagaggaaaggtgtggcttgaccccaatgaagtcaacgaaatctccatggccaattctcggcaaaacatcatgaagttggttaaggatgggtttatcatcaggaagccaaccaagattcactcacgctcgcgtgctcgtaggatgaaggaggcaaagaagaagggccggcactctggttatggtaagagaaagggtacaagggaggcgaggcttcccaccaagatactttggatgagaaggatgcgtgtgctcaggcggttgcttcgtaagtacagggaatcaaagaaaattgacaagcacatgtaccatgatatgtacatgaaagtgaaaggtaatgttttcaagaacaaaagagtcttgatggagagcattcac

SEQ ID NO: 261306 - DNA, 455 bp, Glycine max
gctcggaaccttcgacaccgccatcgaagccgccaaggcctacgaccgagccgccttcaggctccgcggctccaaggccatcctcaacttccccctcgaagttaacaccgcggcggagaccgtctccgtcgccgccgtcgacgtcgagaggaagcgccgccgcgaggaggaggaggtggtggtggaggatgtaaaggcggtggtgaagaaggagaaaataacggagcatgatgtgagttgttttagggggatgccgttaacgccgtctatgtggaccgggttctgggacagtgacgtcaaggatattttcaacattccgccgttgtcgccgttatctccttttggattttcaccgctcgtggctgtgtgaaattccaatttaggactgcgttttttcgggttttagtacttacagcgtccttctgttcagggatgagtacattggacatttgacg

SEQ ID NO: 261307 - DNA, 311 bp, Glycine max
atatacggcatcgttaccatggtcaacaagaatgaaaattgcagctggagctgcaaagggtctagcctttctacatgaagcaaagaaaccagtcatctatagagattttaaagcttcaaacatcttgttagactcggattataatgcaaaactttccgattttggcttggccaaagatggtcctgaaggagatgacacacacgtttcaactagagtcatgggcacacaaggctatgcgggcccagaatacatcatgacaggacacttgacagcaatgagtgatgtgtacaagtttggagtcgtgctcttgg

SEQ ID NO: 261308 - DNA, 312 bp, Glycine max
cttctcaccatcgttctttattattatcatcccctcctcttccttccttctcctctcattccatacctcaacaaaacaaggttcagagacttttccgattcctggaagaagagaagagaaaacctaaatcacagatccatggcggaagaacaccgatgtgaacctcccgaaggtcaccgactctgcgtcaacaactgcggcttcttcggtagcaccgccacgatgaacctctgctccaaatgctacagcgcgatccgtttgaaggagcaagaaaaagcgtcgacgaaatccacaatcgaaaccgcgctctct

SEQ ID NO: 261309 - DNA, 299 bp, Glycine max
acgccacgcgttcgttatttttgccctatctattatggttcccgcggcttcaaaccttaatggttctgttactctctttccctcatgcgcccttgctctcaacaacaattacacaccgtcatcgaaaccctcgctctttatcttcttcgttctcctttttgctctcgatcgagggttctttcgtggggaacactgcagatttcaccacccgggtcttattcatccgtgcccatgtccaaagttctcggcttttccggagttgacaatttttgccctattggatcaatataccccaaccc

SEQ ID NO: 261310 - DNA, 462 bp, Glycine max
  unsure (1)..(462): unsure at all n locations
tntcatgctatgggatactgataacatttctctcaaacacggcaatngaactcaaagctggtctaagaagatatggttctacccttaaggatatagaaatacgtgatcttatggaagcggctgatgtggacaaaagtggaaccatagactatggggaggttattgctgcaacagttcatctcaacaaactagagcgtgaagaacatctcattgcagcattccaatattttgacaaggatggtagtgggtacattacagttgatgaacttcaacaagcttgtgcagaacaaaacatgactgacgcttttcttgaagacatcattagagaagttgatcaagataatgatggaaggattgattatggtgaatttgctgccatgatgcataaaggcaacgctggaattggtaggaaaactatgcgcaacagtctgaatttaagcatgagagatgcaccaagtgctc

SEQ ID NO: 261311 - DNA, 389 bp, Glycine max
cctttcagatgatgtttccttccccacgcttcaaccctttctctatctgaactcactcacaagaacaccactgcttcaacttcaaaccccaaaatcgaatcaaactttcccaccatcactcactccgaaacacacctcaaccacttcacagcaccacccattcaaggtttgctacctcgtaagcacttgtggcttctccgtagaaaccgctctcaagatctccaagttcacccaattcaaaacccccgaaaaacccgattcaatcatcgccttattcagaagccacggtttctccaacacccagataatcagcattattagaagagcacccaatgttctctcatgcgacccccacaaaaggattttcccaaagtttgaatttttacgct

SEQ ID NO: 261312 - DNA, 320 bp, Glycine max
cccacgcgtccgattttaacatatgagtaacatagcgggttcacaggccaccgacgaggatgttctccaccttcacttcaccgtcgctggcgtcaagatttccgcactagcgctccggcggcaccatcgacgtcactggcctgatgcatggcaagactgatgccaacgccatcatacgccttcgcccttcccgtcgaaggcaccaagattcgtgtcattgcccatttttttttcatatttctgaattccattcatgtgcttcaagtcctctcttgattcacacctgttggattttctgtggaacaagtatgggatgaata

SEQ ID NO: 261313 - DNA, 451 bp, Glycine max
  unsure (1)..(451): unsure at all n locations
gagctactgttgtcattgctgtgaagtactccatagttgagcgtccagagaagatagatgagatcatataccctgaaatatcttcatttctgatgcttatcaaggataacgataggcatgttaggcgagctgctgttttggctataagcacatttgcacacaataagccgaatctcatcaaggggcttcttcctgatctgctgcctcttctatatgatcaaactattgttaagcaagagctcataaggacagttgatcttggtccttttaagcatattgtggatgatggactngaattgaggaaggcggcttttgaatgtgtagacacattgctggatagttgccttgatcaagtgaacccgtcatcattcattgttccttatcttaaatctggtttggatgatcattatgatgttaaaatgccatgccacctggtactctccaaactagc

SEQ ID NO: 261314 - DNA, 402 bp, Glycine max
aatttcttggttacatcaaggtacatattttctgttcattcattaactcatctgcaaacatggccgataagcaaccccacttgaacggcgcttattacggtcccgccattcctccggcggagcaaccacgctaccgccctcacagtcaccgcggaagaagctgctgttgctgcctcttcggaatcttgtggaagattctggttgcactcattgtcctcgttggcctcgcggtcctcatcttctggctggtggttcaaccccgttccttcaagttccacgtcacggaagccgacctaacacaatttgattactataccaacaacaacacccttcactacaacatggtcctcaacttcactgcacgcaaccccaacaagaagctaatcatatactacgacaaag

SEQ ID NO: 261315 - DNA, 397 bp, Glycine max
caagcattggagaggcattaaaccaaggacaggggcaccatattcctgtgatattggctatgaacgatttctaggccctgagattttctttaatcccgagatatatggcagtgactttaccacccctttgccagttgtaatagacaagtgtattcagtctgcgccaattgacacaaggagatcattatacaagaatgtagtgttgtctggaggttcaaccatgttcaaggattttcacaggaggttgcaacgtgatctaaaaaaaatagtggatgctcgtgtacttttatctgaatcacgcttgaatggggagataaaatcgcagccagtggaggtaaatgtactcagcaatccaatccagagatttgcaagttggtttggaggatcaatgcttgca

SEQ ID NO: 261316 - DNA, 378 bp, Glycine max
cggacgcgtgggtccaaatccaaaaaaatcatggagcagttgtactacctcacccttgtgctactgtttgtgtccttcgtctctgtctcttttttcatcattttctacaggcatcgttctccgttcagcgtccccaacttgccgccggggaaggcggggtttccggtgatcggcgagagcctggagtttctgtcggcgggacggaaggggcttccggagaagttcttctccgatcgcatgacagagtactcttccaaagtgttcaagacctccatcttaggggagcctacagtgattttctgtggagccgcatgtaacaagttcttgttttctaacgagaacaaacacgtcatttcgtggtggcctgaaaatgtcaag

SEQ ID NO: 261317 - DNA, 345 bp, Glycine max
cgttgttcatgttggatacaggcatattgactgtgctagtgcgtataagaatcaagcagagattggttctgctcttaagaagctttttgatgatggcgtggtgaagcgtgaggacttatggatcacttccaaactctggtttgttgtctcttagtaattgtgatctctttttgaatattgagaaagattgtatgtgtttggaccaggtcgggtgctgaatgaaggatcctttgatttgctggctatatttttaggtgttcagatcatgcaccagaagatgtgccaaaagcattggataaaacattacaggtattgcgacttgactatcttgacctctatctgatc

SEQ ID NO: 261318 - DNA, 327 bp, Glycine max
ctcaaccttaagaagacacctcagcttgtggaattggttgatgacagcgaggagatcgaagagcttcttaatttgtctcctgaaaaggttctactaaaatggatgaattttcatctccagagagcaggttacgagaaaactgtcagaaatttttcttctgatgttaaggatggagaggcctatgcttatctgcttaatgtccttgctcctgaacattgcattccggccacctttgataccaaagatgccagtgaaagggcaaatcttgttcttgatcacacaaagagaatgggctgcataatatacttgaccccaatggatgttgca

SEQ ID NO: 261319 - DNA, 418 bp, Glycine max
cggacgcgtgggcggacgcgtgggtggaaattgaggcagctcagtggatgccattcgaggaatttgctgatcaaccttttaatcagatgcatgaacccttcaagtacatgattgaattatgcttggcaaaggttgaaaaagtctataatggattctctccgcgacccatctcatcatatttcgtggaggagttgaattatctatatttgaatagtcattgcctggacaagtcttcttaagttttacaaatcaaccttggtcgtcatccataaaagtttagtttgatatttctttcttgtaaggatttaattaagctttttctccttaaatttaggttacttctgtttttgtccttcaaatttattttttttagtcctaaaattatgaaagatgttctttttacttcctcttgcggttt

SEQ ID NO: 261320 - DNA, 377 bp, Glycine max
gaaggaagagaagaagttcagaacaaaaacacatcaaaaaagaagtaactctctttctttctttctttctttctttctctcgttgtgaagttgttctctttaatggcgaagtcaaagaacaatgctaagaagttgtcctacatatcagttccatctcagatcatcaactccatatcatcatcttctctgcaatctcttcttgactctcccaagaagtcttcaaggaacaccaacaacaacaggttctttatcttcttcaccaacagcaccagcaccatcatcttcagaaaacaaagactctggtttttcacactctttctccttggtttccttggcatgctcaagtttggccttaacctttacaccccttttccccc

SEQ ID NO: 261321 - DNA, 394 bp, Glycine max
cccacgcgtccgcccacgcgtccgtatagcttggttttatgttgctggctctcatttggaagtttgactttccaccctttatggtgcttattatcgctatcctaaatgatggtactattatgacaatttcaaaagatcgtgtaaaaccatcacctctgccagatagctggaagctagcagagatatttactactggagttgtgcttggaagttacttggcaatgatgacagttatattcttttgggcggcatacaaaacaaactttttcccgcgagtgtttggagtcccaagtcttgaaaaaactgctcatgatgattaccggaaacttgcctctgcaatctatcctcaagtgagcactattagtcaggctcttatatttgtaactcgatctcg

SEQ ID NO: 261322 - DNA, 122 bp, Glycine max
ggggggggggcataaatcaccgccttgttagtccgtgttgaaatggcaacttttttttttaatctgcccggggtggatttttttatttatatactatcaataccgtttggtggccgcccaac

SEQ ID NO: 261323 - DNA, 379 bp, Glycine max
tcgcccacgcgttcgtccacgcgttcgagccctcagagattccggcgaggacttcaaggcggtgctcaagtgcgactacagtggtggcggatgcggctgctactgttggggtgggggtgaccgggatgcggagaaagaagaaggtcccttgtcggagtggttgaatttcacttctgatgacgcaaaaacggtgcttgcggctctcgcaatttcgcttgcgtttcgatcattcgtggcggagccgaggttcattccttcgctgtcaatgttttctacattggatgttggagatcgaattattgctgagaaggtttaatactattttagaaaaccatgtgcaagtgacatattgatttttaaaaagccctcggtgcttaag

SEQ ID NO: 261324 - DNA, 355 bp, Glycine max
cccacgcgtagctctttgacaccttcttcggcaacaccgagatgagggttgtgatgcttggtcttgatgctgctggcaaaacaactatactttacaagtttcacattggagaagttttatccaccgttcctacaattggtttcaatgtggagaaagttcagtataagaatgttattttcacagtctgggatgttggaggacaagagaaactaatgccactttggaggcactactttgacaacacagatggcctgattttatgttgttgatagcccggaccgtgagagaattggtaaagcaaagcaggaatttcagacaatcataaatgacccatttatgctcaatagtgtcatct

SEQ ID NO: 261325 - DNA, 453 bp, Glycine max
  unsure (1)..(453): unsure at all n locations
cccaaacgttaactcagacgaagcaccaacagaagaagaagaaacaaaaccgaacctctctaaactctccaacgtcgccacccgattcatcgcatttcgcaggctgcaatggcgacgttcgaactgtaccgcaggtcgacgattggaatgtgcctgacggagacgctggacgagatggttcagaacggcactctaagccccgagctcgcgattcaggttctggtccagttcgataagtccatgactgaagctctggaaacgcaagttaagagtaaggtctccatcaagggacatctccatacatatagattttgtgacaatgtttggaccttcatcttacaagatgcnttgttcaagagcgaagacagccaagagattgttggacgggttaaaatagtggcgtgtgactcgaagttgctcacacaataatgtgcctaatttctgccattgtcg

SEQ ID NO: 261326 - DNA, 362 bp, Glycine max
gcgcccacgcgtccggtgtatcatcatatggaggagcggcattaaaaatgcagatcttcgtgaaaaccctggcggggtagaccataaccctcgaggtctaaagcagcgacaccattgacaatgtcaaggctaagattcaagacaaggaaggcatccctccggatcagcagcgtttgattttcgccggaatgcaacttgaagatggaaggaccttgtccgattacaacatccataaagaatcaacccttcaccttgttctcatgcttcttggtggcattatcgagccttccctcatggctttggctcgcatatacaaccaggaacaagatgtttttgccgcatattcttttgctcgttctgta

SEQ ID NO: 261327 - DNA, 317 bp, Glycine max
cccacgcgttcgctccttcttccacctagcagtggtgacaaccaaaccaagtgtcccctccggtctcttgttaacaggtagcagagttagtgagtaatggcaggaggacaactaggagtgcttaatgcactcgatgtggcaaaaacacaatggtaccacttcactgctattgtgatagctggaatgggattcttcactgatgcctatgatcttttctgcatttcccttgtgaccaagttgttggggaggttatattacacagacataaccaacccgtagcctggtgttcttcctcctaatgtgcaagctgctgtgac

SEQ ID NO: 261328 - DNA, 423 bp, Glycine max
aacgcagcatcgctattctcttcattccatggctttgcccaaccagcaaaccgtggattaccctagtttcaaactcgttatcgtcggcgatggtggcacaggaaagacaacctttgtgaaaaggcatctcaccggagaattcgagaagaaatatgagccaaccatcggtgtggaggttcacccattggattttttcacaaactgtggaaagattcgattttactgctgggatactgctggacaggagaaatttggtggcctcagagatggatactatatccatggacaatgtgctattatcatgtttgatgttactgcccggctaacatacaaaaatgttcccacctggcaccgtgatctttgcagggtctgtgagaacatcccaattgttctttgcggtaacaaggtttgatgtcaagaaca

SEQ ID NO: 261329 - DNA, 298 bp, Glycine max
cgtctctccgcaccagtttcaccgcacgaatatcttgttgtttggagcgatccgagaaaaagtctgtaaacatgttggtttaccaggacctccttacaggtgatgagcttctctctgactccttccgttacaaggaaattgagaatggaatgctgtgggaagttgaggggaagtgggttgttaaaggagcagttgatgtagacattgttgcaaacccttctgctgagggtggaggagaagatgagggagttgatgattcacctgtttaggttgttgacatttttgacacatttatact

SEQ ID NO: 261330 - DNA, 279 bp, Glycine max
ctcatgttgaattcttgagaggagttgctaatccacttggcatcaaggtgagtgataagatggttcccgatgaacttgttaagctgatagatattctgaaccctaaaaacaagcctgggaaaaatacagtcattggtaaaatggagctgagaatttgccaagggaactttcacattttaatcaggccattccgaaaacaagtcaaaatttcacttgggtttatgaccccattcattggaacaccattaaagctccatttggacttaaaacccgctcttt

SEQ ID NO: 261331 - DNA, 150 bp, Glycine max
  unsure (1)..(150): unsure at all n locations
cttctattgttgtttgtgtgtntgtttatttctctcacctgataatgtcttgctgcggtggtaactgtggttgcggaagctcctgctagtgctgcatcggctgcggaggctgcaagatgtacccaaacttgagctacacccagtcaacca

SEQ ID NO: 261332 - DNA, 295 bp, Glycine max
cccactcgtccgcccacgcgtccggctggtgcatgcaccatggattggcctctaaggctcagaattgcaattggagcggccaaaggattagcatggcttcatcatagctgcaatccccgcattatccaccgaaacataagctctaaatgcatcttgttggatgctgattttgagcccacaatttctgattttggccttgctagattgattaaccctattgatacacatttgagtacttttgtgaatggggatgttggggatttatgttatgtcgctcctgaatttacataaactt

SEQ ID NO: 261333 - DNA, 296 bp, Glycine max
cccacgcgtccgccacaacagtgggagggagatccaaaaagagagagtggaaaagatggcgcggttgatcacagtggtgtggtgcgcggtggctgttctattattctcctcggccggtgcgtcgtgggtggaggatgcggctaacccgatacgaatggtgtctggcgtggaggcggaggtggttcgggtgatcggggagtgccggcgtgcgttgaagtttgctaggttcgtgagcaggttcgggtagagttaccaaagcgaggaagatatgaatgagaggtacgagattattctcg

SEQ ID NO: 261334 - DNA, 312 bp, Glycine max
agataacaaaaatcgaaacattactcgttttttatttccccaaaatgatcaaggttatgagattgaatcgactaaaaaatgaaatgaatcatttcatattgatagtattgctatgcttagtgtgcgactcgttagttttttagaacggttccaatctaacaaatttataaaccggttcatcgtataaatgaattaaaaaagaactaatttccaacgcatcgcttcggattttctagatcttaagaactagtcctaacataaaactatattaaaaatgatttattatgcgcaactgaacttttgtgaagcata

SEQ ID NO: 261335 - DNA, 456 bp, Glycine max
aaccggcccaatttagcatatagcccagcatggccaccgcaacagcagcagccacctcgtccttcatggggacgcgcctcctggaggcccactccggggcggggcgggtgcaggcccggttcgggtttggcaagaagaaagccgccgccccgaagaaagtttccagggggtcgggctctagctccgataggcccctgtggtatccgggcgccaaggcgcccgagtacctggatgggagccttgtcggagactacggattcgacccatttgggctagggaagcccgccgagtacctgcagttcgagttggactcgctggaccagaaccttgcgaagaacgtggctggggacatcattgggaccaggaccgagctcgcggacgtgaagtccacgccgttccagccctacatcgaggtgtttcggctggcaaggttccgcgagtgcgagctcattcacg

SEQ ID NO: 261336 - DNA, 321 bp, Glycine max
ctcagatattgttaaaaaagcaattgaaaatccagagctatttgtgatgaagcctcaaagagaaggaggaggtcttgtaccacttaaactttgactcaacactgttggaaaaaaatgtccgggagagaaacttacacaatgagctgtaattacttttcaggaaacaatatttatggtgatgagttgagggaaaccctccttaaattacaggaagcacgttctcaagaagatgcagcatacattcttatgcagaggatatttcccgccacttcttcagcaattttggtgcgtgatggtaattgggataccggtcatgtcatt

SEQ ID NO: 261337 - DNA, 379 bp, Glycine max
ggctatggaaatgagaatgtagatggcttgaatgaactgaacagaggccctacggccaatggtggcagaaaccaaaaaggttttgcaccaactattttggcagtcaaagggcagaacttgcctgcaagtttatgcaccgatgaagagaaagacaagactagtaccgttccggaccgtgatcagtataacaaagctgattttccagaagaatatactgatgctaaattttttgtcatcaagtcttacagtgaggatgatatccataagagtattaagtataacgtgtgggccagtacccaaaatggcaacaagaagcttgatgctgcatatcatgaggcacagcataaacctggtggctgccctgtttttctcttttttt

SEQ ID NO: 261338 - DNA, 377 bp, Glycine max
aaatggtgtcgctgaaactgcagaagcggttttccgcttgcgtgctcaagtgtggcagaggaaaggtgtggcttgaccccaatgaagtcaacgaaatctccatggccaattctcggcaaaacatcaggaagttggttaaggatgggtttatcatcaggaagccaaccaagattcactcacgctcgcgtgctcgtaggatgaaggaggcaaagaagaagggccggcactctggttatggtaagagaaagggtacaagggaggcgaggctttccaccaagatactttggatgagaaggatgcgtgtgctcaggcggttgcttcgtaagtacagggaatcaaagaaaattgacaagcacatgtaccatgatatgtacatg

SEQ ID NO: 261339 - DNA, 252 bp, Glycine max
ggctcggaaccttcgacaccgccatcgaagctgtcatgtcctacgaccgagccgccttcaggctccgcggctccaaggccaggctcaacttccccctcgaagttaacaccgcggcggagaccgtctccgtcgccgccgtcgacgtcgagaggaagcgccgccgcgaggaggaggaggtggtggtggatgatgtaaaggcggtggtgaagaatgagaaaataacggagcatgatgtgagttggtttaagggga

SEQ ID NO: 261340 - DNA, 335 bp, Glycine max
atatacggcatcgttaccatggtctacaagattgaaaattgcagctggagctgcaaagggtggagcctttctacatgaagcaaagaaaccagtcatctatagagattttaaagcttcaaacatcttgttagactcggattataatgcaaaactttccgattttggcttggccaaagatggtcctgaaggagatgacacacacgtttcaactagagtcatgggcacacaaggctatgcggcctcagaatacatcatgacaggacacttgacaggcatgagtgatgtgtacagttttggagtcgtgctctttggagcttctaacatgacgaaagtca

SEQ ID NO: 261341 - DNA, 444 bp, Glycine max
  unsure (1)..(444): unsure at all n locations
cccacgcgtccgctttttttttgccctatcttttanggttcccgcggattcaaaccttaatgcttctattactctctttctgtgatgcgttcttgctctcaacaacaatcacacaccgccatcgaagccttcgttcttttcttcttcgttctcctttttgctctcgttcgagggttctttcgtggggaacactgcagatttcaccacccgggtcttattcatccgtgcccatgtccaaagttctcggcttttccggagttgacgatttttgccctatgggatcaatatacgccaaccccaaggaagcaaggttcttcttgtcccttggccctcaagttgatgtatactttcctcctcggaagagatcgcgtgtcaatgctccattcgtttttatggagaatgggtcgagcataaacagaaaacctctattgaagccttgccaga

SEQ ID NO: 261342 - DNA, 389 bp, Glycine max
  unsure (1)..(389): unsure at all n locations
ccggaaaanctgggaagacccacgcgtccgnntcaggctatggatactgataacatttcttttaaacttttaaangaacntaaanctagtggaaaaagatataggtgtaccgggaaggatataaaaatacgtgatcttatggaagcggctgatgtggacaaaagtggaaccatagactatggggagtttattgctgcaacagttcatttcaacaaactagagcgtgaagaacatcttattgcagcattccaatattttgacaaggatggtagtgggtacattacagttgatgaactttaacaagcttgtgcataacaaaacatgattgacgctttttttgaaaacatctttagagaaggtgatcaagataatgattgaaggattgatta

SEQ ID NO: 261343 - DNA, 436 bp, Glycine max
ccaagttgccttaatactctgaaatcatagatcactttcttaaacacctttcagatgatgtgtccttgcccacgcttcaaaccctttctctatctgaactcactcacaagaacaccactgcttcaacttcaaaccccaaaatcgaatcaaactttcccaccatcactcactccgaaacacacctcaaccacttcacagcaccacccattcaaggtttcctacctcgtaagcacttgtggcttctccgtagaaaccgctctcaagatctccaagttcacccaattcaaaacccccgaaaaacccgattcaatcatcgccttattcagaagccacggtttctccaacacccagataatcagcattattagaagagcacccaatgttctctcatgcgacccccacaaaaggattttcccaaagtttgaatttttacgct

SEQ ID NO: 261344 - DNA, 443 bp, Glycine max
  unsure (1)..(443): unsure at all n locations
gagctactgttgtcattgctgggttgtacnctanatttgagcgtccagagaagatagatgagatcatataccctgggatatcttcatttctgatgcttatcaaggataacgataggcatgttaggcgagctgctgttttggctataagcacatttgcacacaataagccgaatctcatcaaggggcttcttcctgatctgctgcctcttctatatgatcaaactattgttaagcaagagctcataaggacagttgatcttggtccttttaagcatattgtggatgatggacttgaattgaggaaggcggcttttgaatgtgtagacacattgctggatagttgccttgatcaagtgaacccggcatcattcattggtccttatcttaaatctggtttggatgatcattatgatgttaaaatgccatgccacctgatactcttc

SEQ ID NO: 261345 - DNA, 171 bp, Glycine max
  unsure (1)..(171): unsure at all n locations
ggggnnaaaaaaaaaaaaaaataaaatacttaaatatcgtagctcgctctannaacannnaaaaannaaaaaaaaagaaggggggaaaaaaaaaaaannaaaannaaaaaannaaannaaaaattaaaaaaaaaaaaaaaaaagggaaagggaaaaaaaaaagggaanggg

SEQ ID NO: 261346 - DNA, 413 bp, Glycine max
caagcattggagaggcattaaaccaaggacatgggcaccatattcctgtgatattggctatgaacgatttctaggccctgagattttctttaatccccagatatatggcagtgactttaccacccctttgccagttgtaatagacaagtgtattcagtctgcgccaattgacacaaggagatcattatacaagaatgtagtgttgtctggaggttcaaccatgttcaaggattttcacaggaggttgcaacgtgatctaaaaaaaatagtggatgctcgtgtacttttatctgaatcacgcttgaatggggagataaaatcgcagccagtggaggtaaatgtactcagcaatccaatccagagatttgcatgttggtttggaggatcagtgcttgcattaacacctgaatttt

SEQ ID NO: 261347 - DNA, 448 bp, Glycine max
cggacgcgtgggtccaaatccaaaaaaatcatggagcttttgtactacctcacccttgtgctactgtttgtgtccttcgtctgtgtctcttttttcatcattttctacaggcatcgttctccgttcagcgtccccaacttgccgccggggaaggcggggtttccggtgatcggcgagagcctggagtttctgtcggcgggacggaaggggcttccggagaagttcttctccgatcgcatgacagagtactcttccaaagtgttcaagacctccatcttaggggagcctacagtgattttctgtggagccgcatgtaacaagttcttgttttctaacgagaacaaacacgtcatttcgtggtggcctgaaaatgtcaagaagttgttcccaacgaatattcaaacaaactctaatgaagaagccaagaagttgagaaacattcttcctc

SEQ ID NO: 261348 - DNA, 415 bp, Glycine max
gcgcgttgttcaggttggatacaggcatattgtttgtgcttttgcgaataagaatcaagcaaaggttgggggtgatctgaagaggggttgtgatgatcacgtggtgaaccgtgaggacttatggatcactatcaaactctggtttggtgacttttagtaattgtgatctctttttgaatattgagaaagatagtatgtgtttggaccaagatggttgctgaatgaaggatcctttgattagttggctatatttttaggtgtgcagatcatgcaccagaagatgtgccataagcattggataaaacattacaggaattgcaacttgactatcttgacctctatctgatccactggccagtgcgcatgaaaagtggaacatttggactcaataaataatatcttgagcaaccagaca

SEQ ID NO: 261349 - DNA, 454 bp, Glycine max
  unsure (1)..(454): unsure at all n locations
ggaaaaaccgggccgacccacgcgaccgcncaaccnaaagaagacatcgcattttgngttattggntgatgacagcaaggagatcgaagagcttcttaatttggctcctgaaaaggttctactaaaatggatgaattttcatctccagagagcaggttactagaaaactgtcagaaattgttcttctgatgttaaggatggagaggcctatgcttatctgcttaatgtccttgctcctgaacattgcagtccggccaccttggataccaaggatgccagtgaaagggcaaatctggttcttgatcacgcagagagaatgggctgcaaaagatacttgaccccaatggatgttgcagatggtacttcaaatttgaatcttgcttttgttgcacaattgtttcattatatgagtggtttatctacagacactaaaaagaatgtcatgctgagatga

SEQ ID NO: 261350 - DNA, 417 bp, Glycine max
cggacgcgtgggtttgcctcttgtcgcaatttgatcgaagctatctacccttccatggcggcaggactctccaccgccgcaatcttaaagccctacaatctcgtccaacccccaatccctctttctaaaccaaccacatcactcttcttcaaccccttaagatgtttccatcacagtacaatccttcgagttcgacccagaagaagaatgagcggcttcaccgtttgcgtcctcacggaggattccaaagagatcaaaacggtcgaacaagaacaagaacaagtgattcctcaagccgtgtcagcaggtgtggcagagaagttggcgagaaagaagtcccagaagttcacttatctcgttgcggctgtcatgtctagctttggcatcacctctatggcagtctttgccgtttattat

SEQ ID NO: 261351 - DNA, 443 bp, Glycine max
gaaggaagagaagaagttcagaacaaaaacacaacaattaagaagtaactctctttctttctttctttctttctttctctcggggtgaagttgttctctttaatggcgaagtcaaagaacaatgctaagaagttgtcctacatatcagttccatctcagatcatcaactccatatcatcatcttctctgcaatctcttcttgactctcccaagaagtcttcaaggaacaccaacaacaacaggttctttatcttcttcaccaacagcaccagcaccatcatcttcagaaaacaaagactctggtttttcacactctttctctttggtttccttggcatgctcaagtttggcctcacccttcacacccctttccccccctacccatgtgccaccacaacccttctgccacagaacatgatcttaaccaccccacattcaaagtc

SEQ ID NO: 261352 - DNA, 446 bp, Glycine max
cccacgcgtccgcccacgcgtccgtatagcttggttttatgttgctggctctcatttggaagtttgactttccaccctttatggtgctgattatcgctatcctaaatgatggtactattatgacaatttcaaaagatcgtgtaaaaccatcacctctgccagatagctggaagctagcagagatatttactactggagttgtgcttggaagttacttggcaatgatgacagttatattcttttgggcggcatacaaaacaaactttttcccgcgagtgtttggagtcccaagtcttgaaaaaactgctcatgatgattaccggaaacttgcctctgcaatctattctcaagtgagcactattagtcaggctcttatatttgtaactcgatctcgaggttggtcttatgttgagcgtcctggtttattgctggggtttgcttttgtt

SEQ ID NO: 261353 - DNA, 359 bp, Glycine max
  unsure (1)..(359): unsure at all n locations
cccactcgtccgcccacgtttccgagccctttgtatattctttgaggacaacaaggcggggctcaagttcgacgtcggagggggcggaggcaacaacaacagagggggngggggngaccgggatgcggagaaggaagaaggtcccttgtcggagtggttgaatttcacttttgatgacgcaaaaacggtgcttgcggctctcgcaatttcgcttgcgtttcgatcattcgtggcggagccgaggttcattccttcgctgtcaatgtatcctacattggatgttggagatcgaattattgttgagaaggtttcattactattttagaaaaccatgttcaagttacatattgatatttaaa

SEQ ID NO: 261354 - DNA, 393 bp, Glycine max
cccaaacgttaactcagacgaagtttcaatttgtgaagaagaaacaaaaccgaacctctcgaaactctccaacggggccacccgattcatcgcatttcgcaggctgcaatggcgacgttcgaactgtaccgcaggtcgacgattggaatgtgcctgacggagacgctggacgagatggttcagaacggcactctaagccccgagctcgcgattcaggttctggtccagttcgataagtccatgactgaggctctggaaacgcaagttaagagtaaggtctccatcaagggacatctccatacatatagattttgtgacaatgtttggaccttcatcttacaagatgctttgttcaagagcgaagacagccaagagattgttggacgggttaaa

SEQ ID NO: 261355 - DNA, 454 bp, Glycine max
  unsure (1)..(454): unsure at all n locations
cccacgcgtcctgtgaagcagcagattgattttcggtttttataatgcagatctncganaaaaccctggctgatttgaccatggccctggaatactaaagcatcaacaccattgacaatgtcaaggctatgattcaagacaaggaatgcattcctccggatcagcaatgtatgatttttgccggaaagcaacttgtaaatggaaggaccttggcctattacaacatctataatgaattaaccctttattttgtcctcaagctttgttgttgtcattaaataacctttctctattgttttggctttgcaaattcaatcattacaagatgatttgccgaatatgcgtattctcctcttcacccaattgcttttaattgttttactaagaatttctgtaatattaattatttaaggtcttataattaatattatgtaaatttgtgtgttatattttt

SEQ ID NO: 261356 - DNA, 425 bp, Glycine max
  unsure (1)..(425): unsure at all n locations
acaacaacaactgaggaaattcaagagtacttgcttcttttatgggctaagtttgaaatagggagggctgctgtctattgggggaccatgaatggcctccctccttcttcaggagaaaagctaaaacttttctataatccagctgcaactcaacttgtccctaatgaagaatttggaattgcttttaatggaggttttaatcagccaattatgtgtggtggtgagccaagggctatgcttagaaaatatcgaggcaaagctgatgccccaatatattccattcagatatgcattcctaagcatgctttgaacttgatcttttcatntacaaattggagtagactgggatggtccatatagactacaatttcaagttcccaaggcattacagaacatgccaattgacttctttaataagggcttgg

SEQ ID NO: 261357 - DNA, 420 bp, Glycine max
cccacgcgtccgctcctccttccacctagctttggtgttatttaaaccaagtgacccctcctttctcttgttaacaggtaggggagttggtgagtaatggcaggaggacaactaggagtgcttaatgcactcgatgtggcaaaaacacaatggtaccacttcactgctattgtgatagctggaatgggattcttcactgatgcctatgatcttttctgcatttcccttgtgaccaagttgttggggaggttatattacacagacataacgaacccgaagcctggtgttcttcctcctaatgtgcaagctgctgtgactggtgttgctctatgtggcactttagccggccaacttttctttggatggcttggtgacaagttgggaaggaaaagggtttatggcttaacttctatgcttatg

SEQ ID NO: 261358 - DNA, 343 bp, Glycine max
  unsure (1)..(343): unsure at all n locations
aacgcacatcgctatttttcatcatgtcttgttaaccagcaaaccgggatagggtatttaaactcgtatggtcgcgaggtncacaggaaagacaacctttgtgaaaaggcattaccgggaattcgagaagaaatatgagccaaccatcggtgtggaggttcacccattggattttttcacaaactgtggaaagattcgattttactgctgggatactgctggacaggagaaatttggtggcctcagagatggatactatatcaggacaatgtgcttttcatgtttgatgttactgcccggcaacatacaaaaatgttccacctggcaccggatctttgcatgg

SEQ ID NO: 261359 - DNA, 323 bp, Glycine max
aaaaacgggccgacccacgcgttcgcggacgcgtggtcacaaatactattctcaattttcagggacaaaatgtaatatggtgttatgtatctattggtcggggagcatctacttaaactcaagttgtgaataccttacaagaaagaggagcaatggaatacactattgtagtatctgaaacagcggattcttcatctacattacaatacctctccccttatacatgagcaactctgtcttaatattttatttaccgtgaactccacactttaatcatttattacgatctctttaaacaagcacaggcttattgtcaaatgtct

SEQ ID NO: 261360 - DNA, 371 bp, Glycine max
cgtcgctccgcaccagtttcaccgtacgaattttttgttgtttggagcgatccgagaaaaactctgtaaacatggtggtttaccaggacctccttacaggtgatgagcttctctctgactccttccgttacaaggaaattgagaatggaatgctgtgggaagttgaggggaagtgggttgttaaaggagcagttgatgtagacattggtgcaaacccttctgctgagggtggaggagaagatgatggagttgatgatgcagctgttaaagttgttgacattgttgacacatttagacttcatgagctacccgcattcgataagaagcagtttgttaccttcatgaagagtgttattaaggaatttgacttc

SEQ ID NO: 261361 - DNA, 350 bp, Glycine max
  unsure (1)..(350): unsure at all n locations
ctcatgttgaattcttgagaggagttgctatttcacttggcatcaaagngagtggtaaaatggtacccgatgaacgggttaagcttataaatattctgaaccctaaaaacaagcctggaagaattacagtcattgttatgaatgggagctgagaatatgcgagtgaagctttcacatcttattatggcagttctcatagcaggtcaaattgtcactttggttagtgaccccatgcatgggaacaccattaaagctccattttgacttaaaacccgctctttttattcaataaagtcttaacttcagttctatttcttttgtttttgcatttttcatataatagaagctta

SEQ ID NO: 261362 - DNA, 351 bp, Glycine max
ctcagatattgttaaaaaagcaattgaaaattcagagctatttgtgatgaagcctcaaagagaaggaggaggtcttgtaccacttaaactttgactcaacactgttggaaaaaaatgtccgggagagaaacttacacaatgagctgtaattacttttcaggaaacaatatttatggtgatgagttgagggaaaccctccttaaattacaggaagcaggttctcaagaagatgcagcatacattcttatgcagaggatattttccgccacttctccagcaattttggtgcgtgatggtaattgggatacgggtcatgtcatttcagaagctggaatatttggtacttattta

SEQ ID NO: 261363 - DNA, 409 bp, Glycine max
  unsure (1)..(409): unsure at all n locations
ggctatggaaatgagaatgtagatggctggtttgaactgtacagaggcccnagggccaagggtggcaggaaccaaaaaggtggtgcaccaactattttggcagtcaaagggcagaacttgcctgcaagtttaggcaccgatgaagagaaagacaagactagtaccgttccggaccgtgatcagtataacaaagctgattttccagaagaatatactgatgctaaattttttgtcatcaagtcttacagtgaggatgatatccataagagtattaagtataacgtgtgggccagtacccaaaatggcaacaagaagcttgatgctgcatattatgaggcacaacagaaactctggggctgccctgtttttctttttttctcagataataccagttggcaatttgtggggc

SEQ ID NO: 261364 - DNA, 275 bp, Glycine max
acgcgtcacgctacgcgtacgtacatgcgttcgctgctacaacaaacaaacaaacaccaccaacaacaacgactggggtttattttcaccctcgaatccacactttctttacaccgcgtttggatctccgtaaacaataccatgcatttaccgagggaatatcgaatacgtatatccaaccatcggtgtggaggttcacccattggattttttcacaaactggggaaagattcgattttactgctgggatactgctggacaggagaaatttggtt

SEQ ID NO: 261365 - DNA, 229 bp, Glycine max
gctgaagaggcattgcagaagctaaatgggacaacgattggcaagcaaacggtccgtctttggtggggtcgtaatccagcaaataagcagtttagaatggattttggcagcccttggactggggcatattacggggcccctatgtatgatggttatggggtatgcattgtcccctcgtcatgatcccagcatatatgctgctgcttatggtgcttacccccttttatgg

SEQ ID NO: 261366 - DNA, 392 bp, Glycine max
  unsure (1)..(392): unsure at all n locations
atctgaaacaagcatggagtntggaaatggtgaattcagctcataggagctaaagaaaatagaggagggcgataaacttgctgaaattgccatggccgatcctaagcgtgctaaaaggattttggctaatcgtctatcatctgctcgctcaaaagagaggaagatgcggttcatttctgaattagagctcaaagtacaaacacttcatacagagacaaccacatttgtctactcagtttaccaaattacaggtgtgtacggtctgagttgagccataattctcttttctttcaggttttaataatattttattgtgtggaataatgtttgctttctagcattcatttattcttttttttcctttcttttgatgtgcttgtctacagatggat

SEQ ID NO: 261367 - DNA, 373 bp, Glycine max
caaacctaacgcagcatcgctattctcttcattccatggctttgcccaaccagcaaaccgtggattaccctagtttcaaactcgttatcgtcggcgatggtggcacaggaaagacaacctttgtgaaaaggcatctcaccggagaattcgagaagaaatatgagccaaccatcggtgtggaggttcacccattggattttttcacaaactgtggaaagattcgattttactgctgggatactgctggacaggagaaatttggtggcctcagagatggatactatatccatggacaatgtgctattatcatgtttgatgttactgcccggctaacatacaaaaatgtttccacctggcaccgggatctttgcag

SEQ ID NO: 261368 - DNA, 417 bp, Glycine max
taaatattccggtttgcgtatctctgcctaaaaggattgaaagatgggtcaagcgctagggggctatcaagttgatcagtcaaatgtggctatcaaggagcattttggaaaatttgatgatgtcctagaacctggatgtcattgcctgccttggggtcttgggtaccagattgctggtagtttgtcactgcgtgtgcagcaacttgatgttcgatgtgagacgaaaaccaaggacaatgtctttgtcactgtggttgcatctgggcaataccgagctgggtctgagaaagcatttgatgcattctataggcttaccaacacaagggagcagatccaaatatatgtttttgatgtcatcagggccagggtaccaaaggtggagttggattcctgcttttgagctgaagaatgttttat

SEQ ID NO: 261369 - DNA, 307 bp, Glycine max
cccacgcgtccgcccacgcgtccggaaaaaaagcaactacatcagtccatggcaacccccaaccctaccagattctcccttgccatggagagaaccgggcaatgggttttctccccagaaatcccaaccgatgttattgttgcagttggagaatccactttttctctccataagtttattctggcggctaagagtaactacatcagaaaagtgataatggaatcagaagagagtgacctaacaagaatagagatttccaacataccttggaggacaagaagctttttaagaaagccgcgaaattttg

SEQ ID NO: 261370 - DNA, 363 bp, Glycine max
ttccggtaactttttaattcctaaattctctaaaattcgaaattctaatttcgttagggaaaagaaattggttgtttataagtgagtatttcttgaaaaagccagggtccttctatcggaatcgatttgggaacgacgtactctttcgtctgcgtgtggcaacacgatcgtttttaaatcatagccaacgatcaaggtaacaaaactaccccatcctactttgctttcaccgacacaaaacggttgatctgcgatgctgctaaaaaccaagttgctattaacccaaccaacaccgtttttgatgctaaacgttttatttgaaagcgttttttctattcatcaatacaaggttacattaaattt

SEQ ID NO: 261371 - DNA, 392 bp, Glycine max
cccacgcgtccgggaggagttcaaaagacacagactaggagctgcccaaaattgctctgccgctcttaacggcaaccacaagctcaccgatgctgttcttcctccaacgaaagactggagaaaagaaggtatagtgagttcagttaaagatcaaggcagctgcggatcatgctggacattcagcacaactggggctttagaagcagcctatgcacaagcatttgggaagagtatctctctttctgagcagcagctagtggactgtgctggccctttcaacaactttggctgccatggtgggttgccatcacaagcctttgagtacattaaatacaatggtggactagagacagaagaagcatatccctacacaggaaaagatggtgtctgca

SEQ ID NO: 261372 - DNA, 421 bp, Glycine max
ctcgtgtcaaaagaagcatctcgtgtatcgtctcctaaaaaaaatggaattgatgtgtcattgttcgagctttcttcttccgccggagaatcctaacacgacgtgttcgctttctctaaagtacgctctcgttgttctcaaccaaagcctcccgagatttgctcccctgctttgggaccacgctcaagtgcgagtttgtgctgatggaggtgccaatagggtgtatgatgaaatgcctcttttcttccctcatcaacaaccttcccatgttcgcaccaggtacaagcctgatgtaattaaaggggacatggattcaatcaggacagaagtacttgacttctatgcaaagctgggaactaagataattgatgagtctcatgatcaggacaccacagatttacacaaatgtgtggcatacata

SEQ ID NO: 261373 - DNA, 431 bp, Glycine max
cccacgcgtccgggtggatcaaataattcgggggacgatgagaggggtagaatcgaagaaggtgaacgtagcttcggcggtaaccggtggccacgacaagagactttggccttgttaaggatacgctccgatatggacgtggcgtttcgagatgcaagtgtcaagggtcccttgtgggaagaagtatccaggaagatggcagagcttgggtatcacagaagctccaagaagtgcaaagagaaattcgagaacgtgtacaagtaccacaagagaaccaaagaaggccgaagtgggaaacaagatggcaaaacctatcgtttctttgatcaactacaagcccttgagaaccacttttcaacaccccaattttccaacccttcaacaaaaccctcacaatcagcaccatcaagagtagtagcattatcggtgtc

SEQ ID NO: 261374 - DNA, 325 bp, Glycine max
cccacgcgtccgggcttagctacattccttctcatgtaggtggtgcacttcccattgtaaaggcgcttgatcctccagaaagaccagtggagtatttcccagaaaactcgtgtgatcctcgtgctgccatttctggaaccttggatggtaatggaagatggctgggaggaatttttgacaaagacagctttgtggagacactagaaggatgggcaagaacaagtgttacaggaagggcaaagcttggaggaatccctgtgggaatagttgctgtagaaacacaaacagtaatgccaataatacctgctgatcctggtcagcttga

SEQ ID NO: 261375 - DNA, 341 bp, Glycine max
cccacgcgtccgggcttagctacattcgttctcatgtaagaggtgcacttcccattgtagagccggttgatcctgcagaaagaccagtggagtatttcccagaaaactcgtgagatcctcgcgctgccatttcgggaaccttggatggtaatggaagatggctcagaggaatttttgacaaagacagctttgtggagacactagagggatgggcaagaacagttgttacaggaagggctaagcttggaggaatccctgtgggaatagatgctgtagaaacacagacagtaatgcagataatacccgctgaatccgagccgcttgattcttacgagagggtt

SEQ ID NO: 261376 - DNA, 346 bp, Glycine max
  unsure (1)..(346): unsure at all n locations
gcgcccacgcgttcgatcttctgcgaggcatatatgcttatggttttgagaggccttctnctaggcagcggaggggaattgttcctttcttcaaaggactggatgtgattcaacaggctcagtctggaacaggaaagacagcaacattttgttctggaattttgcagcagcttgattatggattggttcagtgccaggctttggttttggcaccaacaagggagctagcacagcagatcgagaaagttatgcgagctcttggtgattacttgggagttaaggtccatgcttgtgttggtgggacaagtgttcgtgtggatcatctcattcttcaagctggtgtcca

SEQ ID NO: 261377 - DNA, 419 bp, Glycine max
gcagcatcgctatactcttcattccatggctttgcccaatcagcaaaccgtggattacccgagtttcaaactcgttatcgtcggtgatggtggcacaggaaagacaacctttgtgaaaaggcatctcaccggagaattcgagaagaaatatgagccaaccatcggtgtggaggttcacccattggattttttcacaaactgtggaaagattcgattctactgctgggatactgctggacaggagaagtttggtggcctcagagatggatactatatccatgggcaatgtgctattataatgtttgatgttactgcccggctaacatacaaaaatgttcccacctggcaccgtgatctttgcagggtctgtgaaaacatcccaattgttctttgcggtaacaaggttgatgtcaagaaca

SEQ ID NO: 261378 - DNA, 431 bp, Glycine max
acttcttcttcaaaaacacacaaacacactacactttgtctctgttctgtgtgtgcgagaaagggcggtggcaatggcgcttcgcaggctttcatcttcaattgacaagcctctgcgccctctcttcaatgccggttccctctactacaagtcgtctttgcctgatgaagctgtttacgacaaggagcgacccggagttacatggccgaagcagttgaatgctccacttgaggtcgtggatcctgagattgctgatattattgagcttgagaaagctaggcaatggaaggggctagaattgataccgtcagagaatttcacctctgtgtctgtgatgcaagcggttggatcggttatgaccaacaaatacagtgaggggtaccctggtgcaagatattatggtggaaatgagtatattgacatggcttaaa

SEQ ID NO: 261379 - DNA, 361 bp, Glycine max
ttctttcttaatgcctcctggccaggggttaaaatggcccaagaaacttttctattcacatctgaatcaatgaacgaggggcccccttacaagctttgtgaccagatctcctatgctttgcctcaatcatgctttgagcaagacccttacagcaagggtggcttgttaaccttcaccaaaaccaacatggtgatgggtttcggagagatcacaaccaaagccaacgttgactattagaagattgtgcgtgacacatgcaggaacattggttttgtctctgatgatgttggtcttgatgctgacaactgcaaggtcctcgtcaacattgagcaacagagtcctgttattgctcaaggtgtgc

SEQ ID NO: 261380 - DNA, 430 bp, Glycine max
gcgtacgcgataatgatgggttcaaacccaaaacctcttgtgcacctttgtctgcttctcctggtccggttttgttcctcaaccgaatccctgagatttgaaatccaatccgggcacaccaaatgcatctccgaggatatcaagagcaattccatgaccgttggcaagtaccaaatcgttagccccaacgagggtcaacctctgccagatgcccacagattcaccgtcagggtgacttcgtcttatgggaacaactatcactacggggatcgcgttcagacggggcagtttgcgtttgctgcagtggaggctggagattacatgacttgcttctgggctgtggatcacaaccctgtggaaacgttgactgtggattttgattggaaaacgggtgttgcggccaaggattgggcaaaagttgcttaaaaag

SEQ ID NO: 261381 - DNA, 472 bp, Glycine max
tcgcccacgcgtccgcttttattacaggtttggtctcagggttcactttaatagcaggggcagtgtctatttaataattttgatatttaaatgtttcatatagtgtactttctataatttatattaatatatttatagaatttttattttttttcttttattgtatttttttttttttttttatattttttatttaattttatttttttttttatttttttttattattttattatattatttatttattttttatttttttttttatttttttttttttttattttgttctatttttttatttttttattttttttttttttattttattttattttattttattttaatttttttttttttttttttattttttttttatcatattatttttttatatttttttattttttttatatttttttttttaattttttatttttttattatttttttttatttattttttttt

SEQ ID NO: 261382 - DNA, 248 bp, Glycine max
cactcatggaccccaaaaacgtgaaatcggacctggttctcattctcgattacggtgcccagtacacccaccttatcactcgccgcatacgcaacctctcggggatctacctaagcatctacggcaccatctgtctttcaaccatcaccgacctgaaccccttcgtcagcattctctccgggggccctcactccgttcacaccccagactccccccccccccctatgaatcaattttactaatattat

SEQ ID NO: 261383 - DNA, 368 bp, Glycine max
caacaattgctgctgcagtttatcttagaatggcaggaaggccacctgtgcttcgggctcaggcacctttcttacacagagaacttcctatatatgctagattcttttggtaatcggtcatataaacccaatcctcggctaactcgtgtgctagacattatcttcatcctgcatgcagaacatgaaatgaattgttctacatctgctgtccgacaccttgcatcaagtggcgttgatgtatacactgctattgccggggctgttggagctctatatggaccacttcatggtggagctaatgaggctgttcttaaaatgctgagtgaaattggaactggtcagaacattccaaagttcattgaaggaaa

SEQ ID NO: 261384 - DNA, 383 bp, Glycine max
aaggatgtcaagcaatttgcattctgtctgcaaatggcacaatttcaaatgttacactacggcaaccgactttttctggtggtactttaacatattaagggcggtttgaaattctctccttggctggttcataatataacaacctggacaaattggattaaacaaaagagccaaaatcctggtgggaatgagcatctcttttggccgctccaaaatggtcgagtaaattggggggtgggattggctggtttgcttgtagctgcaagtactgtgcaagttgttgtggctagttttgttcctggtcatcagctggagcaacagaaaccaaataagccgagagtggagcatatattaaatgctgctccgacgtatgttaaccctac

SEQ ID NO: 261385 - DNA, 475 bp, Glycine max
  unsure (1)..(475): unsure at all n locations
gaccaagaaaggccagcttaaggtcaaggtgaatacagtgcttggttcaactgcgcgaccggtaacatttaaacttgtcctttcttttagcacangttcaaaatattcaactattattgacatgcaattatcttctttattaccaataaattggatttcatgttttttattttttttctaataattttttttttgtcttcttttttttttatcttttttatattttttttttaattttttttttttatttatatattttcttttcatcctttaatttatttatctttcatttttttttatttattatttttctatttttttatttatattttcattttcttttttatatattttttttattacttatttttttattattatttattatttttcttctctttatcattctttttcttcttctcttctttaattttttcattcttattattctttttattatttttttttataattt

SEQ ID NO: 261386 - DNA, 381 bp, Glycine max
aacgcctccattatcagtcctttttcaggcttggtttttacctaaccctacaatgggccgagtcttccagttagggtttttctcttttatcaaattcttttaaatatataaacacttattatttttttcttatttctcatttataatttatttttattttttctacttattttttttttacttattattttcttttttattttctctttttatattactcttatttatatattttttcctttttttttttttattttttattttttatattattattttttattattttatctattatttatttatttttattttttattatatttattttatttatttttaatatatttttttatattattatattttttttttattttt

SEQ ID NO: 261387 - DNA, 374 bp, Glycine max
cggacgcgtgggtgaccaccgactttcacgggcaaagttcttctttattgcactagtgtggagtttttcgtggtatggtgtccctggatacttgttcacaacgctcacaaacatttcatgggtgtgttggatattctccaagtcagttacagctcagcagatagggtcaggcatgaggggccttggagtttgtgccctcacacttgattgggctgccgtggcatcattcttgttcagccctctaatctcacccttctttgccattgtcaatgtttttgtgggctatgcattaattgtctacgtggtcattcctgtatcatacttggtgcctaatgtgtacaatgcccataggtttcccattttctccttacact

SEQ ID NO: 261388 - DNA, 431 bp, Glycine max
cgggtcgaccacgcggtccgccacccgtccgattttgttcctcacccagtcaccaaccccgttgtccggagccaccattgtgcgcgcgcggcaatgttctttccggtggccatcgtcccttaaacccaccacactttaaagtcatgggtatttcatgggacgacgctcctgtgatccagcaaggggaggatcacaatgagccctgcatcgtcacccgcaattgccccgacaaggctggtctcggctgtgaactttgcagaaacaatctcgagttcggtctccccattacccgtgctgatattttcacggatggaagatggtgctacatccactattgggttcttgcacatccagcatcgctcaacgttgattgggagagtttgaagactctgctcctttcagcttgcccttcatgtttgctttcctatcac

SEQ ID NO: 261389 - DNA, 351 bp, Glycine max
aacataggtaggggcaatttgaaaattgacatatcagatgagcttgcccggattgctgatatggtaaccaggtacgattgctcgaaacaggaagttgaaagagtgattgttagctatgagggtgatcttgatagggctgcagagaccttgagagagttgaaacttgatccaccatctgctccaccaaaaccagaaggaaaccggtgatcctcctattattaacaatgttaagcagtcaagagttgcaagtcagaagctaaggccacaaacaaaacccattcctttaccaaatcaacccaaaaaagatgacaaggattttaactatacaaaggctgcattgactattggagt

SEQ ID NO: 261390 - DNA, 279 bp, Glycine max
gtttgaagattcttacagacaaattagctgctgctctgctgactattagtgcaaaagaagagttaggaaagcagcattctaaagttgcagaacaagccgtctcaggctgggagaaggctgaaaatgaagtgtcatctttaaaacaacagcttgatgctgcaaggcagaagaactcaattctcgaagatcgagttggtcatcttgatggggcactcaaagagtgtatgaggcagcttctacaagctagagaactgcaagagctaaagatggttgatgctg

SEQ ID NO: 261391 - DNA, 369 bp, Glycine max
cccacgcgtccgactttttctacttaccttttctcttaatccaaatacgatggcaggcatggcaaccacaaccctctcttcaaaccccaaactctcattcttcaacggaaagcccgtcacatattcttcccgcgtcgcgcccaccaccaaattatcctcatccaaacaaggcacaatttccatgtccctaaccccacccccctacgaccttcagtccttcaaattccagcccatcaaagaatccatcgtgtcacgggaaatgacccgccgctacatgacccacatgataacctaccccgacacccacctcctaatcgtccgaacccgttccgcccggctcttctgcgcctaccaacctaacaagaaccc

SEQ ID NO: 261392 - DNA, 426 bp, Glycine max
cccacgcgtccgcccacgcgtccgtcttcattgtgatataaagccagataatatgttggtaaatgagtctaaaaatgttttgaagctttgtgactttggcaatgccatgtttgctggtaaaaatgaagttacaccatatcttgtgagtcgtttttatcgtgccccggaaataatacttggcttgccatatgatcatccattggatatttggtctgtaggttgttgtttgtatgagttgtatatagggaaggttcttttcccaggtcttacaaacaatgacatgctacggcttcacatggaactgaagggtccttttccaaagaagatgctgcgtaagggagcatttactgaacagcattttgatcaggatctgaattttcttgctactgaaggggatcctggtacaaaaaagaccataaagcggct

SEQ ID NO: 261393 - DNA, 302 bp, Glycine max
gcgatctttatataataatataaataagaataaaaaaataaaaaaaaaaaaagaatctatataaagataaagataatatatataaggtgcaaatagtaaatctaggtacccattttattataaactttccttccatttttgttcctctagtaagcctagtatttccggcaatttcaatggcttctttatttccttatgttcaaaaaaacaagattttttagatacagaaaacaaagtaaaattcttgggttttttattccccaattataatactaaattcaaaaaaaggatcaattaactta

SEQ ID NO: 261394 - DNA, 420 bp, Glycine max
gcggcacgcgtccgctctaacctacctctttttcttctctctcaacaacttcaccttcttcctcctccatcatgtgtcactgcaagggcaagtaccatgatgagcttatcgccaatgctgcgtacattggcactcctggaaagggtattcttgctgctgatgagtcaacagggacaattggcaagcgtttggccagcatcagtgtagagaacattgaatccaacaggcgagctcttagggagctgcttttcactgctcctggtgttcttcaatatctcagtggtgtcatcctctttgaggaaaccctctaccagagcacagctgcaggcaagccctttgtgaatgtcttgaaggaagctggtgtgcttcctggcatcaaggttgaccagggcgcactctagcttgctggaactaatggag

SEQ ID NO: 261395 - DNA, 274 bp, Glycine max
gtaaaaagtcactgtctactgatgctcatttatcaagatcatcaaagttggaggaaaaagagaaagagcacaagcgtgatttggatggagctaaagagaaggaaagatacagggagaaatacatgggaaaatccattcaagaacttgaccttagtgactgtaaacgttgtactcccagctaccggcttctgcctgcagattatccaattcctaaagctagtcagagatctgagcttggtgctcaagtcttgaatgaccattgggtatctgtgac

SEQ ID NO: 261396 - DNA, 212 bp, Glycine max
gcacaatttctctctttctttttgtgtccaaaatggctcctagttctactcacaaggctggggtctatgtgcttatgctagtttggatatttattagcactattgttgctacctgtgctggtagcttctaccaagacttttatctaacatggggtggtgaccgtgctaagatattcaatggtggccagcttctattctttttcccttgacaa

SEQ ID NO: 261397 - DNA, 407 bp, Glycine max
cccacgcgtccgcggacgcgtgggttttcgaactgatggcgaacagttcctcaagtatccaccacctaaagtgatgcaggtcgacaagtctgcatggatgactgatgaagaatttgcaagagaaacaattgctggtttgaatccaaatgtcatcaagattattgaggagttcccactaagtagcaagctagatactcaagcctatggtgatcatacctgtataataacaaaagagcatttggagcctaacttaggtggtctcactgttgagcaggctatccaaaacaagaaagttgttcatcttagatcaccatgactatctcattccaatattgaggaaaataaatgcaaataccacaaagacttatgctacaagaaccatattttttttaaaaatgatggaactt

SEQ ID NO: 261398 - DNA, 279 bp, Glycine max
gcgtccacgcgtccgtccacgcgttcgaaaaaaacaagattttttagatacagaaaacaaagttgggttcgggggttttttattccccaattattatactcattactctcagacgatgtactgatatattctatggcgggggttcgaagaacaagcaatttattttgggccgttttcacttttggtaggttctttgtgggttatgttctgtatcatattttcagatatttttggtatggattatgttccttatattttgtgaatatattttgttttttc

SEQ ID NO: 261399 - DNA, 254 bp, Glycine max
ccaagatccaggacaaggaaggaatccccccggaccagcaacgtctcattttcgccggaaagcaacttgaggacggccgtacccttgctgactacaacattcagaaggagagtactctttacctcgtcctccgtcttcggggtggcatgcagatcttcgttaagacactcaccggctagaccataaccctataggttgaaagctccgacaccatctataacgttaaggccttatatccaggacaaggagggttt

SEQ ID NO: 261400 - DNA, 242 bp, Glycine max
accgaggcgaccgacgcagtccgtaaacctaacccagcattgctattttattcattccatggctttgcccaaccagcgagaccgggtattaggctaggggaaactcgttatcgtcggcgatggtggcacaggaaagacaacctttgtgaaaaggcatcttaccggagaattcgagaagaaatatgagccaaccatcggtgtggaggttcacccattggattttttcacatactgtggaaaga

SEQ ID NO: 261401 - DNA, 412 bp, Glycine max
  unsure (1)..(412): unsure at all n locations
tcgcccactcgttttcccacgctntctgtttaaatgcaacnacancagnccanggcagccccctgtcctacgtgattctgccttgcgatgganagaaccgggcaatgggttttctccccagaaatcccaaccgatgttattgttgcagttggagaatccactttttttttctatatgtntattctggcggctaagagtaactacattagattagtgattatggtattataggagagtgacctatctagaattgtagttttccaacattccttgagggcattgagtctttttttattcctttttatatttctattgtttctttttgatatatctctttttttatctcttttgtttttttctttttttttttatttatcatttttttttctccttttttttttcttgttttttt

SEQ ID NO: 261402 - DNA, 251 bp, Glycine max
cccacgcgtccgggaggagttcatatgacatttactaggagctgcccaaaattgctctgccgctcttagcggcaagcacaagcgcacctatactgttcttcctccaacgaaagactggagaaaagaaggtatagtgagttcagttaaagatcaaggcagctgcggatcatgctggacattcagcacaactggggctttagaagcatcctatgcacaagcatttggtaagagtttcttttcttttgagcatc

SEQ ID NO: 261403 - DNA, 371 bp, Glycine max
ctcgtgtcaaaagaagcatttcgtttatcgttttctaaaaaaaatggaattgatgtgtcattgttcgttctttccgcttccggcttataatactaacacgacctgttcgctttctctaaagtacgctctcgttgttctcaaccaaagcctcccgagatttgctcttcttctttgggaccacgctcaagtgcgagtttgtgctgattgaggtgcctttttgttgttatgatgaattgccttctttttctctctatctactacctttccatgttctgactaggtacttgccttatttatttttatgtcgaccatgcttttttcttccatctattttattttgtctttatacttcttattctgcttttatctta

SEQ ID NO: 261404 - DNA, 199 bp, Glycine max
tttcttattttcttattttttttatttttgtttttttttttttttttttttttattttaaattattttatttctttttttatattttttttctttctttttttttttttttctttttatttattttttttttttttattttttttttttatttttaattttttttttttatttattttttttttttctatttttttttt

SEQ ID NO: 261405 - DNA, 298 bp, Glycine max
  unsure (1)..(298): unsure at all n locations
ttttctttcttctattttttttatatcctttttttatttcttcttttcttcctttatttttttttttttcttcttactncaattaatattttttttctttttttttttttttttttttttttttttttttttttttattttcttctttttttttttttttttttttactttcttctttttttttcttttttttattttttttttttttttcttttttttttctttttatttttttttttttttattttttttttttttctttttttttttttttatttttttttactttttttttttt

SEQ ID NO: 261406 - DNA, 284 bp, Glycine max
aaaagccgcttgatcctgcagaaacgccagtggagtatttcccagaaaactcgtgtgatcctcgtgctgccatttctggaaccttggatggtaatggaagatggctgggaggaatttttgacaaagacagctttgtggagacactagagggatgggcaagaacagttgttacaggaagggcaaagcttggaggaatccctgtgggaatagttgctgtagaaacacaaacagtaatgcaaataatacctgctgatcctggtaagcttgatttttacgagagggtt

SEQ ID NO: 261407 - DNA, 264 bp, Glycine max
acttctcattttacttttttttttttttctcttctcttttatccttttctttctttcttatttttctttcttttttatctttttcttttttctttttatttctttctttttcttttcttctatttttttattatttttttcattttttcttttttactcttatctttcttcctctttttttttaatttttctttttttcttactatttttttcttttttttcttctttctttttttctcttttcttttttctctttattttttt

SEQ ID NO: 261408 - DNA, 310 bp, Glycine max
gcagtatcgctatactcttcatttcatggctttgcccaatcagcaaaccgtggattacccgagtttcaaactcgcgatcgtcggtgatggtggcacaggaaagacaacctttgtgaaaaggcatctcaccggagaattcgagaagaaatatgagccaaccatcggtgtggaggttcacccattggattttttcacaaactgtggaaagattcgattctactgctgggatactgctggacaggagaagtttggtggctttaaagatgtattctatattcatgggctatgtgctattataattgttgatgtt

SEQ ID NO: 261409 - DNA, 289 bp, Glycine max
aaaaaaaagaaagaaaagataaaaaaaaaaaaaaaaaatgagaagaaaaaaaaaaaaaaaaaaaaaagaaaaaaaaaaagaaaaaaaaaaaaaaaaaaaaaaaaaaaaaaaaaaaaaaaaaagaaaaaaaaaaaaaaaaaaagaagaaagaaaaaaagaaaaaaaaaaaaaaaaaaaaaaaagaaaaggaaaaaaaaaaaaaaaaagagaagaagaaaaaaaaaaaaaaaagaaaaaaaaagaagaaaaaaaaaaaaaaaaaaaaaaataagaagaaaaaaaaagaaaa

SEQ ID NO: 261410 - DNA, 225 bp, Glycine max
agcgtttggacgccgagttgaaactggtcggtgagtacgggcttcgctgcaagagggagttattgttggtccagtacgccctgagccgcattcgtaacaacgccagaaaactattgacccttgatgagaataaccctttccttatcttttagggtgatgcccttttttgtagaatgtttcttaccgactctttgttttgacacataataagctgtattatttttt

SEQ ID NO: 261411 - DNA, 248 bp, Glycine max
gacaggcctttgccccctctcttcaaggccggttccctctactacaagtcgtctttgcctgatgaagctgtttacgacaaggagcgacccggagttacatggccgaagcagttgaatgctccacttgaggtcgtggatcctgagattgctgatattattgagcttgagaaagctaggcaatggaaggggctagaattgataccgtcagagaatttcacctctgtgtctgtgatgcaagcggttggatc

SEQ ID NO: 261412 - DNA, 391 bp, Glycine max
  unsure (1)..(391): unsure at all n locations
ccggtcgaccacgcgtccgggtttacttttcaggttatcagggggncccatactcttttgtgctnccgncngnngcacgaccggcttacaatgcagtgaagtacagaccaaatggtgctgctggaggaaagctccagaacagcaaggaggagcggagtaactcattgaccatgggtgttgcagatgagcatataggattggttgttggtcgtggtggaaggaatattatggaaattagtcaggctagtggggcaaggataaagatatcagaaagaggtgattacgtatctggaacaaccgataggaaaggtaccattacaagatcccagagagcaattcttacagctgaatttatgtattgcaaaaggtgctaatgcacccagaggggggt

SEQ ID NO: 261413 - DNA, 448 bp, Glycine max
  unsure (1)..(448): unsure at all n locations
tgataatgatgggttcaaacccaaaaccccttgngcacttttctcttctnctcccggncctggtttctgcctcaaccgaatcgctgagagttgaaatccaatccgggcacaccaaatgcatctccgaggatatcaagagcaattccatgaccgttggcaagtaccaaatcgttagccccaacgagggtcaacctctgccagatgcccacagattcaccgtcagggtgacttcgtcttatgggaacaactatcactacggggatcgcgttcagacggggcagtttgcgtttgctgcagtggaggctggagattacatgacttgcttctgggctgtggatcacaaccctgtggaaacgttgactgtggtttttgattggtatacttgtgtttgtgtctatgtaattgtactaattttgttataatggctatttttttctcttctattctt

SEQ ID NO: 261414 - DNA, 300 bp, Glycine max
  unsure (1)..(300): unsure at all n locations
acgcgtccgaagatgtcaagctattgcattctgtctgctataggcctaatttcaaatgttacactacgcgcaaccagcgtcttctggtggtgctntagcgatatnaangagcggtttgaaattctctccttgtctggttcatatataacaactgagaatggattaacaaagagcagatctggtgggatgagcatctctttggccgctccagatggtcgagtaatggggggtggattggctggttgcttgtagctgcaggttctgtgcaggttgttgtggctagttttgttcctggtcatc

SEQ ID NO: 261415 - DNA, 403 bp, Glycine max
cccattaatcaaaacccctttttttcaaccttatttttctccataaaccctagattcaacgagcccgtctgaccaagctcgaagctcacttcacaaaaaaacacttcttttcccctctccgaggttgtcgtgtcggagcatatccatgttgttccctcgaggaaattgtttttttttcataacatttgaatctcgttttgcttgttttgtcatttttattatgtatttcatttttctttcttttcttcttcttctttctttttttttatttatcttttattttttctattatatcttctttttttttttttattcttttatttttcattactctttatcttttcttttataatttcttctttcttaatttatcatttctttctccttttctattatcttcttt

SEQ ID NO: 261416 - DNA, 405 bp, Glycine max
  unsure (1)..(405): unsure at all n locations
tcgcggacgcgtttttgaccaccgacttttanggtcatagnncnncnnnanngcacgagngngtggnnatttttggtatgttgtcgctggatacttgnncacaacnctcacaaacatttcatgggtgtgttggatattctccaagtcagttacagctcaacatatttttttaggcatgaggggccttggagttggtgctctcacatttgatttgtctgtctttgcattatttttgttcaatcttttaatcttacccttttttgctattgcaaattttttttgtggttatgcatttattttctacttggtaatttctttcattattattttttttttaattgataaatatttccatatagttttattttttctttttataattttttatctccttatttctattat

SEQ ID NO: 261417 - DNA, 415 bp, Glycine max
  unsure (1)..(415): unsure at all n locations
cacaacactattctncttttcagcaanggcgtggntggattctggacgggaaccccannaaggcactttttanatgtatgatcgacgctccctactncatangctcgcatctntncnagaagctcatgtccgaaacccctcacaccgtcctcgccctcgacgtctacaactacaagatcaaacacctnctcgaaccctccgattccccctgggccggccgcatcaccttccaccgcctcaacattcaaacacgactctcgcctcgaaagccttatcaagattgcagatctcactattaatctggccgccatttgcacttccgcggattacaacacccgccctctcgacaccatttacagtaatttcattgacgcgccttcccttgggaaatactgatcccagaacaacaaacctc

SEQ ID NO: 261418 - DNA, 432 bp, Glycine max
gtttgaagattcttacagacaaattagctgctgctctgctgactattagtgcaaaagaagacttactaaagcaggattctaaagttgcagaagaagccgtctcaggctgggagaaggctgaaaatgaagtgtcatctttaaaacaacagcttgatgctgcaaggcagaagaactcaattctcgaagatcgagttggtcatcttgatggggcactcaaagagtgtatgaggcagcttcgacaagctagagaactgcaagagcaaaagatggttgaggctgttgtgaatagttctcgtgactgggaatccaaaaaatctgaacttgagaggaaagttgcccagtttgaggctcaacttcaaacagctaaagcagatgctgctgcgtcaattccatttgatcttcaccagagactagaggctgtgcagaatgaga

SEQ ID NO: 261419 - DNA, 298 bp, Glycine max
ttatttaatactataaataagattaatttaatatttaaaaaaaaggattctttataagtttaaaggtaatatgtatagggggcaaatagtaaatcgaggtacccattttatgataaactttccttccatttttgttcctctagtaggcctagtatttccggcaattgcaatggcttctttatttctttatgttcaaaaaaacaagattttttagatacagaaaacaaagtaaaattctggggtgttttattccccaattataatactaaattcataaaaaggatcagttaacttatat

SEQ ID NO: 261420 - DNA, 300 bp, Glycine max
ctctaacctacctctttttcttctctctcaataacttcatcttcttcctcctcgatcatggctcactttaagggcgggtaccgtgattagcttatctccaatgctgcgtacattggcactcctggaaagggtattcttgctgctgatgagtcaacagggacaattggcaagcgtttggccagcatcagtgtagagaacattgaatccaacaggcgagctcttatggagctgcttttcactgctcctggtgttcttcaatatctcagtggtgtcatcctcttctaggaaaccccttaccat

SEQ ID NO: 261421 - DNA, 387 bp, Glycine max
  unsure (1)..(387): unsure at all n locations
gtaaaaagtcactgtctactgatgctcatttttcaagatcatcaaagttggaggaaaaagagaaanagcacaagcgggatttggatggatctaaagagaaggaaagatacagggagaaatacatgggaaaatccattcaagaacttgaccttagtgactgtaaacgttgtactcccagctaccggcttctgcctgcagattatccaattcctacagctagtcagagatctgagcttggtgctcaagtcttgaatgaccattgggttttttttacttttggaagttaggattacttttttaaacattttttttagttttttgtatttattattttttgtatataattgtatttttttcttatttttattttgtactttttttattttt

SEQ ID NO: 261422 - DNA, 417 bp, Glycine max
cccacgcgtccgcccacgcgtccgtaacaattaagctctctgatctagttttcttgtcaattgattgatgatttggctgattgcactatttagatttattttccctaacacttttattgtggtattcatggaaaatgaattgagttcggattattcttgttgattattgttttgtctatgccctcttctgtatatcatctgtgtctgttctgttctaccatttttcttgttatcttttctttttattattattttctttctttttattttttttcttttgtatttctcttacttttttttatttttctttcttgtcttttcttttttctttcttttttcttttttctttcatttctttttttttattttctattttcttctattttttttttttttttttctttctttctttttctt

SEQ ID NO: 261423 - DNA, 313 bp, Glycine max
  unsure (1)..(313): unsure at all n locations
tcggcacaatttctctctttcttttggtgnccaatatggctcctagttctactcacagtactgggttctatgtgcttaggctagttggaatagtgattagcactatggttgctacctgtgctggtagcttctaccaagactttgatctaacatggggtggtgacctgtgcttagatattcaatggtggccagcttctatctctttcccttgacaaattctctggctcttgctttctaattcaataatgtatacctattttggaggatttgatctgcctgttttgttcttttcttgttatcttttcttatttct

SEQ ID NO: 261424 - DNA, 338 bp, Glycine max
tcgcccacgcgtccttagcagataatatttttgatgtgtggctgatgaacgattattgggacgtgtttttttgggtgaggcattagattttttttttttttcattttaattacattttctttttgttttattttactttttttttttttattttatgtctttattttttttttttttttattatttctaattacaattttcttttttatttttttccatatttctcttttttttttctatttattttttctttattttttatttttatactctttttttttttttttttctttttttttttttttttctattattattttttctatttttatattttt

SEQ ID NO: 261425 - DNA, 468 bp, Glycine max
tcgccaagatccattacaaggaaggtatcttctctgaccagcaacgtctcattttcgccggaaagcaacttgtggacgggcgtacgctttcttactacaacattcagaaggagagtactcttcacctcgtcctccgtctccgtggtggcatgcagatcttcgttaagacactcaccggcaagaccataaccctagaggttgaaagctccgacaccatcgataacgtcaaggctaagattcaggacatggagggtattctcccttaccagcaacgtctcatctttgccgtaaagcatcttgaggactgactcactcttgcttacttcattattcagaacgatttaactttttcatcttttttttcttttttttttgtaatctattcattatcttttattttatactttttatctttataatctatttttctattttactttttattttttttatatactttttttattt

SEQ ID NO: 261426 - DNA, 375 bp, Glycine max
  unsure (1)..(375): unsure at all n locations
gtgaattccaattcaacgtttcaaaacgcagtcntttcttctcttcctctcggngnctccgctgacttcatgtcggcgataaggggcatccagggccaacctcttgaggttacggtggtttcgtgctccaagttgaaggacacagaatggatttcaaggcaagatccgtacgtttgtgttgagtatggcagcacaaagttccgaaccagaacctgcacagacggcggaaaaaatccggtattccaagagaagttcatcttccccctcattgaaggccttcgggagctcaaatgtcttgtttggaacaacaaaactctcaccttggacgatttttatggaagcgggaagattccatttgcaccaaggttttttttt

SEQ ID NO: 261427 - DNA, 251 bp, Glycine max
tccgcgaggtagaacgacgacccccttctgcgttttgaccttcaatctcaatcatggccaaagctggagggggcaagggaccaataaatgaacaagcagtagcaaatatgtatgctgcaatgaggtctgagctcaaccaaatttactccaaaataactgaactggagatggaagttagtgagcacacattggttaccaatgccattcaaccacttgaccaatctagacgatgctatcgtatgattggaggg

SEQ ID NO: 261428 - DNA, 311 bp, Glycine max
gtctattcgttcttttgctgaggcctctatggcaactgctttagagaaaaagtggccactgtatcttagcaccaaaaatacaattctgaagaaatatgatggaaggtatacaattcattattagcttattcatttaatatttttcaaaaacttttactgcattgatcgctgtttaattatattcatttattggttgtagattcaaggacatatttcaagaagtttatgaggcaagctggaaatcaaagtttgaggctgctggtatatggtatgagcatcgactcattgatgatatggtggcgtatgcactt

SEQ ID NO: 261429 - DNA, 265 bp, Glycine max
aaatcccgggggggaccaacgcgtccgcccacgcgtccgcccacgcgtccgcccacgcgtccgattgttctcaaaacagctgaccaaacgccattatctgctttgaatgcatcaaaattgcttcatgaggctggacttcctcctggcgttctgaatgtaatatctggctttggtcctaccgctggtgctgccattgctagtcacatggacatagataagcttgctttcactggttcaaccgaaactggaaaagttgtccttgaat

SEQ ID NO: 261430 - DNA, 462 bp, Glycine max
ggtgtatccgccccactcctgaagagctggagaattttggtactccggacttcactatatacaatgctggacagttcccctgtaatcgttatactcactacatgacatcctccactagtatagatcttaatcttgctaggagggaaatggtcatcctcggcacacaatacgccggggaaatgaagaagggtcttttcggtgtcatgcattatctcatgcctaagcgccaaatcctctccctacactctggatgcaatatgggcaaagatggggatgtggcactcttctttggactctcaggtaccggaaagaccactctttcgaccgatcacaataggtatctaatcggagatgatgaacactgttggggtgacaatggtgtctccaacattgaaggtggttgctatgccaaatgcattgacctctcacgggagaaagagccagatatttggaatgcaatca

SEQ ID NO: 261431 - DNA, 439 bp, Glycine max
gggcccacgcgtacgcttttgggctttatctccgcctatgacccacatatggcttcgtgacgcgtgctggaggacctcaaggatttgcagaaggatcctcctacgtcatgcagcgcaggtcctgtggctgaagacatgtttcactggcaagccacaatcatgggacctgctgatagcccatatgcaggtggtgttttcttagtttcaattcattttcctcctgactatcccttcaagccaccaaaggttgctgttcggactaaggtgttccacccaaacatcaacagctatggcagtatatgtattgacattctgaaggaacaatggagcccatctctaaccatttacaaagaactatagtcaatttgctcattgttgacggatcccaaccctgatgatccacttgtacctgagattgcacacatgtacaagaccgaca

SEQ ID NO: 261432 - DNA, 398 bp, Glycine max
  unsure (1)..(398): unsure at all n locations
gccctatctcatagggtttccaccctctctctcatgcatttttgctgtcacgagttcttctttgccgttgccctcttattctttgctgtatttggagccttcttttgtgtggaacagagcagatttcacctccctgggttttttgaaccgtgcccatgtctaaagttttcagctttaccggaaatgatgatttctaccatgggggccctatttatcctaacccgaaggaaccatgtctcttcttgtctcttggccgncaagttgatgtttaccttcctcttcagaagaggtctcgcttcagtgttccatttgatatcagcggagaatggtttgagcaagaagcagagccaaagacatctattgaatctttgccagatgaatgcctctttgagatcctt

SEQ ID NO: 261433 - DNA, 406 bp, Glycine max
attttgagatttttttattgtttgatgtgtaccgattttaagattggatctcttttgattgagctgtttgagatttctttcttctttctctctctctctctctcttttggttggtgactgtgttgaattatcttatgatgtttccaatccttgtttgttttgtaggtgacccagtttaaaatttgagatttttttcttgtttgatttgtacccatttgaagattggatctcttttgatttggctgtttgagatttctttcttcttctttttttctttggtggctggtgacagtgtgttgaattatcttatgatgtttccttttaagcacttgttgctggatttcaatcatttcactccatttattgatatatttgttttttatttttgcatatttttttgaatatg

SEQ ID NO: 261434 - DNA, 420 bp, Glycine max
gttgaatacaaattttgggaaaaaaattgggccacaagaatgatttgcttcttaaatacacccctgttcacaaaaaaggtccagtgtttgttcacaatgagcaccccctatcacagtctcttgtgattgttgaatacattgatgagacatggaagaacaaccccatcttaccttctgatccttaccaaaaaaccttggctcgtttctggtccaaattcattgatgataagattgggggggctgcatcgaaatctgttttcacggctgatgaaaaaaaacgtgagaagaatgttgaagaaacatatgaagctcttcagtttcttgagaatgagctggaggacaagaagttttttggaagaaaagaatttgggttggtagatattgctgctgtcttcatagcattttggatcccaatttttc

SEQ ID NO: 261435 - DNA, 423 bp, Glycine max
  unsure (1)..(423): unsure at all n locations
cccacgcgtccgaaagcattgaattcaaaaactaagttcatttcttgtgctttgctttattcctcaaaaccaaacatgtcgaacacatgcggcaactgtgactgcgctgacaagactaactgcaccaagggaaacagctatggtgttatagtagagactgagaagagctacatcgagactgttgacatggatgttccagcagctgagcatgatgggaagtgcaagtgtggcactaactgcacttgcacggactgcacttgtggccattaaggaatatgtatgaaaatgtaattgccatgtgtttggcaatacaaatctccaaataatgtaatcttcgtatgaataaatgtgtgctgttatcctacttcanggtctgtgtagtcatgcagtctgaatcatgtccagttcctgtcatagttatta

SEQ ID NO: 261436 - DNA, 361 bp, Glycine max
  unsure (1)..(361): unsure at all n locations
gcgcccacgcgtncgcccacgcgtncgctctgaggatcaaaaacttttgagagaaaaggtgcagcacctgagtggagatgctggaattgagcgtatggaatctgcattatctgaaacaagatctagatactttgtagtgaaggatgacggaagtccagtgaggtctccaatgattccatctatgcccacaagcccaacttcgctttctactgctgccagctcaagtgaaagaaatatttctaatgagagtaatcataggtcaagccgagtagttcgctccctctttaaggaaacaaatacttcccctggagagtctagcttctctgaacccagaaccagttcagatagtcagcttggcaca

SEQ ID NO: 261437 - DNA, 439 bp, Glycine max
caaaataaaaaaaaagaaaaaatgtttgcagggaaaggggctgtttggttctcccaaccgggggcgttggcagcaatcgcggtggtagcttgcgttgggcttacacaggcccaacccgaggccaggttcaagtgcaacagcgcgaacatccccacgtgtcgcgcgctcataagctactctcacccgaacaccaccaccctcggcgacatccaaaagctcttcaacgtgaaacacatactcgacatcgtgggagcgaacaacctcccaagcaacgccacaaaaacatacgcggtgggccccaacgaggttgtgaaggtccctttctcgtgcaggtgcagcaacaacacgggactctcggaccgtgttccgctgtacaggatcaagaagggggacacgctgtactacatcgcgacgacgacgttcgcgggtctgatgaagt

SEQ ID NO: 261438 - DNA, 460 bp, Glycine max
gtaggctgttccattgtatctttcggaaatggctccagctaagaaccgaggagcagtgaaccaactgtttcagttcacaacttgtgctggaatcttaattgcaaacctagtgaattactttactgaaaaaatccatccctatggatggaggatatctctgggtttggcaggtcttccagcatttgcaatgcttgttggaggtatttgttgtgctgagacaccaaacagccttgtggagcaaggaaggttggataaagcaaaacaagtattgcagagaattagaggtaccgagaacgttgaagccgaatttgaggatcttaaagaagccagtgaagaagcacaagctgttaagagcccgtttaggacactcctcaagaggaagtacaggccacaactgatcataggtgcattggggattccagcgttccagcagctaactggcaataactccatcctcttc

SEQ ID NO: 261439 - DNA, 371 bp, Glycine max
cccacgcgtccggctttcttttccttcagggttaagcggtgagatttgcgaatctgagaaatggcggattcttctcgggaggagaacgtttacatggcgaaattggcggagcaggccgagcgttacgaggagatggttgagttcatggagaaagttgcaaagactgtggaagttgaagagttgacggtggaagagaagaatctcctctctgtggcttacaagaacgtgattggtgcgaggagggcttcgtggaagatcatatcctccattgagcagaaggaggagagcaggggcaatgaggaccacgtggccattataaaggagtacaggggcaaaattgaggctgaactcagcaagatctgtgatgggat

SEQ ID NO: 261440 - DNA, 358 bp, Glycine max
cccacgcgtccgattggacttgagaataaaatcattttacactttgaaaatgtgttttggcctaatgtggagttcttgggagtagttgcagatacatcttatggatgtagctacttccttaatctccacaaggccgccggtcatgctgttctggtttacatgccttctgggcagcttgccaaagacgttgaaaagatgtctgatgaagcagccgtcaacttcgctttcatgcagctcaagaagattcttccagatgcttcttcaccgattcagtatcttgtgtctcggtggggatcagatataaattcactaggttcatatagctacgatgcaattgggaaaccccatgaactatatg

SEQ ID NO: 261441 - DNA, 452 bp, Glycine max
atcgatttgaaggcaggaggtaagtccaagaagaccaaacgtacagcccccaaatcgaatgatatttacctcaagctcctcgtcaagctgtaccgttttcttgttcggaggactggtagtaacttcaatgccgtcatcctcaaacgccttttcatgagcaaggtcaacaagcccccgctatccctctctagattgattcgttacaccaagggaaaggaggataagatagctgtggtagtcggtgccgtgaccgatgacattagggtgtatgaagtccctgctctgaacgtaactgccctgaggttcactgaaactgccagagctagaattgagaatgctggtggcgaatgcctcacctttgatcaactggctcttagagctccactcggccagaatacggttcttcttagacgtcccaagaatgcccgtgaggctgtcaagcactttggacc

SEQ ID NO: 261442 - DNA, 459 bp, Glycine max
gtaggttttgaggaccctcatgtattacttactgtcggacgatggactctcatttgtggagggttttccttaaggaacttaccatacaatcatagaggattcatctgaccctattggtcctgctcaagagctgtctgaaaaactctttattcgtccaattcaaatgctttcccacaagaagattgtttgtaactaaacagaaagtatatagtcttatatgcacatcattgaggacattgtgtctaattgtctctaaatattcaaatgttcatttcaactattcatgaaccacagtttctacatattactaatggaataaacgctttattacatttcttaactgatgatactctttttgttttcacaccttctagagaatactttaaacgacgaatttattgaacaatcaaaactttcgaaattttacaattcttaaaaacatacaccaatttttttttt

SEQ ID NO: 261443 - DNA, 398 bp, Glycine max
catggtttccctttccaccaccccttttctccccttcactgcaaaaaacgcttctactagattcccacctcccaattcattctcccgcaacaagcaacgtagtaacagggatcacaggaaggttgtctgcgcctgcatcgcacctccgcagaacttcaagagccaggactcttccgccattaatttcaatggttcgtccaaatcagaacaactgagcacggcgtgggatcatgaggatgattctgatgttcttattgagtgtagagatgtgtataagtcttttggggaaaagaaaatcttaaatggtgtcagcttcaagattagacatggtgaagctgttggaataattggtccttctgggaccggcaaatctacagttttgaagattattgctggac

SEQ ID NO: 261444 - DNA, 353 bp, Glycine max
  unsure (1)..(353): unsure at all n locations
ntccgtgagcgtgaaagatgccttcggcgaggctttcanggtcaccaaggctcgacgttgctattgacatgggcaatccatttctcaatctcactgttgatggtttccttaagatcggagctgtcgcagccacgcgatcagctgctgaagatacttatcatattatccgaaacgggaatatctcaagtcatgatttcgagaaaacgttgaagaagatgtgtaaagaaggtgtatattggggaactttagctggtgtttatcttggaatggaatatggggtagagaggatccgtggcaccagagattggaagaatgccatgattgggggtgcagtaactgcgactctgttatct

SEQ ID NO: 261445 - DNA, 332 bp, Glycine max
gtgagtattcagctcaatatgtggatgctttctccaatgcccatcactcttcttcttcttcttctataccagaattcatgcaattccaacgcctcgagaatgatccccaagagaagaaattggagtacaatggaagtcaagtaccggaagaatttgtggaaacagagtattaccaagatctcaacagcgtggacaaacaccaccatacgacgggaacaggatttatcaaagtagagaaaaatggaaatgactttcacatagaaccagataatgacactggttgccatcactcttgcaggtgcaatccagcaaccaatgattgggttccttct

SEQ ID NO: 261446 - DNA, 400 bp, Glycine max
atttttcttctctcccttctttctctctctctctctctgaccattctcttcttcttctttttcttctcctctctctctctcccctccgccatggctgaggataaggagatgtctacctctgtcatcaatgggaatgattccctaactggtcacatcatatctacaactattggaggcaaaaatggggaacccaaacagactattagctacatggcagaacgggttgtaggaactggatcatttggaatcgttttccaggcaaaatgcttggaaactggggaggcagtggcaattaaaaaggttttacaagacagaagatacaagaatcgtgaactgcagttaatgcgtgtgatggatcatccaaatgtgatctctttgaagcatttgttcttttcaacta

SEQ ID NO: 261447 - DNA, 443 bp, Glycine max
gtaggttttgaggaccctcgtgtaacacttactgttggtgatggagttgcatttttgaaggatgttccagaaggaacttacgatgcaggtatagtggattcatctgaccctattggtcctgctcaagagctgtttgaaaagcccttttttgcgtccgttgcaaaggctctccgtccaggaggtgttgtgtgtactcaagcagaaagtatatggcttcatatgcacatcattgaggacattgtggctaattgtcgccaaatattcaaaggttctgtcaactatgcatggaccacaggtcctacatatcctagtgggatgattggttttatgctttgctcaactgagggtcctcttgttgatttcaagcatccagtgaatcctttaagtgagaatgatagtcaacagtcaagaccattgaaattttacaattctgagattcatac

SEQ ID NO: 261448 - DNA, 168 bp, Glycine max
gcgcgagtttcaactcggtgtagcaatggcgatgatgctaggggtgcagaagaacacactgtacgtgggagggttagcggaggaagtgaacgagtcgatcctccacgcggcgttcattcccttcggcgacatcaaagacgtgaagacgccgcttgaccaagccacgca

SEQ ID NO: 261449 - DNA, 214 bp, Glycine max
cctttttgcgtgaagggtcgcgtctactgtgacccttgccgtgctggttttgagaccttaacaaccacctacattgccggtgctgagattatgttgcaatgcaagagcagggttagcaacgaggttgtgtacaccaagaaagggtacactgactcaactggagcatacacaatgtacgtggacgagggatcacgcagatcaaatatgcagtgcc

SEQ ID NO: 261450 - DNA, 443 bp, Glycine max
ccacgcgtacggaaatgtcctttttggctagttgtcaaaatctcgttcctcgaccttgggtcattgatgatcttgacactttcaaattgaaatggagcaagaacccatggaagaaggttatcatatttgttgataactctggtgcagatatcattttgggtattatgccatttgcaagagaactacttcggcgtgggagtcaggttgtattggctgctaatgacttaccatccatcaatgatgtgacttgttctgagctagttgaaattatatcaaagttaaaggatgaagatggacagcttgtgggtgtcagtacttcaaatctcttaattgcgaactctggcaatgatttacctgtcattgatcttacaagagtgtcacaggagcttgcttaccttgccagcgatgcagatcttgtcatcttagaagggatgggtcgtgga

SEQ ID NO: 261451 - DNA, 451 bp, Glycine max
  unsure (1)..(451): unsure at all n locations
cgagtttcaacttgcgagactggttaaatgagtttaggaagaaagagctgaacctaaagcgtattacttatctaagtggatcttacactcacccttttgatgtgccccatggttatatatggagccctcacttagtccctaaaccaaaagactggggacctaagattgatgtggttggattttgtttccttgaccttgcttcaaattatgtaccaccaaaatcgctagtagattggcttgaagagggagaaaaacctatntatgttggatttggtagccttcctttacaacaaccagaggaaatgacgcanattataattcacgctctggaagaaacagggcagagaggtgtcatcaacaaaagctggggtggtcttgggtctttggcaaaacaaaaaaatctgtgtatttattggacaactgtccgcatgattggctgtttccccgatgc

SEQ ID NO: 261452 - DNA, 322 bp, Glycine max
  unsure (1)..(322): unsure at all n locations
acctttcccaggccgacttcggccgcctcgagatcgagctggccgaggttgagatgcccggcctcatggcctgtcggaccgagttcggcccctcccagcccttcaagggggcccgcatcaccggctccctccacatgaccatccagaccgccgttctcattgagaccctcaccgcccttggcgccgaggtccgctggtgctcctgcaacatcttctccacccaggaccacgccgccgccgctattgcccgcgacagtgccgccgtcttcgcctggaagggtgagaccctccangagtactggtggtgcaccgagcgcgccct

SEQ ID NO: 261453 - DNA, 456 bp, Glycine max
gtcctctgaaaacaacagtaactggagttgagatgttcaagaagattttggatcaaggacaggctggtgataacgtgggtcttcttctccgtggtctgaagcgggaagacattcaacgtggtcaggttagttgaggagatctagcttttgctttttgttagacatcatagctgcatgcaagagaactgtatattatctgtatttgtttcgataaaatttatagaatttcgaattcaaattactaaatttgagaaagcactttcccaatgctgctttctattgaaaaggtgattgccaaacctggttctgtaaaaacatccaagaaatttgaggcagagatatatgtactcacaaaagatgagggagggcgacacactgctttcttctctaactacaaacctcagttttacttgaggactgctgatgtcactggaaaagtagagttgcccgaaaatg

SEQ ID NO: 261454 - DNA, 443 bp, Glycine max
  unsure (1)..(443): unsure at all n locations
cttcctacttgaagaaagtaggatacaaccctgacaagattccttttgttcctatctctggttttgagggagacaacatgattgagaggtccacaaaccttgactggtacaagggtccaactctgcttgatgcacttgaccagattagtgagcccaagaggccctctgacaagcccctcaagcttccccttcaagatgtgtacaagattggaggtattggaactgtgccagtgggacgtgttgagaccggtgtcttgaagcctggaatggtggtgacttttgcaccaactggactgacaactgaagtcaagtctgtggagatgcaccatgaatctcttacagaggcacatcctggtgacanatgtgggattcaatgttaagaatgttgctgttaaggatttgaagcgtggttatgttgcctcaaactcaaaggatgaccctgc

SEQ ID NO: 261455 - DNA, 410 bp, Glycine max
gatgtgagccggccaaagccaatgaccgccttttggtcatctctggctcatagctttaccaagcgcccaatgaagggaatgcttaccggtcctgttaccattcttaactggtcctttgttagaaatgaccaacctagatctgataccacctaccagattgctttgtctatcaaggaccaagtggaataccttgaaaaggctggcatgactgttatccaaattgatgaaactggtttgagagaaggtcttccactgaagaaatcagaacaagctcactacttggacttggcttgccatgccttcaaaatcaccaatgtttgagtgcatgataccacgcagatacacactcacatgtgctactcgaacttgaacgacatcatacacttcatcatcgacatggactccgatgt

SEQ ID NO: 261456 - DNA, 456 bp, Glycine max
agtaaatcgaggtacccattttatgataaactttccttccatttttgttcctctagtaggcctagtatttccggcaattgcaatggcttctttatttctttatgttcaaaaaaacaagattttttagatacagaaaacaaagtaaaattctggggttttttattccccaattataatactaaattcaaaaaaaggagagtaatgagtataatctttcgctcagacgatgtactgatatattctatggcggaggttcgaagaacaagcaatttattttgggccgttttcactttgttaggttcattggggttattgttcgttgcaatttccagttatcttggtatggatttgttctttatttctgagaaaattagtgatttttcttttattccggactttatttattttccatttattccactaaagagacccacgatggctttttatggaaatcgc

SEQ ID NO: 261457 - DNA, 373 bp, Glycine max
cttccgcctattgtagccaagaaaggaaggaaggaaacccttgcttaccttttcaacttttaagaagccaatttttggtaaaacacttactgggtaaaaaatcacccttggaggggggaggtcaaataccataaataatggaaaggccaaaattcaagaacagggaaggatcccaccaaaccaacaacgtctcatttttggtggcaagcaacttgggggtggacgtacacttgctgattacaacattcaaaaagagtccactctacacttggtgctccgtcttcgtggtggaatgcaaatctttgttaagaccttgaccggaaagacaatcacccttgaggtcgagagctctgacaccattgacaatgttaag

SEQ ID NO: 261458 - DNA, 429 bp, Glycine max
  unsure (1)..(429): unsure at all n locations
agtcgttcctaaatggtatgagcatngggacttcaaacaaagtatatgatggagacatgattgttcttcaaggccaagagaaaatcttcctttcagaaaccaaagaaggtggagacattaacaaacagtatacaaacatcaccttcacaccaacacaagcagatcgctttgtcttggcatttcgaaactggctaaggcggcatggcaatggccaaccagaatggtttggcaacagcagcgaccaaccattgccatcaactgttttatcaaaacgtcagatgttggatagatttgaacagcacactctcaagtgttcatcatgtaaagcagcatatgagggattccaaacatggcagaaagtcctaattggtacaacagttgtgttttgtgcaacatcanggatcccatcaaatgttcaagtgcgtgtac

SEQ ID NO: 261459 - DNA, 414 bp, Glycine max
  unsure (1)..(414): unsure at all n locations
atggaaccaaaagttttcagggctttgcttcatttatttatagagacactctaatagatgatgaagagctctttatgtcacgttcatcattcttgccttggtatctgaatcatttgctgcanagttgttagctgctgcagaaaagtatggtttgccaagacttaaactgatgtgcgagtctgtactttgcaaagacatctccatagattctgttgcctatattctggctcttgctgatcgttatcgtgctacagaattgaagtctgtctgtctacaattttctgctgaaaaccttgtcgctgtgatgcaatctgatggttttgagtatcttaaggaaaattgtcccttgctgcaatcagaactgctaaagactgtggcaggatgcgaggaggaatttagtggagaaggaaagtg

SEQ ID NO: 261460 - DNA, 445 bp, Glycine max
tctttttctcagaagcaaaggttttgaatttcagttatggccttttgctgtctttttgtttgtattgttttgaaaaaaattggatattttttcagggtattggagtggttaaacaacctactatggaaggaggttcaaagcctcctcctcctcctatgttggagagaagggcaaggcctcaaaaggatcaagctttgaactgtccaaggtgcaattcaaccaacaccaaattctgctactacaacaactatagcctatctcagccaaggtacttttgcaagacatgtataaggtattggactgagggtggttctctcagaaacgttcctgtcggtggtggctctagaaagaacaaaagatcaacctcatcagcgccaccaccatcatcagcatcagcacaagcaaagaagcttcctgatctcacaacacctaatttccctcaatc

SEQ ID NO: 261461 - DNA, 455 bp, Glycine max
catagtctttcggtccttccttccttcctccgctctagtgtatgccactctggttaattatcatacccccttctaggcatagttcttctccctctgttctctattctacactgtgaaaccaagatgaaggtagcatttgtagctgttctacttatttgccttgtcctaagctcctccttgttcgaggtgtcaatggccggttctgctttctgctcctccaagtgcgcgaagaggtgttctagggctgggatgaaggacaggtgcacgaggttctgcgggatttgctgcagcaagtgtaggtgtgtgccatctgggacttatgggaacaagcacgagtgcccttgctacagagacatgaagaactccaagggcaagcccaaatgcccttgattgttaatttcaccatgcatcaacttcaatctcaaacctttgaatccttcactcttgctagctga

SEQ ID NO: 261462 - DNA, 408 bp, Glycine max
aaaaaaacaaaaacagaaacaaaagatggttcatcagaggcaaaacaacatccatgttcttgttcttccataccctgcccaaggccacatcaacccccttgtccaattcgcaaaaagattagcttcaaagggtgtcaaagccacagttgccaccacccactacactgccaactccatcaatgcacccaacatcacggtcgaagccatctccgatggtttcgaccaagccggcttcgcccagaccaacaacaacgtgcaactcttccttgcctccttcagaacaaacggctccaggaccttgtctgagctcatcagaaaacaccaacaaactccctcccccgtcacctgcattgtctatgactcatttttcccctgggttctcgacgtggcgaagcagcatggcattta

SEQ ID NO: 261463 - DNA, 374 bp, Glycine max
cccacgcgtccgcccacgcgtccgcccacgcgtccgcccacgcgtccgatttcgtataacatttcatttcacttcacttagggtggtgcatttgcaaccctttaatttcctcacaaaaatggaggaacgtagtttgtactcactagtgtttcttgtgcttgctttggctattgtgaacaaagtgcatgggcaagggacgcgtgtagggttctattcgagtacatgcccacgcgctgagtccattgttaagtccacagttacaacccatgttaattctgatagtactttggctgctgggttgcttcggatgcacttccatgattgctttgtgcaaggttgtgacgcttctgttctcattgccggttctggcactg

SEQ ID NO: 261464 - DNA, 461 bp, Glycine max
  unsure (1)..(461): unsure at all n locations
gtgtggaaacattctgttatggtttgtgctgcaatcacaacacaccaatatgtatctgctgagcagattgtgaatggcatgcatcaggcaaaggcagaaggagctgatatagtggagcttaagcttgactgcatcaccaatttccactctcaccatgacctcaaaatcattctccaaaataagccactacccgtgcttattgttaaccgaccaaaatgggaaggtggtttgtacgagggcgatgagaacaagcggttggaagcattacagcttgctgtggaattgagtgctgatttcatagacgttgagctgaaggcagcttcttgtcttccaaccttggtggaacatatgagaaatcataatagtcatggcaaaatcattgtttcctgctatgtggatggcaccacccctccgcatgaagtactacttcaacttgttgaactaatgcangctactggagc

SEQ ID NO: 261465 - DNA, 450 bp, Glycine max
  unsure (1)..(450): unsure at all n locations
ncacgcgtncgnccacgcgtncggaaaattgagctttgggtggataaaacagaaaaccttcgctctcaggctcaagatttcaggcagcagggaaccaagattaggagaaagatgtggttccaaaacatgaagataaagctaattgttctgggtatcataattgccttgattctcattattgttctttccgtttgtggtggcttcaactgtggtaaatgagtcttcccacatcctggcttcaactgtggtatttgtctcctcacttgataagattggtgctagcagattgccattgcctctactgtcaacatagtgcttttgactttttgggatttacattcttccgacttctccgatgatgaatattatatggcattgcttgtatagtgtgaattatttagcctttatcatcttgtctccatagcataatgctaatctgtcattctctat

SEQ ID NO: 261466 - DNA, 398 bp, Glycine max
aaaggaaaaatgtttgagggaaagggctgtttggttttcaaaaccgggggcgttggcagcaatcgcggtggtagcttgcgttgggcttacaaaggcccaacccgaggccaggttcaagtgcaacagcgcgaacatccccacgtgtcgcgcgctcataagctactctcacccgaacaccaccaccctcggcgacatccaaaagctcttcaacgtgaaacacatactcgacatcgtgggagccgaacaacctccaagcaacgccacaaaaacatacgcggtgggccccaacgaggttgtgaaggtccctttcccgtgcaggtgcagcaacaacacgggactctcggaccgtgttccgctgtacaggatcaaaaagggggacacgctgtactacatcgcga

SEQ ID NO: 261467 - DNA, 456 bp, Glycine max
cccacgcgtccgcccacgcgtccgcccacgcgtccgcccacgcgtccgcccacgcgtccggaaccaccataacatcattctgcccttccctcgcgtttcaacaccgataacccgcaaaaatctccattgatctgcgcctcctgttccatggcaaagctgcctgtggaatacaacggcgactgcgccaccaccgcctcagcatccgcctccgcagccgcggagtctcagagatccattcccacgccgtttctcaccaaaacctttcaactcgtcgacgaccaatccatcgacgatgttatttcctggaacgacgacggatcaacgtttatcgtctggaaccctaccgtcttcgccagagacttgcttcctaaatatttcaaacacaacaatttctctagcttcgttcgccagctcaacacttacggattcagaaaagttgtacctgatcggtgggag

SEQ ID NO: 261468 - DNA, 457 bp, Glycine max
cccacgcgtccgcccacgcgtccgtttacgcgtccgcccacgcgttcgcccacgcgggcggggccaccataacatcattctgcccttccctcgcgtttcaacaccgataacccgcaaaaatctccattgatctgcgcctcctgttccatggcaaagctgcctgtggaatacaacggcgactgcgccaccaccgcctcagcatccgcctccgcagccgcggagtctcagagatccattcccacgccgtttctcaccaaaacctttcaactcgtcgacgaccaatccatcgacgatgttatttcctggaacgacgacggatcaacgtttatcgtctggaaccctaccgtcttcgccagagacttgctttctaaatatttcaaacacaacaatttctctagcttcgttcgccaactcaacacttacggattcagaaaagttgtacctgatcggtgggagt

SEQ ID NO: 261469 - DNA, 448 bp, Glycine max
aaaccttattggcgtcgtagcagaactcaaaagttaacatccttaatctcttcaaacacggttgttcatagcatatggaaacgaggatgttgcggctttcgattcaacgagtgaggaagttgaactttctgaggcctcagatctctgctttgggaaggtcccatttgtcaactgctgctgaaccatcttccagtaagagcaatccacctagggttccaaatcttattgggggcagttttgttgactcaaaagcatcaactgtcattgatgttataaacccggcaacccaagaagttgtttcacaagttcctttgtcgacgcatgaagagtttaaggcagctgtatctgcagcaaaggaagcatttccatcatggcgtaacactccaattacaacacgccaacgtgttatgttgaagcttcaagagcttatacgcagagatatggataa

SEQ ID NO: 261470 - DNA, 374 bp, Glycine max
gataaagttgctgcaaaccttgtccgacttctctcatataacaataagaatttcttagagaccgggttaattgttggtggatgggataaatatgaatgtggacaaatttatggagttcctctgggtggaacaatagtacaacaaccttttgctatcggaggatctggctccagttacttgtatggtttttttgaccaagcctggaaagagggaatgaccaatgatgaagctgacgatttattaaaaaaagctcgttcactggctattgctcgtgatagcgcaagtggttgggttgtcctaacagtcataataaactcagagtgagtgaccaggaatttctaccctggcgaccaacttacattatggcacgagga

SEQ ID NO: 261471 - DNA, 375 bp, Glycine max
ctttgtcaccaccacgggtaacaaggacatcatcatggttgaccacatgaagaaaatgaagaacaatgccattgtttgcaacattggtcactttgacaatgagatcgacatgctggggctggagaactaccccggcgtgaagcgcatcaccatcaagccccaaaccgacagatgggtcttccccgagaccaatgtcggcatcattgtcttggccgagggtcgtttgatgaacttgggatgcgccacaggacaccctagttttgtgatgtcctgctccttcaccaaccaggtcattgctcagcttgagttgtggaaggagaagagtaccggcaagtacgagaagaaagtttacgttttgcccaagcaccttgatga

SEQ ID NO: 261472 - DNA, 450 bp, Glycine max
  unsure (1)..(450): unsure at all n locations
ctttgtcaccaccacgggtaacaaggacatcatcatggttgaccacatgaagaaggggaagaacaatgccattgtttgcaacattggtcactttgacaatgagatcgacatgctggggctggagaactaccccggcgtgaagcgcatcaccatcaagccccaaaccgacagatgggtcttccccgagaccaatgtcggcatcattgtcttggccgagggtcgtttgatgaacttgggatgcgccacaggacaccctagttttgtgatgtcctgctccttcaccaaccaggtcattgctcaacttgagttgtggaaagagaaaagtaccggcaagtacgagaagaaagnttacgttttgcccaagcaccttgatgagaaggtggctgcactttaccttggcaaacttggagctaaactcaccaagcttagcccggcccaagctgattacat

SEQ ID NO: 261473 - DNA, 476 bp, Glycine max
  unsure (1)..(476): unsure at all n locations
cgggtcacccacgccgtccctaattcttatttcttcatcggtcgaatcttcttcttctaaaaatgccaatctttgtgaaaaccttggccgggaagaacattaaccttggaggggaagtcttccgcccccatcgataccgggaaacctaaaattcaaaacagggaagggatccaacctgaccagcaaaaactaatttttgcgggtaaacaactggaggatggtcgaacctttgccgactacaacatncaaaaggaatccactctccacctcgtccttcgcctcaggggtggcatgcaaatctttgtcaagactttgactggcaagaccatcaccctcgaggtcgaatcctcggacaccattgataatgtcaaggccaagatccangacaaggagggtatccctccagatcagcagaggttgatatttgctggtaaacaacttgaggatggaagaacccttgctgattacaatattca

SEQ ID NO: 261474 - DNA, 448 bp, Glycine max
aaaaagtcaccttcttttcgcaaatccctttcccttttacactctcccttctcttcttcggctccctctccgtctccgcccaaagcggccaccgcgacgacgacgacgacgacgacgcggacgccggaggcgacgccacccccaacctccgtgctcggtccttgattctcgcaaaggtgtggtgtttgatcgttattttttttgctacttttgtatcgggcgtttccccctacattctgaaatggaacgaggggttcttagttctggggacccagtttgctggaggagtgtttctgggaactgcaatgatgcattttctcagcgacgctaatgaaaccttcggggacttaactcgcaaggagtaccccttcgcgttcatgctcgcgtgtgcagggtacttgatgaccctgctcgctgatgctgtcatttcctcggttttgaagaatac

SEQ ID NO: 261475 - DNA, 479 bp, Glycine max
tcccggcgccacgcgtcgagacaacactactcactagctaacaatttcataagcctgccatggcttcctcgtgtgcttgctctgccattgcagctgttgccatctccacaccaagttcccagaagaatggatcactcttgggaagcacaaaagcttcttttcttagtgggaggaaactgaaggtgaacagttttacagcaccagttggagcacgatccagcactacagtgtgtgcagttgctgagcctgataggcctctgtggttcccaggcagcacccctcctccatggctagatggcagtttgccaggagattttggctttgatcccctaggtcttggatctgatcctgagagcctgagatggaatgtccaagcagagcttgtgcactgcagatgggccatgttgggagctgctggcattttcatcccagaattcctcacaaagattggtatcctgaacaccccttcatggtacact

SEQ ID NO: 261476 - DNA, 375 bp, Glycine max
  unsure (1)..(375): unsure at all n locations
cgcagaacaacaactnactcactaagctaaacaatttcatcaagcctgccatggcttcctcgtgtgcttgctctgccattgcagctgtngccatctccacaccaagttcccagaagaatggatcactcttgggaagcacaaaagcttcttttcttagtgggaggaaactgaacgtgaacagttttacagcaccagttggagcacgatccaccactacagtgtgtgcagctgctgaacctgataggcctctgtggttcccaggcagaacccctcctccatggctagatggcagtttgtcaagagattttggctttgatcccctacgtcttggatctgatcctgagaccctgaaatggaatgttcaagtacagcttg

SEQ ID NO: 261477 - DNA, 449 bp, Glycine max
gagacactcatgtgctcttttcagatactaaggcctgcggaacacagaaagcctaagtttgcttttgggagcaaaactacattcaaggcaattcttgatgctgctagagtatgaccccattgagctgacttagatcaataaagtttgtaacatagcaaaaaattgacatggacaaattgatatccgtgttcactccaatgtgaaggaagggtattacaactaccaatataatgaagaacgtaggaatattatctctgctttttcttttcaagtatagctgaaagtgtttttctgtgctggcgcattctcaatatgtaccatgttgtcaacacagatttagggggtcaggttccatttttcttttctttcagctttttgatgtgagagacagttatgcaattctccttttcatatctcctgttgtattataaatggcagcatacttttcg

SEQ ID NO: 261478 - DNA, 461 bp, Glycine max
aaaggagctcatcaaatacaagggatatcaggttcctccagcagaactagaggccttgctactgactcatcctgctattttagatgccgctgttatcccgtatccagataaggaagctgggcagcatccaatggcatacgtggtgaggaaggctggaagtagcttatcagaaactcaagttatggattttgttgcaggacaggtggctccgtacaagcggattcgaaaagtggcatttatttcctccatacccaaaaatccatctggcaaaattcttcggaaggatctcatcaaactcgcaacgtctaaactctgaatagatgagctttttcgtaatatattttttctatcggagttggacaagtgaggaaataatctttagctccttttttgctgtaattttctggcttgtttacttttgctgctttcatattatctgttctttgttcaacagtctattg

SEQ ID NO: 261479 - DNA, 389 bp, Glycine max
ctctaataacatttctaatctcattctccttctgttcaaacactctctctcatggcatcagataagaagattaggatcggcatcaacgggtttggaaggattggccgtttggtggccagggttgcccttcaaaggaatgatgttgaacttgttgctgtcaacgatcctttcatcaccactgattacatgacatacatgttcaagtacgacaccgttcatggccagtggaagcattttgatgtgaaagtgaaagactctaagacccttctctttggtgagaagcccgtcaccgtttttggaatcaagaaccctgaagaaattccatggggtgaggttggtgctgattatgttgttgagtcaactggtgtattcactgacaaggacaaggc

SEQ ID NO: 261480 - DNA, 438 bp, Glycine max
ctttcttttcttctcgcagagcgaaatcccaatcccacacaaatggcatgctcagccacctctgcttctctcttctccgcaaaccccacacctctcttctctcccaaatcctccctctccctccctaacaactctctccacctcaaccctctccccacgcgcccttctctctccctcacgcgcccctcgcacactcgccgctccttcgtcgtcaaagcctcctccagcgagcttccgctagttggaaacaccgcaccggatttcgaagcagaggctgtgtttgaccaggagtttatcaacgtgaaactatctgattacattgggaagaaatatgttgtgctcttcttctacccgttggacttcacttttgtttgtcccacagaaatcactgctttcagtgaccggcatgcagagttcgaggcactaaatactgagata

SEQ ID NO: 261481 - DNA, 441 bp, Glycine max
atcgaacatggctaagtatcattcaagtgggaaaagctcttgcatgactgctatagccttcctgtttatccttctaatcacttatacaggcacaacagatgcacaatccggggtatgttatggaagacttggcaacaacttaccaacccctcaagaagttgtggccctctacaatcaagccaacattcgcaggatgcgaatctacggtccaagcccagaagtcctcgaagcactaagaagttccaacattgagcttttgctagacattccaaatgacaacctcagaaacctagcatctagccaagacaatgcaaacaaatgggtgcaagacaacatcaaaaactatgccaacaatgtcagattcagatacgtttcagtgggaaatgaagtgaaacccgaacactcatttgcacaatttctagtgcctgcattggaaaacat

SEQ ID NO: 261482 - DNA, 442 bp, Glycine max
gaaaattctcccagttttaaacttgcccagagaaactttgttgaaagtatggcaggatattccctggtgtgctactttctgcaggtgaaggataggcataatgggaacctcctattggatgaagaaggtcatatcatacatatcgattttggcttcatgctttccaattcacctggtggtgttaactttgaaagtgcacctttcaaattaacacgtgaacttcttgaggttatggattctgatgctgagggtgttccaagcgagttctttgattattttaaggttttatgcattcaaggcttccttacttgccgcaagcatgctgagcgcatcattcttcttgttgagatgttgcaggattcagatttcccatgctttaaaggtggtgctcggacaatacagaacctacgaaagcgattccatctcagtttaactgaagagc

SEQ ID NO: 261483 - DNA, 443 bp, Glycine max
  unsure (1)..(443): unsure at all n locations
ctcagtcctacgatacgattctcttccgcctcccttcccttcaactccacggcgcanatccgaggagtgtgggaaaccctaattcattcctctttgcttcttctatctctattcctctaacaccagtgatggcaggtttggctccagaaggatcgcagtttgatgctcggcaatatgattctaagatgaatgaattgctttccgccgatggacaagaatttttcacttcatatgacgaagtctatgatagttttgatgcaatgggccttcaagaaaatcttctgagaggcatatatgcttatggttttgagaggccttctgcaatccagcagaggggaattgttcctttctgcaagggtctggatgtgattcagcaggctcagtctggaactggaaagacagcaacgttctgttcaggaattttgcagcagcttgactatgga

SEQ ID NO: 261484 - DNA, 442 bp, Glycine max
aaagaaatggcttctgttctgctttcagcactgtatgctgatgtcatcagccctgcacagagtagggatgggttttttatgcttattgaatcttctgatgatcttgctgtggatatactggatgcagttgacatccttgcattattcttagcacgagctgttgttgatgacattcttcctccagcctttcttgccagggctaggaaggctcttccagaatcttccaagggagttcaggtaatccaaactgctgaaaagagttatctctcagctccacaccatgcggaacttgtggaaaggcgatggggtggtagcactcacataactgttgaagaagtgaagaagaagataggtgatttacttagagaatatgtggatagtggtgacacattggaggcctgtagatgtatacgtgagttgggggtttcattcttccatcatg

SEQ ID NO: 261485 - DNA, 434 bp, Glycine max
  unsure (1)..(434): unsure at all n locations
ctcagcgatggtgttggatccgccgcccttcctcccgtcgacaaagtccgcctacctccaaggcggcgacgccacggccttcgatgaggaagatctctacagccgcctcaaatccctagtgcgtcagctcgagttcgtcgacatccaggaggagtatgtgaaggacgaactgaagaatctcaggcgcgagctcctccgcgcgatggaggaggtgaagcggatccagtcggtgccgctcgtcataggccagttcatggagatgatcgaccagaacaacggcatcgttggatccaccgcaggatccaactactacgtcagaatcctcagcactatcaaccgcgaattgctcaagccttctgcttncgtcgcgctccaccgncactccaacgcgctcgtcgaggtgctgccgccggaggccgactccagcatctcgc

SEQ ID NO: 261486 - DNA, 439 bp, Glycine max
gcgttcgatttatttacaacaacaagggcttctgtgcctgaaccaaaaatctcccttcgggccttatggttcggggcgtccttcaccatcattgcgcatgcaattgttcctcaaaacgaaaccttcaaatttgagaactcaggtgaacttggaccctacatcgttgagtacggtgcagattacagaatgataagcatcttcaactctccattccaagttggtttctacaacaccaccccaaatgccttcactctagctttgcgtgtagggctccaacgctcggagcacctatttcgttggggttgggaggccaatagggccaacccagttggagaaaatgccactttctcacttggcactgatgggaaccttgtgttggcagatgctgatggcagaattgcatggcaaactaacactgccaacaagggtggtgtgggct

SEQ ID NO: 261487 - DNA, 433 bp, Glycine max
tgggagtgggaagtgtttaaaaatttattctgggcatgtgaatagagtatactgcataactgccacattttctgtgactaatgggaaatatattgttggcggttctgaagatcactgtgtttatatatgggatcttcagcagaaattggttcagaaacttgaaggccatacagacactgtaatatctgttacttgtcacccaacagagaacaaaattgcttctgctggtctcgctggtgatagaactgtgagggtttgggtacaggattcctgaataatatcgaaactgtatggggatgttgtctttcttctagatttcaactacatgcctatgcatgtctgatttcaatattagacactattaaacatacaagttgatctcatgttggcactagttccgtttttggtattatttgtaaatatagtttttcat

SEQ ID NO: 261488 - DNA, 434 bp, Glycine max
  unsure (1)..(434): unsure at all n locations
gtaagtcctatcagtttccacgtaagtctccaaaatcagaaacactcgaagctgttcaatggagatagatggcaacgttctcgcggccaagtcgctggtgcgcttcggtgtgcagcacatgttcggcgtggtggggattccggtgacgtcgctggccaaccgcgccgtctcgctcggtgtcagattcattgcttttcacaacgagcagtccgcgggctacgccgcctccgcctacggctacctcaccggccgccccggcgtgttcctcaccgtctccggccccggctgcgtccacggcctcgccggcctctccaacgcctncgtcaacacctggcccaccgtcatgatctccggctcctgcgaccaaaacgacgtcggccgcggcgattntcaagaactcaaccagatcgaagccaccaaacccttcaccaaac

SEQ ID NO: 261489 - DNA, 439 bp, Glycine max
ttcgtcaattccaacaacaccacaatgggaagaagaccggcgaggtgttacccgcggataaggaacagaccggacccgaaatcccttttctgccgcggcgtgccggagccgaagatccgaatctacgacgtgggaatgaagaagaaaggcgtggacgagttcccgttctgcgtgcacctggtctcgtgggagaaggagaacgtctccagcgaggctttggaggcggcgcgcatcgcatgcaacaagtacatggccaagttcgccggaaaagatgccttccacctgcgcgtgagggtgcatcccttccacgtgctccgcatcaacaagatgctatcgtgcgccggggccgacaggctccataccggcatgaggggcgcctttgggaagccgcacgggacgtgcgctagggttaacattggtcaggtgctgctctcggtga

SEQ ID NO: 261490 - DNA, 440 bp, Glycine max
ctgcattgcttaaacctcatgaaagaatcatggcacttgatcttcctcatgggggccatctggctcacggatatcagactgataccaaaaagatatctgcagtctcgatattttttgagacaatgccatatcgattgaatgaaagtacaggatacatcgactatgaccagatggagaaatctgctacactcttcaggccaaaattaattgttgctggagctagcgcttatgcacgtctctatgattatgaacgtgtacgcaaggtttgcgataaacagaaagctatactattggcagatatggcacacatcagtggattggttgcagctggtgtcatcccatcaccttttgattatgctgatgtagttactaccacaactcacaagtcacttcgaggaccacgtggagctatgatattctacagaaaaggggttaaagaa

SEQ ID NO: 261491 - DNA, 440 bp, Glycine max
ctttgacaaaccggagtttgccacggtcaacattcagcgtgatctgttctatggttacgatactctcatggagaatgtctctgatccttctcacattgagtttgctcatcacaaggtcacgggaaggagagacagagccaaacctctgccattcaagatggattctcgtggttcatggggcttctctggagctaatgaagggaacccacagatcagtgccaagtttgttgcaccatgttatatgatgaacaagattgagattgataccaaactccctgtagttggtgaccagaaatgggtagtatggatatgttccttcaatgtccccatggcacctggtaagactcgctccattgtttgcagtgctcgaaacttcttccagttctcagtgccagggcctgcctggtggcaagtcgttcctagatggtatgagcattgga

SEQ ID NO: 261492 - DNA, 445 bp, Glycine max
gtttttgaagtatagagatggcagagacattcctatttacctcagagtcagtgaacgagggacaccctgacaagctctgtgaccaaatctctgatgctgtcctcgacgcttgcctcgaacaggacccagacagcaaggttgcctgcgaaacatgcaccaaaaccaacttggtcatggtcttcggagaaatcacgaccaaggccaatgttgactacgagaagatagtgcgtgacacctgcaggaacatcggctttgtctcaaacgatgtgggactggatgccgacaactgcaaggtcctcgtcaacattgagcagcagagccctgatattgctcagggtgtacacggccacctcaccaaaaaacctgaagaaattggtgctggtgaccagggtcacatgtttggctatgccactgatgaaacccctgaattgatgccattgagcca

SEQ ID NO: 261493 - DNA, 437 bp, Glycine max
gaaaaagatatctagtggttacaacaaggtaatggtgacggtcgaggatggcaggaactttgttgctgatgctgctatcataactgttcctattggaatcctaaaagcgaatttgattgaatttgaaccaaaacttcctgattggaaggtttcagcaatttcagatcttggtgtgggcaatgaaaataagattgccctaagatttgacaaagtattttggcctaatgtagaactcttgggcactgttgctccgacctcttatacctgtggctattttctcaatcttcacaaagcaacaggccatcctgttcttgtctacatggtagctggaaggttcgcttacgacattgagaaactatctgatgaagcagctgcaaattttgtgatgcaacagctcaagaagatgtttccaaatgcttctaagccagttcagtatc

SEQ ID NO: 261494 - DNA, 406 bp, Glycine max
gaatacaaatatatctaatcctcacaataaaagccggtaacagagtttactagatagaagagaatcttaaaattccaattccatataataaaaacttcagtgtccttaataaaataggcaatttggaaaacacttgagaaaatggaaggacaaactaaaacggcccagtacatccacaattcataacagacatgaatgcctaaaatcccagtaccaaagagatattagcaacaaacaccttctcccttcaaaaagatatggaggagaagttcaattctaattagcagtaaaatatttttactggtcatccggtttcggcgctgcttctttaatttcatctgctccatcgtcctgcatgtcagaggtccaaagtgtgaggttatcacgaaggagttgcatgatcaaa

SEQ ID NO: 261495 - DNA, 425 bp, Glycine max
gccgagattccgtgagttgcaaaaatgaagacgattctttccaccgagaccatgaacatcccggacggcgtgagcatcaaagttcatgccaaggtcatcgaagttgagggcccccgcggaaaattggtgcgagacttcaagcatttgaatctcgattttcagctcattactgacgaaaacggtaaaagaaagctgaaaatcgacgcgtggtttggttctcggaaaacatccgccgccattcgcaccgccttgagccacgtggagaatcttatcaccggcgtcaccaagggctaccgctacaaaatgaggttcgtttatgcccattttcccatcaacgcaagcatcggcaacagcaacaagtctattgagatccgaaatttccttggcgagaagaaggtgaggaaagtcgacatgcttgatggcgt

SEQ ID NO: 261496 - DNA, 441 bp, Glycine max
tgacattttgcgtgaaatttgaatacatatcagattcaatttttatgcacagataaaatttggacagaccttcaaagcaagcttcttcatctggttcattgctctaaaccatttcatcctaattaaaacagcactgtctggatgcttgtctgatgcttcaccaccttccttcaaccaagggtgttcgaaaaatatggaatggggtgatgacagcatcaatcagtagttaaactatcagaatgcaaatgggtgaaaatagttaccaagggcatcagcagttgtaatgcattccttagggtcacaagtcagcatttttctaaccaaatcttttgcagattctgaaatagagggccatggctcgttgtccatatctaacattccttccaaaatagcatcaaacatgcctttttcggtttctgaagttgaccaattcattgatat

SEQ ID NO: 261497 - DNA, 435 bp, Glycine max
cgacaatctggtcattgagggttttgtcaaaacgacgtggccagctcaaacaggccgtaacagctatggtgcaacaagctatgcaatatattgatgagacaccagatatcgaaactcgcatagaactcatcaaaacgttgaacagtgtgtctgcagggaagatatacgtggaaattgagagagctagattgatcaagaaacttgcaaagattaaggaagaacaagggcttatagctgaagctgctgatttgatgcaagaaattgcggtggaaacttttggtgccatggccaagactgagaaaattgcattcattctcgaacaagtccgtttgtgtctagatcgccaggattatgttcgtgcacaaatactctcaagaaagattagcccaagagtatttgatgccgatttatctaaggaaaagaaaaagcctaaag

SEQ ID NO: 261498 - DNA, 424 bp, Glycine max
ctcacacacacacaaagtgactcttccgatgatgttaatcggcgacggtgccggttgccgggaagtcctcgtcggcgttaaattagatcctcgcagccgcgaattgctgacgtgggctctcgtcaaggtcgccgagcccggcgacctcgtcattgcgcttcacgtcctcgactccatcactgagggaacggcatcgctgttatctctcgtgaagacgttcgattccgttctcggcgtttatgaaggcttctgcaacctaaaacaggttggtctgaggcttaaagtgtgtcgcggaggttcggtaaggaaggcgttggtgcaggaggcaaaggcgtttggcgtttccaccgtgattttgggaacttcgaaatcttatcatactattcgttcttccgcgtgggttgcgaaatactgcgcaaagaaa

SEQ ID NO: 261499 - DNA, 443 bp, Glycine max
gctctcttggactcagttcagtttcacgaccgatcctacaatggcgacagtcacgttttcggtttccggtaaaaccctaactctaccttatcaccccaaaaccccaatctccaactttaccccggtaacgaatcttcgcctccctccttctatcgtgacccgaacccgcaattgtaaccggattcgggcggcgctggatggggatttctcggcgaaaaggagcagcagcagcaacaacaacgaccagagggagacgataatgttacctggttgtgactacaaccattggctgattgtgatggagtttccaaaggaccctgcacccacccgtgaacagatgattgacacgtacctcgacactcttgccactgtcttgggaagcatggaggaagctaaaaagaacatgtatgcctttagcaccaccacttacactggatttcagt

SEQ ID NO: 261500 - DNA, 446 bp, Glycine max
agaatccataaaacacacaaaaactcagggtagggcagagagagagagagaaatgggaggttgggctatcgcggtgcatggtggcgctggtgtggaccctaatcttccactcgagcgtcaagaagaagcgaaacaacttctcacgcactgtctcaatcttggaatctctgctctaaattctaatcttcccgccatagatgtcgttgaacttgtggtgagggaattggaaacggatccgctgttcaattcgggccgtggatctgccctgacagaaaaaggaacggtggagatggaggctagcatcatggatggtccaaaacgacgatgcggcgccgtttcgggtcttaccaccgttaagaacccgatctcgctcgctcgtttggttatggacaaatccccacattcctatctcgccttctccggagccgaagaatttgctaggcaac

SEQ ID NO: 261501 - DNA, 448 bp, Glycine max
cgacttgttcacatcaagtgcaacagtgagagctttaccttgtgggcattacatgcattcatgttgctttcaggcatacacttgtagccactacacatgtccaatctgcagcaaatcactgggagatatggcggtttactttggtatgcttgatgctttattggctgctgaggagcttcctgaagagtacagggaccgctatcaggatatactctgccatgactgtgatagaaagggcacttcacgcttccactggttatatcacaaatgtggatcttgtggctcatacaatacccgggtaatcaagagtgaggcagcaaattctagctgcctttagtatgcttattttttgtaatgaaagtacagagcttgtaaatatttgtatagccaatccaattttccccaaaccaggaaactggttacctttcattttatacacaatgcgagt

SEQ ID NO: 261502 - DNA, 299 bp, Glycine max
  unsure (1)..(299): unsure at all n locations
cttattccangatctatttacattacctgcataactaactcgagcagtattactaaagagggcggatgagaaggaagattttgggttgcgtctacacttgtgctatcctgaaaaccctggaacttatattgatatcattctagtttgatcttatgattctaatcacttgcttcagaaaccctatcggcacgaccctgttagttcttaagcttgaatatcactcttttatggaatccaagtgaaccgtgtaccttttgcggtcgatagctaacaggaatcttgtgtgtcatctgcaaaca

SEQ ID NO: 261503 - DNA, 437 bp, Glycine max
  unsure (1)..(437): unsure at all n locations
acggtatttccctacctctcccttcaagatgcagatcttcgtcaagaccctcaccggcganaccatcacccttgaggtggaaagctctgacaccatcgacaacgtcaaggccaagatccaggacaaggaaggaatccccccggaccagcaacgtctcattttcgccggaaagcaacttgaggacggccgtacccttgctgactacaacattcagaaggagagtactcttcacctcgtcctccgtctccgtggtggcatgcagatcttcgttaagacactcaccggcaagaccataaccctagaggttgaaagctccgacaccatcgataacgtcaaggccaagatccaggacaaggagggtatccccccggaccagcaacgtctcatcttcgccggaaagcagctcgaggacggccgcaccctcgccgactacaaca

SEQ ID NO: 261504 - DNA, 330 bp, Glycine max
cccacgcgtccgcccacgcgtccgacaccatgtggttgaaagcctgctgggatgattgttgtggttttatgtgtatatatattggtgttgtggttgttatactgaagtggaggagagggtgaaaaagttacctgatgcacattgagacgacatcgattgagtccatgtgcaaaattggtttttgtttgtgtggaagtctctagcttcctgtgatgtaatgttataatattaccttgtagttgtaaggagaaagcaatttggcgctttcttataagaaaacaacccaatgtaataacataaggtatattaattcaatcatgttttgctttt

SEQ ID NO: 261505 - DNA, 444 bp, Glycine max
aaaaaatcgtagttggaggcgccgcactccactccactccaatcaatcagatactagcgatggggaggaagcgaaaggtagcaccgaaatcttctgtatccgccgagcccccgctgaagcaacaccaaccaaaacccgaaaatgccgctcaggaatacgaagaagaggtcgaagaggaagttgaggaagaagaggtagaggaagaggtcgaagaggaagaagaagaagaggaggacgaagaggacgaggaagaagaagaagaagaccaaaaagaccaataccagcaccaacaacaacagcaagacgaagacgacgacccgatctccaagcttctggaaccgttgagcaaggaccagctcctcatccttctctgcgaggcggcggccaagcaccaagacgtggctgagaggatccgaagggcggccgacgaggatccggtgcacc

SEQ ID NO: 261506 - DNA, 445 bp, Glycine max
acgctttcttgcaaaaatacggtatcaagttgaacgatgcgattctcgctgaggataagcacaaacctgtgtatgaagaattggctaacaatcctaatgtggagtacattgctggaggtgctactcagaattcaatcagggttgctcagtggatgcttcaagcaccaggtgccacaagttacataggttgcataggaaaggacaaatttggagaggagatgaagaagaaatgtacacttgatggtgtaaaggttaactattatgaaatcgacaatacacctactggaacttgtgctgtttgtgtggttggcggtgaaaggtcccttgttgccaacttatcagctgcaaattgctataagtctgagcatttgacgagaccggaaaattgggcattagttgaaaaggccaagtatttctacatttctggctttttcctcactgtatc

SEQ ID NO: 261507 - DNA, 455 bp, Glycine max
aattccggtcgcccacctccgacgattccacccatcttgattccaactccactcccggaatcagttcgatagctcattatatgtgtcgaatgaccaattaatcagcaatgctcaccaaacccaaagcactataatgatcatggcaccgttgggttagctcttggtcctctaatcatcgacatcagggttcatgctggcagctcttctgctataaatccttttgatgattggtcccacaacagggacaagggggctgatgaattcttttcggaagaagaaatccgcttcagaagtcacgagatgctagagaatgaagatatgcagcagttgcttcgcctcttcagcatgggaggtcatggctccatgagtgctgaggatggcttttcattcccatcattcatgccatctcccagtataccgaactatgatgaggatcgctctcgcccaggcagagc

SEQ ID NO: 261508 - DNA, 440 bp, Glycine max
cccacgcgtccgatatatatatatatatatatatatatatatatattatttaatttcacacggaaaagcgattatttaattttgttggaattttgaatttataagtatgcagtagtatttaatatattaagtttttttcttcttctcagaaacgccccttcatattattacagaatcccctaaatgtgggttcgacgccaggcaagggtttcaaaaacttctatttatattacgggggattattattttcttataggttatgcttttctcttgtcataagccaagtaaaagtgctttttcttctttttttgaaagattgattctgaagttcccacaacaaaaacacaaactttactcgttccagaaaaggcattggtgcagatcgggggattattatcaatatatgattagagacaaatctacaatataataatgacatt

SEQ ID NO: 261509 - DNA, 448 bp, Glycine max
ctctttgcaacacaacaaaaaaagacaacacagagagaagcgtcttaataaacgctcttctgtgaaaaacctgatttcttctcttcttctcttctctttcgtttcgatcttcgatctctgaaaatgagagagtgcatttcaatccacatcggtcaggccggtattcaggtcggaaacgcctgctgggagctctactgcctcgaacacggcattcagcctgatgggcagatgccaagtgataagactgttggtggaggtgatgatgctttcaacaccttcttcagtgaaactggggctggaaagcacgtgcctcgtgcgatttttgtagatctcgagcctactgtgattgatgaagttaggactgggacataccgccaactatttcatcctgagcagctcattagcggaaaggaggatgctgcaaacaactttgcccgtggccactata

SEQ ID NO: 261510 - DNA, 446 bp, Glycine max
aggatatctgtaacttttattgataaggatggtgaggagaagcatatcaaagtccctgttggaatgtctatgttagaagctgctcatgaaaatgacattgaactagaaggcaagagctttgattttataattctattatttcacctcaagatttcggtcttctgaattctgcttttttttttctcttttaaatgtttgagatagccagttggtcatatttgatccatctagccaccccacctgttgggttaatttttatttttttagtttttttagttttgctagaattacttttcattttgatagtctgcctttactttggaaaaagctcgccaaaaatgagactgtttctaataggtttagactcactacacttttacttgcctactttagagacaagttcacttgagaagaacattatctcctcctttgcttatgatggatat

SEQ ID NO: 261511 - DNA, 439 bp, Glycine max
aaaacatctcaatgggttcttcttctattacaacatcgcccgcaaccatgaccatggctgcgatcgtgctcctgttcacggtctttgccgtttcctccgccctagacatgtcgataatctcgtacgacagcgcccacgcggacaaggccgccacgttgcgcaccgaggaggagctgatgtccatgtacgagcagtggctcgtgaagcacgggaaggtgtacaacgcgctcggcgagaaggagaagcgcttccagatcttcaaggacaacctgcgattcatcgacgaccacaactccgcggaggaccgaacctacaagctcggactgaaccggttcgctgatctcaccaacgaggaatacagggccaagtacttgggaaccaagatcgatcccaaccggaggctcggaaagaccccgagcaaccgctacgcgccacgtgt

SEQ ID NO: 261512 - DNA, 441 bp, Glycine max
caaactctcgcatcaatcttcgtttctttagagagagagagagagagagagagcgcggtgtcggaatcgtgttctccgattgcaccggtggttcgatttatggtcgtcggagaatcgccgatctcgctgagagtttcgaatcgcaccggtgaccggaggagatggtgaattccatggtggaacgcgccacgagcgacatgctcatagggcctgattgggccatgaacatcgagatctgcgacatgctcaatcatgaccctgggcaagcaaaggatgttgttaaaggtataaagaagcggattggaagtaaaaattcaaaagttcaacttcttgcactaactttgttggagacaatcataaagaactgtggagatattgttcacatgcatgttgcagaaagagatgtgcttcatgagatggtgaaaatagtaaagaaaaagc

SEQ ID NO: 261513 - DNA, 446 bp, Glycine max
gactcgttcttcttcgtcgttatcttcttcttttgttgtttgtgtgtttgttttttctctcacctgaaaatgtcttgctgcggtggtaactgtggttgcggaagcgcctgcaagtgcggcaacggctgcggaggctgcaagatgtacccagacttgagctacaccgagtcaaccaccaccgagaccttggtcatgggagtggcaccagttaaggctcaattcgagagtgctgaaatgggtgttcccgctgagaacgatggctgcaaatgtggagctaactgcacctgcaacccctgcacttgcaagtgaggtgttggagagctaaagcttcaagcagaaatggcccttagaaataatgataaaaactatatgtagtttcaaaacttcaaaattatgtagtatgtattatgttgcactctggtgttttgtgtctaaacaaacaccct

SEQ ID NO: 261514 - DNA, 413 bp, Glycine max
cagcaaaaccaaaataacactccagatggttcaggagaggtgcctttgaagcgtaaacgtgggcgtccacggaaatacccaaagccagattcagaggagagttcctatatcctagttagtcaaaatagaaggcagaatcctgttcgtgctgaacaagctccagtacctcctggatttgaaggggttaatggaaatcaacagcttcaaaggggtcaagagaatcattcaaataatgcaatggtgggccagctagtttccggcgtaattgaggctgcatttgatgcatgatatttgcttagtgttagagttggtgattctaatactactttgagggggctaatcttcaagcctggacgatacgtttctatatcacctgataatgatgttgctccgagtgttccaatgatccaaag

SEQ ID NO: 261515 - DNA, 448 bp, Glycine max
cgctgttgttgttgctgcaccaccgaacaacttcccctgtaaatcgcgtttcgtttgtgcagggttttaaaagatggctgatgctgaggacattcaacctcttgttgttgataatggaactggaatggtcaaggctggttttgcaggtgatgatgctcctagggccgtgttccccagcattattgggagaccacgccatactggtgtaatggttgggatgggtcagaaggatgcttacgtgggtgatgaagcccaatcaaaaaggggtatactcaccttgaagtatcctatagagcatggcatagtcagcaactgggacgatatggagaagatttggcatcacacattttacaatgagctacgtgttgcccctgaagaacaccccgtacttcttaccgaggcaccactcaatcccaaggccaacagagagaagatgacccaaattatg

SEQ ID NO: 261516 - DNA, 436 bp, Glycine max
ctcacccaccctccatacacactctctctgagtcggtcgagttgaatcggtgtgagtcagtgaccgagtcgaaccatgtcggacgaagaacaccatttcgaatccaaggccgatgctggagcctccaagacctatcctcaacaagccggaaccatccgcaaaaacggttacatcgtcatcaagggtcgtccctgcaaggttgttgaagtttctacttccaagactggtaagcacggtcatgccaagtgtcactttgttgggattgatattttcactgccaagaagcttgaagatattgtgccctcttctcacaactgtgatgttccccatgtgaatcgtactgattaccagttgattgacattgctgaggatggatttcttagcttgcttactgaaaatgggaacaccaaggatgacctgaagcttcctactgatg

SEQ ID NO: 261517 - DNA, 435 bp, Glycine max
ggcatcgaaagaggaagcataagggcaactgttctgatagaaacacttcctggagtgtttcgaatgaatgaaattttgtatgaactgaacgaccattcagtgggtttgaactgtgggcgttgggattacattttcagttatgttaagaccttccaagctcatccagatcgcctcttaccagatagggtcctagttggcatgactcaacacttcatgaaaagttattctgatcttctcatcaggacgtgccacaggcgcggcgtgcatgctatggtaggaatggcagcgcagattccaatcaaagaagatccagtggctaacgaggtagcactggaacttgtaaggaaggacaagcttatagaagtgaaggcagggcacgatggaacttgggctgcgcaccctggtctcattccagcctgcatggatgatattaac

SEQ ID NO: 261518 - DNA, 438 bp, Glycine max
ttcacctcatgtcagatcacaaccacaagatatccaattccgctgtcaatgggagtgattcgctgaatggtcacatcatatccactacagttggaggaaaaaatgggaagcccaaacagactaaaagttacatggcagaatgcattgtggggactgggtcatttggaattgtcttcctggctaaatgcttggaaactggcgagccagtggccattaagaaggttttactggacaaaagatataagaatcgtgagctacagttaatgcgcttgatggatcatccaaatgtgatctctctgaagcatcgtttcttttccactacaagtgcagatgaactttttcttaatttggtgatggaatatgttccagagtctatgtatcgagtctcaaagttctatagtaatactaatcagagcatgccacttatttatgtaaaac

SEQ ID NO: 261519 - DNA, 352 bp, Glycine max
cggacgcgtccgcccacgcgtccgcccgaatatagagcatatcaagagcaagttctcagcagcagctttgggtttgcacaggctctgagtgagataagctatcaacttgtctctggtggaaccgagaatcacctggttttggtgaatctgaagaataagggtattgatggctccagagttgagaaggtgttggaagcagttcatattgcagctaataaaaacactgttcctggagatgtgtctgccatggttcctggtggcatcaggatgggaacccctgctcttacttctagaggatttgttgaggaggattttgtcaaggtagcagagttttttgatgcaacactgaaga

SEQ ID NO: 261520 - DNA, 442 bp, Glycine max
gtttctagttcaaaattcttattacaagcattcttgccctggtagtatgcgccttgttttatgaatttaggagaacactttgtggcaatacaaataaaatctgtaatgcacctcaagcaccacgtgcatggcctatcattggccatttgcaccttttgaatggtcatcaactcacacacaaaacactcggcatgatggctgagaaacatggtccaatcttcacaataaaacttgggtcatacaccgatctagtattgactaaatgggagatggccactgagtgtttcactgtacatgacaaagcattctccaccataccatgtgttgcagactcaaaactaatgggctacaactataccatgtttggcttcactccatatgagtcttactggcgtgaggtaaggaaattaactaccatataacttgttctaacaatcgtctt

SEQ ID NO: 261521 - DNA, 439 bp, Glycine max
cccacgcgtccggtctttgtatcacgaaaactatacgattcgattccttgttttcaatgggcgaccttcttgaattctcaatcttcttcttcttcgagaagccgctggagttacgatactctcaagaatttccgtgagatctctccgctggttcagaatcacatcaaacgggtttattttacgttatgttgcgctgtggtggctgctgctgttggagcttttcttcatgttctgtggaacattgggggttttctcaccacgttggcttccattggaagcatggtttggttgctatctacaccccctgttgaagagcaaaagaggttgtctctgttgatggcttcggccttgtttcagggcgcttgcattggacctctgattgatttggctattgccattgatcctagccttattggtagtgcatttgtggcaacttctt

SEQ ID NO: 261522 - DNA, 439 bp, Glycine max
caaaacttgaaatcaaatcaggagcgggggaaaaagaaaagagagagaagtagggttcgaaaatggcaggagaatcatcagagggcgaagaagaaaccaagttaagcggagggagcttattgctgaccgttgacgacgacttaacggaaatgggaaagaaagccgcttggagcgtcagttcctgcaaacccggtaacggcgtttcctctctccgtgacgacaatctcgaaacctattggcaatccgacggagggcaaccccatttggtcaacattcagtttcaaaagaaagttagacttcagttgattgtgctgtacgtggatttcaagcttgatgagagttacacgccgagcaaagtttccatccgtgccggtgatggttttcacaacttgaaggagattaagaccgtggaactcgtgaagccaactgggtgggttta

SEQ ID NO: 261523 - DNA, 438 bp, Glycine max
gcaccacattcacctgaggcttccaaagcaatggcttcccttgcagcatccactgctgctggttcccttggcatgtcagaaatgcttggaaaccccatcaacttcagtggtgccacaaggccagctccatctgcttctagtcctgcctccttcaagactgtggctcttttctccaaaaagaaggctacaccaacacctccaaaaaaagctgctgctgctgctcctgccaatgatgagcttgccaagtggtatggtcctgacagaaggatcttcttgcctgagggtctcttggaccgatccgaaatcccagagtacttgaccggagaagtccctggagactatggttatgacccatttggtcttagcaagaagccagaagactttgccaaatatcaggcatttgagttgattcatgccagatgggcaatgcttggtgct

SEQ ID NO: 261524 - DNA, 423 bp, Glycine max
ctcaagtctctcgaagcctctttctctctcttctagaagctatctgtgtttggtgttactaggtctccaacaagcaaagtacatggttgatttggaaatccaggtccccaccccattcgacccgtttgccgaggcgagagaatcggatgcccccggagcaaaggagtatgtgcatattcgaattcagcagaggaatgggaagaagagtctgaccacagtgcaagggctgaagaaggagttcagctacgagaagatcctcaaggacctcaagaaggagttctgctgcaacggaaccgcggtgcaggacaaggagcttggcaagatcatccaactccaaggcgaccagcgtaagaacgtctgccacttcctcgttcaagctggccttgtcaggaaggaccagatcaagattcatggtttttgacc

SEQ ID NO: 261525 - DNA, 435 bp, Glycine max
gtttttctttttctcttctcactgcatcgcttcaggttcttctgaaaagatgggtcgcgtggatgttggtaacttggattcacgagtcactgagagagatctcgaagacgaattccgcgttttcggagttattcggagtgtttgggttgcacgtagaccacctggttatgcttttattgactttgatgaccgcagagacgcacaggatgctatccgtgaattggatgggttttcctcaactagctagttaagtcttctttttggcctatggggcaagcagatgctgctctctctttcttctacttctgccttggcctgcagtaatggttttttcttggttgtgtcttcgtcaaagtctgctgctttgtacagtttgactacttctactactactgcatgtaaagagaattaagaatgtgaacacaggggatttgc

SEQ ID NO: 261526 - DNA, 447 bp, Glycine max
caacaagggaaacagaatattattccattttttcacttccacactttcttgcattcattcccgattttcgactatggcctcttcagctcaattttccaccactttggtcgtactatgtctcttccaattcctagcaggttcatattcaacgacattcacaattgtgaacaagtgcagctacacagtttggcccggcattttaaccggcgccggaacctcaccgctctccaccaccggcttcgtcttacaacccggcgagtccaacgtgatcaccgtgccggccgcctggtccggccgcctctgggggcggaccgtctgcacccaagacgccaccggaaaattctcctgcgtcacaggcgactgcggctcctccgccgtggaatgcaacggcgcaggagccgccccgtcggccacgctcgccgagttcacactgaacggcgccggcgg

SEQ ID NO: 261527 - DNA, 427 bp, Glycine max
caagggaaacagaatattattccattttttcactgccacactttcttgcattcattccgcattttcggctatggcctcttcagctcaattttccaccactttggtcgtactatgtctcttccaattcctagcaggttcatattcaacgacattcacaattgtgaacaactgcagctactcagtttggcccggcattttaaccggcgccggaacctcaccgctctccaccaccggcttcgtcttacaacccggcgagtccaacgtgatcaccgtgccggccgcctggtccggccgcctctgggggcggaccgtctgcacccaagacgccaccggaaaattctcctgcgtcacaggcgactgcggctcctccgccgtggaatgcaactgcgcatgagccgccccgtcggccacgctcgcctagttacac

SEQ ID NO: 261528 - DNA, 448 bp, Glycine max
  unsure (1)..(448): unsure at all n locations
agcgcattatagcacaccacacaaaaaagcaaagcagaaaacaactgttacttacacacgccatgggtatgggtatgggtatgggtatgggtaaatgagtggtaaatgagtggtttttgagcagaagcagttaaaagagaaagggattcagcgaagatgacatcggttggtgtggcaccaacttcgggtttgagagaagccagtgggcatggagcagcaggtgttgatagattgccagaggagatgaacgatatgaaaattagggatgatagagaaatggaagccacagttgttgatggcaatggaacggagacaggacatatcattgtgactaccattgggggtagaaatggtcagcccaagcagactataagctacatggcagatcgtgttgtanggcatggatcatttggagttgtcttccaggctaagtgcttggaaactggtg

SEQ ID NO: 261529 - DNA, 366 bp, Glycine max
  unsure (1)..(366): unsure at all n locations
atcgctttttttgtcagtacgcggattatcctatctttctctagcagtagatagatccgccaggaggatgcaactccggatcgggctactactacgatctcgggattagtagggatgcctccttctctgatattcgcactggctaccgaaaactcactatgaggggggacccggacaaaagggctcttaatcccgcaaccgccggcgatagccaagcgccggtttcatcaaatgcaagaagcctactcagttctctccgatcagtctaaaaggtcaatgtacgatgcggggctctacgatcctttggaggaagaagaccaaaatttttgtgacttcatgcangagatgatctctatgatgaacaat

SEQ ID NO: 261530 - DNA, 412 bp, Glycine max
gccttatctatctaatatactatacaaaaagttcttatcagtgacagagtaaaggaggcataccgatgacgatggcgatgacggcgtcgcacttgcggtgcggttgggggtggaggccaacgccgaatcagcagcagcaacgacgtcgtatggttccggtggtgtgttccatcgctatagagaacgcgaagaacaaagagagagcgaaactgaagaagctcttcgatgaagcgtacgagaggtgccgcactgctctcaccgaaggcgtttacttcactgtacaacaattcaccgacgctctcgacaagtacgacttcaacgccgaaatgggcaccaaggttaagggcactgtttttgccacggataacaatggagcttatgttgacattactgctaagtccacggcctactt

SEQ ID NO: 261531 - DNA, 433 bp, Glycine max
gtggcattgtagggactagggattgtttcacagaacacctctgaaattcaaatcccttttttttgtttgatattaatctatggtaggatatagaatctgaagctgaaaaaaggggttaattgttttgcagaatcagtataattgtagagagcgagatggatcactatggttcttctggaggaagctggacaatgatcccaacccacaattcccaatcccaatcgaaccaggaccctaacctctttctgcaacaacaacaacagtttctccagtcacaaccttttcagcaagcactagcgcctcaatctccatttcaacagcagcagcagcagcgtcttctacagcaacagcaacaacaacaacagccgcagaaccttcaccagtcactggcctctcactaccatctcttacacttggtggagaatttggctga

SEQ ID NO: 261532 - DNA, 441 bp, Glycine max
gccaacatagcattacccatggtgctaaccgggttattactctattctcgctccgtaatctgcatgctcttcctcggtcgtgtgggtgagcttgccttagctggtggctctctcgccattggattcgccaacatcacgggctattctattctctcgggcctcgccatgggcatggagcccatttgcggccaggcttttggggccaaaaggttcaaacttttgggtctcgctatgcagaggacaatcgtcttgcttcttctaacttcagttttgatttcattcttgtggctcaacatgaagaaattattgatcctatgtggccaacaagaagacatcgccaccgaagctcaatctttcatactattttctattcccgatcttgtagcacaatcattgctacaccctttgagaatctacttacgaagtcaatctataacccta

SEQ ID NO: 261533 - DNA, 421 bp, Glycine max
cgcattctcaatacccttttgatttgtgaaaggaaagcaaacatggttgatcaggtccaacaccctacagtcatggacaaggttgctggtcagctccatctccgttctggtctttcatctggtattagaagttatgatggagcctaccgccacccagctatgtaccaaagaccctcttttgggaattactcgaatgctgcattgcagtttcctgtgatgcccacatgcaaagctaccatggatttgtctgctactgcaacatctgcctcacccgtctttgttgctgctccagcagagaaaggccattttcttttagactttctcatgggaggtgtttcagcagctgtctccaaaactgctgctgctcccattgaacgtgttaagcttttgatccagaaccaggatgagatgatcaaaactg

SEQ ID NO: 261534 - DNA, 439 bp, Glycine max
  unsure (1)..(439): unsure at all n locations
cccacgcgtccggcggcagcgacggtaaccctccaacaacaacacttccgctgcgaaaaatgtctctggtggcgaacgaggatttccagcacattctgcgtgtgctgaacaccaacgtggatgggaagcagaagataatgttcgcaatgacctccatcaagggtattggaaggagattcgccaacatcgcttgcaagaaggctgatgttgacatgaacaaaagggctggtgagttgactgctgctgagttggatagtgtgatgactgtggtggcgaaccctatgcagttcaagatcccagactggtttttgaacagaaagaaggattacaaggatggcaaatactctcaagttgtgtctaatgctcttgatatgaagctcanggatgatcttgagagactcaagaaaatcagaaaccaccgtggtttgaggcattactg

SEQ ID NO: 261535 - DNA, 438 bp, Glycine max
cccacgcgtccgcccacgcgtccgcccacgcgtccgtgttgttgtaactcgttcttcttcttttgttgttctgtgtttgtgtttgttttttctctcacctgaaaatgtcttgctgcggtggtaactgtggttgcggaagctcctgcaagtgcggcaacggctgcggaggctgcaagatgtacccagacttgagctacactgagtcaaccaccaccgagaccttggtcatgggagtggcacctgttaaggctcaatttgagggtgctgaaatgggtgtgcccgctgagaacgatggctgcaaatgtggaccaaactgctcctgcaacccctgcacttgcaagtgaggtgttgggagagcaagcttcaagcagagatagcccttaattaggaataatgataaactattaatgtgtagctaaaaacttatgtattatgtct

SEQ ID NO: 261536 - DNA, 413 bp, Glycine max
cccacgcatgcgcccacgcgttcgaccacgcgtgcgtgttattgtaactctgggttcttccggtgtggggcagtgttagtatctcactttactctctcctgaaaatgatttgctgtgttggtcactgacgcctcggtaactaactgcaagtgcggcaacagctaccatacgctgcaagatgtacccaaacttgagcatctctgagataaccaccaccaataccttggtcatggtagtggtacctgttaaagcacaattactggatgctgaaatggatattccccattagaactatggttgcaaaagtagaccaaactgatgctgcaacccctgcacttgcatgtgaggtgttgggagaccaagctttacccatatatagcccttaattaggaattatgataaactattaatgt

SEQ ID NO: 261537 - DNA, 404 bp, Glycine max
cagggtggctttatgatgtctcagacttctctgctcttccaggaaggggcatggagtgcttggtagatgggaggcgtattttggttggtaaccggaagctgctggaggaaaatggcataaatatttctacagaagtcgaaaattttgtagtagagcttgaagaaagtgcaaagacagggatactagttgcatatgatgatatattaattggagtcttagggattgcagacccactaaagagagaagctgctgttgttatagagggcctacagaaaatgggagtcatacctgtgatggttacaggagataactggagaacagctcgagctgtagccaaagaggtgggcattcaagatggtagggcagaagttatgcctgcacgaaaggctgatgatgctggatca

SEQ ID NO: 261538 - DNA, 439 bp, Glycine max
gtttatatcttgcctctcacaaggtctatggtggagaggcaaggatttcaactgtgagggaattatttcctctgatggaagacaagaagagccttgcttcatctgaagagcgttctcagataaagggaaaagcttctctattagctgcacttgactactatgttggcttgcatagtgacatcttcatctctgcttccccaggaaatatgcacaatgcattggttggacaccggacatacttgaacttaaagactataaggccaaatatggcattgatgggtcagcttttcctgaataaaaccatagagtggtcagagtttcaggatgcagtggttgaaggtcaccaaaatagacaaggggaactaaggctgaggaagccaaaacaatcaatatatacgtatccagctcctgattgcatgtgccaagcttagtagtgact

SEQ ID NO: 261539 - DNA, 394 bp, Glycine max
  unsure (1)..(394): unsure at all n locations
gaggaaccctagctagggtttggaagaagctgatccgagaagatggtgcagcgtctcacctaccgcaaacgccacagctatgctaccaaatccaaccagcacagagtcgtcaagactcccggtggcaagcttgtttatcagaccacgaagaagagggccagcggacccaagtgccctgtcactggaaagaggattcaagggattccacatttaaggccagcagagtataatagatcaaggttacacagaaaccgaaggactgtgaaccgtgcatatggtggtgtgttgtctggcagtgctgttagagaaagaatcattcgagctttcttggttgaagagcaaaagatngtgaaaaaggtcttgaagatccaaaaggacaaaggaaaacaagctt

SEQ ID NO: 261540 - DNA, 405 bp, Glycine max
gtctgccacaacacacagtcgcacacagcgcatgaatataagcagagtaaacgtaatgtggaagagaggcttggtcggcgccgtgggtggtctccggcggccatattcgtcaggaggtggcggcatctcctcctccgtgaactcaatgctcctccgctccctaaaggatcactatcaagaagtcgccaaaatgaacatgccccctaaagtgagtgctccatcgccgttcacgatcgtgaagggagctctggactcgcacggtccggttctgaagcgcagctacggcaacgaagaggtgagcatctatgtgatgcggttgttgacccccgaggacgaggattccgccatcgaccagctcttcatccacgtcgatgtctccaaacctcagcagaacgaatccttgat

SEQ ID NO: 261541 - DNA, 410 bp, Glycine max
  unsure (1)..(410): unsure at all n locations
cccacgcgtccgttccactctatatccatcgtcaacagtgaagtgcgaatactcagcaactggagctggggaaccttgtctctactcgctctcgtccccgccggagatccaccatggccggcaaccccgccaccacttcctcctccgcattatctcccgagaaatttaatttcaatttctcccccgataacccctcccgaatcaccctcacttcggatcaggtcaaccactgcacccaagccctcaacattctgaaggagaagctccacgctcctaacgtgatcactcangagttcgcacacttgcaggcgaacaggataacgccgagcgagatgaggagaagatgcaccgtcgcgtatgacgacgtcaatttgaggaaaaaccgatacaccgacgttctgccatttgac

SEQ ID NO: 261542 - DNA, 446 bp, Glycine max
ctctcttcttcagtggtggaagctactagaacactagtttgttgagcactgcgatgaggaagtggacggttgcttccgctctccttcttctctctctcctctttctctttgcagatcaaggtcgaaagtttcaggcgaatgccgagggagattccgacgagcttgtagatccacccaaggtggaggacaagatcggtgctgtgcctcatggcctttcaaccgattcagatgtcgtcaagagggaggcggagtcgatctcgaagagatctctccggagcaacgcggagaagtttgagttccaagcggaagtgtcgcggcttatggatatcatcatcaattctctctacagtaacaaggatatcttcctcagagagttgatttccaatgcttctgatgctttggacaagattaggttcctctccctcacggataaagaagtgttggga

SEQ ID NO: 261543 - DNA, 349 bp, Glycine max
cccacgcgtccgtacttgctatggaagtcagtcaaatggtgacacagggaatgtgggaacgcgactccatgctgcttcaacttcctcatttcacaaaggatctggctaagaaatgccaggagaacccagggaagagtatagaaactgtgtttgatttattagaaatggaggatgaggagaggcaaaaattgttgggcatgtcagatttgcagttgttggatattgcccgattttgtaaccgattccctaatattgatttgtcatatgaggtgctggacagtgacaatgtgcgggctgtggaggttgtcactgtgctggtcactcttgagcgggattttgagggaaagac

SEQ ID NO: 261544 - DNA, 422 bp, Glycine max
acagattgtgaagaagaacgaaactggctggaccttccgcgagacgtggtgtgcacgattttccagaagctgggcgcaatcgaaatcctgacgcgcgcccagcgcgtgtgctccgtgtggcgcggcatctcgaaggagcctctcctgtggcgcaccatcgacatgcgcaattcgggcgacattgaaaccaacttcgtgttcttggccatgtgccaccgcgcaattgactacagctccggccacttgctccatatcaacatcgagtatttcgccaccgatgatctcctccgccacatcacccattctacaagtaatctacgaagcctacgtcttgcatgttgctaccaaatttcagatgaaggattgtgtgaaattgcaaaagagcttcctcagctggaggagcttgatatatcaatcagcag

SEQ ID NO: 261545 - DNA, 426 bp, Glycine max
cagcgatcgaagtttcacatcagtcttatccagtttagggtttcggttccttacgctacctttgacgtatcgaaaccttaaatttgggattaggtctgagcaatctggttggtagaacctttggtcttagagagtcaagttttatgtctggattagacgatcaaattcctactgccttcgatccttttgctgatgcaaatgctgatgactcgggtgctgggtcaaaggagtatgtgcatattcgcgttcagcagcgaaatggtaggaaaagcctgacaaccgttcagggattgaaaaaagaattcagctataacaagatacttaaagacgttaagaaagagttctgttgcaatggaacagttgttcaggacccagaactaagacaggttattcaacttcaagtgatcagaggaagaaatgttctac

SEQ ID NO: 261546 - DNA, 369 bp, Glycine max
cccacgcgtccgatctttatataataatataaataagaatgaaaaaatgaaaaaaaaaaaggaaaggggaaaaaaaaaagaatctatataaatataaaaataatatatataaaggacaaaatagaaaatcgaggtacccaatttaatgataaactttccttccattttatgttcctatagtaggcctagtatttccggcaattgcaatggcttctttatttctttatgttcaaaaaaacaagattttttagatacagaaaacaaagtaaaattctggggttttttattccccaattataatactaaattcaaaaaaaggagagtaatgagtataatctttcgctcagacgatgtactgatatattctat

SEQ ID NO: 261547 - DNA, 420 bp, Glycine max
taatatttttatataataatatttataatattaaaaaaaaaaaaaaaaaattgtaaattgttaaattttagtagtttttatttaaaaaaaaattattttatttaatttattttttatatttttatttattttttaaatttattaatttataattttattatttatattttattttttttttttattttataatattaatttattattttatatttatttatattttttaataaatataaatattatttattttatttatttaatttttttttttttatatatatttatttttttaatttttaatatttattataatttattgttttatttttattttatttatatttctttcaatttttatatattttattttaattaatatttatttttttataaatttatattatttttttttttttt

SEQ ID NO: 261548 - DNA, 396 bp, Glycine max
cgatcttattacgtgaccttgcttttcccaatggtgttgccttaagcaaagacggctcatttgttctggtagcagaaaccgctacttgcaggatcttgcagctttggcttggtggacctaaggctggccaagtggatacatttgcggttctgcctggtttcccagacaatattagaagaaattcagaagggcatttctgggtggctctgcatgcaaagagaagccctttcgcgaagtgggtttcttccaatccttgggtgggaaaggcattgcttaagattggatttaatttcaagcagctgcacacatcatttgcagggtggaagcctcatgctgctgctgtaaagctgagtgataaaggagagatattagaagtcttggaagattgtgatggga

SEQ ID NO: 261549 - DNA, 445 bp, Glycine max
gtagtttcatccttggccaatctgcatggttggactcttgagaatctaaaccttgatggtgtcaaaaatatcagtgatgctagcttgatggcaattgctgaaaactgtgcattgctatgtgatcttgatgtctccaagtgcacaatcactgatgctgggattgcagtcctggcacatgccgaacagattaatctgcaaatcctttctttgtcaggttgcactttggtctcagacaggagcttaaccgctctgagaaaattaggccacacccttttgggactaaacatccaacactgcaatgcaatcaacaacagcacggttgacacacttgtggagtttctctggaggtgtgacatcctctcctgagctgaaagaagaactaatctcacttgcaatttaagccaggatcacatcatgcaagaagcttgtatgcttagtgttgcac

SEQ ID NO: 261550 - DNA, 439 bp, Glycine max
  unsure (1)..(439): unsure at all n locations
cccacgcgtccgcaagaacattagcttcactgtttgggatgttggtggccaggagaagatgggtcccttgtggaggcactacttccagaacacccagggtcttatttttgttgtagacagcaatgatagggacagagttgttgaggccagagatgagttgcataggatgttgaatgaggatgaactgagagatgcagtattgcttgtgtttgccaacaaacaagatcttcctaatgcaatgaatgctgctgagattaccgacaagttgggtctacactctctcagacagcgccactggtacattcagagcacctgtgcaacctctggggagggcctttacgaaggtctggactggctttccaacaacattgccaataaagcttaatgcctttgggagtcttgcggattggtaattctggatgcangggtgaacattatc

SEQ ID NO: 261551 - DNA, 252 bp, Glycine max
  unsure (1)..(252): unsure at all n locations
aaaaaaaaaaaaaaaaaaatttttaattttaaaaaaaaaaaaaaaaattcgtaatgttgaaattttgaaattggannaaaaataaaataaatattatttataaatttttaatatattatttataataaatttttaaatttattaattaattttattttttatataaatattatattattatttattaattattattttattattatttttaataattaaaaattatttttttttatttttttatttattttt

SEQ ID NO: 261552 - DNA, 442 bp, Glycine max
cttttctcttctccctttttctctctgtctctctctctcggtctcgctcttcttctcatcaagcacagagttacagactcaccgatcttccgattctctttcgtcttggtttatgagctcgaaggagagacccactcttggtggcacgcggattaagacccgcaaacgaaatattgctgcgccgctggaccctgcagcattctcggatgcagtggtccagatttatttggataatgctggtgatctggaacttattgctaagagtattgaatcttcagaccttaacttttcaagatacggtgacaccttttttgaggttgctttcactgggggtcgtacacaacctggaactaccaagcctgatgagggggaccgccacccatactctataatagagtgtgagcctaagcgtgaagtcatttaccatctgtaatctacatac

SEQ ID NO: 261553 - DNA, 377 bp, Glycine max
cccacgcgtccgatggcatcttcaccaaccttaataccctttctcctcatcttcttcctctggcactggcactttcaccgttcctactacctccccctctccgaggagaaccccgaagatgacgtcatagtctcgtcgccgaagggaaccttcaccgcagggttcagccccgtgggggagaacgcgtactgcttcgcgatatggttctgcacgcaagcgacgacaaagaccgttgtgtggatggcgaaccgcgatcaaccggttaacgggaaacggtccacgctttcgctcctcaagacggggaacctcgatttaaccgacgcgggacagttcgatgtctggtccaccaacacgctctgctcgaagacgcttgagct

SEQ ID NO: 261554 - DNA, 412 bp, Glycine max
ggaggagtgaatagtgaaatgcttagagagagtctcgagaaaatagttggaaaagatgattccacgtttagtggatttgaccttgctacccttatcaggaacaaatatgggaggtcttatgatgttcagttgataaagaaggagttcatgggaagaaatctccttgcgatgaatgtcatgtggaagtacatggagcagagatccttcccattgaccgaagaagagtatattttgaggcttgatgatattgcaaacaacttaaaatgttggggagctgtgtctcatattcggaacagcctagaaaagtcgaaggaacgacctcggatagggaaggcagtaagcatttttatagatatggatgagtcgggtgctcgttccaacgagtggatctacaaatagaatgtggtactga

SEQ ID NO: 261555 - DNA, 434 bp, Glycine max
gagagtcttcccgtctcttcctcttcacttcttataccggcgcccccaaacgacgccgttggctgttctcttatgtaaacgccgttcgagaacaaaccaaaaaaagaaaagaaaatcagttattgccgttgttgttttgtttccggttcggtttatttcaatggatcgggcggcgttgacggttggaccgggcatggacatgccgatcatgcacgacagcgaccgttacgatctggtacgcgacatcgggtccggaaatttcggcgtggcgaggctgatgcatgataaacaaaccaaagaactggtcgccgcaagtacatcgaaaggggtgataagattgatgaaaatgtaaagagggaaatcattaatcacaggtctctgaagcatacttacatttgtagatttaaagaactttaatgtttttggagtgtctt

SEQ ID NO: 261556 - DNA, 264 bp, Glycine max
  unsure (1)..(264): unsure at all n locations
cccacgcgtccgatgaaatgtactatctaagtattacagcatattgattggtcaagaaaatcttatgggttgccatggaaacataatgtaatcatcctacctcacatgaataaaataagtagtctctttgagacggtttacaaaaaaaaaaaaaaaaaaaaaaaaaaaaaaaaaaaaaaaaaaaaaaaaaaaaaaaaaaaaaaggaaaaaaaaaaaaaaaaaaaaagaaaaaaaaaaaaaaaaaaaaaaggggggnngnaaaag

SEQ ID NO: 261557 - DNA, 440 bp, Glycine max
cccacgcgtccgtgacactcttctctccttaaagccaccacattctgataccctggtgatcaatcaaagtgaagatcagcatagaatgcttgtttgattctatttcattgctatggataagtacgaggctgttaaggatttgggagctggcaattttggggtggctaggctcatgaggaacaaggtcaccaaggagcttgtagccatgaaatacatcgagcgtggccccaaggtttcttcttttatacaatcacttcatcaatttatgatttatcccaacccttttgtgtgtttattattatattaagcagttaaagagatggtagaacttgatgcagaactgaacaaagacttatgtttgttaattattctcctatgatttgtgaagtttatttctatgtaccggtttacgctcaacccatcagaaatcatatgacttt

SEQ ID NO: 261558 - DNA, 451 bp, Glycine max
acgcttgatcatcctggtgttggaagggttccaaaggctttagaaggagagcaagtggtagcagggtgaccaacttgactttcttatgatgctggtgaagctatccaagggtggataccacggaaggcggatacttttgagaggtttcataaaattggccaaggaacctacagtactgtgtataaggctcgtgatttgactgaccaaaagatcgttgcattgaagagggtacgctttgataattgtgatgctgagagtgtcaagtttatggcaagggaaatccttgttctgcgtaagcttgaccatccaaatgtaataaagttggaaggcttgataacatcgcagacatcttggagcttgtaccttgtttttgaatacatggaacaacgatcttacaggacttgcatcaagtcctagcattaatttttctgaaccacagggtaaaatgctt

SEQ ID NO: 261559 - DNA, 375 bp, Glycine max
caatcgtagccgtcgcactttgcgttttctgcgtcatctccgattccccgacaatggccagccaaatgagcaagaagagaaagttcgtagctgatggagtgttcttcgctgaactgaacgaggttctgacaagggagttagccgaggacggatactccggcgtggaagttagggttacgccgatgcgcaccgaaatcatcatcagagccaccagaacccaagccgttctcggtgagaagggaaggagaatcagggaacttacctcggtggttcagaagaggttcaagtttcccgagaacagtgttgaactttatgctgaaaaggtcaacaataagggtctttgcgctatagcacaagctgagtctctccgctaca

SEQ ID NO: 261560 - DNA, 398 bp, Glycine max
cccacgcgtccgcccacgcgtccgcccacgcgtccggcaaaaacccaacacaccacactcgggcaatcaatcaatggcggaaccttcctcctcgaagcccgccgtccctctcctgaaggacgagctggacatcgtgatcccgacgatccgcaacctcgacttcctcgagatgtggcggcccttcttcgagccctatcacctcatcatcgtgcaggacggagaccccaacaggaccatcaaagttcccgatgggttcgattacgaactctacaaccgcaacgacatcaacaggatcttgggtcccaaggcctcctgcatctcgtttaaggattctgcttgtcgctgctttgggtacatggtgtctaagaggaagtacatctacaccatcgacgacgact

SEQ ID NO: 261561 - DNA, 452 bp, Glycine max
ggaaaagaatggaggccatttgttccaagcaccttatgacatcccttgtcataattcttgcttctagtttgaccttatcacagggtgccaagaaaggcagtgacagtgaaaggccataccaagaagcgagcacggtgttcattagaacatcttgcagctccacgacctatccaagactctgctacagctccttagtgaagcatgcagacttgatccaaacaaaccgtgtggttctgacaggcacagccctgaatgtgacccttgcgtctgccaagtcgacctcggcaatgatgtcgacgctggcaaagaggcaaggcctgaagccaagagaggttgcagcgatgaaggactgtgtggaggagttggctgactctgttgatgagctcagaaggtctatttctgagatggctcaactaacaccctccaattttgagatgacaatgagtgacgta

SEQ ID NO: 261562 - DNA, 444 bp, Glycine max
  unsure (1)..(444): unsure at all n locations
cccacgcgtccgtttctctctttgaccaattctaaacccaaaacaaaaaataaaaatggagggggatctgaagcagaagctgttgagaagaagaaaggaagaggaagaagaagaagaagaagagttatcattggccaagagggtgtggaatgagagcaaggttatgtggatagtggcggcaccagccatattcacaaggttttccacctttggaatcagtgttataagccaagcttttgttggccatattggttctaaggaattggccgcttatgctctcgttttcaccgttctcattaggttcgccaatggtgttctgttaggaatggcgagtgcgttgtcaacactttgtggacaagcatatggngcaaaagaatatggcatgaagggagtgtatcttcaaagatcatggatagttttgttcttaactgcaagctggcttct

SEQ ID NO: 261563 - DNA, 441 bp, Glycine max
cccacgcgtccgcccacgcgtccgcggacgcgtgggtgaagattacatggcaagaagctcaaggtctgctccgaccccctcctagccacattccaagtattgtggtgattgaaggttttgaatttgaggaatatgaggaagctccagtgcttgggaagccaacaatttttaccagtgatagtgtgggtgaaaagatccagtgggctcaatgtgaagattgtttcaagtggcgcaaattgccagcaagtgcgcttcttccatcaaaatggacgtgttctgataattcatgggatccagaaagattttcttgttcagctgcgcaagagctgacagcagagcaacttgagaatttgctacctccttgtaattcagctgttcccaagaaaatgaaggccaccaaacaagatcccgataatgctgaaagctttggaaggacttgac

SEQ ID NO: 261564 - DNA, 411 bp, Glycine max
acccacgcgacgaacagcatacgcggcagcgacggttacccttcaacaacaacactttctctgcgtgaaatgtgtctggtggcgaacgaggatttccagcacattctgcgtgtgctgaacaccaacgtggatgggaagcagaagataatgttcgcaatgacctccatcaagggtattggaaggagattcgccaacatcgcttgcaagaaggctgatgttgacatgaacaaaagggctggtgagttgactgctgctgagttggatagtgtgatgactgtggtggcgaaccctatgcagttcaagatcccagactggttttttgacagaaagaatgattacaaggatggcaaatactctcaagttgtgtctaatgctcttgatatgaaactcaaggatgatcttgagagactc

SEQ ID NO: 261565 - DNA, 439 bp, Glycine max
ttcatctatctggatattctccactaggttcaccagcagctctcaaaagtgataggcttaagaatcctgttgtcacagagattgcagagagattggggaagacaccagcacaagttgcccttcgatggggcttgcaagcaggtcatagtgtgcttcctaagagcactaatgagtccagaatcaagggaaattttgatatctttgactggtctattcctcaagatttgatgaccaagatctctgaaattaagcaggaaaggctagttaaggccagtttttttgttcacgagacctatggtgcctataggagcattgaagacttctgggatggtgaactctgagcaatatgcatctttgagacgttgaaaaatacattgctcctagagcaaatttattctgccttatacccactagttgtagtgattcaagtgagattttg

SEQ ID NO: 261566 - DNA, 454 bp, Glycine max
cgcattcacaaataaggttgaagaggtcactgccggaagaagggagcaacaccatctttcattttccggcgatctcttgtttcttccatcatcaccgttttccggcgatccctaatcctcgcaaacagaaatgacgacatcaaggcgccttgcggacaggaaggtggagaagtttgagaagaacatcacaaaaagaggatttgtgccagacactaccactaagaagggaaaagactaccctgttggcccagtgctgctcggtttcttcgtctttgttgtcattggatcatctctcttccagataatcaggacagcaacgagtggaggcatggcttaaatggagctttgttttggattttgtgtcatcttctctttcttagcctcctcgtagaaaatgctaatacttctctacatgtactgtacttgtactaaaccctgttcctgttcatgttta

SEQ ID NO: 261567 - DNA, 412 bp, Glycine max
attcggacggaacctccgccggttcttccgacgaggacaccggcgggcagacttgtcacgagtgccggaggaatgaccgcgaccgagttacttggtgtcaacggtgtgataggaggggatattgtgatagctgtttatcaacatggtactcggacatttcattggatgaaattcagaggatatgtcctgcttgccggggtatatgtaattgcaagacttgtttgcgaagtgataattcaattaaggttcggatacgcgagatacctgttctagataagttacagtatctccatgtgctgctgtcgactgtgctacctgtggtaaagcagatccactgtgaacagagttttgaagttgaacttgaaaagaagttgcgtggtgctgaaatagatcttccaagataaaattgaac

SEQ ID NO: 261568 - DNA, 391 bp, Glycine max
gatggcttcaaagttgcagaagttgcaggccacagcatctcaagcgtctcaatttgtatcgagtcgtggaactaactactacaagcaattgctggaacagaacaagcaacacattcaggagcctcctacagtagagaaatgcaacctgttggcaaagcaattgttttacactcgccttgctagtattccgagtcgtaatgagtccttttggaaggaacttgattatgccaagaatttgtggaagaacaggaaagagctaaaggttgaagatgcaggaattgctgctttgtttggcctcgaatgctttgcatggttttgcgctggtgagattgttggcagaggatttactttcaccggttactatgtctgataataaaccacttggaaagtg

SEQ ID NO: 261569 - DNA, 454 bp, Glycine max
cccacgcgtccggagaaaaagagattagagagagagagagagaggagacgaatgagacacgagagctgaacataaaggtgaggttacgtgtatctcttgaagtagtgccatgccaccccatcaataataagatcactcaatcaccaatgcatcatcgttgttggaattccagcgctgtgtttggaaattggaactggaggggcttcaggtgccataatctcaaccttagataacagattattgcacagcaaaaaccttgtaaaaggagaattagaatcacctctctctaaggatgttggaaggaaaggctatggtgaaagaaacagacatgtcaaccaagatgcagatccatgccatggcctctgcttctcaagcccttgatctctacgatgtttatgattgcatctctattgctgcccatatcaagaaagaatttgatagtgtgtacgggaaa

SEQ ID NO: 261570 - DNA, 430 bp, Glycine max
ctcaatctctctctctctctctctctgaattttctcctctctccgattccttttattaatgggagtttactcgctccttttcctttccctgaaaacatttcctcgtcgtattgatgtcggaaaagggccggccacttccaaaatttggtgaatgggatgtcaatgatccaacctcagctgaggggttcacagtgatttttaataaggccagggatgagaaaaagacaggtggtaacccagattcaccaggaaagactgccactgatcctcatagcaaacctgctgtagagcctggcaaaactcaaactaaaaaatggttttgctgcatgcaaaacccttctgccgaatcatagcatagcaatggttgctcctgtgaaaagcctgaacagaagaacaatgtttgtgtaactagtgtcacagtattttctct

SEQ ID NO: 261571 - DNA, 378 bp, Glycine max
cgcgtacgatttatttttttcaattccgacttttattttttagaagaggcaaaaacaatcttgtaacggtaaaattttacactggcactaaaataccttaattttgattacaaacatatatttatataaatgttatttaacttgactacttgctcagaaattaaatctaaaaatgttaatttaataatctttttcaaatgaatatatactcatattgcattccctatacttaatatacacatttcatatatatcttataaaaatgtttgctgtcactacacattttaaataataaactaatttaataaaaatgctgaaaatttctagaatttttattttaaaatataatgccaaataaggtaaaatatttttttttta

SEQ ID NO: 261572 - DNA, 366 bp, Glycine max
  unsure (1)..(366): unsure at all n locations
ggaaaacactggtccaatcaacattgggaacccaggtgaatttacaatgattggggttgccgagaatgtgaaagagcttatcaatccaaaagtgcagataaatatggttgagaacactcctgacgatcctcgtcagagaaaaccagacattacaaaagcaaaggaattgctgagatgggaaccaaaggtcaagttgtatgatggccttcctctcatggaagaggatttccgtcagaggcttggagttcccaagagcaactaagctccttttactccttcatttcttatcatataatcataatgaatattttgatagtaacggngatgtggatgaacctgttaagtgttaagagatgttntatattg

SEQ ID NO: 261573 - DNA, 443 bp, Glycine max
  unsure (1)..(443): unsure at all n locations
cagaaatggccaccacttctgcttcattcgcgagcttctccgtcatcttgcgaccttcttcgtccaatccccaattcttcctcttcaacgtcgctccccgaaccggaacctctcattcccgaacccgttcgactcggttcaggtgctcggccggtcagaccgggttcttcacgaaactagggcggttgataaaggagaaggcgaagagcgacgtggagaagcttttctcgggattctccaagacccgcagcaacctcgccgtcatcgacgagcttctcctctattggaacctcgccgacaccgatcgggtcctcgacgaactcgaagaggctcttttagtgtctgattttggtccaagaatcactattaaaatagtggagaatttgcgcgaggatatattttcagggaagcttaaatcanggaatgagataaaggaagcactg

SEQ ID NO: 261574 - DNA, 434 bp, Glycine max
  unsure (1)..(434): unsure at all n locations
cttcttgagggtaccctattgaagccaaacatggtcacccctggatcccaatctgctaaggtttcccctcaggtggttgccgagcacactgtcagagcccttcagagaaccgtgcctgctgcagttcctgctgtcgttttcttgtctggtggccagagtgaggaggaggcatccgtcaacctcaacgccattaaccaggtcaatgggaagaagccatggtcactctctttctcctttggaagggcacttcaacagagcacccttaaggcatggggcggaaaagaagagaatgtgaagaaggctcangaagcccttttggtaagagccaaggctaactcagaggcaactctgggaacctacaagggtaactcacagcttgctgatggtgcctcagagagcctccatgtttcgaactacagctactgatcaatcga

SEQ ID NO: 261575 - DNA, 329 bp, Glycine max
cccacgcgtgcgacggcatggaagtggcacatattgatggctccacaaggatgggttcggggtttggggcgatgatgatatcagggcacaaggcggctcatttggcgttgaaggcgttggggaggaacaatgcaattgatggaacgtgtggagttggaagggaagaaccccagcttattttcgcttctgcagacactgaggaaattgttgatgcttaaacttacttttaaattacctagatatatagcttaacttttcttttctttctgatggggccctacttaattatgattgtaatttgggaataaatgaacaacatgtgaattatg

SEQ ID NO: 261576 - DNA, 388 bp, Glycine max
cccacgcgtccgcccacacgtacgaaccaacacaacatcaactccgccccctacggcgccggctggcgcgccctacgccgcaacctcacctccgagatgctccacccgtcacgcgtcatgtgcttctccggtacccgcaagtgggtcctacacaccctcctcacgcgcctcaaatcagattcacaatccaacgattcaataaaagtcattaaccacttccaatactccatgttctgcttgcttgtgtttatgtgctacggggaaagactcgacgatgggaaagtcagagacattgagcgcgtgcagcgacaaatgctcctgcggattataaggttcaatgtactcaatttctggcccatagtcacgcgcgtattgatcttcaaactat

SEQ ID NO: 261577 - DNA, 413 bp, Glycine max
cggacgcgtggggcaaaattgatttctgtacttcgggctcctaaatccaaggaagggtatgctgctattggtggtggctctcctttacgaaaaattacagatgaccaggcacttgcaattaaaatggctttggaagcaaagggcatctcttcaaatgtctacgttgggatgcgatactggtacccatttactgaagaagcaattcagcaaattaagagggacagaataacaaggcttgtggtactacccctttatccccagttttctatatccacaactggatcaagcatccgtgttcttgagcatatattcagggaagatgcctacttgtctaagctccctgtttccattataaactcttggtatcaacgagaaggttatattaagtcaatggctaacttaattcagaaaga

SEQ ID NO: 261578 - DNA, 322 bp, Glycine max
gcgctgcaatacttcttgcactcggttttatcttttacacactagcaaatgcacagtggtcttgtaattacagtatgatgggtgttattatgatttctggagcattgggcatcgattcttttctgggaaatcttcaagaagcaatatttaccatgaaccctgagaccacacagatggagatgctcttttgctcaactgcggtgggtttgcctttcttaatcccacctatgcttttcacaggagaattattcaaagcatggacttcattgttcacagcatacctatgtgtatggaaagctatgttttgaacaatggccacatt

SEQ ID NO: 261579 - DNA, 414 bp, Glycine max
ctcgatcgtatggagcatagtgattacggagacaggtaccgtgaattaccccatggagtggatcacgctctaggctgcatgaatgctgctggtctcacagccgaccatcccatcatgagtacaacagacttttggacctcccatgagtgtatgcgtttaccttatgagcatgcacttactatggaggattctactcctgggcatcattatgattgctcacactcacatgctatgggtaggggaacgtagacgccaacttgatggtgctcatgttgaattcttgagacgagttgctaatacacttcgcattaaggtgagggataagatgcgatcccgatgaacttgctaagctgctagatattctgtaccctgaaaacaagcctggaagaattacagttattgtgagaatgggag

SEQ ID NO: 261580 - DNA, 425 bp, Glycine max
cccacgcgtccggttttaggtagttggatgtgttgagatccactgctgcagaatccaattggtgaccctaaatccaagttactatgactgctcagacccaagaggagcttcttgcgcaacacctcgaacagcaaaagatccatgatggtgaacctgttgtcgaggatgatgatgatgaggaagaggatgatgatgatgatgatgatgaggatgatgaccatgccgaaggactagaaggtgatgcatctggtaggtcgaagcagaccagaagtgaaaagaagagtcgcaaggcaatgcttaaacttggaatgaaacctgtcacaggtgtcagccgagtgacagtcaagacgagcatgaatatcctgttcgttatctcaaaaccagatgttttcaagagtccaacatctgaaacttacattatattt

SEQ ID NO: 261581 - DNA, 453 bp, Glycine max
  unsure (1)..(453): unsure at all n locations
cccacgcgtccgctctgaactctcaatccacaaaaaagcaacatggcttcaattcgcgccttcttcacagccattgcttttgtggctcaatcatttcaaaactacatgatccagagtctgcacaaactttacaagcattatggatatgctgctgaagtgaaggacaatgaagagaaagaaagtgattattgttctgtgtgtctaagccaaatttgtaaaggggaaaaagctaagtctcttcccgtgtgcaaccacagataccatgttgattgtattggtgcttggttgaagaatcataccacatgccctctttgtaggaacaatatcactgatcatatcacccaaaaacataaacaggtgaagagcttangagaatctttgttcaatctcattcagagtttctctgatctattggtagctattctctacatgatgcttncatctaccatcact

SEQ ID NO: 261582 - DNA, 443 bp, Glycine max
ggaagcttggggtttgaatctaatcgaatctaaacgattcatcgatcgatcgatggctctggtacgagttgaactgaagcatgcggcggacggcgtaccggaagctaattgctacgccaagcccaccaagcaaggcgagggcctacgccactactattctctcaacatacacgagcatcagctcctttttcgccaaaagactcataacctcaaccgtctcgaggctcagagaaacgacctcaattctagggtgaggatgctgcgcgaagaattacagcttctgcaggaacccggctcttatgtcggtgaagttgtcaaaagaatgggcaagaacaaagtccttgtcaaggtccaccgcagaggaaaatatgttgatgacattgacaaaaatattgacattacaaagattactccatccactataggtgcactccgcaacgaca

SEQ ID NO: 261583 - DNA, 441 bp, Glycine max
tctttatataataatataaataattttaaaaaaataaaaaaaaaaaaaagaatctgtataaatataaaaataatatatataaggtacaaatagtaaatcgaggtacccattttatgataaactttccttccatttttgttcctctagtaggcctagtatttccggcaattgcaatggcttctttatttctttatgttcaaaaaaacaagattttttagatacagaaaacaaagtaaaattctggggttttttattccccaattataatactaaattcaaaaaaaggagagtaatgagtataatctttcgctcagacgatgtactgatatattctatggcggaggttcgaaaaacaagcaattttattgtgggccggtttcactttgttaggttcattggggttatttgtcgttgcaatttccacttatcttggtatggatt

SEQ ID NO: 261584 - DNA, 409 bp, Glycine max
cccacgcgtccgtggagagtttgaagattcctaaagccacatggatggctgataaagaacccagctgctggcctggtacctggacaactgctgcaccggaacattccaggggtgatcatgccagtatcatacaggtaatgttacaacccccaagtgatgaaccactgactggcaaaacatcagattcaaatgccttggatttcagtgaagttgatattcgtcttcctatgcttgtgtatgtttctcgtgaaaaaagacccggctatgatcacaacaaaaaggccggggccatgaatgcccttgttcgagcctcagccataatgtccaatggccctttcatacttaatcttgactgtgaccactacatatataactctcaagcactgagagaaggaatgtgcttcatgat

SEQ ID NO: 261585 - DNA, 402 bp, Glycine max
ggcagtcatcgttctgcttaagttcatagagagtgtgtgtatgatgcagcagcagcagaacgtggcattgatttggaatgggtacgggtagtgttgtcagctgatcctggggctagattggaagatattgaggatcaagcaccacctctgaggaaggaacatcgccgtgttccaagtaccgtggcaatagaggaagtaaaggctgcggcagctaaaggggaagcacctcttgaactccctttgaaaggcgctggtcaagattcttccgatgcacaaccaagggttaatggacttaatcccaaagctagcgatgccttgtctggtgaactttgggaggcaaagaaggataggatatgcaaggcttccatatatggaaagttacatggttgggacttgcgatct

SEQ ID NO: 261586 - DNA, 395 bp, Glycine max
cggagataagattaaagattcaacaatggcctctgcttctgctactcttctcaagtcatctgctgtgcttgacaagtgcgagtgaatcacatgccagacccttcgccaacctctcgtgagatgtaacccttcctcagcatcagctctcaccatcaaagctgctttctatgctgtcgagctcgtgaaaaccgccaaaacagtggcctcaccggtgcgtggtattttggcgatggatgagtcaaatgcaacctgcgggaagcgtttggcatctattgagttagagaacacagaagcttatcgggaggcataccgtaccctacttgtgacagtaccagggcttggtgaatacatctcctgggccattctctttgacgaaactctgtatcaatccactg

SEQ ID NO: 261587 - DNA, 285 bp, Glycine max
  unsure (1)..(285): unsure at all n locations
gccgccgtggccaccacctctattgctggggtcgcgttcgacgccgacgacatccttatccgtcaggtggtgccagatgttggcgaancctaatatgatgacaacctgctgaacgccgagcaccacttcgcgagcttcaaagccaagttcgccaagacctactcctccaaggaggagcacgatcatcgcttcggcgtcttcaagtccaacctccgcagatccaggctgcacgcctagctcgacccctccgccgtccacagcgttaccaaattctccgatctaact

SEQ ID NO: 261588 - DNA, 430 bp, Glycine max
cttacacactctttatctctctctttctctctctcagaattttctcctctctccggggccgggtattaattggagttttctcgctcctttttctttccctgaaaacatttcatcttcgtcttgatgtccgaaaagggtccgccacttcccaaatttggtgaatgggatgtcaatgatccagcctcagctgaggggttcacagtgattcttaataacgccagggatgagaaaatgacaagcggcatcccatagtcaccaggaaagactgctactgatcctcatagcaaacctgcagtatagcctggcataactcagactaaaaaatggttttgctgcatgcaaaacccttctgccgaatcatatcatagcaatgtgtgctcctgtgaaaagcctgaacataaaaacaatgtttatgttttactagcgtcac

SEQ ID NO: 261589 - DNA, 416 bp, Glycine max
cttgcattcagttagactttgatagtttgattagctctaataaggttaaggaccagagagagaaagagaaataagaagaaaaacacaagatgggttattggaagtctaaggttcttcccaagatcaagaaggttttcgagaagaatagcaccaagaaagctgctgctgctgaggccaccaagtcctttgatgagtcaaaggaggaatacaacaaagcctttgaagaaaagaagactgaacttcaaaccaaagttgttgaaatatatgaggcttcatcaactgaaatcaagagtttggttaaagaacccaaggaagctggtttgaagaagaactccacagaagtccagaaattcctagaagagctggttaaaattggtaaagaatatttgtagcccttttataagtttttatttatc

SEQ ID NO: 261590 - DNA, 348 bp, Glycine max
cccacgcgtccgataagctctggtatgacgttgtggctggcccttaacctgtgcggggccgggtcatgctcagaaaactcaccaccctcaaaactattgatgaaggagaaagtagcatgctgcataagacgttgtcgatgccgtctacaccaacaaccccgatgactccgactactccatcgacaccggtatcggcccgtaaagctgacaacgtttggaggagcgtcttccatcctgggagcaactccgtcacaaagaccatcggtgctcatatgtttgacaaaccacttcccaacactcccactgtctatgactggctttacagtggggagaccagaatcaggcacc

SEQ ID NO: 261591 - DNA, 404 bp, Glycine max
tccaatttaaattttaaaaatgacttttattaacttaagaattcaattatcgaaggtgaattatttaacaattcaattggattgttcaaattgtttcaaaaaaatggagtacttactcccatttcttatttattattgaattaaccgatcaactagctttgttatcgaacatttcttttctatttcaaaaattttccggaaaaaatttgaaatctattttatttgcgaatcaatcctacttcttctggtcccgaaatttttgctcttgataaaaaaaatctggtacttttcttccaaataattgggccggtactttattatactttttccccaagttatattcctaatatttacaatgctcttatttttaatggtttaaatacttgttgttaacaaaataattt

SEQ ID NO: 261592 - DNA, 261 bp, Glycine max
cccacgcgtacgtgtagacatctattgcgactgctgttgcaaactcatcatcaccatcatacttgcgtgccgttggtactgatcatattcatacttgctctggagatggtgcataacttgcaagagaacatgtcataccctctagatgatctctcacgttctattgccatacttgctgaattagaatcaggtggctcacaaatgaatcatgctcactcaggaagggaacgcaaaattcaaaggaccctactggacttgctc

SEQ ID NO: 261593 - DNA, 379 bp, Glycine max
ggaaaacatggctttactttcataagtcctaaaccatttgccgcttgacctaatttcacccggttggctaacagctttcttctgcttcttccttatactccttcagctaataagaagaaacaaatacaatctgccaccatccccaccaaagatacccataatcggcaatcttcaccagctaggcacactgtcccaccgctcctttcatgcactctcacacaaatatggccctctcatgatgttgcaattgggtcaaattccaaccctactggtcttcatcagctgacgtggccagagaaataatcaaaacgcatgatgttgttttttccaaccgccgacaacctacagctgctaaaatctttgttatggatgcatggat

SEQ ID NO: 261594 - DNA, 273 bp, Glycine max
cccacgcgtccgctaatatttactttggcttttcacgtggtcatactttatttcgggccagggccttctaagatgactttctcaatagcacttgctgaactggaacttagctctcattcctaacaaaaggtccttcacaacacaatcctcttgctcctaataatgaacccctttcactataatcacccaattcttctccatattgtccaaaccatttgtatatactattcctctttatatgacattgatgacctctgtacaaacttagattac

SEQ ID NO: 261595 - DNA, 362 bp, Glycine max
caatctctctttctctctttttttgtgtgtccaaaatggctcctagttctgctcggaacggggggttctatgtgcttatgctacttggtatagtgtttagcactattgatgctacctgcgctggtagcttctaccaagactttgatctaacatggggtggtgaccgtgctaaaatattcaatggtggccatcttctatcactttccctacacaaagtctctggctctggcttcaaatcaaagaaagaatacctatttgggaggattgatatgcagcttaagctcattgccggcaactttgctggcactttcactgcttactacttgtcattccaagggccaacacatgatgagattgatttc

SEQ ID NO: 261596 - DNA, 434 bp, Glycine max
ggatgctggaactggttttacagctcaagtttacaagttgtcaacctttttcttgcacaaggaatggataatggagcagtgggataaaaacttttacattacttctattgcagggagcaacaatggcagctctcttgtggtgatgtcaaaaggtacgcagtatactcaacaatcctacaaagtgagtgaatctttccccttcaaatggataaacaagaagtggagagaaggttttcatgtcacttcaatggccactgctggaagtcgttggggtgttgttatgtctcgaaatgctggattcagtaaacaggtggttgaacttgattttctctatccaagtgagggcatccataaacgttgggataaaggttataggattacagcaaccgcagctacattggatcaatctgctcttatattaagtattccgagac

SEQ ID NO: 261597 - DNA, 428 bp, Glycine max
cctctctatatttccgctttcacttattctctctcaccctccaactatgagttactacaaccagcatcagccacccgtcggtgttcctcctccccaaggttacccaccgccggaatcttacggaaaggacgcgtaccctccgtcagggtaccctccacagggaggataccctccgcaggcgtatccagcacaggggtaccctccaccctacgcgcctcctcagtacgctcagcctccgtcgtaacaacaccataattcatctggcccgggttgcttagaaggatgtttggctgctctctgctgctgttgcctgttggatgcctgcttttgagaaagaaaagagaggttgctttgcacaaattggatttgaaactgtgttttgactgtgaacatgaccattatcgctcttagtttttattattttctat

SEQ ID NO: 261598 - DNA, 418 bp, Glycine max
cggacgcgtgggcggacgcgtgggtttcgtttttttcttcactgctatttgccattgtcaggctcattctcgatggcggcgaagatttcattggcaattggtttgagaactctcttcactgtttcgggactgcttatgcttgctatcgttctttacactgacttcaccgatggtcttccgtttcgcaaagaacttctcacaccgcggatggcagcaacttagattgatttttatatcaacgatgtaactgtggcggtctggattgcttacaaggaatcaaactgaatcagctcaattctgcggattgttgtgcttgtctgccttggaagcatcactacatctgcctatattggtgagcaatttctgaagctgtcatgtcaagaatcttctcaggatcctatgtgttatgttctattgc

SEQ ID NO: 261599 - DNA, 403 bp, Glycine max
aaaaagtggaggattgttgaagagagagtctcgtgatttgagaaggccacaaatctccgaagtaaaagcttcaaatttcggtcacaatttaaagaaaaaggggatttatttaaaaacttttttaaataaaagaacagaacttggggtgtggcaaagcagagaaagaagaagaagaagaagaatcatttgggtgtgtttttgaagtgaaaggtgatgtcgggttcttcttcatctgggtctgaagaggaggatgaggggttcgactcttaccggaaaggagggtaccacgccgtcagagtcgccgatcagttcgccggcggcaggtacatagcgcagaggaagctcggttggggtcagttttcaacagtttggcttgcctatgatactactacatctgcatatg

SEQ ID NO: 261600 - DNA, 428 bp, Glycine max
cccacgcgtacggttctgcaagattgtatctattggggaatctttcgctgcctcgggctagatcttttgaaaaaatatcgaatcctcaaagtgccgatcctcctaaatccaatgtttgctctttttagcccttctctccctatatattttttcacaagcacctctttcaattctctccgtttcactagctcttattccaaagcataggaagaagaaagaggagactagtctaatatggagaccatgaatgttcaggtgatgagaagcttatcagatatggtaattaaaaaaggaccatggactgaggaagaagattctgttctgatcaactatgttaacgtccacggcgaatgccactggaactcccttgctcgctcttcaggtttaaagcgaacgggcaaaagctgcagactaagattggtcaacta

SEQ ID NO: 261601 - DNA, 410 bp, Glycine max
cccacgcgtccgcccacgcgtccgcccacgcgtccgcttggagctgcgagcactagttttcccttttccccttgtttgtttttttaggataataattgaccaattgggtatcttgtcagttgagacatttttcaagaagtagcaaagctccttctacaatatttgacttggtgctttccttttggatcttacaatgggaaacagtgaggaagagaaatctaccaagactgaaaaaccttcttcacctgtaacagtggatcaagccaatcagaccaaccagaccaatattcatgtctatcctgattgggcagccatgcatgcatattatgggccaagagtcaccatgccaccatactacaactcagctgtggcttctggtcacgctcctcacccatacatgtggggaccac

SEQ ID NO: 261602 - DNA, 418 bp, Glycine max
gatccggctgctatggacgagagaatgaggatgcggatggagtccaaccgcgagtgcgcggggcgatcgcggatgaagaagcataacctgctcgaagacctatccgacgtagcgagtcgccttcaaggcgagaacgtgcgcttagcgcagagcataaaggcgaaggatgaagcgtacgttgagatcgaagccgcgaacgacatcctcatagcacagaccatggaactcgccgaccggctaaggtttctgaactccattctcgatatcgccgatgatgtcagcggctgtggtgaatcctttgagattccgcagattccagaccctctttttatgccctgtcatatgccccaccctatgatggcgtcacctgacatgcttcctcatggatatcaaggcctgtttgcttgatttactttaa

SEQ ID NO: 261603 - DNA, 347 bp, Glycine max
cccacgcgtccgcccacgcgtccgcactactcaacacaaaaaatagtcttaattagttagggtgtcaatttgtgcctcaaattgaaactagctatagatatggccaattcccttaataaccacctgtttgttgtagtatctattctttctctcttagccttttctagcaacgcacaactatctcccaccttctatgccaaaacttgccccaaccttcaaaccattgtgcgcagtgcaatgaggcaagctgttgctaaagaagccaggattggtgcctctattcttcgcttgttctttcatgattgctttgtaaatggctgtgatggatcaatcttattggacgacac

SEQ ID NO: 261604 - DNA, 419 bp, Glycine max
cccacgcgtccggtctgaatcatgtgctgcttctagctccaaggcatgtcgagagaagttgcgaagagataggcttaatgacaagtttgttgaattgggctccattttggagcctggaaggcctgccaaaacggacaagactgctatcctgattgatgctgtccgaatggtgacccaattaaggggtgaagcccagaagttgaaagacactaatcagggtcttcaagaaaagattaaagatttgaaggctgagaagaatgaacttcgcgatcagaaacagaggctcaaggcagagaaggagaagctggagcagcagctgaaatcattgaatggacagcctagtttcatgccttcccctgctgcaatccctgctgcatttgcggtgcaaggccaagcccacggcaacaagttggtacctt

SEQ ID NO: 261605 - DNA, 276 bp, Glycine max
aaatcaacaagttgagatgcagagttaattatcatgcactgaaatttcttcctgaggtagagcagatggctaattcacttgcatcaagaatgagaaaccgtactggcagttcaaatccttacatggctctgcatcttacatttgagaaaggaatggtgggactatcattctgcgattttgtggggacaagagaggagaaagccaatatggctgagtatataaaaaaggagtggcctctacggtacaagaatggttcccatctgtggcaattagctc

SEQ ID NO: 261606 - DNA, 446 bp, Glycine max
attaggggggcgacccacgcttccgcccactcttacttaaaaaaccaatttcattttttcagtatagttgatccgttaatgtagtgtgaatgttgtattcccattcaaactatcttaacttatatatatacattctttacattcttctatcttgattcaaatttatggtttcgattggtgcaaacccaataatcttaatttacaatttaatatcaaaatgacttttccatctctatcaaaacaaatttaaatttaccctttaatcgtataaaaaactattttaattataatataatactatctcctttaatgaatgaattcttatcgattttctcactatcctaatttattaattatatcttctccatcaaattttttactaattataaacccattactgttttaactacatattcatttgtcaaaaaaattctatctttactaaa

SEQ ID NO: 261607 - DNA, 248 bp, Glycine max
gaacacctgttgaagaaaaaaacgccctcgccctcggaacccatgaaataccctaaggagggggcattctatgaagatacgatccctaatttgcagaaatcctctcaaaagacgctttgaaattcaacgctgaactgcaaccagagttcaagagcgacatctaccatgcattacacagcacaagagatgcgaagactaatgcccatgcagggactcttccggtgtttgatccttccacccatcacatt

SEQ ID NO: 261608 - DNA, 301 bp, Glycine max
cccacgcgtccgggcaatagcagcagcagcaacaacgatgatggggaattgactggggctaagcctgctcgtccgtcttacaacgcttttgagataatctcgtccttgtcgaatgggttcgatctgaggaatttgtttgagacgaggaagcggtcgccgtccatgttcatttccaagttttcggcttcggcggtgatggcgaagctggagggggtggcgaagaagctgaactttatggtgacggggaagaaggagttcgtggtgaggatgcacggggcgacggaagggaggaaggggagaa

SEQ ID NO: 261609 - DNA, 417 bp, Glycine max
aaagaagaaaagaatggtaacaatagctggtggtgtgagtctttcaagccctagcagggtatttgctaatgctaagggaatagactcagcacaaaaggcccaggccgtgaggtttccagctctgtcgaggcccattcaaaagtggcctggtttggtgaagacccggcccgttcgggcgacgccggagaagatatcggagaaggtagaggagagcataaagagcgcggaggaggcgtgctcgggaggcggcggtgacgcggaatgcgcggcggcctgggacgaggtggaggagctgagcgcggcggcgagccacgccagggagaagcataagcagtctgacccgctcgaaaattactgcaaggacaatccaaagactgatgagtgccgcacctatgataattggatgactgaactcag

SEQ ID NO: 261610 - DNA, 408 bp, Glycine max
gtcggactcatcaagagtgttgagaagaaataccccaccggagccaaagtcaccaatgccggtgccaagaggaagtgattgcatttgggcaattttgctagcacatgtgatcatcatcgtggttactcctttatagcagttctatccttgcagagtcttaagtgttttgtttaagttatattcttaagtttctgccgatttcatgtagccgtaactttcaaaactaggtccttgatcggcggtggtcaattttcattgctgtatgcttttgatgagtactgatttttgttttgatggtaagaagagtctgagatatttcgaactttacaagcagctatatggttttagtccattttctttgctgctgacggatgtgttaagttgcaattaatttataacgagctttat

SEQ ID NO: 261611 - DNA, 442 bp, Glycine max
cggacgcgtggggttttctttgcagacatatcttggatcccatttccatcaggtcagtgcgcgtatgtactgtgttcagaaaggttggtggtgactggtgattgttgaagagaataatggcaacttcaactatggatattcttcatttccaccacactcctttttattgtgaggagaatgtatacttgctttgcaaaaagttgtgcaatgatggaatagcaaatgctgatggatctgatctttttgttgctttcatttccaacgaaaagaaacagatcccactttggaatcaaaaggctagcaaaagagctgatggggtgattctattggattatcatgtaatttgcattcagaataaacaaggagctgtccctccactagtgtgggacttaaattcgactctttcttttcctttacctttaccattatatgtggctgaaac

SEQ ID NO: 261612 - DNA, 311 bp, Glycine max
cgaaggactttaggttgggatttgggaattagggttattcgcgtggctaagatgattgatgtggttttgaacgatcgattgggtaagaaagtgcgcgtgaagtgcaacgactatgataccatctgcgacctgaataagcttgtggcggctcagactggcacaagagccgacaagatccgcattcagaagtggtacaccatctacaaaggatcactttactcttaaagattactaaatccaagacggcatgggtcttgaacttttacttcacttaacacaacaaggtgtgttttatgcgtaatatactatgt

SEQ ID NO: 261613 - DNA, 381 bp, Glycine max
gacaccatgaacattaattcacttgcccgcaaatccttggtcaatgcagacggtattatagagaaaacaggcttgtggggtaggtactctttggaaatgtctgctgttatttacaaggactgggttttcactgatcaagcattgcctaatgatcttgtcaagagaggagttgcggttaaggatccatctgctccccatggagttcggcttttgattgaggactatccttatgcttctgatgggctagagatatgggatgccatcaagtcctgggtgcatgaatatgtctcattctactacaagtcagatgcagcaattcaacaagatcccgagctccaagcttggtggaaagaacttgtccaagtgggtcatggtgatttg

SEQ ID NO: 261614 - DNA, 273 bp, Glycine max
  unsure (1)..(273): unsure at all n locations
gaaggacggaccattgttggttgtcgcgtgtggaagagataccatttctactgcaagttcggtaaaacgtggagcatctganaatgcttttgatgttcagatacaaaatccaagactgcatctgaataggtttgacatggtgattacacctaagcatgattattatcctttaacttcagaacgacagaaacaggttccttggttccttcgaagttggataactgcacgtgatcctccagattgtcatgtggttctgaccatgggggcgctaca

SEQ ID NO: 261615 - DNA, 422 bp, Glycine max
gcggcaacccgtccgcgcctctttctcccaatgccttccctccgcctgggcccactcggcgatcctactcccggatcaactcgcccgtgactcaccgcagagctgccccgaccctgaccccaacctctactaccagccagtcatcggaatcgtcagccatcccggcgacggcgcctccggccgcctcagcaacgccaccggcgcctcctacatcgacgtctactatgtcaaattcagtgaggccgccggcgcccatgtcgatcccctcatgtataccgagccttcggagaagcttctcaagaagctccaattggcaaatggggatctcttcactggtggatgggctaaaaatggcttatatcttgaaactgtcacaaaaatatttaagaaaattttacagaacaatgatgctggagatcatt

SEQ ID NO: 261616 - DNA, 421 bp, Glycine max
  unsure (1)..(421): unsure at all n locations
ggttcccatggcttcttcttcttcgattcgacccactctctcctcccttagattcttaacgccgtcatctgtttcgctctccaacccttcttctcgtatctctttctcccatcttccctctccctctgtgtctcaatccaatagttttggcctcaaagcttccagagagttgagacaacatggcaactccacgagaatcatggcatcagggcacgtgtctcaatcgatttcagctgcttcaccagaaaatgtgcttgagtgggtcaaacaggacaagcgaagaatgcttcatgttgtatatcgtgttggggacttggacaggaccataaagttttatacagagtgcctaggaatgaagctcctcagaaagagggacatacccnaggagaaatatactaatgcctttcttggatatgggccc

SEQ ID NO: 261617 - DNA, 311 bp, Glycine max
agcaaacacagtcatggcctcgattcttcaatgcttactggatccgaacaacaactgatcggcccctcaggacatgacatacctctccagacggcttcgcaaatacgggctcccatatgacgatttgtacgatccttactacgatctagacgtgacggacgcgctgcatcggattcccgaagatgtgcgcgacgctcgccacgcgcgtcttacacgcgccatctatcttatcatgaagcacgagtacctccctgacaatcttcaggcaatgcaaacaccaatcaggcgctaccttcacgatatgctgactc

SEQ ID NO: 261618 - DNA, 438 bp, Glycine max
cacaaagagaagcattagcactaggagcagcaacaactagtctcagctgaaatggcctctggagtgatggcatctgtggccctcaaacctgcccctttcactgttgagaagtcctcagtgagaggccttccctctctctcaaggaactcttcttcattcagagttgtggccagtggcaagaagatcaagactgacaaaccttatggaattaatggtggcatggctttgagggatggaactgatgcatctggcaggaaaggaaagggaaagggtgtttaccagtttgtagacaaatacggtgctaatgtcgatggttacagtcctatctacgacaccaaggactggtctccaaccggtgatgtctacgctggcggtacgactggcttggctatctgggctgtgactctacttggtcttttagctggtggtgcacttctt

SEQ ID NO: 261619 - DNA, 444 bp, Glycine max
  unsure (1)..(444): unsure at all n locations
gagaaaagttagggttcacaacttttccttttccttttgcttgcgaatctgaatcaaatgggcaatcatgcgttcattattcatcatgtcgtcggcgaagaaaatcacgctgaagagttcggacggcgaggctttcgaggtggaggaggcggtggcgctggagtcgcagacgataaagcacatgatcgaggacgactgcgccgacagcggcatccctctgccgaacgtgacgagcaagatcctggcgaaggttatcgagtactgcaagaagcacgtcgaggccgcgaatcccgaagacaaaccctccgaggacgatctcaaggcctgngacgctgaattcgtcaaggtcgaccaggccacgctcttcgatctcatcctggctgctaactacttgaacatcaagagcctgctggaccttacatgtcaaactgtagccgacatgat

SEQ ID NO: 261620 - DNA, 453 bp, Glycine max
cccacgcgtccgaagatttcagttccaaacaaaacttatcaaaatctcatatactgattcagttctatacataaccatcgagatttactatcaaaccaaaaattctcaaaatctcttcacctctgtgatgaccatggaatacagaaccttagaactcaacatcatatccgcaaaggacatcaagaacgttaacctcttctccaagatggacgtatacgccgtcgttacgctctccggcgaccctctccaccctcagggcgccaccacccacgtccacaaagacgccggcagcaaccccacgtggaactaccccgtgaaattctccgtcaacgaatcgctggccaaggagaatcgtttgtctcttgagatcaagctcgtctccgaccgcaccctcggcgacaccgttatcggcaccgtccatgttcctctcagggaactcatggacaatcccgg

SEQ ID NO: 261621 - DNA, 428 bp, Glycine max
  unsure (1)..(428): unsure at all n locations
tctctctctctctctcttcacgttcgatctttcgcttctgaatctccaacgatggtgctcgaggcgactatgatctgtattgacaattcggaatggatgcgtaacggggattactctccttctcgatttcaagcccaaacagacgccgtcaatcttatttgcggtgctaaaacccagtctaatccagaaaatacggtgggagttctcacgatggcggggaagggcgttcgtgttttggtgacccctaccagtgatctgggcaagatcttagcttgcatgcatggactagaaataggcggtgagatgaatctagcttgctgcattcangntgcacaattggctcttaagcatcggcagaacangaagcaacagcaaaggattattggctttgcttggaggtgtgaataaactgttcttctgtggtattt

SEQ ID NO: 261622 - DNA, 452 bp, Glycine max
  unsure (1)..(452): unsure at all n locations
cccacgcgtccgcacggtgatccgtatccttttgatggtccaggtgggatattgggccatgcggtcgctcccactgatgggaggtgccactttgacgccgacgaatattgggtggcgtctggcgatgtcaccaaatcgccggtgacaagtgcgtttgaccttgaatctgtggcagtgcacgagatcgggcacttgctcggattaggccactcgtcggacctaagagccatcatgtatccttctataccacctcgaactaggaaggtgaatctagcgcaagatgatagacgggattcgaaagctctatggtatcaacccctaattattatagctaggtgttgtttgtactagaactagagttttatttcggtaatttgcattaaaggattttgaaagttatcgaggtgaaattattctaattcangaacaacanaaatagcatgtaagatatt

SEQ ID NO: 261623 - DNA, 436 bp, Glycine max
cccacgcgtccgcccacgcgtccggttgttggaagccaaaaccctagcagccggcgagaatggcagacgttgaggttgatgtggcggcggcggcggcggcggcggctgcagggcagccaaagaagagaacgttcaagaagttcagcttcaggggggtggatctggacgcgcttctggacatgtccactgacgaactcgtgaagatgttcagtgctcgcgcacgcagaaggttccagagaggtctcaccagaaagcccatggccttgattaaaaagctccgcaaagcgaaaagggaagcaccagcaggtgagaagccagaaccagttcgcacccatcttcgcaacatgattattgtgcctgagatgattggtagcatcattggagtctacaatggcaagaccttcaaccaggttgaaatcaaacccgagatgattgg

SEQ ID NO: 261624 - DNA, 310 bp, Glycine max
ggattgaagaggtgcgaacagagagaggcagtgatgtcattattgttcttgttgggaacaaaactgatcttgtcgagaaaagacaagtctctatagaggaaggggaagcaaaagcacgtgagctcaatgtcatgttcattgaaactagtgctaaggctgggtttaatataaaggccctatttcgaaaaattgctgcagcactacctggaatggaaacactatcttctgcaaaacaagaagacatggttgatgtaaacttaaagtctacgaatgggagtgctcattctcgacctcagtcaagtggatgttc

SEQ ID NO: 261625 - DNA, 451 bp, Glycine max
cccacgcgtccgcccacagcagttttctgtttaatacgctccgtgcttttggaaatgattgccacccagatataaagagtgaaatatgcacacactttgctaattgtgagctgcgttcaatcgtcatcattgatagaggtatgattggatcaagtgaatcaactaccaactatcctggcaagattcctcgtggccccgatgttcccagtgaagctgctgactaaaaccattcagggattatccttaccaaataatagctcctctttgtgatcattggtcgtatattggaattttcattggtataatagggttatttcttaattgcatttacaggcaagtgttcaatattttgttttacccgaacaaactaatccgtaagagcagtttcaaaattcctttttagtggcttaaagtaaattggtaacatatgtaagtgccaatttttaagatg

SEQ ID NO: 261626 - DNA, 371 bp, Glycine max
ggagtctctgggtacccaacaattcagtggtttccaaaaggatctcttgaacccaaaaagtgtgaagggccacgcactgctgattcacttgctgagtttgtaaatacggaaggaggaacaaatgtgaagattgctacagctccttccaatgtagtggtgcttacatctgaaaattttaatgaggttgtcttagatgaaaccaaagatgtcttggttgagttttatgcaccctggtgtggacattgcaaaagtcttgctcctacttacgagaaaattgccacagcatttaaattggaggaagatgtattaattgcaaatctggatgctgataaatataaagatctggctgaaaagtatgatgtgagtggatt

SEQ ID NO: 261627 - DNA, 386 bp, Glycine max
  unsure (1)..(386): unsure at all n locations
ttcttgtttgcttcccaagtctctcgaagcatctttctttctcttcctgcagaagctatccgtgttacttgttcccaagtctccaacaagcaaagtacatggttgatttggaaatccaggtccccagcgcattcgacccgtttgccgaggcgagagaatcagatgcccccggggcaaaggagtatgtgcacatacgaattcagcagaggaatggaaagaagagtctgacaacagtgcaagggctgaagaaggagttcagctacgagaagatcctcaaggacctcaagaaggacttctgctgcaacgggactgtggtgcaggacaaggagcttggcaagattatccaactccaaagcgaccagcgcaagaacgtatnccatttcctc

SEQ ID NO: 261628 - DNA, 450 bp, Glycine max
aactatcgattccctcaaagtggaacccaagcaaagaggttgagtacacaggtcaggttgttggatatgaggataactttgattcaaccaccaacgtggttgtcaccatcactccgactgataagaagtctatcactgactatggttcacccgaagagttcctctctaaggtggattatttactaggaaaacaggccttcttcggcgaaacacaagccgagggtggttttgatccaaatgcggtggccacggctaacatcttagagacggcaacacctgtgattgatgggaagccgtactattttctgtctgtgttgacaaggactgctgatggagatgaaggtggcaagcaccacataattagagcaactgtaaaagatggaaaactgttcatttgcaaggctcaagctggagacatgaggtggttcaagggaacaagaagatttgtgg

SEQ ID NO: 261629 - DNA, 447 bp, Glycine max
cagacattcttgaaaaccgtaacggggaagacgatacccctagaggtggagtcatcggtcacagtcaacagtgtgaaggcgaatatccaggacacggtgggcatcccgccggaccagctgcgcctgatcttagacggcaagcagctggtggacggccggacgatagccgactacaaaatccagaaggagttcacgcttcacctcgtgctccgcctccgcggcggcgccaagaagcgctagaggaagacctacaccaagcccatgaagatcacgcacaagcacatgaatgtcaagctcgaccttctacagatctacaaggtcgacgactccggcaaggtccagaggctccggacggaatgccccatcgccgagtgcggcgccaggactttcatggccaaccacttcgatcgccactattgccgcaagtgtggtttgacctatgtttac

SEQ ID NO: 261630 - DNA, 451 bp, Glycine max
  unsure (1)..(451): unsure at all n locations
cccacgcgtccgggtgccaattggtagtgggattgacatgtgtaattttgaggaccctttggatgtaaatcctcctgcattgatcagtttaggtggcaatgccaaattgtctgggtataatgataggattccctgtagcttgttgtccaaaagtcgtgacaatgtaccagtagttagtagagatgatgatgaaaactcttctgggtgtactcaccctataaatactgaaaccaagtcctttaggccaaagacttgtataggtaaaagaatggcttctaactttcagaaagttgctgaaaaaacaaagaattatgcactttctaacaatgatggagattggaagcgaacttacctcagcaagaggaactgcaataaacaccaaagttctcagatgaatattcctttcaaaaagaggaagctttntaattatcgctcttgtgcaaactctaat

SEQ ID NO: 261631 - DNA, 385 bp, Glycine max
  unsure (1)..(385): unsure at all n locations
cccacgcgtccgctcttcttctcttgcggctagggttttagcgcagcttcttctagatttaaggaagatgggtaaggaaaaggttcacatcagtattgtggtcattggccatgtcgactctgggaaatccactaccactgatcacctgatttacaagcttggaggcattgacaagcgtgttattgagaggtttgagaaggaagctgctgagatgaacaagaggtctttcaagtatgcctgggtgctggacaaacttaaggctgagcgtgaaagaggaatcaccattgatattgctttgtggaagtttgaaacaacaaagtattattgcacagttattgatgcgcctggacatagggatttcattaagaatatgnatactgggaca

SEQ ID NO: 261632 - DNA, 143 bp, Glycine max
ggattgatcgagtgtactttttcttttcgagattggcttggtgtgcagtggaaagagggtggaaaagagtggtaagggggagggcggcgccccttgaaaaaataaaaaaaaaaaaataaaaaaaaaaaaaaaaggacaaacga

SEQ ID NO: 261633 - DNA, 443 bp, Glycine max
gttttcattcaatcatcactgatctaagatatgtctacatctgataagtcagaagtggtggaaaggggtgctaaggatgatgaaaagccaaaggaagaacatgagaagggtggatttcttgatacagtgaaggatttcattcaagacattggtgagaagattgagggagcagttgggtttgggaagccaactgcagatgtcactgggatacacattccatcaattaatcttgagaaggcagagctagttgttgatgttcttataaagaacccgaatccggtgccaattcccctaattgacataaactacttggtcgagagtgatgggaggaaactagtttcgggattgataccagattcgggcacaatccatgcacatggagaggagacagtcaagattcctcttactttgatttttgatgacttaaggaatacctatgatga

SEQ ID NO: 261634 - DNA, 456 bp, Glycine max
aattgcttctctgctggcagaggggaaggttcccattgggattggaaggaacacaaaaattaggaactgcataattgacaagaatgcaaagatcgggaaagatgtcatcatcatgaacaaagatggcgttcaagaagcagatagaccagaagatggattttacattcgatcaggaatcacagtcatattagagaaggcaacaatagaagatggcactgtcatataaataaatgggtggaagtacttatttcatggactggtgtagtggctagcagtactagctcgaagaagcattccaaggaactttggggacagaaggatccaattgaaaaatcagcactccccttttgctatatatgcaacacataaggctctcccactgcatgtaaaaataaaatgaataaacagtgtatgaaatcaagatgcataaacgtaaataaaatgaaaatgtgaatg

SEQ ID NO: 261635 - DNA, 457 bp, Glycine max
  unsure (1)..(457): unsure at all n locations
aagaagttcagatctgctgcttactccaactgcatccgcaagccatcctgagattccctaggttgtgtgacgacatagcccccgtagtcttgcatctgctatattattctagtctcttcttttcccttttcttgttctcttccttgcccttttgttctctctacctatacagcaagactttgtttctttttgagtcaagatggctggctcagctattggtttcgaaggctacgaaaaaagacttgagatatcattttttgaaaatggtgtgtttgctgaccccggaagattaggcctncgagcattgtccaaagaccaatgggacgagattcttaaaccagcagagtgcactatnngtgcatcactttcaaatganttatgtgactnctatgttctgtcagagtcaagcctgttcgtctatccttataaaattatcatcaaaacttgtgggactacc

SEQ ID NO: 261636 - DNA, 451 bp, Glycine max
gcacgaatatcttgttgtttggagcgatccgagaaaaactctgtaaacatgttggtttaccaggacctccttacaggtgatgagcttctctctgactccttccgttacaaggaaattgagaatggaatgctgtgggaagttgaggggaagtgggttgttaaaggagcagttgatgtagacattggtgcaaacccttctgctgagggtggaggagaagatgagggagttgatgatgcagctgttaaggttgttgacattgttgacacattcagacttcaggagcaacccgcattcgataagaagcagtttgttaccttcatgaagaggtttatcaagaatttgactcccaagctcgatgcagagcaacaggagttgtttaagaagcacatcgagggagcaactaaatacctgctctctaagattaaagatttccaattttttgttggtgaga

SEQ ID NO: 261637 - DNA, 458 bp, Glycine max
gggttatcaagtaaaagccgtggctttcctttaaaacatgatgagaaaaatatccatggtgggggtacaagttatggtgcaattgaagccaaggggaatccgccgataactccagcagtgatgactcctggaggacctcttgatctcacatctgttttgttcaggaatcgtataatcttcataggtcagccagtcaattcacaagtggctcagagagttatatcccagcttgtgactctagctactataaatgaaaatgcagacatactggtatatataaattgtcctggtggaagcacatattcagtgttggcaatttatgattgcatgtcttggataaagcccaaggttggtaccgtgtgttttggagtagctgcaagccaaggagcacttctacttgctggaggtgagaagggaatgcgctatgcgatgccaaatgctcgcataacgatacatta

SEQ ID NO: 261638 - DNA, 450 bp, Glycine max
caagaaacaacaagggatttccatggaagtctcaaaagaagaagctcgagtggcacccgcacgggccctagtggcgatgctgccatcccctggcatgggccacctaatcccaatgatcgagttcgcaaagcgagtggtgtgctaccataacctggcggtgagcttcgtgatccccactgacggcccaccttcaaaagcccaaaaggcagttctggaggcccttccggactcaatttcccacaccttactccctccggtcaatctctccgacttcccgccggacaccaaaatcgaaaccctgatctcccacaccgtcctccgctaccttccttccctccgccaagcattccactccctctccgccacaaacaccctctccgccgtcgtcgtagacctcttctgcaccgacgccttcgacgtcgccggcgaattcaatgccttcccctacgt

SEQ ID NO: 261639 - DNA, 489 bp, Glycine max
ggagccgacattgtgcaaaaggcactgatagctcctgcagcattgattgctcaaaatgctggaatagaaggtgaagttgttgtggagaaaataaagagtggtgaatgggaggtcggttacaatgctatggtagacaggtatgagaatttagtggaggctggagttatcgaccctgccaaggtaacaaggtgtgcattgcagaatgctgcttcagttgctggaatggtgttgaccacacaggccattgtggtggaaaaacctaagcccaaggcacctgtagctggtgccccacaaggccttaccgtttaaattttaggttattagggctacggcaaagaacagttttgtgcagaaaattgaaagagcggagagaaatataccgatgaattcgttcgtttctgtgccaagaaagtaatacaccatgaaattgctccagcatttcaacatcagtcaatctacatgcaagcagacgatgtgaaattctcctca

SEQ ID NO: 261640 - DNA, 423 bp, Glycine max
ggcgaagagatggccaccgttccagggcagctcgtgtgggagatcgtcaagaaaaacaattgcttcttggtcaagcagtttggaaggggcacccagagcgtcgaattcagcagagagagcaacaatctctacaacctcaattcgttcaagtactctggtttggcaaacaagaaaactgttactgttcagcctgagggcaaagatcaggctgtgttgttggctacaaccaagacaaagaagcaaaacaagcccgctgcattgctccacaaatctgtgatgaagaaggagttcaggaggatggcaaaagctgttgaaaaccaggtggccaaaaattactacaggcctgatctcaagaaggctgcccttgcaaggttgagtgctgttcacagaagcctcaaagttgccaagtctggtgtcaagaag

SEQ ID NO: 261641 - DNA, 478 bp, Glycine max
  unsure (1)..(478): unsure at all n locations
gaaggaaggtcagagtgacatctactacatcacaggtgaaagcaagaaggctgttgagaactctccattcttagagaagttgaagaagaagggatacgaggttctttatatggttgatgccattgatgaatatgctgttggtcagctcaaggaatttgagggcaagaagcttgtctctgccaccaaggaagggctcaagcttgacgagagtgaagatgagaagaagaagcaagaagagttgaaggagaagtttgacaacctctgcaaggtgatcaaggatgttttgggtgacaaggttgagaaggttgtggtctctgaccgcgttgtagattcaccatgctgtcttgtgactggcgaatacggttggaccgcanacatggaaaggataatgaaggcccaagctctaagggacaacagcatggcanggtacatgtcaagcaagaagaccatggagatcaacccttagaacccaatcatg

SEQ ID NO: 261642 - DNA, 459 bp, Glycine max
ggaagcttagagagagagagagagagagagagagagaggagagagtgttggcgcttcatcaagatgggtatttctagggattccatgcacaagaggcgtgccactggtggcaagaaaaaggcttggagaaagaagagaaagtatgagcttgggcgtcaggcagcaaacaccaagttatcaagcaacaagacaatcaggaggattcgtgttagaggtggcaatgttaaatggagggcattgaggctggatactggcaattactcatggggtagtgaagcagttactcgcaagactcgtattctagatgttgtttacaatgcctcaaacaacgagcttgtgcgaactcagaccctggtcaagagtgctattgtccaggttgatgctgctcctttcaggcagtggtaccttcagcactatggtgttgaaattggtagaaaaaagaaagtggcagccaagaag

SEQ ID NO: 261643 - DNA, 454 bp, Glycine max
  unsure (1)..(454): unsure at all n locations
gaaagaaaaaggtagagaaggagagagagagagagagaaagaaaactgaaaaaaaaaaaaagaggataagactaattaactacatttttggtttggtttttcttcatctcgcaggagacacgaagagacaagttacatcacatgagatgtcaggtggtggatgcagcagcatagtgtggttcagaagagatctgaggatagaagacaatccagcactgacagcaggagtgagagctggtgctgttgttgcagttttcatatgggcacctgaagaagaaggacaatactaccctggcagggtctctagatggtggctcaagaacagtttggctcaccttgattcctctctcaggaatcttggcactcctctcatcactaagcgatccactgatactctntcttctctatttgaggttgttaagtccactggagccactcaactcttttttaatca

SEQ ID NO: 261644 - DNA, 418 bp, Glycine max
  unsure (1)..(418): unsure at all n locations
cttatcacaaatgacaagtttgtcagtgtgtatcaccgtgtcttatcacagaacacaggcccaagaatatctgtagcaagcttctttgtaaattcgcatgatccagctgagggtacatcaaaggtgtatggtccaattaaggaactgctttcagaagaaaacccaccaatctaccgagacactaccttaaaagagtttttggcatattattatgcaaagggccttgatgggaactcttccttgggccccttcaggttgtgaatcgaacaagggaatatactcttcattctcatcgatcgtatctggatataatttatccaaacaacaagcctctacttttattgagaatgtttaacaatttgtttgttaaaaagacattaccgnctataagaaatatgaaacacttacattattnatt

SEQ ID NO: 261645 - DNA, 482 bp, Glycine max
  unsure (1)..(482): unsure at all n locations
gaatttcacgagtaataatttgattgattttggaaattttaagttttagatagctcatgagattcaattttctcacaattttcatcttattttatgacccatgttgatttgaacataattgacgcagttccatagttttcacgaaaattgaattagttaagttttagtgcttgaaaattcaaaattgtgtttcaaaattaaaaatgatcagattttttttaagaataaactagtaataaaataattacttaagaaattaatttatattttaataaaaaattaaattataacctaaaataaaataaagattatatgaataatttaacttaaattttgctagctgacacttcagctgtttttatataggcgttagtcttctctttggtttggccttttcaaacccaaccctcgcatggtatggttaacgtaacccanatcatatagaagacataagagattcagcaatacattgtcttcaccta

SEQ ID NO: 261646 - DNA, 464 bp, Glycine max
tgctcaccaacagcatatcttctttttgccttctcactccaacaattccctaatcccaaactcttcactcttcttcaccctcttcttttgctttcacaccaatctcagacaaaaaaaaaaaactaaaaaaaataattaagaaaccctagaaccgtgtttgggtggaggaaaacatggccaccaccaccaccagtctcggcggcggcgtcggcgtcggcggagacgaccgcgtcctcgccacggctcagcagatcgtgaagagtctcagggcggcgaaagaggatcgcgaagacatgcttatgatcttctccgccttcgataaccgtctctccggcatctccgacctcatcaacggcgacgattcgaagtcttctgatgaagaagacctcgaccgctttgaagccgcggagaaagtgattctcgctgatgcctctctctccggcgagccttcgcgtcaatccacg

SEQ ID NO: 261647 - DNA, 410 bp, Glycine max
cccacgcgtccgcccacgcgtccgcacacttgaggcctgcagagtacaagagatcaagggtgcccagaaaccgtaggactgtcaaccgtgcatatggcggagttttgtctggaagtgctgtcagggagaggattatccgagctttcttagttgaagagcaaaagattgtgaagaaggtcttgaagatccagaaggcaaaggaaaagcaagcctcaaaggcttgaatttgaacaacacaatgagacatctttttggaggacttttaggtttgagtggttatagttaatcacaaattttattagagttgtcatgttaattgtcttttattattttgcctgtttgaactctttctagagcaagtgttaactttgtcgacaatgtcattatgatacagttttggttctcaaaaa

SEQ ID NO: 261648 - DNA, 457 bp, Glycine max
gttttccaaaaggagaactgggctgcgcaagaaagccaacgaaatctgtgtgctctgtgatgctcaagtagcactgattgtgttcaatgctaaagggaagctttttgagtattcttctgaatccagcttgcttcaaagtcaaactgaaatagtactcgggaaggtttttaaattgtgcggccgtgattacaatttcgttgcaatctttggtattgtggaaaattaagaaaaatgcagctgatgttgtaacaattgcgattatgacgcggttgtgatgagttgaaaaacttgatgctgccactcatggtcacagacggtgtttccaaaccttggtgcagtaaaaagaaatgaaatagtagtaatatacatttccatacaatttcctagctaatttgttattgtgttttcattacctttttttatttattttttcctattttgggtttaatgcattcta

SEQ ID NO: 261649 - DNA, 448 bp, Glycine max
ggaagacatgggaaaagcttgggtaggcctggtggtattgctgtgtttgattgtcacggccatcgccgaacaatgcggtcgtcaagctggcgggcagacatgtcccaacaacctatgctgcagccagtacggttggtgtggaaacaccgaagaatactgttccccttctaagaactgccagagcaactgctggggaggcggcggcggtggcggtggcggcggcggcggtgaaagtgcttctaatgtccgcgccacatatcattactatgagccagagcaacacgggtgggacttgaacgccgtgagtgcttattgctcaacttgggacgctagcaaaccttactcatggcgcagtaaatatggctggaccgctttctgtggtcccgttggtcctcgtggccgtgattcttgtggaaagtgcttgcgggtgacaaatacaggaacagga

SEQ ID NO: 261650 - DNA, 445 bp, Glycine max
  unsure (1)..(445): unsure at all n locations
aaggtcgccaaccccatcgtcgagatggacggagatgaaatgactagggttatctggaagtcaatcaaggacaagctcattttgcccttcttggagttggacatcaagtattatgacttaggccttccttaccgtgatgagaccgatgataaagttacaattgaaagtgcggaagcaactctcaagtataatgtggcaattaagtgcgcaactattactccagatgaagctcgtgtgaaggagtttggtctgaagtcaatgtggaagagtccaaatgggacaattaggaacattttgaatggaactgtcttcagagaaccaattctttgcanaaacattccccgccttggtcctggttggacaaaggcaatatgcatttggaagacatgcgtttggtgatcaatatcgggcgactgacacagtaattaaaggagctggaaagctg

SEQ ID NO: 261651 - DNA, 419 bp, Glycine max
  unsure (1)..(419): unsure at all n locations
gcgagaaatggcgatggcaatggcgcttcgcaggctttcatcttcaattgacaagcctctgcgccctctcttcaatgccggttccctctactacaagtcgtctttgcctgatgaagctgtttacgacaaggagcgacccggagttacatggccgaagcagttgaatgctccacttgaggtcgtggatcctgagattgctgatattattgagcttgagaaagctaggcaatggaaggggctagaattgataccgtcagagaatttcacctctgtgtctgtgatgcaagcggttggatcggttatgaccaacaaatacagtgaggggtaccctggtgcaagatattatggtggaaatgagtatattgacatggctganacactgtgccaaaagcgtgccctagaagcttttagatgggatc

SEQ ID NO: 261652 - DNA, 416 bp, Glycine max
  unsure (1)..(416): unsure at all n locations
tattctcgcaaaacctcaggttcatccgctcccacaacaagaaccgcttgccctacactctctctgttaatcattttgctgattggacttgggaggagttcaaaagacacagactaggcgctgcccaaaattgctctgccactcttaacggcaaccacaagctcactgatgctgttcttcctcccacgaaagactggaggaaagaaggaatagtgagtgatgttaaagatcaaggcagctgcggatcatgctggacattcagcacaactggggctttagaagcagcctatgcacaagcatttgggaagagtatctctctttctgagcagcagctagtggattgtgctggccgtttcaacaactntggctgtaatggtgggttgccatcacaagcctttgagtacatcaaatacaat

SEQ ID NO: 261653 - DNA, 474 bp, Glycine max
ggaagaagacttcgacatccccggcggcgaggaaatggatctcggcgaagacgaggtcggcgaggagagggagatcggctctggcggcctcaagaagaagctcctcaaggaaggtcaaggctgggaaacccccgaagtcggtgacgaagtccaagttcattacacggggactttgctcgacgggactaagttcgattcgagccgcgacagggattctcccttcagcttcacgctcggacaagggcaagtaattaaaggatgggatgaaggtattaaaaccatgaagaaaggtgaaaatgctattttcaccatccctcccgagctagcttatggtgaatctggttcccctcctactattcctcctaatgctacactccaatttgatgttgagctgctgtcatggactagtgtaaaagacatatgccaggatggcggtatatttaagaagataattacctgaaggggagaaatggg

SEQ ID NO: 261654 - DNA, 447 bp, Glycine max
cccacgcgtccgcccacgcgtccgccacatttctctattttctagtatttggcacatagtgcattgtttgggccattattaatcaaccaaggaaaaacaccaccttttggcttcttctgctgttccaactgtgcattttgtgtgctgtttctttcacaaacaagcagcaacagcagccagaatgagaatggggaacctcttctggcttggcattgttgcagcacttgttttcagcttctgggttgattccttttctgcctatgaatatcaccacttcaatgaaaccgagttctctttgttggagtctcaagaacaggtacattcatccctccttgggagaacttctctcatggttggactcacagttattcaaagtgctgctggcaaaggagcagtttgcttggatggaacattgcctgcttatcatttgcattcgggatatggatc

SEQ ID NO: 261655 - DNA, 451 bp, Glycine max
ccgacctgatgtgtctactgtttgtgttggattagcagctagtatgggagcttttctgctgagcgcagggacaaaaggaaagagatacagcttgccaaattcaaggataatgattcatcaaccgcttggtggtgctcaaggagggcaaactgacatagatattcaggctaatgaaatgctgcatcataaggcaaatctgaatggatatctcgcctatcacactggccaaagtttagacaagatcaaccaggatacagaccgtgactttttcatgagtgcaaaagaagccaaggaatatggactcatagatggtgtcattatgaatcctctcaaagctctccagccattagaggctgcagcagaaagtaaagaccgggctagtgtttgaacatgagaatgttgcactttaatttccaaggtataaaaaatcatagtggtagactgtaagatg

SEQ ID NO: 261656 - DNA, 446 bp, Glycine max
agcagaaggaggagaagcagaaagaggagacgaagcaatggcgccggagaagccccgaaccgggtcgaggaaccctgatttggtcaggggaattggcaaatattcgaggtcgcagatgtaccacaagaggggcatctgggccatcaaggccaaaaacggcggtgttttgccccttcacgatcccaagcccaaacccgaggccccggcccagaagccgtccaagttctacccggccgatgacgtgaagaagcccctcgtcaacaagcacaagcccaagcccgcaaaactcagggctagcattactccagggactgttctgatcctgcttgctgggaagttcaagggaaagaagggttgtttcttgaagcagcttccatctggattgcttcttgtaacaagtccctttaagatcaatggggttcctctgagaagggtgaaccaatcgt

SEQ ID NO: 261657 - DNA, 436 bp, Glycine max
cttctatctggttgaatcagttttactacatcttcggcttcctctgcttggtcttcgtcatgctcatcgtcacttgtgctgaaatcaccattgtgctttgctacttccagttgtgcagtgaggattacttgtggtggtggcgatcatacctcacatctggctcttctgctctgtacctctttctttacgcaacattttacttcttcaccaagcttgaaatcacgaaattggtatctgggttattatactttggttacatgcttatagcatcctacgccttctttgttgtaaccggaaccattggattttacgcgtgcttttggttcactaggctcatctactcctcagtcaagattgattagttatagcaaccagtggtttttggataatctactacacttcttgaaggacgaaggaccggttgtgtaaggatttg

SEQ ID NO: 261658 - DNA, 461 bp, Glycine max
gtgatatggcttgtaattctatctcccaagcagcttcaatgggcacacaaatatgcacccaaatagcttccatattctcaaagcccacccatccatacccggccccactagaccttttagtcaccgaactcacctccgttgcctctcaaaaaggcaacgtttttctatacggcgtgggccgcgagggcctcatgctcaaggccctctgcatgcgcctcttccacctgggcctctcggcccactttgtcttcgacatgaccacaccccccatagccgccggcgacctcctcatcgcctctgccggccccggcggattctccaccgtcgatgccctctgcgcggtggcgcgctccaacggcggaagggtgctgctcctcactgcccagcccgagacaaggtcttgcgtgaaacacgccaacgctgtggcttacgtggcagcgcagaccatggccgatgatgcg

SEQ ID NO: 261659 - DNA, 470 bp, Glycine max
  unsure (1)..(470): unsure at all n locations
cccacgcgtccgtaagtgcccatttcttcttgtagtggttattagaggatttgctcgctatcatatcacagtatatatcttcttatttgtttaatttttatgtttcttaggtgaattactcaagagggctcgacaatcccacaaagtagaaaaagaggttatgttatggcgggcaaaggtgttagttcggtggctaaggcggtagcagaatatcagtatccttggcgtgagaagttggggaaatataaggatgagcttgccaagggtgtgtggggatactgggagctgggggcatggaagccgctgagtatcagtgctcggcatcgtgctagaattcgcaaggaagtcctccttgctggggaagattggccctacgatcctgaaaggaaggagatgaagaccaggaggaaaggacacaaatgtgataggatttctgccgaaaagcgcgcanacacagcgaagttgatgga

SEQ ID NO: 261660 - DNA, 455 bp, Glycine max
  unsure (1)..(455): unsure at all n locations
ggaagaacgaacctgtttaattcccccaaatcggaagttgatcctgagaccctaaatagccggtaacgttgtgtctatgtttttgaattatggacgcgaaggatatcctgggattgcccaaaaactcgttcccatctctcgagaagaaatctcgtcctcccaaagagtctcaaagaaaaccagatggcatttcgcgcgaggtgtatgcgcttacgggcggattggcctctctcatgcctgcaattgaagcctctcagttgaagaaaaagcctcttcctctcgaaaaaatcacttggcagtggcttcctttcaccagttctgctcgtaaagataatcttcatctttaccattgggtacgagtcatcaatggtgttcctcctacggnggactattcttttgccaagtataataagtccgttgatgttatcaaatacacagatgaggagtatgacaag

SEQ ID NO: 261661 - DNA, 371 bp, Glycine max
cgtttatcatctggtccacgcctctgccaaagagcttgtggaactgggtgtatacgctgtgagtgcctgccacctggcactgctggaaaccaagaactgtgtccctgctatgcaagtttgactactcatggtggcaaacgcaagtgcccttagacttaattggaccactatcctatgcatgcctttgatttatattataaaataaaaataatactatatataacatgttaattgcttaatatgtgctttaagagtaaagaatcacatcgtgaaatcaaattacccctttctcaatacgtgttgaatcatcgatcttggtttgtaattaggttgtatattcacaaaattaattagtatattgtgatgtgatt

SEQ ID NO: 261662 - DNA, 404 bp, Glycine max
gcttattctctcgcattccgtggagatctagtgcttctgctgcaagacctcgctgaaaatgagggtttcgattcggaggtagacgaagatgttcggaagggctccgaagaaaagcgacagcaccaggtactacgaaatcctcggcgtttccaagaacgcttcgccggatgacttaaagaaggcttacaagaaagccgccattaagaaccatcctgacaaaggcggggatcccgagaagtttaaagagcttgctcaagcctatgaggttctgagtgaccctgagaagcgcgagatttatgatacatatggagaagatgctcttaaggaaggaatgggtggtggtggcggtggccatgatccatttgatatcttcagttcattctttggtggaagtccgtttgggt

SEQ ID NO: 261663 - DNA, 492 bp, Glycine max
  unsure (1)..(492): unsure at all n locations
gaaagtgagagagtccaattatgcgaacgctttgtgatgcttgtgagagtgcggcggctatagttttctgcgccgctgatgaggctgcactttgtcgtgcctgtgatgagaaggttcacatgtgcaataagctagctagtaggcatgtgagggttggtcttgcaagtccaagtgatgtgccacggtgtgacatatgtgagaatgcaccagctttcttctattgcgagacagatggaagttccctttgtttgcagtgtgatatgattgttcatgttggtggtaaaagaacgcatggaagatatcttctgttcaggcaaagagttgagtttccaggagataaatctagtcatgctgaaaatccggcttcacaagcattggaaccaggtgaggctaaaagaggaccaaatccactttccaagctanaaaatgggagagaagcaacanaatcacaggatgcctatgggttcaacaccaggacctgatgctgatggg

SEQ ID NO: 261664 - DNA, 372 bp, Glycine max
gtatgtccctacttcagaagggcctgtgctgtgtctatgacatgggtaaccataataatgtgggctcactgaacctctcaatcacaaattaccatgccgcaaaaccgctatccaaaacagccacatattctcctctccaatacgtgacacgtggcaaaccccggaggaggatgctgaaacctatatccgcagctcttcccgatccaacgacgcttgacctcacagaaaataacgtgaaacaggttttagacgacgctcgaaaggagctgggtcaaatctttgacacctctgtaggtatgacaggagtggttgaactagctaacttggatgggccttatgagaaaaatagccttagtggtcggttttggcaca

SEQ ID NO: 261665 - DNA, 394 bp, Glycine max
cccacgcgtccgcacattcttcatcacttcattcaacatttctggctcccttagctagttgggaccaatggctgctgcggttagtgctgcagtctcttttccatccaccaagtctacctctctcccaagcaggaccttcatcattaccccagacagagttgttttcaaaaaggcttcattgcaatacagagatgtttgtagcattggaatggcagtttccatcagagctcaagtcaccactgaggctacattcaaagacgtaaaagagtccaagaaacatgatgaaggtgttgttgtgaacaagttcaaacccaataccccttacgttggtagatgcctgctcaacacatagatcactggtgatgaatctccatgagaaacttgtcacatggtc

SEQ ID NO: 261666 - DNA, 455 bp, Glycine max
cccacgcgtccggtttgtgctgagtttggtggatctgttttcaaacggcttgttggagaggcgctttcaaggttagatgctgtgataaggcatccaaatgcactacattctgataacataatggcatatgacaatgctgtttcagctcttggaaaaatatgccaattccatcgtgatagcataaatgcagcacaggttgttcctgcctggctaaattgcttgcctataaaaggtgatttaattgaagccaaggttgtgcatgaccaactttgttcaatggttgaaagatcggatagagaacttataagtcccaacaatcaatatctttccaaaattgttgcagtttttgccgagattttatgtgcgggaaataatctggcaaacgaacagactgttagtcggatgattaatttattgaggcaacttcaacagactttaccaccttctacacttgc

SEQ ID NO: 261667 - DNA, 459 bp, Glycine max
cccacgcgtccgcccacgcgtccgcccacgcgtccgcccacgcgtccgcttcgagtgaggtatttgctgcttctgatccttgctcagtttaattctaaattaccaatttcaacattaacttgtgattgcataaaccataagcgaaacgattctgaagcgcgtttgtttatgggacagggaaatggctcccaaaccgcctagtacgggtctgtttgttggactgaacaagggtcacgtcgtcaccaagaaggaattgcccccacgcccctcagatcgtaaggggaaaacaagcaagagggtgcactttgtgaggaacctcataagagaggttgctggttttgcaccctatgaaaagcgtataactgagttgctgaaggttgggaaggataagagggcactgaaggttgcaaagagaaagcttggaacccacaaacgtgcaaagaagaagcgtgaggaaat

SEQ ID NO: 261668 - DNA, 333 bp, Glycine max
ggaaaacactggtccaatcaacattgggaacccaggtgaatttacgatgattgaacttgccgagaatgtgaaagagcttatcaatccaaaagtgcagataaatatggttgagaacactcctgacgatcctcgtcagagaaaaccagacattacaaaagcaaaggaattgctgagatgggaaccaaaggtcaagttgtatgatggccttcctctcatggaagaggatttccgtcagaggcttggagttcccaagagcaactaagctccttttactccttcatttcttatcatataatcataatgaatattttgatagtaacggggatgtggatg

SEQ ID NO: 261669 - DNA, 419 bp, Glycine max
gctttggaagcctgcttcggttaccctctgaacagttaaaggaaattgcttgtggtcttgaagcttctgaacaatcgttcatttgggtggtgaggaatatccataacaacccatcagaaaacaaagaaaatgggaacggaaactttcttccggaagggtttgagcagaggatgaatgaaacgggtaaagggttggttcttagaggttgggctcctcaattgttgattttggagcatgttgcaatcaaagggtttatgacccattgtggatggaactccactttgtaaagtgtgtgtgcgggagtgcctatgattacgtggcctgtctcggccgatcaattttcgaatgagaaggtgataactgatgttctgaagattggtgttcaagtgggaagcagagagtggttgacgtggaattca

SEQ ID NO: 261670 - DNA, 324 bp, Glycine max
gctgagagagcgcgctgcggcagcaagtcctatcagtgtaagacagatgctcgtaatgaagacgatcttgaacaatgagacaatgaatattcccgacagcatgagcataacggatcacgctacagttatcgaggtagcgggaactcgtgtaaaactcgtgctagacttacaccgtctgaacctggacttgcaacttattaccgacgatggccgccaaaggaagctcaagagtgacacttggcaaggatctcgtaaaagctccatcgtcattcgaaccgcactcaggcacgtttagaatctgaacaccctaataaccaatggata

SEQ ID NO: 261671 - DNA, 397 bp, Glycine max
catgacttgattcaggacatgggcaagcgaatagaccaagaatcctcagaagatccagggaagcgaaggagattgtggttaacaaaagatataattgaagttttagaaggcaactcgggaagtagagagattgaaatgatatgtctggatttatccttatccgagaaagaagcaacaatagaatgggaaggagatgccttcaaaaagatgaaaaaccttaaaatacttattattagaaatggtaaattttccaaaggtcccaattattttccagaaagtttaagattactggaatggcatcggtatccttctaattgtttaccatctaattttcctccgaaggaacttgctatatgcaagttacctcaaagttgcattacgtcatttgggttccatg

SEQ ID NO: 261672 - DNA, 309 bp, Glycine max
agcaaagcaaagcagagccaacaacatgaagatcaaaaccaacatcaacaaccacaagaagaagaagctggcaaattagaagaatcttcagttgaaagggaagaacacacaagaacaaagagaggaagaaacgcgaatgaagggagaattagagttgccaccagggttcagatttcaccccactgatgaagaattggtgaatcactacttgtgtaagaagtgcgcgggtcaaccaatcgcggttcccatcatcaaagaggtcgatttgtacacgtatgatccatggcaactttcataaaatgggtacta

SEQ ID NO: 261673 - DNA, 412 bp, Glycine max
cccacgcgtccggataaacttaagaattcaattattgaaattgaataagtaaacaatttaattggattggtcgaatggtatcaaaaaaatggagtactaactcccatttcttatttattattgaattaaccgatcaacttgctttgttatcgaacatttctttttgatttcaaaaattttccggaaaaaaatttgaatctatttttatatgcgaatcaatcctactacttctggtcctgaggtttctgcgcttgaaaaaaaaaatctgggacgtatcgcccaaataattggtccggtactagatgtagcttttcccccaggtaagatgcctaatatttacaacgctctgatagttaagggtcgagatactgttggtcaacaaattaatgtgacttgtgaagtacagcaatta

SEQ ID NO: 261674 - DNA, 322 bp, Glycine max
cggaactttctcagattgacacacaccatgaaggaaagtggtttcgagaataatgatacaaagcatgctgctgctgatgcgttgtttctatattcaaaatttgcaatggcatgcattggatgtaaggctcgtccatgtgattcgaggtttcatttgatgaacgagatttcaggtatgccctattctctaaatagggagtcaccacagaatgcatcatctgctgatgcaatgggtgagtcatgcagcacaggaacagcatgacttgatagatcagacagttttcgtgcactctagttgagagtggactgtgaccaatgttttt

SEQ ID NO: 261675 - DNA, 420 bp, Glycine max
  unsure (1)..(420): unsure at all n locations
ccttggagaccccaacgtggccttccagagcgtgccgtttcagttcttcgggcttggctctttgaacattttctccatccgtacccaagcgatgttgataagcatattttagcacgccaaaccggtctctcgagaggccaggtttcgaattggtttattaatgcaagggtgagactatggaagccaatggtagaagaaatgtacttggaggaagtgaaggatcctgagaacaacatagcttcctcagaaggggctactgatcaagacaatgatataaacccaaataatgttcaataccctccacctnctttatcatcaagatcagaggatcagaagccatcactggttcgaattgactccgagtgtgcgtnctccatcatcaacaaccacagtaccccagattacaaaaacgatccaaag

SEQ ID NO: 261676 - DNA, 422 bp, Glycine max
agaagatggagatgtatcagatctggagcaggagaatagcgttgggagcgttcgcgtttgttctgcttttcctatcggcctcagcagacgacgtcgttgtgctctctgaagataacttcgagaaggaagttggtcaggacagaggagctctcgttgagttctatgctccttggtgtggacactgcaaaaagcttgctccagaatatgaaaagcttggtagcagcttcaagaaagccaaatctgttttaatcggcaaggttgactgtgatgagcacaagagtttgtgcagcaaatatggagtctctgggtacccaacaattcagtggtttccaaaaggatctcttgaacccaaaaagtatgaaaggccacgcactgctgattcacttgctgagtttgtaaataccggaggaggaacaaatgtg

SEQ ID NO: 261677 - DNA, 286 bp, Glycine max
tagtgcaccgtaagggttgtgaagcaggcagagaagagccatggtgcacgtttctttctaccgaaactatgggaaaacgttcaagaagcctcgtcgtccctacgagaaggagcgtttggacgccgagttgaagctggtcggtgagtacgggcttcgctgcaagagggagttatggagggtccagtacgccctgagccgcatccgtaacaacgccagatacctattgacccttgatgagaagaaccctcgccgtatcttcgagggtgaagcccttctccgaaaaatg

SEQ ID NO: 261678 - DNA, 317 bp, Glycine max
acgcacacgcttgcgctgggatgttaacgagctatttagagcctaggtgcacgtcattctctacggaagctaccggtaaacgtttaacaagccatctcgtagctactactacgaacgttattgctgccataatcaatctggtctgtcagtgcgaacgttgacgatggagctgatactggagggtgctgcacgtcctaagtcgaatacgtgactagagaacccacctactgaccgtagatgaacttaactggtaaagattctatcatgtttgaaaattcattcgaagaatagctcgctactgactatgcaattatgca

SEQ ID NO: 261679 - DNA, 362 bp, Glycine max
acgtagtgcaccgtgagggttgtgaagcatgcagagtagagccatggtgcacgtttctttctaccgaaacgatgggaaaacgttcaagaagcctcgtcgtccctacgagaaggagcgtttggacgccgagttgaagctggtcggtgagtacgggcttcgctgcaagagggagttatggagggtccagtacgccctgagccgcatccgtaacaacgccagatacctattgacccttgatgagaagaaccctcgccgtatcttcgagggtgaagcccttttccgaagaatgttccgttacggactccttgacgagacacataacaagctggattatgggttggcttttaccgtcgaaaactttt

SEQ ID NO: 261680 - DNA, 376 bp, Glycine max
agaaaactagacctggtcctgcccaggaagctgttaaagctagagccatgagagttcttaagcaaaaacgaatgtatgaaggccagcgtgacatgctgtacaatcagacgttcaatctcgatcaagttcaatttgctgctgagggcattaaagatgctcaacaaactatgacagctttgaagtctgccaacaaggagttgaagggaatgatgaaaactgtgaagatccaagacattgataacttgcatgatgagatgatggacctcatggatgtaagtaatgaaatccaagagactttgtgtagaagctataatgtgcctgatgacattgatgaggatgaccttatgggtgaacttgatgcattggaattagacat

SEQ ID NO: 261681 - DNA, 363 bp, Glycine max
cttactagaacgaaaaataaaagaagagcaattttccctcaccaaagaagaagaagcaaacaatggccgatcaacttaccgatgaacagatctccgagttcaaggaagccttcagcttgttcgacaaggacggcgatggttgcatcacaaccaaggagcttggaactgttatgcgttcattggggcaaaacccaactgaggcagagctccaggacatgatcaatgaagtggatgctgatgggaatggtaccattgacttccctgagttcctaaatctcatggccaggaagatgaaggacactgattctgatgaggagctgaaagaggcattccgggttttcgacaaggaccagaatgggttca

SEQ ID NO: 261682 - DNA, 378 bp, Glycine max
ggccaccgttccagggcagctcgtgtgggagatcgtgaagaaaaacaactcctttttggtcaagcagttcggaagggggacccagagcgtcgaattcagcagagagagcaacaatctctacaacctcaattcgttcaagtactctggtttggcaaacaagaaaactgttacggtacagcctgagggtaaagatcaggctgtgttgttggctacaacaaagacaaagaagcaaaacaagcctgctgcattgcttcacaaatctgtgatgaagaaggagttcaggaggatggcaaaggctgttgaaaatcaggtggcagaaaattactacaggcccgatctcaagaaagccgccctttgcaggttgaatgctgttcacag

SEQ ID NO: 261683 - DNA, 353 bp, Glycine max
ttcaccttgaagtatcctatagagcatggcatagtcagcaactgggacgatatggagaagagttggcgtcacacattttacaatgagctacgtgttgcccctgaagaacaccccgtacttcttaccgaggcaccactcaatcccaaggccaactgagagaagatgacccaaattatgtttgagactttcaatgtgcctgccatgtatgttgcaattcatgctgtcttgtctctgtatgccagtggacgtactacaggtattgtgcttgattctggtgatggtgttagccacacggtgcccatatatgaagggtatggctctttctcatgcaattctttggttgggacctttgt

SEQ ID NO: 261684 - DNA, 375 bp, Glycine max
  unsure (1)..(375): unsure at all n locations
cccacgcgttcgcccacgcgtccgccgcaacagagagtagaaaagatggcgcggttgatcacagtggtgtggtgcgcggtggcggtgctactgtgcgccgcggcgggcgcgtcgtgggtggaggaggcggcgaacccgatacgaatggtggcggnggtggaggcggaggtggttcgggtgatagggcagtgccggcgcgcgctgaagtttgctaggttcatgagcaggttcgggaagagttaccgaagcgaggaagagatgagggagaggtacgagatattctcgcataaccttaagttcatccgctcccacaacaagaaccgcttgccctacactctctctggtaatcattttgctgattggacttgggaggag

SEQ ID NO: 261685 - DNA, 306 bp, Glycine max
gccacaggctccttttgatcaggttaaacctgcacttcctgctcttgcccgtcttatccattcaaacgatgaagaagtattgactgatgcatgttgggcactgtcatatctttctgatggcacaaatgataaaattcaagctgtaattgaagctggtgtttgtccccgacttgttgagctgctgctgcacccatccccttcagtgctaattcctgctcttcgaactgttggaaatattgtcactggagatgatatgcagactcaggttatcatcaatcaccaggctcttccttgccttcttaatct

SEQ ID NO: 261686 - DNA, 423 bp, Glycine max
cccacgcgtccgctcattttctagcttccaaaccctaacactcctcttgctcttcgatcatgacctctccacaatgccgccgaagttcgacccctcccagatagtcgacgtcttcgtccgcgttaccggcggcgaagtcggcgcggcgagttccctggccccgaagatcggtcccctcggtctctcccccaagaagatcggagaagacatcgcctaagaaaccgccaaggactggaagggcctccgcgtcaccgtcaagctcaccgttcagaatcgtcaggcgaaggtcactgtggtcccctccgacggcgtcctcgttatcaaggccctcaaggagcccgagcgcgaccgcaagaagaccaggaacatcaagcacaacgggaacatctcgctcgatgacgtcatcgagatcgctaggggtat

SEQ ID NO: 261687 - DNA, 395 bp, Glycine max
gcagcatgtatgtagatgtctaatgggcttgtttctttcgctgaggaatcggattgatcatgattcattgatgtattgctcggtttgttatgaaaatttatcttaaggggggtctattattctcctaactcaaaaaaaaaaaacaaaaaataacaatgacaaaaaaaataaaaacactaaaactataccccaagaagatcagaaaaaacaatccactaagaaaccgacaaagactgaaagggcctgcgcgtcaccttcaagctcaccgatcataatcgtcaagccaatgtcactgtaatcccctacgtcgtcgacctcgttatcaaggcctttaaagagcccatacgcgaccgcaagatgaccactatcatctatctcaactgcaacatctcgct

SEQ ID NO: 261688 - DNA, 381 bp, Glycine max
ggcagaggagggaattaactttgtggtgaatgctaatatcgggcatgatcctttacattctgtcgataggcttcgggaggaaaataatgctattgtcttggctgtaggagccacaaaaccaagggatctcccagtacctgggcgggagctgtcaggagttcattttgctatggagtttcttcatgcaaacactaaaagcttgcttgatagcaatctccaggatggtaacttcatttctgctaagggaaagaaagttggggttattggtagaggtgacacgggcacatattgcatatggacatccattcggcatgggtgtagtagcatttgaaatctggaacttcttccttagtcaccacaaactaaggccccaagcaaacc

SEQ ID NO: 261689 - DNA, 400 bp, Glycine max
ctttctccaaacctacctttctatcttttctttttcatcggagcattatttgataccctcttgagtcctctctgcagcaacgcatttttcctcattctcttaaacaatttaacttctcctcgtttgatctgcataaaattgcattaatataaaaaatgaagaagtttgtactaaagttagatttgcatgatgacaaggataagcagaaggccttgaaaacagtttcaactctttcaggaattgatgccatagccatggatatgaaagagaagaaattaacagtgataggaacagttgatccggtaactgtggtgagcaaattgcgcaaatactggaaggcagacatagtagcagttggaccagtgaaggaacctgagaagaatgaggatcccaagaaagc

SEQ ID NO: 261690 - DNA, 286 bp, Glycine max
ctctaacctacctctttttcttctctctcaacaacttcaccttcttcctcctcgatcatgtctcacttcaagggcaagtaccatgatgagcttatcgccaatgctgcgtacattggcactcctggaaagggtattcttgctgctgatgagtcaacagggacaattggcaagcgtttggccagcatcagtgtagagaacattgaatccaacaggcgagctcttagggagctgcttttcactgctcctggtgttcttcaatatctcagtggtgtcatcctctttgagg

SEQ ID NO: 261691 - DNA, 369 bp, Glycine max
cttgaggatgttatggaagaggggggaaacattgtggactaccatggctgtgatttctttcccgagcgttggtttgattgcgtggttgtacttcaaactgataacaccgttttgtatgaccgtttgagtcggagggggtacaaagattcaaagctttcgaacaatattgaatgtgaaatcttacaagttctgcttgaggaggctaaagaaagttactcataggagaaactgattgcaatgaagagtgataatatagaagacattagtagaaatgtggcaactctgacagattgtgtcagatattggtcttttgccctcacaggtcttgacaaaaaaaaatgaggtacttttgtattatactcatttttg

SEQ ID NO: 261692 - DNA, 261 bp, Glycine max
agaagcgggaggactgcttacgttgcgcggacacgaagcattgacaccgggaccgtccaggagaacattatggaaccctgaccagtgaacagacataggcacatttaagttgtcagagagtgccacatgaagagcgtcttggacatgatggcacatgacgaccatactgagattgtagagcacggcatgaacctacccgagggtcagaagcagaacatacacatggtctacgctgtcgatgacgactataatctatatgtt

SEQ ID NO: 261693 - DNA, 464 bp, Glycine max
  unsure (1)..(464): unsure at all n locations
cccttctccaacatgccaaacgacagcgttctgagtcttttcttgttcgttaccctcttgacatgccttctctgtgctaattcccacgatgaccatatcttcctaccgagtcaactccatgacgatgactcagtgagtcgcactgctaccgacccaaaccttaactacaagccggtgatcggaatcctgacccaccccggcgacggtgcctctggccggctcagcaacgccaccggggtttcttacatcgccgcctactacgttaaattcgtggagtccggaggtgctagagttattccccttatctacaatgagtcacctgagaaccttaacatgaagctcgatttggtcaatggagtgctcttcactggtgggtgggctgtttctggtccatatttggatactcttggaaacanttttaagacagctttagagaaaaatgatgctggagaccatttcccagt

SEQ ID NO: 261694 - DNA, 469 bp, Glycine max
cccacgcgtccgaccacgcgtccgggggttcatagatttagggaatcgattactatactaggaataaattgtacaaaaaataaaaatataaataatataaatataaaaagaacaaacacaaattttatgtgattagtcgcggtatttaaaataaaaaatgaaagtagacaaataaaaaaggaaaggagatgtttgaataaaaataattccccttcaagttcttattttttgagaggacaggacaatatgaatgttttattatgctctatcaacacattaaaaagattatatgatatatctgctgtggaagtaggtcaacatttctattggcaaatagggagtttccaagtacatgcccaagtacttattacttcttgtgttgtaattgctctcttaatgggtttagccattctaattattcgaaatctgcaaaccattcccgttttcggtcagaatttctttgaatatg

SEQ ID NO: 261695 - DNA, 312 bp, Glycine max
aatttggttgccatgtataaaaaaatccatagaggggacttcaagtgcccaccgtggttctctctcgatgcgagaaagcttgttacgaaactgcttgatccgaatccgaatacgaggattagtatttctaaagtgatggagtcttcttggtttaagaaacaggtgccgaggaaggtggaggaggtggttgagaaggtcgatttggaggagaagattgagaatcaggagacgatgaatgctttccacataatctacttgtcggaggggttcaatttgtcgccgttgttcgaggagaagaggatggaagagatg

SEQ ID NO: 261696 - DNA, 277 bp, Glycine max
acgcatatgctgaatatgtgtatagaacaagggattacttttcgtggctattgaccataatagggctatgtcacatcaaggcccttatgatatcagactcgcataagttataaggcctagagtggcgccaggttcttgaggattataggctatcacatccagatattacctgacttgatccttcagatgccatacaacatttactcagccggcagaacatgcttcacgctagacctgatatgaacctatctgagtcccatggcatcattggtgcacc

SEQ ID NO: 261697 - DNA, 343 bp, Glycine max
cccacgcgtccgcccttccattacaactccttctcgcgcgatagattgctctttctcctctgctccttcctttcccattcctcctttccctctgccctccgcatcccccaattgtcccccaaactttctccctccgccgctccgccgtcgcccctctcgctcgccctgcgccgtcggcttcgcccctggacgccatggcccagaaaatcagaaagtgcacgcgccgacacggctcgtactccaaggcccgcgactactccgatgtcaacgtcaatcgccccaaggaatattgggactacgagtcccttaacgtccagtggagggagcaagatgattatgacgt

SEQ ID NO: 261698 - DNA, 395 bp, Glycine max
ctgacgcatggtatccctccagtccagctgtaattgatcagaggattcaaggcaagtctgaggtgatacctgagcatcaagtaaccagtttaggtagacattttgaaagtgaccatgattcatcaccttctcctgtcaatgcgtatggtgacaaaaatatgatatattccaaagaactggttactgtacctgaaatggatgatgaactagctatggtacctgtacaccagatgccaaagcgatctgagatcgtacagcgtcgaatactcaggcctttgactgtatatgaagtctacacactggttcaagcactcgagaaactaggaactggaaagtggcgtgatgctaagctttgtgcttttgataatgcatagcatagtgcatatgctgatttg

SEQ ID NO: 261699 - DNA, 358 bp, Glycine max
cccacgcgtccgggacaagcgaagaatgcttcatgttgtatatcgtgttggggacttggacgggaccataaagttttatacagagtgcctaggaatgaagctcctcagaaagagggacataccagaggagaaatatactaatgcctttcttggatatgggcccgaagactcacactttgttattgaactgacatacaattatggagttgacaagtatgatatcggaactggatttggccattttggtatagctgatgatgatgttgcaaaagcagtggaactaatcagagctaagggtggcaaaataactagggagcctggtcctgtcaagggaaggcgttcagtaattgcatgtatt

SEQ ID NO: 261700 - DNA, 372 bp, Glycine max
gagaagtcaattgagcttttgattcggtttacccgggctgggaagtctgcttcttatgctggtctcatgggggattcctttgggaattatggaaaagctctggtgcagatatgtgttataatcaataacatcggtgttctgattgtttacatgattataattggtgatgtgctctctggaacatcttcaagtggagatcatcactatggtatccttgaaggatggtttggtgtgcaatggtggacaggccggacatttgttgtactttttactacacttgccatatttgtacctcttgcgagctttaagcgaattgattcattgagattaacgttctgcctttcagtcgcacttgcagttgtttttctagtc

SEQ ID NO: 261701 - DNA, 359 bp, Glycine max
cgcacgcgtccggtacaagcgaacaatgcttcatgttgtatatcgagttggggacttggacaggaccataaagttttatacagagtgcctacgaatgaagctcctcagaaagagggacataccagaggagaaatatactaatgcctttcttggatatgggcccgaagactcacactttgttattgaactgacatacaatgatggagttgacaagtatgatatcggaactggatttggccattttggcatagctgttgatgatgttgcaaaagcagtggaactaatcacagctaagggtggcaaaataactagggagcctggtcctgtcaagggagggcgttcagtaattgcatttattg

SEQ ID NO: 261702 - DNA, 344 bp, Glycine max
cacagaacaagctggggtggggcgacgcgctgcctggaacgggacagagacagagagggttccttccggtcgctgtaattggtttggcgttcaattgaggaagaacaatgtcggtgacagcgggtgttagtgatactgtaatagccattagggataagctcagaggtaaaattggccaaactaaagttaagcgttattggcccggtaaagttcctgaatgggctgatgatgagaacgaagaagatgctgcccctgccgatattagaccctccaaggaagctgccttggagaaagcctttcctcgtcacgaagaaaacgcttgtattgtcagaaaagacgatcgt

SEQ ID NO: 261703 - DNA, 454 bp, Glycine max
  unsure (1)..(454): unsure at all n locations
gctctgtttctgtctctgtgtttgcggctgaggattccgaacgagcgaccttcttcgtttctcgcaaagtttaagtcatcatgggtaaggaaaagactcacatcaacattgtcgtcattggacatgtcgactctgggaagtcaactaccactggtcatttgatctacaagcttggaggtattgacaagcgtgtgattgagaggttcgagaaggaggctgctgagatgaacaagaggtcattcaagtatgcctgggtgcttgacaagctcaaggctgagcgcgaaagaggaattaccattgatattgctttgtggaagtttgaaaccaccaagtactactgcacagtcatcgatgcccccggacatcgtgactttatcaagaacatgattactggtacctnccaggctgattgtgctgtccttatcattgactccaccactggtggttttgaagc

SEQ ID NO: 261704 - DNA, 360 bp, Glycine max
ataagacgaaaatgttgacagaaaggataatgcatgaatgcatcaagaagttattgggtcagtatcaggatccggatgaagaagatattgaagctttgtgcaagctgatgagtactattggggagatgattgaccatcccaaagccaaggaacatatggatgcatattttgaaatgatgagatcattatcaaacaacatgaatttatcttctaggttgaggttcatgttgaaggatgtcattgatttgagaaagaataaatggcaacaaagaagaaaggttgaaggtccgaagaagattgaggaggtgcacagagatgcttctcaagagaggctggcccaagctagtaagctgggtcgtg

SEQ ID NO: 261705 - DNA, 262 bp, Glycine max
ataagacgaaaatgttgacagaaaggataatgcatgaatgcatcatgaagttattgggtcagtatcacgatccggatgaagaagatattgaagctttgtgcatgctgatgagtactattgtggagatgattgaccatcccaaagccaaggaacatatggatgcatattttgaaatgatgagatcattatcaaacatcatgaatttatcttctaggttgaggttcatgttgaatgatgtcattgatttgagacagattaaatg

SEQ ID NO: 261706 - DNA, 424 bp, Glycine max
aaagagaaatggaggagactctttctctcagtctcatccacgtaaacaactcattggttttcaccaatagactacacatcatcctccatttcactgctctatgtttcttggtttactacaggctttgtttcttctttcagaatccacaaaccagacgaggaactactttgttcccttggcttcttgtttttgcctctgaaatcattctctccttcatttggattcttggtcaaggtttccgctggcaccccatttcaagaactgtgtttcctgaaaggttaccacaggatgacaagctccctctcattgatgttttcatatgcactgcagacccaactaaagaaccaactttggatgttatgaacactttgctatcagccatggcgcttgattacccgccagagaagcttcatgtgtatggttc

SEQ ID NO: 261707 - DNA, 387 bp, Glycine max
ctcggtctcgctcttctactcatcaagcacagagttacagactcaccgatcttccgattctctttcgtcttggtttatgagctcgaaggagagacccactcttggtggcacgcggattaagacccgcaaacgaaatattgctgcgccgctggaccctgcagcattctcggatgcagtggttcagatttatttggataatgctggtgatctggaacttattggtaagagtattgaatcttcagaccttaacttttcaagatacggtgacaccttttttgaagttgctttcactgggggtcgtacacaacctggaactaacaaggctgatgaaggggaccgtcacccatactctataatagaatgtgagcctaaacgtgaagtcatttt

SEQ ID NO: 261708 - DNA, 256 bp, Glycine max
gtttttcctttcgggattggcatctatggcttctgaagtaatagagtaccgatgctttgtcggtgggcttgcttgggccaccgacagcgatgctctcgagaaagccttctgtgattatggtgagatcgtcgaatctaaggttatcatcgatcgtgaaactggaagatcgagagggtttggatcagtgaccttcgtcttggagcatgccatgaacgacgcagtcgaaggaatgaacggtcagaacctagacggtcgt

SEQ ID NO: 261709 - DNA, 357 bp, Glycine max
cccacgcgtccgattgaatttcaatttccctaggggcttaatatctccccgcatttgtgccgagcctcattattatcatagtagatattcattccccttatctttctctcttctctctccccgcccaaaccctaactccctaccctattccgctttctctcatccatcatgaaaggaggaaagtccaagaccgaatctaagagagccgatgccaaacttgctgtgaataagaagggcgccgccaccaagactaggaaacccgccggaaaggggaaggcagcgaaagatcctaacaagccaaagaggcctccaagtgctttcttcgttttcatggaggaattcacgaaggtgttcaac

SEQ ID NO: 261710 - DNA, 449 bp, Glycine max
aagcccttctccgaagaatgttccgttacggactcctcgacgagacacagaacaagctggattatgtgttggctctcaccgtcgagaactttctcgaacgccgcctccaaaccctcgtcttcaagtctggcatggccaagtccatccaccacgccagagtcctcatcaggcagaggcacatcagggttgggagacaggtggtgaacatcccatcgttcatggttagggttgattcgcagaagcacattgacttctcactgaccagtcctcttggtggtggtcgtccaggacgcgtgaagcgaaagaaccaaagggctgctgctaagaaggctgctggtggagacggagatgaggaggatgaagattaaattattaatggcttctgatatttatagaccttgtgctcgtttttttatctgtgtcggtagacattttagatttttgaaatg

SEQ ID NO: 261711 - DNA, 454 bp, Glycine max
cccacgcgtccgcccacgcgtccgctcacaaagacacagagtgcgttcgttgacgacaaacacacacaaacacacaacaaaagctcgccggaaaatctttctccggcgacctggaattccgacgaaggtagttgcggctccttcgtcccgaaactgaggccctcaaagtataaactttggtggtggtgggtaggatctggcggtgtatgatgggatcttgcatatgcccgttggagactccggcgaggttgctttggaccacaagcttcttccgtcataagcttatgatcttctaataattaataattcacgcacacaaacaaacaaacaaacaaacaaaaaacacttcataacaacaacaacaacccttctgaaattctcaacacaagtttcaaaaaacagagtaaaagaaacagagcaaaaacacacacacaaaaacacaaacacagacacc

SEQ ID NO: 261712 - DNA, 356 bp, Glycine max
  unsure (1)..(356): unsure at all n locations
agaagatggagatgtatcagatctggagcaggagaatagcgttgggagcgttcgcgtttgttctgcttttcctatcggcctcagcagacgacgtcgttgtgctctctgaagataacttcgagaaggaagttggtcaggacagaggagctctcgttgagttctatgctccttggtgtggacactgcaaaaagcttgctccagaatatgaaaagcttggtagcagcttcaagaaagccaaatctgttttaatcggcaaggttgactgtgatgagcacangagtttgtgcagcaaatatggagtctctgggtacccaacaattcagtggtttccaaaaggatctcttgaacccaaaaag

SEQ ID NO: 261713 - DNA, 279 bp, Glycine max
ctgcagcattgatcgccactgtcattctccgtcatcgtcgctttcgatgagtactgtgtctgtggtgtgaaagcgaagagttctcagatcattatgcgcatgctcaacactatcgtttatggccatctgctgagcttgttagctgtgacctctatcatgggcattgaatcgatatgggactacatctcttgcaagaaggccgatgttggcatacgctctagggcatccgagcttactgatgcatacatgcatcgtgtgatctctgctatagcgatacct

SEQ ID NO: 261714 - DNA, 356 bp, Glycine max
aaaaaaaattagaaaacaatatagatacgatcttttatcctataattttatcaattgtgcagataagaaagactcatatatttatggatatagatccctatttcaagttaaagaaaaaccaagtgatttcttctaattacaacacgtgtaaaaaagaagtattggatatcatagataatctctttatcaagaattatatatcggaggatgccattctagatatggaaaactatatgaatcgaacgtatttcgattgaatggtaatctatagagaaatactaaatcgttacatatcgaatccatacatctggttcactgcaaaaactgtgacgttttatgactcatataggggtaac

SEQ ID NO: 261715 - DNA, 398 bp, Glycine max
ggcactgtggcagaagtcttaggagtgtaaaacagagacgcaaaatgaagacgattctatcgtccgagaccatgaatattcccgacggcgtgagcatcaaggttcacgctaaggttatcgaggttgagggccctcgtggaaaactcgtgcgagacttccaccatctgaacttggacttccaacttattaccgacgatggcggtaaaaggaagctcaagattgattcttggtttggttctcgtaaaacctccgtcgccattcgcacacgcctcagccacgttgagaatttgatcaccggcgtcaccaaaggataccgatacaaaatgagattcgtgtacgctcattttccgatcaacgctagcattggcaacaacagcaagtccatcgagatcagaaat

SEQ ID NO: 261716 - DNA, 452 bp, Glycine max
cccacgcgtccgcccacgcgtccggagtttacaggtcttgatgttgaaatggagattaagaagcattactttgaggttatggatatagtcgatagattgtttgtcgcaatgtttgacagtttgaaccagaattgtaagaaggatctggaagctgtcgggtctcagtatccatttgaacctttgaagtatctgcggacgacactacggcttacatatgaagaagggattcagatgctcaaggatgttggagtagaaattgaaccttatggtgacttgaatactgaagcggaaaggaaattgggtcagctagtctcagagaaatatggcacagagttctatatccttcaccggtaccctttggctgtaaggccattctatacaatgccttgctacgacaatcctgcatacagcaactcgtttgatgtctttattcgaggtgaggagataatttc

SEQ ID NO: 261717 - DNA, 448 bp, Glycine max
gtttttgaagtatagagatggcagagacattcctatttacctcagagtcagtgaacgagggacaccctgacaagctctgtgaccaaatctctgatgctgtcctcgacgcttgcctcgaacaggacccagacagcaaggttgcctgcgaaacatgcaccaaaaccaacttggtcatggtcttcggagaaatcacgaccaaggccaatgttgactacgagaagatagtgcgtgacacctgcaggaacatcggctttgtctcaaacgatgtgggactggatgccgacaactgcaaggtcctcgtcaacattgagcagcagagccctgatattgctcagggtgtacacggccacctcaccaaaaaacctgaagaaattggtgctggtgaccaaggtcacatgtttggctatgccactgatgaaacccctgaattgatgccattgagccatgt

SEQ ID NO: 261718 - DNA, 263 bp, Glycine max
cagattttgggcttgccaagttgaggaaaaaagaggacatggagaccatgtctaggaggaggggcacaccatggtacatggcaccagaatggatcactgcaaacccaattacctcaaaggctgatgtgtatagtttgggcatggtgcttttggagcttgagattgggattaggaactttgagatccaaggttctcagtttaggagtgatgagtggaacttacttagatgctccttggataagatgtttaaggagatcataatg

SEQ ID NO: 261719 - DNA, 180 bp, Glycine max
cacacgccaccgaaaagtaaacgctggtattacaagagcatccaaaccgcatatggaaatgggagagtttatgacacgttactcactgcttacctaggttcatggatcatgaacagacttcttgactattgatatgctggtcctacctctattcgctctcacccaagatgcaagcgtgat

SEQ ID NO: 261720 - DNA, 336 bp, Glycine max
aaaagaatggcgtccatgtttggcacatcttcgatggccttcctctcttcacgatgccactgtgcccaatcccttgccaccaattctccctctctaaccacagtgcaggtatatgggcgcatgttttgcataggaaatggatttcacggcgtcaaggctacaagtgttgctgccactcaacgtaactctgctcaacaggctcaaaagatcgcttctaaccagagcctatggctcctgtacccattatctactataacgggacaggatgagatgtagctctgccatgctctaaatgacaatgatcccaagattggctgtgtaatgatcatggtggac

SEQ ID NO: 261721 - DNA, 324 bp, Glycine max
cctggcttcagcaaaggatctcaaagacttgaatatattctcaaagatggatgtatatgctgtgctttcactctccggcgatcaaaagaccaagactcccgtccacagaaacggcggcaccaacccaacatggaattttccggtcaagttcacttttgatgaatcggtggcgcggcagaaccgtttggccctcgaaatcaagatccgctccgagcgcgccctcgccaccgattaggacatcggccagattcacgttcctctcatggaactccttaagcaacctggcgacggtaaattctttcaacacgttagttaccagttcag

SEQ ID NO: 261722 - DNA, 285 bp, Glycine max
gggtaaccctggggagtttaccatgttagagcttgctcaggttgtaaaagaaacaattgattcaagtgctacaatagaatacaaaccaaatactgctgatgatccacacatgaggaagccagatattagcaaagcgaatgaactgctgaactgggagccaaaaatgccactgagagaagggttgcctcttatggttaatgatttccgaaatcggattctgaatgaagacgaaggagaagggatgaaataagcataatagcaaaccctgtatgtatatggagatga

SEQ ID NO: 261723 - DNA, 358 bp, Glycine max
atttggaacaaacaacaatagaggggttgtggtgctctgtgtgctgcaatttccttttgagcttgtgtttgattcatcaaatcatcaaagatgactgtaggggcaggaatatctgttgcagatgggaacttgatggtgttggggaacaaagtgctgagccatgtccatgacaaggttcttgttacccctgcatgtggtggtgctttgctcaatggggcattcattggggttcaatcccatcacaagggtagccgcacagtctttccaattggcaagcttcaagggttgcgatttatgtgtgttttccggttcaagatgtggtggatgacgcaaagaatgggcacttgtggacaagata

SEQ ID NO: 261724 - DNA, 408 bp, Glycine max
ctcacgcgtccggccacgcgtacgcccacgcgtacggtgaattaaagtatattcacatgtgcgtttctctgactaacaggattgaaagatgggtcaagcattcggtcgctaccaagtcgatcagacaaatgtggctatcaaggagcattttcgaaaatccgatgatgtactagagcctagatgtcactgtctgccatagtgtcttgggtaccaaaacgctggtattctgacgctgcaagttcagcaacttgatgttcgacgtgagaccaaacccaaagacaatgcctatgtcaatgttcatgcctctgcggaataacgacctgaggctgaaaaagcatctgatgcattctataagcttaccgacaccaaggatcatatgcaatcatacgacatagatgtcatcatggc

SEQ ID NO: 261725 - DNA, 325 bp, Glycine max
atcatgacatgtacatgaaggtcaagggtaacgttttcaagaacaaaagagttttaatggagagcattcataagtccaaagccgagaaggcaagagagaagaccttgtccgatcaatttgaggccaaacgtgccaagaacaaggccagcagagaaagaaaaattgctcggagggaggagcgattggcccaaggtcctggagaaaaagtatccgctgcacccagtgctacagctgctacagcatcacagccagcgcaagcaccaaagaaatctaagaagtgatccacatattctgatattggcttgtagaatttttgggtctggca

SEQ ID NO: 261726 - DNA, 349 bp, Glycine max
cattattgaaccaccggtgggaacgagatggattacatagctggatctgactatccacagaggaaagggaaagggattgtcaattcacggatggaagtacgctcgctacaacgtcttacgcaaccatactcaagtctatgtgaagtacgctgccactatccatcacgatgctctgagctcatactgcatcgttcgctatgcaacgaattcggagactaaagattgactgaccataaatgaagattgggaatgactatgacaacaagatcgacgacgagacgacactcatggaaatcaagcttgtctgtcacatggaacatgataacataattaaaaataatgacataat

SEQ ID NO: 261727 - DNA, 277 bp, Glycine max
gtgagacaacatgactgagaggtccacataccttgcctggctcaaggttacaactctgattggtgcacttgaccagattagtgagcccaagaggccctgtgacatgcaacatatgctgcaactatatgaagtgtatcattaaaggacgcttcggatctgtaacagggtgatgtgttcacatacgggataggaagcttggcatggaattcacagacgcacgaactagtctgactactgaagattgggaatgccttttacaacatgatcgtctcacaga

SEQ ID NO: 261728 - DNA, 237 bp, Glycine max
cccacgccaaagaaaggtaaacactgcattactaggagttttcaaatggcactagggaaaaggtagagtttgtgtcacgggaggcactgggttcctcggatcatggatcatcacgagactccttgaagatggatatgctagtaataccactatcagatgtgactgatgactcatgaaagattgtagctttctcacaaacctacctggtgcatcagaatagcttataattttcaatgc

SEQ ID NO: 261729 - DNA, 299 bp, Glycine max
ggcgttgttgcagctgaagaacttgctccatatcttgatatagattccacagagggaattaaggatgatgaatcctatattttacctgtgctcttacgatttgatggtcaacctgatgttgatgaggagggaaatattctgtataggtttccatctttgcagaggacagcttctcaaaagagtaagagaaaagaatatgttggaaggagatgggcagattgcgttggaattgagaagtttttcaaggagaaaaaatggcaattcaagtaaactggcacgccagagagagcaatggtcat

SEQ ID NO: 261730 - DNA, 464 bp, Glycine max
  unsure (1)..(464): unsure at all n locations
gtttgtgggagtactgcttatgttgcacaaacatcttggattcaaaatgggaccatcgaagagaacattatctttggtttaccaatgaacagacagaagtacaatgaagttgttagagtttgtagcttggagaaggacttggaaatgatggaacatggggaccagacagagattggagagcgcggaatcaacctaagtgggggtcagaagcagcgcatacagcttgccagggctgtgtatcaagactctgatatatatcttcttgatgatgtttttagtgcttgtgatgcacacactggcactgaaatattcaaggaatgcgtgaagggggctctgaaaggcaagaccgttattcttgttacacaccaagtagacttnctacataatgtggatcttatagtggtgatgagggacggaatgatagtccaatcggggaagtacgatgatctacttgcgtctggaat

SEQ ID NO: 261731 - DNA, 449 bp, Glycine max
cccacgcgtccgcccacgcgtccggcaacacccaatctggggctgctaaggtttcaatattaatgattggtcagcaagccatagtagatgcttatctttgccttacacatttgactgcaggaatactagttgaatccctgttcaatgcttttgcaactgctgcatttttcaagtttgtggttttctcaatatttgagatgagatatctccttgccatctggaaggcaagtaggcctttgagcaatggtgaaggttgggagacaatgagacgtgaattgtcagttttatacagccgtttctatgggatcctattgggaggcatactgctcatgtatgaattccacaatcatttgagacctattcttcttcttgtatactcattttggatacctcaaataatcaccaatgttattcgtgactcgcgcaagcctttgcatcctcattatatc

SEQ ID NO: 261732 - DNA, 382 bp, Glycine max
ttagacgccgcacgccagcaccgtcactgtttcaatcctcgaactgtgtcttcttcgctttctggtctttttattacgttttgttcatcgatccatcgccaaacatgccttccagtcacttgcttctcgaggaacctattaggatggtctccatccttgagccatccaagcctagttttttctctgcaatgacaaagattgatggtaccctgcgacctaaatctagatccgtcgaaaccatttctggttgcctcaaggctggcatgtctagtgctcgttttgacttttcatggcatgaccctgagtaccaccaggagactttggagaatttgaacgctgctatcaagagtactaagaagctctgtgcttgtatgctggacac

SEQ ID NO: 261733 - DNA, 395 bp, Glycine max
actttttctacttaccttcactgttaatccatatacgatggcagtcatggcaaccagaaccgtgtcttcaaacccaagactctcatactgcaacggaaagcccgacacatattcttcccgcgttgcgcccaccaccaaattatgactcatccaaacacggcacaatttccatgttcctaacctcactgccctacgacctacagtccttcaaattccagcccatcaaagaatccatcgtgtcacgggaaatgacgcgccggtacatgaccgacatgataacctacgcctacacctacgtcgaaatcgtctgagccggttcggccgggctgtactgcgcgtacgagctcagcaagaaccccgccgtgagcgtggccatagtcgaacagtcagtgagc

SEQ ID NO: 261734 - DNA, 294 bp, Glycine max
cccacgcgtccggtttcaccgcacgaatatcttgttgtttggagcgatccgagaaaaactctgtaaacatgttggtttaccaggacctccttacaggtgatgagcttctctctgactccttccgttacaaggaaattgagaatggaatgctgtggcaagttgaggggaagtgggttgctaaaggagcagttgatgtagacattggtgccaacccttctgctgagggtgtaggaaaagatgatggaattgatgatgcagcttgtaaggttgttgacattgtttacacattcagac

SEQ ID NO: 261735 - DNA, 292 bp, Glycine max
atcaatcttaccacatcttgctgagactacttagtctaatagaggctctacatggcagctagagagttcatctttgtggagcttctgctggttctgaatatggccgctgtattggtgttaaactatttcgaggtttaatacttagcttagcagtcggctgtatcatattgcgacacgacagaggacaattgatgttaccctacaacttgaaaacccgctgcatattttggacttcatgggctttggcctaattacaaatatggttcatacccatctaactgtgattcaaaca

SEQ ID NO: 261736 - DNA, 327 bp, Glycine max
atgcataggaatttaataaaagggatcttaattataaagtggtaggtattgataacataattcaaattaatacatgcatagaaaatatagaatatccaatccaatattgcttatttatattatttttttgatattggagtgcataacataaaggacaaaatagggattaataattcatattaatataataaatttcgatcgatttatcaaatagatatctatttgattatttcaaaaatattattattggaaattttagtaaagtaactaagaataataattaggaatttcatatttctaaattaatgtctaattctacatttaaaa

SEQ ID NO: 261737 - DNA, 406 bp, Glycine max
cgtccccttggccggccccttggggaaaagtttccattgtcagggctgaaggaattgctcaagaaagggttaggtttaggcgacatggcgttcaacgccggcgagggagccatcacctggttccccggcacatggccgccgccacacgcgccatccgccaccgtcttagacttgccgacctagccatcgatgttcgtgacactcgcattcccttctcctgcgccaacgccgatctccagccgcacctcttcgacaaacgacgcgttgaaacactccataaattagacattgactaccctaacctgatgcataaatggacgcattattttgagagtggtaatccgaattgcgttgcgataaacgcgcacagcatgagttccgcgaaaaacttttggaagtggcggag

SEQ ID NO: 261738 - DNA, 390 bp, Glycine max
cccacgcgtccgctagaacactagtttgttgagcactgcgatgaggaagtggacggttgcttccgctctccttcttctctctctcctctttctctttgcagatcaaggtcgaaagtttcaggcgaatgccgagggagattccgacgagcttgtagatccacccaaggtggaggacaagatcggtgctgtgcctcatggcctttcaaccgattcagatgtcgtcaagagggaggcggagtcgatctcgaagagatctctccggagcaacgcggagaagtttgagttccaagcggaagtgtcgcggcttatggatatcatcatcaattctctctacagtaacaaggatatcttcctcaaagagttgatttccaatgcttctgatgctttgga

SEQ ID NO: 261739 - DNA, 454 bp, Glycine max
ctttcgcaccttgcagaatcaattatctctctcaatcgtctttcatggctcgtaccaagcaaaccgctcgcaaatccaccggtgggaaggctcctaggaagcaactcgccaccaaggctgcaagaaaatctgcacctaccaccggtggagtcaagaagcctcatcgctatcgtcctggaactgttgctcttcgtgagatccgaaaataccaaaagagcacagagcttctgatccgcaagctcccctttcagcgtcttgttcgtgaaatcgcgcaagacttcaagactgatttgaggttccagagtcacgcggttcttgcgcttcaggaagctgcggaggcttacttggtgggtttgtttgaagacaccaacctttgtgcgatccacgccaagagagtgaccatcatgcccaaggacattcaactcgcacgccgcatccgtggagaacgtgctta

SEQ ID NO: 261740 - DNA, 452 bp, Glycine max
gatcattccaatatgggcaacagaattgttatgggaaattcccttctctttatctctttcttcatcttcagctttagtttcttggaggctcaaaaggctccagcagtttatgtgtttggagactcacttgttgatgttggcaacaacaattacttgagtctctccattgaaaaggcaattcttcctcactatggcattgattttccaactaagaaacccactgggagatttagcaatggcaagaatgctgcagatttaattgctgaaaacttgggcctacctacttctccaccttatctctccctagtatctaaggtccacaacaacaacaagaagaacgtatctttcttgggtggtgttaattttgcctccggaggtgctggaatatttaatgcctcagataaaggatttaggcaatcaatacctttgccaaagcaagtggactactactc

SEQ ID NO: 261741 - DNA, 465 bp, Glycine max
cccacgcgtccgcccttccatttcaactccttctcgcgcgatagattgctctttctcctctgctcctccctttcccattcctcctttccctctcccctccgctcccccaatttcccccaaactttctccctccgccgcttcgccgccgcccctctcgctcgccctccgccgccgcctccgcccctggacgccatggcccagaaaatcggaaagtccacgcgccgccccggctcgtcctccaaggcccgcgtctacgccgatgtcaacgtcgttcgccccaaggaatattgggactacgagtccctcaacgtccagtggggggagcaagatgattatgaggtggtgaggaaggtgggtagggggaaatacagtgaggtgttcgaaggtgttcactgcacggacggtgagaaatgtgtcattaagatcctgaaacccgtgaagaagaagaagatcaagagggaaatc

SEQ ID NO: 261742 - DNA, 359 bp, Glycine max
tgaaggcgaaaaagcagaagaggcacaggacgattttgacgttttacactgcttgcttcggttttcggaagccttacaaggttctatgtgatggcacatttgttcatcaccttcttgtgaatcgaataacccctgctgacacggccattggcaatgtcctcagtgctacgatcaagctctacacaacaagatgtgttctagctgagttgaaacgacttgatagctcgtattctgaggctctagaggcatctcatatacttatagttgcaagatgtgatcatgataaacgttatatcgcatatgcttgcatcatggaagatgttggagaaaaaaattcttagcatttctttgttgctaat

SEQ ID NO: 261743 - DNA, 357 bp, Glycine max
cccacgcgtccgggacaagcgaagaatgcttcatgttgtatatcgtgttggggacttggacaggaccataaagttttatacagagtgcctaggaatgaagctcctcagaaagagggacataccagaggagaaatatactaatgcctttcttggatatgggcccgaagactcacactttgttattgaactgacatacaattatggagttgacaagtatgatatcggaactggatttggccattttggtatagctgttgatgatgttgcaaaagcagtggaactaatcagagctaagggtggcaaaataactagggagcctggtcctgtcaagggagggcgttcagtaattgcatttat

SEQ ID NO: 261744 - DNA, 460 bp, Glycine max
cgacaacgtcaaggctaagattcaggacagggtgggaatccccccagaccagcagaggctgatgttcgccgggaagcagctcgaggacggacgcacccttgctgactacaacatccagaaggagtcaactctgcacttggtgttgcgtctacgtggtggtatgcagattttcgtgaagactcttacgggtaagactattaccctcgaggtggagagctctgacaccattgacaatgtgaaagccaagattcaagacaaggaaggcataccaccggaccagcagaagctgatttttgctggcaagcagctcgaggatggaaggaccctcgctgactacaacatccaaaaagaatcaacccttcaccttgttctccggctccggggggggttttaagctcgtagggtaaaggtggaagtgttcccaaaacatttgaagaactttgaatgttaatgggtctgg

SEQ ID NO: 261745 - DNA, 315 bp, Glycine max
cttaattgccttaaggaacgttcgagaccacagaggtttctatagtcttcttctgaggagagcttgtcttctcttgctcattcatctcacttccaattaacgaacacgctttccaccaatttgaatcaccaacggctcggtctttctgcaacctcaaggttcgctctgctcttgaagccgacggattcttcaacactgtcaacaggcttgggtacacaatagcgacacaaagaccaacaagaggaagagcaagcttcatcaacggcaagtcatgggaagacaaggtacttcgaagaagtgctgaaaacgtttcaa

SEQ ID NO: 261746 - DNA, 269 bp, Glycine max
agcgcacagctgtcgtggggcgactcgctgtctggatcgggacatagacagatagggtctccgtgcggtcgctgtcattggtttggcgttcaattgatgaagaacaatgtcggtgacagcgcgtgttagtgatactgtaatagccattacggataagctcagaggttaaattggccaaactaaagttaaacgttattggcctcggaaaggtcctgaatgggctgatgatgagaacgaagaacatgctgcccctgccgatattagaccct

SEQ ID NO: 261747 - DNA, 360 bp, Glycine max
tggactcatcaatttggattccagacctcatcgaaatacagatagcaaatggtacatcagcccagaggaatggagcgaaggaacttatcctacttgggcacatggtcccggctatgtggtctcacatgatatcgctaggacggtgtccaagaaattcagagagaaccatttgaagatgtttaaactagaagacgttgcaatgggaatctggatcgctgacatgaagaaggaaggtctagaagttcgctatgagaatgaggtcagagtgtaccctgaaggttgtaaggatggttatgtggttgcccattaccaaggccctagggagatgctctgtttgtggcagaagcttcaggtagataa

SEQ ID NO: 261748 - DNA, 215 bp, Glycine max
gaggagacacaccttcagtagcagcagtcatggttctcaaaaccgaactatgccgattcagcggtgccaagatctactcagggtaaggcatcagatttgttcgtggtgattctcaggttttcctgtttgctaactcgaaatggaagaggtatttctacaacaggttgatatcatcaaagctcacctggactgcattgtacagaaagcatcacttg

SEQ ID NO: 261749 - DNA, 287 bp, Glycine max
  unsure (1)..(287): unsure at all n locations
gccacgcgtgcaggttctaagggctgctatacatactacggtacatactcaggaanatactcgggttgatgttattgtgggggggccatttttaagcccccttccaattcgccctccaatttaccctaatttaatacaaatttttatacaaaaatttgggcaacaagagggacttcctgagtaaatacatccttgaatacaacaaggttcccaagattgttcccaatgagcatcccattgcacagcccatagcgaatgctgtatacattgatgaaaacattgataac

SEQ ID NO: 261750 - DNA, 202 bp, Glycine max
  unsure (1)..(202): unsure at all n locations
ccgttgantattacaatgacaatggtgccagggttccggttcgtgtccacaccgtgctgatcgccacccaacacgacgagactgtcaccaatgaccaaattgctgctgacctcaaagagcatgtgatcaagcctgtgatcccagagaagtaccttgatgagaagaccattttccacttgaacccttcaggccgttttgtcat

SEQ ID NO: 261751 - DNA, 285 bp, Glycine max
  unsure (1)..(285): unsure at all n locations
ncncgcntgcaggttcttatggctgctatacatgctacggtacatactctggcagatactcaggttgatggtattgtggggagcctatttggaagcccatttcagatcgcccttcagattgaccgtaaggtgtacaaatttttatacaaaaatttgggcgacaagagggacttgctgattgaattccttcttgaatacaacaatgttcccaagattgttcccaatgttcatcacattgcacagtctatagcgaatgctgtatacattgatgaaaacattgataac

SEQ ID NO: 261752 - DNA, 264 bp, Glycine max
acggaaattttaaaaatgactgggataaacttaagaattcaattattgaaattgaataagcgaacgatttaattggattggtcgaatggtatcaaaaaaatggagtactaactcccatttcttatttattattgaattaaccgatcaacttgctttgttatcgaacatttctttttgatttcaaaaattttccggaaaaaatttgaatctatttttatatgcgaatcaatcctactacttctggtcctgaggtttctgcgcttg

SEQ ID NO: 261753 - DNA, 252 bp, Glycine max
cccacgcgtccgcccttctccaacaagtcttttaaaaactcttccatgacttgcaaccggatggcatcgtcaccgacatgttccacccttggagtgtcgatgctgctgctaaactcggcattccgaggatcatgttccacggcgcaagttatctcgctcgctccgctgcgcactccgttgaacagtacgcaccccacttggaagcaaaattcgacaccgacaagttcgtgttacctgggttacccgataact

SEQ ID NO: 261754 - DNA, 463 bp, Glycine max
ataacactcgatccagcacataacaatggaaacgcagctttacgtgttttctctctagattctgctcttaaacgccgtcgttttcaaactctttttttccccttcgcttctctgtctttgtaaccgaaaggggggaaaatataattaacaccgatttcgcgaccaattcttcttctgcgttgaattgggacaacgagaaattggatctcagtttttggcaggaaataaaaattgcatttgagtgtaaaataacagagtatagtgtagggccttgttcttgatactgtgctaaatttgttggatggcggagaaatcatgcatcaagcgccttcagaaagaatatagagccctttgtaaagagccagtttctcatgttgtggctcgtccttctccaagtgatattcttgagtggcattatgtgttggagggaagtgaaggaacaccttttgcaggtggatattac

SEQ ID NO: 261755 - DNA, 211 bp, Glycine max
gacaaatcacacgttgtaaccggtgtcatgggaacttatggttactgcgccccaaaatatgcgatgactggacagctgactgtgaagtctgatgtatatagttttggggtagtcttcttggagctgattactggccgtaaagccattgacagcactcgaccccatggagaacaaaaccttgtcacatgggcacgtccactgttcagtgacc

SEQ ID NO: 261756 - DNA, 324 bp, Glycine max
  unsure (1)..(324): unsure at all n locations
gcggacaaagtacgacttncaacccatatcataatcttttaaaaactcttccatgacttgcaaccggccgccatctttaccgacatgtgccacccttggagtgtcnatgctgctgctaaactcggcattccgaggatcatgttccacggcgcaagttatctcgctcgctccgctgcgcactccgttgaacagtacgcaccccacttggaagcaaaattcgacaccgacaagttcgtgttacctgggttacccgataacttggagatgacgcgcttgcaattgccggattggcttaagtctccgaatcagtacactgaactgatg

SEQ ID NO: 261757 - DNA, 161 bp, Glycine max
cggacgcttgggttgcagtcgcaaaggaaaaccctagctagtagtctcagttcgtttgagacgaaaaaattggcagagggtctcgttctccacggaaccatgcgcgcccacaccgacgttgtgacggcgattgccactcccatcgacaacttcgacatgat

SEQ ID NO: 261758 - DNA, 450 bp, Glycine max
acgaccacgcgtccgattaactgtttccattcacctgaaaaagaacaccgtaaccctcttcaccggtgtggctttttatacacgcctgatctctctttcttcttcaatccatcgtttctcttcaatcgatcccactcaagcttttgcaagagtctccagcgtgtcgttctcaaagctggaacagctgtggttactcctactgatagcatactatcattgggaaaacttagaactctctcctatcaccttaaatagctaaataacacctattatgatgttatattagagacttcaggagcatatcctcttggccggcaaagactaagatatcgaacattggtcaataccaccttttcagatcttcaaaatccacaaagagatctttatcggaaagcatttgcagctctaccacaaagtactctcatcgctctctatgatatcatgtttagt

SEQ ID NO: 261759 - DNA, 397 bp, Glycine max
caaaaccagagtggttctagtaatccggtgcttctataggatgggaactagttaatggcatggcgggcgaatatctagcttcggcgctgaatcccccttatcaagagaggcaggaaatgtgcctgaaactgggtcactctctattgttgtgcttggcgcttctggggatcttgctaagaaaaagacatttcctgcacttttccatctataccggcagggattcttaccagcagatgaagttcacatttttggctattcaaggacaaaaatatctgatgatgaattgaaaaaccggttgcgtggctatcttgttccaaacaaaggtgcttcttcccaactgttggaagatgtaaagaagttttacagctgatcaaatatgtaatggctcttattattc

SEQ ID NO: 261760 - DNA, 235 bp, Glycine max
cccactcatacgtatcttaccactttctattctaaattcactctcagaaattataatcgcgcggctatctaacactgaatcagctcactattttacagataaagatgccacccgaaatgatgttaatctctccgattacaaaagaaaagtccttcttcttgtcaatgttaccttacaatgcagcttgactaattcaaactacacatagcttaatcaattgtattgaaaatacaaa

SEQ ID NO: 261761 - DNA, 444 bp, Glycine max
ataagcttgtccaggttagtctttctcagaatcctatagtgaaggtgaagttagaggatatgatggctgctactagtaatttcagcggggagaatgttcttttcgcgacgaggaccgggactacgtataaggctgatcttccggatgggtccacgctcgcggtgaagcggttgagtgcgtgtaggatcggggagaagcagtttgggatggagatgaatcggttggggcaagttaagcaccctaatctggcgccgctgttggggtactgcattgtggaagaagagaagttgttggtttacaagcacatgtcgaacgggacattgtattcattgttgcataagaatggtggcggtgcattggattggttgatgaggtttaggattgcattgggtgtggccagggggctcgcgtggctgcaccatggctgccaccctccgattatac

SEQ ID NO: 261762 - DNA, 456 bp, Glycine max
atcggctcccagaatatttggaatgttacaaactgatctgtgaaagaaaggtcaaacccttggatttggttgcccttttgaaatccctaggagaagaaaaatgcatagtttttacaagatctgtggaatcaacacatcatctctgcaaattgctaaattgttttggtgatctgaaaattggtatcaaggagttttctggtctaaaacatcaacgggtaagaagcaagacagtgggtgaatttcggagaggggagtttcaagtgcttgtatcttctgatgcaatgactcgtggaatggatgttgaaggggtaagaaatgtcattaattatgacatgcccaaatacacaaagacgtatgttcatcgagctggtagaactgcaagagctggccagactgggcgttgcttcacattgatgtcaaaagatgaggttggaggatttaagaagttgatgaaaa

SEQ ID NO: 261763 - DNA, 458 bp, Glycine max
ttggatcttatcctgttgaaccacccccaacttttttaaccatggccctcctcaatcactggggggatgacaccgtcgccggtcctcgcccggagaacggccttggcaagctccgaaagcaccacaccttcgctttccgatctgcctccggcaaggaatcagacagcggaagcgtgaaatcgtacggtgaagatttgccggaagatgcggtgagagtgacgcgaagtatcatgatcgtgaaaccacctggtggtaaccagagtccgagcggatccgctccggcttcccccgccggttctactcctccggtgtctcctttttcgggagctagagagtccttccgttttcggagaaggtcgacatcagatgcgtacgagaagacaggccagaacaaaccaagctcttcttctcctttcgatgtgtgacaaatgagcccgaccactatctcctccatatat

SEQ ID NO: 261764 - DNA, 436 bp, Glycine max
  unsure (1)..(436): unsure at all n locations
aagagttctttcaaaatgcaaacagccttaaccttcgttgcccccaacgttgtgccattggcgcccacaaagagtgtctcccatattaccatctttcctaccaaattgaaagccccgcgctcctcacctcgttactctccgattagggttgcaaccgtggagcccgacacttcaactgtcgactacaactctgcgttctcagtgtttcctgcagaagcatgcgaaactgtaggaggggaagcctgcatggcggagatgtaccctgaaacgaagctacagccagaggctaagactccacgagtcgttacagagaacgttgagagagagtatcttgaatacgatgatcctaaaacggtatttcgaggagaggcttgtgatgatcttggaggaactntctgtgagaccgagtatcagaaggtgtctactagagaaatgt

SEQ ID NO: 261765 - DNA, 300 bp, Glycine max
atgttcttttcacgacgaggaccgggactacgtataaggctgatctttcggatgggtccacgctcgcggtgaatcggttgattgcgtgtatgatcggggagaaacagtttgggatggaaatgaatcggttggggcaggttaggcaccctaatctggcgccgcttttggggtactgcattgtggatgaagaaaaattgtttgtttacaagcacatgttgaacgggacattgtattcattgttgcataagaattgtggctgcgcattggaatggtttattaggtttacgattgcattgggtg

SEQ ID NO: 261766 - DNA, 345 bp, Glycine max
cccacgcgtccgatctcgaatacccactaactcacgaaagccgggatctttcacaaaggggaggcctattctaagggtgcgtaaccgcatggataagctcacactaacccgtcaatttgggatccaattcggttccttaggacgtatcgggaaggaattttggaatgtaataatatcgattcatacacatacagaagaaagggttctctattgattcaaacgctctacctacgaaatatggatagagaaagatgtaaaaaccgaggatttcacatattactttttctcgaaaaatcgatcttatttttttcgcacttttcgctcaatgattaaaatggttcatat

SEQ ID NO: 261767 - DNA, 452 bp, Glycine max
  unsure (1)..(452): unsure at all n locations
aaagcaggttttggcaacaaaaaccccccttttaaccttggcaattggatctttccacctgggggaaagccttgtgaaacataaggtttttccagaaaggtggaatttgactagaanggatgtttggctgttgagtttatggagggtcaagctctttgttgaatagtgtttgtgttgcctttatctgcaacttttaattgaaccaatcctaccctttttatgaacatatgaaaagatcggttttttgtggttcctccactcattgttgttgaagggtctcgcgaaatcaatcaagttttgagacctgttttctggtagaggtgtaagtacaagatcttaataataaggattttgtacaaaggaaaagttgagaataagatgggggaagatggttattcttggattatgaggacaaaattttcacacactgtctgccatcgtttggatcctgc

SEQ ID NO: 261768 - DNA, 434 bp, Glycine max
  unsure (1)..(434): unsure at all n locations
gtttcgttttttcggcccctgtacctgctagggtttcgttgttggctagtttcttgggggagtgtanttgatagtggtgagtttctgtggtttttggagtggttgcagatttggtactttagggtattgttgaaggagagagtgtaaatgaataaaccaacaagcgacgcaattaatatggggaaaaggagcctggagggtggagaagatgatcagcccgaacgaaagaggcctgctcttgccagtgtaattgtggaagctctcaaggtggacagtttgcagaagctttgctcatctttagaacccattcttcgtagagttgtcagtgaaaaagtggagcgtgctttggcaaagttaggtcctgcaagacttagtggaaggtctcctcctaaaatgattgaaggccctgatggtagaagcttacagctgaaatt

SEQ ID NO: 261769 - DNA, 265 bp, Glycine max
cccaagccctatacaaccaaaccctaacacacacccatttgattcagtttccatggctagccgcaagggtgcatttttggctgcagtgctctgcatggttgtggtgagtgcacccatggcacatgcagctatcacgtgcgggcaggtgacgaatagcctgatcaattgcatcggttacctccagaacggaggaacgccgccgtcgggatgctgcaacggagtgaagagcctcaatgccgccggcaagaccaccgtcgaccgccag

SEQ ID NO: 261770 - DNA, 463 bp, Glycine max
agtgaagctgttgagcttttttgcgagtccatttggcaaaagggttgaatgggcattgaaactgaagggtgtggagtatgagtacatagaacaagatatcttcaacaagactagtctccttctccagttgaacccggttcacaagaaggttccggttcttgttcatgcccacaaacccatcgctgagtcattcgtcatcgttgaatacgttgatgaaacatggaagcagtatccactgttgcctcgagacccttatcaaagagcacttgctcgattttgggctaatttcgctgagcaaaagcttttagatgcagcatggattggtatgtatagcagcggggatgagcagcaaaacgctgtgaaagtagccagagaagcaattgagaagatagaagaagagattaaggggaagaaatattttggaggggagaatataggataccttgacattgcacttggatgg

SEQ ID NO: 261771 - DNA, 456 bp, Glycine max
  unsure (1)..(456): unsure at all n locations
catggagatacctatcaccttataactaagaactgcaatcattttacagatgatctctcttagagagtgactgggaaacaaatcccaagttgggtgaatcggcttgctaagctaggtgctttgtgcagctgtctacttcctgaaagtcttcaagtaacaagtgttatacagctacctgaataccatgaatgctcggaagatgaatttgttgaatctctttcacctgccacaccccgtgagtcaacagaaatagatgaggagcaagaaaaacaccttcttttgccatcagatagaactgaggatgttcatttcggtaaagagactcaagtgaaataagcggtgtctttgaggtgagaaataacacaggctgtcttcgcattgaatatttatccattagatttgcagngattcttttttctcaaagggttctcattcttgcatggctttctacattct

SEQ ID NO: 261772 - DNA, 291 bp, Glycine max
atgggaggagttgctgagggttaggaaggagcaagaggacgtgttggttccgcttatcggacgcgggaatcaaaggcgaggcacttaatgtggctgattaagagacgatgatggcttcgttgtttcctatgttgacacgttgttggatttggaattgcctgaggagaaacggaagctgaatgaaaaggaactcgtgacgttgtgtagcgagtttttgaatgcgggtaccgacaccactttcacggcgttgcagtggataatggctaatttggtgaagtacccgcaccttca

SEQ ID NO: 261773 - DNA, 430 bp, Glycine max
  unsure (1)..(430): unsure at all n locations
ccacgcgtncgnccacgcgtncgaaaaaataaaattaagaaattttcatggtaaccattcgtgcagatgaaattagtaaaattatccgtgaacgcattgagcaatataatacggaagtaaaaattgtaaatacgggtaccgtacttcaagtaggcgacggtattgctcgtatttatggtcttgatgaagtaatggcgggtgaattagtggaatttgaagagggtactataggcattgctttgaatttggaatccaaaaatgttggtgttgtattaatgggtgatggtttgatgatacaagagggaagttcagtaaaagcaacaggaagaattgctcagatacctgtaagtgaggcttatttgggtcgtgttataaatgccctggctaaaccaattgatggtcgaggagaaatttcagcttcggaatctcg

SEQ ID NO: 261774 - DNA, 212 bp, Glycine max
  unsure (1)..(212): unsure at all n locations
cggacgcgtccgcccacgcgtncgagctgatggatatgtagcatttgctgatgatgcagatgtgctgaaaggttcttgtggcaagtcacttgcttctttccctcaagggtgtttctactctacagcagttggaggattgagatgctatgagaatccaaagaataagattactgcaatacctgctgaggaagaggaaatctggggtgcattct

SEQ ID NO: 261775 - DNA, 329 bp, Glycine max
cccacgcgtccgctaaaccctaaacaactctttctcttcttccttcgctcgttgttctggctcgcgtagatcgacaatggcggagacagaaacgtttgctttccaagctgagatcaaccagctcctcagtctcatcatcaacaccttctactccaacaaggagattttccttcgtgaactcatcagcaacgccttcgatgctttggacaagattcgatttgagagtttgacagataagagcaagctcgatgctcaaccagagttgttcattcatattattccagacaagactaacaatacactgaccattgttgacagtggtattggca

SEQ ID NO: 261776 - DNA, 244 bp, Glycine max
ctcctgcatatattgctccagaagtattgctgaaacaagagtatgatggcaagcttgcggatgtctggtcatgtggagtaaccttatatgtgatgctagtgggagcatatccttttgaggatcctaatgaaccaaaggactttcggaagacaattcaaagagttcttagtgtccagtattccattccggacggtgttcaaatatctccagagtgtcgccaccttatttcaaggatctttgtttt

SEQ ID NO: 261777 - DNA, 358 bp, Glycine max
aacaaagaaaaaaaaaaacccttagccaacacaaccatcatggccacctctgctattcagcaggcagcattcactggtcaaactgctctgaagcagctcaatgagttcgtccgcaagaccggtggcgccggcaaaggtcgcactaacatgcgccgcaccgtcaagagtgctcctcagagcatttggtatggccctgaccgtcccaagtacttgggtccattctcggagcagattccatcatacctgaccggagaattccctggtgactacggatgggacactgctggattatcagctgacccggaaaccttcgccaggaaccgggagctggaagtgattcacagcaaatgggcaatgc

SEQ ID NO: 261778 - DNA, 375 bp, Glycine max
  unsure (1)..(375): unsure at all n locations
attcaattccaattcctcctccgaggtcgatcgcaacttcgacgattcctatgttgccaatgagatattcccaaattccaccctcgcaccctggaacggggattccgattccgacaccaccgccaccaacgcccccgtggtggcgatggccgaggccgaggccgaggctgtggtggaacaagaagaggaacagaaaaaaatggaagaagtggaagagaaagatgatgatgaggaggatgagggggaggaggaggaggaggaagaagaaaangaaaaagagaagagattggtgtggtggaagagtccttttggggtgagattggtgaccttgcttgcttcctgtggcttttgcgtgcgcgtgttttggacttttct

SEQ ID NO: 261779 - DNA, 374 bp, Glycine max
tctctctctattctcatttcaatccccttcttcaacccctctctctctctccaaaacgccgggccaaaaaatggctcagaaggccgagaaaaacgacaccgactttaaggtccccgaaaccatcatcaccccctgcaccaccaccaccgccacctcgattaccgaaccttctagattcttcgacgcaaccacccccgccacgtcatcgcgctcccccaagcgatccctccccctcgacgacgaatctcagacggaccaaacggcgtcgtcggagcccaaacgcgtcgtgagccgctgctactgctgtcggggcggggctatgattcggcgtgggacttttggcacacgtctcacgcacatgtctacatcagcga

SEQ ID NO: 261780 - DNA, 458 bp, Glycine max
  unsure (1)..(458): unsure at all n locations
gacgccgtcacgcttgtctacccatggttcnngtgatgganntttggcatcaacctataccccatacgagnngcaattggatatgttgttcgactggcaaacaggaaattggggtctcaccataccttcctcttgggtcntgtttagaaattttggagaatcagacgggtcanagcaataccttcacaaggcgttgagaaagacatcaggttcagctatttctgggtccgatgtgctaggcttctttctgtaacacttttttcaattcattgtgctggttgtctctattacatgctagctgatcgttacccccaccaaggaaagacatggatatgagctgtgaccaaacttcgaaacagctcgataatcattggcatactggcctactccatacactgagtatggactcacccgcacacctaaaagacttatattttactgctttaccttcctacagt

SEQ ID NO: 261781 - DNA, 305 bp, Glycine max
attccattctctctgtgtatttccctacctctcccttcaagatgcagatcttcgtgaggacgctcaccggcgggaccatcacccttgaggtggaaagctctgacaccatcgacaacgtcaaggccaagatccaggacaaggaaggaatccccccggaccagcaacgtctcattttcgccggaaagcaacttgaggacggccgtacccttgctgactacaacattcagaaggagagtactcttcacctcgtcctccgtctccgtggtggcatgcagatcttcgttaagacactcacctgcaagacc

SEQ ID NO: 261782 - DNA, 406 bp, Glycine max
gcataggttgcgttatatattgtactaattagcacaacaccatgaggatgaagattgttgtgatgctattgctacctttgatgtttgcactgttttcatgcacgagttctgcaaatacaactacatgccccatggacttgaattatgtgctgagaatcccatggaacacttctgcttgccacaacttccaacaaactttggcggctaaaaatggaaccgatgcaaacacttgttgcatatctctcttgtccctcttcggcataggacttgcacagcatctcaaggagacttctaaagtccaactcaaacttgcactgcttctcatcaaattcaataagttttctttttccacaactgtaactgttgacattagtggactccacattggtgaataacatctgtgaca

SEQ ID NO: 261783 - DNA, 385 bp, Glycine max
tgttgttgtaactcgttcttcttcttttgttgttctgtgtttgtgtttgttttttctctcacgctgaaaatgtcttgctgcggtggtaactgtggttgcggaagctcctgcaagtgcggcaacggctgcggaggctgcaagatgtacccagacttgagctacactgagtcaaccaccaccgagaccttggtcatgggagtggcacctgttaaggctcaatttgagggtgctgaaatgggtgtgcccgctgagaacgatggctgcaaatgtggaccaaactgctcctgcaacccctgcaattgcaagtgaggtggaacaacttaacaaatgcctatagatatgaacataaggactaaactagtatgtgatgttcgccttggttggt

SEQ ID NO: 261784 - DNA, 295 bp, Glycine max
  unsure (1)..(295): unsure at all n locations
gctatcanaaatttggggatagggtgaagcattggatcacattcaatgagccacatacatgggccgcgcaaggatatgatgttggtctacaagcgcctggtccatgctccattctccttcacctgttttgtagagcggggaactctgctactgaaccttacattgttgcacacaatgtcctactctctcatgcaacagtagcagatatttataggaaaaaatataagaaaatacagggaggatcactaggggtagcttttgatgtcatttggtatgagccactaacaaataccaa

SEQ ID NO: 261785 - DNA, 276 bp, Glycine max
taattcctgataagggaaattctctgactgcggcatctgataatcttcgtcgttggtgtaaaaataaaggtcgcgctcaaccaaattgcccaacttccataaccacattttaaacttattacccttttccccccaacaattatggatgccatccaatcttttcaacaccacacactttgcaaaaacttcacaacacaaccttttgttctctcttgtccgcactcatacaacactttgatccccaaaaaaaatctttttcttttataaattcctttc

SEQ ID NO: 261786 - DNA, 410 bp, Glycine max
  unsure (1)..(410): unsure at all n locations
acgaatccactgatgggctggacatccactngggacccctactctcatgttggtgattctgccgtgactggggatagcgaacaagcagcaaaagcatttgcagagaaacatggttgggagtattcggtcaagaagccccacacaccattgctgaaggttaaatcatacgcggacaattttaaatggaagggcccccccaaatctggtgaagagtgatttgttggtttgtattcatgttaatgtattccgtcttccggagtttcaacgtgcagcagtttttctctgcatattttcttggaaaaacaaaagttaagaatactgtgaaaaaagatgatgctggtaaaaaaaaaaaaaagcgcgttaagacaactagacctgctgcagatattaatagactaaatatatgcgcg

SEQ ID NO: 261787 - DNA, 371 bp, Glycine max
ctggtttatagatctctgtgaagtcgctttataacactcaacctaagatgcagaacgaggaaggacagatcaccgagctttacattcctaggaagtgctctgccacaaaccgattgattaccgctaaggaccatgcttcggttcaggttaacattgggcatgtggatgagaatggcgtctacaatggccatttctccacttttgctctctgcggcttcatacgtgctcagggtgatgctgacagtgccctagatcgcttgtggcagaagaagaaagttgaagttaagcaacagtagacacccatgatattgtcttgttgataattacctgtaaaattagactatatgcgctgacaactattaatttgtgat

SEQ ID NO: 261788 - DNA, 267 bp, Glycine max
cgcacttatacctctaagattatggaattcgtgactgatcacctgaagacggaaatggggtggggtggttgactggtcggatatgcaaaacatatcacgatgcggcgcttaaagggacttaagcctttatttgcttccatattacgatgatgtgacctgcgtatatataaccagccaagaggccttgaatatcctgaacttcttgctagagagactgtgtttcagcgtagcgaaatagaagcactttaccagctcttcaaaaagatt

SEQ ID NO: 261789 - DNA, 400 bp, Glycine max
  unsure (1)..(400): unsure at all n locations
gttttgaatagggtagttggtagttatagttgttgtcccagatatggaagaagcggggttaggagattgttgttcctcgaattcgacgattacgaggaagagcgataagcgaaagcagcaacaccaacaacaagagaagccatacagaggaataaggatgaggaagtggggcaagtgggtggcggagattagagaacccaataagcgttcgaggatctggctgggttcttacgccacccccgtcgccgccgcacgcgcctatgacaccgccgtctttcacctccgaggcccttacgctcgccttattccaattgtgcanacacactttgaccacacagcacattcgcgttcatcgaaaagcaccagtcggccgatcaccctcaacgccttacatctgtct

SEQ ID NO: 261790 - DNA, 408 bp, Glycine max
ggaagtttaagcaaacaaaaccctttctgctcctgctttctttgttcaaattttgtgtcaggatggaaactcgggtgaagcacacacttattgtcaaagttatggttcgtactggatccatatgacaagtgacccatgttatagtgaagtttttggatgatcataactcccacatcatgacgaatgtgaaaagacctgtgatagaaggacacattctcaccttacttcactctgaaaggtaagcaagaatattgcgctatatggtctcttatttttgactttcctccaaattcaaactaaaaaatttttctttattataaataataaactaagcgtatgacctattatgttgatcatatattcaatattctgattttatttaacttcaataacatcttgttattatat

SEQ ID NO: 261791 - DNA, 395 bp, Glycine max
ctctctctcttcggagctcaatttggccgtcaatggcggcctccgaggctctcaacggcacaaccaccacctccatcaggcacgcgttcggcaacgtcctcgcgttcttcatacttctcatgatcggcgttctcgccttctcgatccgtctcttctccgttataaagtatgagagtgttattcacgagtttgatccttatttcaactatagagtcactcagtttttgacaaagaatgggatatatgatttctggaactggtttgatgatcgaacttggtatccccttggtcgtgtaattagggggactggttctggtgactgcagagccctatgggtctgatcatacaacctctagtgaactgtgggtatgactatatttgcttgtatgcactat

SEQ ID NO: 261792 - DNA, 308 bp, Glycine max
  unsure (1)..(308): unsure at all n locations
cccacgcgtncgtgctgactccttatttcctagttccgtctttcctttgcacaacacagcgtgcaccgtcgcctatagctactctctcttccttcaattcaattcctcaactctctagctcttatggaaactcaacaccaacaacccaccatcaagtctaggttcagacgcatctgtgtctactgtggtagcagccctggcaaaaaccctagctatcagctcgctgctattcagctcggaaaacaactggtggagaggaacattgacttggtttatggagggggaagcataaggttgatgggtctaat

SEQ ID NO: 261793 - DNA, 402 bp, Glycine max
  unsure (1)..(402): unsure at all n locations
aacatgttttgtccaatgctctacaagaaatgttacttgctagatgcggtgtacggacagattatttctttcccggacgcacacaaggncaaggaatatctgaacgaccacaagtaatttctcttttccttcgctcctgctcctgctgctacatctggtgctccagcaactgcagccaaggaggacgaaaataatgaagaaccagctgaagagtctgactatgacatgggtttcagtctgtttgactaaattaactaatacttttgttgagtttgctttgatagaatacgtgaaaatgttacctatttagtctatttattctgctttaatcatgtacatcaacagtttaatccaagtataaacttacatttgctcttatgttaatcaaaaccatgctctttt

SEQ ID NO: 261794 - DNA, 393 bp, Glycine max
ccgggcgccacgcgccgctcttactttcaaacccactctttccccataaccctacccactccccctcgcgccgccgcgaaacggcctcttctcgtgttctccaaaaacccaatttccgacatcgtctcctccaccttctcacgcgccgaagaaggcgcgtgggacgacgagaagccgcgcgaggagtgcggcgtggtcggcatatacggcgaccctgaggcctcgcgcctctgctaccttgccctccacgcgctccagcatcgcggccaagaaggcgccggaatcgtcaccgtcaacaacaacgtcctccaatcaatcaccggcgtgctcgttcgagtttaacataaaatgacagtcccgagcttcatgcactcgtatcatgcgcatcatgta

SEQ ID NO: 261795 - DNA, 183 bp, Glycine max
atcatatctttctcaaactagaagaaatattcttccatacataatcggaaatttcacattggtggaggtgaaaaactgggctgtgcctccacctactctttacaatgccctaattacatatgccctctacgtcattccaaatgctcttgattccaacaacattgtttaaaacgtttatgtaaa

SEQ ID NO: 261796 - DNA, 408 bp, Glycine max
aacaaaacctacgaggaagaagaaagcacggttctattttcccattcccaaacacgggcagggttgttacccttcaacgagaacgacccgcaggacatggtcatataccaagtcctcaacgaagccaatgctctcaccaacacatttctccctcagaggcttcaccaacctcagttgtgcctcgagcccaccagaaacataacaaagaagcactacagaggagttcggcgccgcccctggggaaaatacgccgctgagattcgcgactctgcccgccacggcgccagaatatggttaggcaccttcaacgtgaaagtgcatggtataccaccggtaaatgaggtcaggttgtaattcactaatgtgtgacgatatttcaatataagacatacatctgtttatcatgtg

SEQ ID NO: 261797 - DNA, 401 bp, Glycine max
cccacgcgtccggtactttggactcatgggtgatggccaacctattggacgatacgatgatatgtgggctggatggtgtgttaaggttatatgtgaccatttgggcttgggagtgaagactggccttccatacatctggcacagcaaagcaagcaacccttttgtcaatctcaaaaaggagtacaagggcatcttctggcaagaagaaatcattccattcttccaaagtgccactctttcaaaagagtgcacgtctgtccaaaaatgttacattgaactctccaagcaagtcaaagagaagcttggtgtgtcctattatagtacaatgcaggactgatgactggatactacaacacacattaaaagtctcaagcaacaagtgtgtgtgcagtgacttatgt

SEQ ID NO: 261798 - DNA, 321 bp, Glycine max
gatggtgcgcgtgtgatttatgttgagggtgtagacataccacttattgctgtgaaaagagatggtggctacaactattttacaactgatctagcatcactttggtatcgtctaaatgaagaaaaacttgaatggattgtatatgttacagatattgggcagcaacagcactttgatatgctatttaaggcctataggcgtgcaggttggttaccaaaggatgagaatgcgtatccaaaatgtactcatataggttttggtcttgttcttggggaagatggaaaacgatttcggactcgcagaggagtgtcatagtgatac

SEQ ID NO: 261799 - DNA, 292 bp, Glycine max
  unsure (1)..(292): unsure at all n locations
cccacgcgtncgctttagagagatagagagatagagagagagagaaagaaatttagaaaagatggcagcctgcactgtctactcaacacaatctctgagcacaaattgcttcatctaaccccatcaaagacacaactgagtttctttcaccaaaagcaagtaggttttttgaggaacaacaacaggggccacagcagcagcagaagaagctatgtgataacatgtgcagcaggtgactcacagacagtggtgattggtcttgctgcaaactcacggtgtgggaagagcacct

SEQ ID NO: 261800 - DNA, 334 bp, Glycine max
acgaaaaaggaaaagaaggacaaagatgaagaaacagacacattaaagggaaagggaaaaaatggtgatggtgaagagaagaaggaaaagaaagagaaggagaagaaaaaggaaaagaaggacaaagatgaagaaacagacacattaaaggaaaagggaaaaaatgacgaaggcgaggatgatgaagaaaataagaaaaataagaaaaaggataagaaggagaaagagaaggatcacaaaaaagaaaagaaggaggatggaaaagaagagggtgagaaagagaaaagcaaggttgaagtttctgtaagggatattaataaaaaacacaagaggg

SEQ ID NO: 261801 - DNA, 397 bp, Glycine max
agctttcgcagaaaaaggaatcaaatatgagtacatggaacaagatctcaccaacgggagtgctttgcttcaagaaatgaacccaattcacaagaagattccagttctcatacatcatggaagacctatctgtgagtccctcataattgttgagtatattgatatggtttgggacaacaattgtcctttgcttccctctgatccctaccacaaagctcaagccaggttctgggctgattttgtagatcagaaagtgtatcatgcttctaagagagtttggatttcaaagggagaagagaaagaaggcaaaagcttctaaagctaacaatggagattttgaacacctatttggggaccattggtagtgagtgcttatactctatgtgttatactataa

SEQ ID NO: 261802 - DNA, 320 bp, Glycine max
tgtaaatcagcttcttactaagatagatggtgtggagtcactaaataatgttttaggtattggaatgactaacagaaaggacatgcttgatgaagctctcttaagaccagggaggttggaagtccaggttgagataagccttcctgatgaaaatggtcgattgcaaattcttcaaattcatactaacaaaatgaaagagaattcttttctagctgctgatgtgaaccttcaagagcttgctgctcgaacgaaaaactacagtggtgcagaacttgaaggtgttgtgaaaagtgctgtctcatagttaataacatgattaa

SEQ ID NO: 261803 - DNA, 364 bp, Glycine max
  unsure (1)..(364): unsure at all n locations
acgcccacgcgtncgnccacgcgtncgaggaaaacgagtcaattcatcatttgctctctgctctgcttgtgcaaattttaggagcggagaatccagagaaagagagatgtctggtatcgcccgtggacgtcttgccgaggagcgaaagtcatggcgcaaaaaccaccctcatggtttcgttgccaagcccgagactctccctgatgccaccgttaatttgatggtctggcattgcactattcctggcaaggctgggactgattgggagggtggatatttcccactgacaatgcacttcagtgaagattacctacagctccaggcnatcctaggttttaccatggatcttaactgtgtgttctat

SEQ ID NO: 261804 - DNA, 298 bp, Glycine max
gagaggccacgtgagtgccggccatggccgcatcgggaagcaccggaagcaccctggagggcgcggtgtatgcctgaagcatgcaccaccaccggatcctctttgacaagtaccaccctgggttcttcggcaaggtcggaatgcgctattttcacaagctccgcaacaaattctactctccgatcctcaacatcgacaagctctggtccctggttccgcaagaagtgaaggacaaggcctccaaggagaacaaggcgccgctgatcgacgtcacgcagttcgggtactttaatgttct

SEQ ID NO: 261805 - DNA, 407 bp, Glycine max
gcgagcaacctttgcttctctcattaattaattcacaaactaacttagcttccaaattcatatggagagggtgacaaagatggtatcagagaggccagtggtgatattcagcaagagctcgtgctgcatgagccacaccataaagaccctcttgtgtgactttggggtgaatccagcggttcatgagctggatgagatcccaagaggcagagacattgagcaagctctttcaaggcttggttgttctccatctgttcctgctgtcttcatttctggtgagcttgttggtggagccaatgaaaagcatgagcctacttatgtcttatcaagctaaagagagcttggtaatgaaatattatgactctcaatatacactattgacacaactttgggtttatatatatctg

SEQ ID NO: 261806 - DNA, 412 bp, Glycine max
accaacttccgctacttcctactccaaccactttcttttttcccgcagacatggggggggggaagatcggaatcaacggatttggaagaattggccgtttggtggccagggtggctctgcagagagacgatgttgaactcgttgccgttaacgatcctttcattaccaccgattacatgacatacatgtttaaatacgacagtgttcacgggcactggaagcatcacgatgtcaccgttaaggatgagaagacccttctcttcggtgacaagccagtcactgtttttggacacatgaaccctgaagatcatgagtgatgactacatatgtgatcacgagttaccgtaggatagtgcgacattaaggggcaagacgtatatttgcccagaggtgccctttgtgtgggtacaca

SEQ ID NO: 261807 - DNA, 337 bp, Glycine max
cccacgcgtccgagaaacacgacttcaaaagttcagggacttgagaatgcaacaaaagacggggagactcaatagttttccaaaaagagatgccgctatattgaagagacatttagctcatttggaaacatatcttggcggcattaaatatatgacggggttacctgatattgtaataatcgtcgatcaacaagaagaatatacggctcttcgagaatgtataactttggaaattccaacaatttgtttaatcgatacaaattgtgacccggacctcgccgatatttcaattcaagctaatgatacttacctaatcataatctacaatatattgatt

SEQ ID NO: 261808 - DNA, 325 bp, Glycine max
  unsure (1)..(325): unsure at all n locations
acgcgtntcgccacgcgtncgaataatcaaaacaaacacaaccaaacccaaagcccggtcgatttggatccgatgggtgatatactgaaacaaatattggcgaagccgatccagctggcggaccaagtaaccaaagccgccgacgaagccagctccttcaagcaggaatgcggcgagctgaaggcgaagacggagaaactggcggcgctgctgcgtcaggcggctcgtgcgagttccgatctctacgagcgtcccacgcgccgcatcatcgacgaaacagaacacgttctcgaaaaggccctcctggcctaatgcgggaccctat

SEQ ID NO: 261809 - DNA, 312 bp, Glycine max
acgatttaactccattttactttcgtcattttaaaccactgcttcaaatctatttaactctttcgctctgtaatccgcgtctgtttgcgtttcacggcccacattgctgcgttctctggagtctttggcctttcaaggaaaaaatggcagagacaaaaccagacacaccgttgatgccaccatcatcgcggaaccttccagatttcaagaagtccgtgaaattgaaatatgtgaagcttggttatcattacctcataacacatggcatgtacctctttctttcccctctggtggtgctcattgctgcacaag

SEQ ID NO: 261810 - DNA, 302 bp, Glycine max
atttttccatagcataagctaacaaaataagaaaaatgaagttgaggtcttcaatcgcattgatttgcattctggcgagtgcgagtgtgacaatttcagaatcattaagccaacaagagcaattgtcagcatatgaagttcttgagaaatacgatctcccagtggggcttcttccaaaaggtgccacagggtatgagctaaacgaaaaaaacgggcacttcacagcgtatttgaatggaacatgctacttcagcatagagtcgtatgagctaaagtacaagtccacaatcaagggatggatc

SEQ ID NO: 261811 - DNA, 276 bp, Glycine max
cacaaaatcaagcacacaagcaaattcacttctctgttctgacacacatattaaggtcccgggaaagatctagagagtgattaacatggttactttgttcacaaatgcaaggccgtatctgctgttagtggcagttcaatttgggtctgctggcatgttcatatttgcgatggatgctataaagaagggtatgagccattacgtgttcatcgtctatcgtaatgccatcgcctctgtatctcttgctcccttcgcatttgttcttgaaaggaaagt

SEQ ID NO: 261812 - DNA, 398 bp, Glycine max
gcgcaagaacaaagaactaaagcacctgggatttgtgaggattgctgctattcaaacttttgtgagtgtgtcaaatctgtatgagtacgcaaagcagaattctgggcctttgagatccgctgttggaacggttgagaacactgtaaccaccgttcttggtcctgtctgcaacaaattcaaggacttccctgatgatgtcctggtttatgttgacaaaaaggtggatgaagcttcccacaagttcgatgagcatgctccttcctttgccaagcaccttgcggatcaagccaagggtgtgattcagaaagtgatggagcaggagtgcagaactattgggggaaactgtgtatttgtgtcaatcaacattggtgtaatcggagtggatgataccattacat

SEQ ID NO: 261813 - DNA, 402 bp, Glycine max
gaccacgcgtgcgatttctgtgccaacaaaagaagatggcctcacaggtttgcaaagctgcttccagagccgcgaggtccgttctctccgcttccagagcctcccatggacgtgcggttggggctgctacggctgtttcattgagctgcaaagtgcctcttttctacggaaagaacggttctggaagtggttccgcttcatcatcatcatcatcatggatttcaggagcacttgctcttcctgccgcagcttacatgttccaagatcaggaggtgcgcgcagctgagctggagcgcactttcattgccattaagcctgatgatgaaagggtgatttaatatattgttgacgaagggcaagctggggtaaagatgatcttaagaattgcaacactatacactg

SEQ ID NO: 261814 - DNA, 373 bp, Glycine max
  unsure (1)..(373): unsure at all n locations
taatttctcaacttctctgtcccttgttttttttccccctcatcttaattaattctgattcgtaagaggaactgaaactccttcaatctcttttttttcttttttctcggacaccatgattttcgatcaagggtcaatgcaatctaagtccaaccttgactgcttcctccggcgtacgacacctgttgtgccgtctcagtttcttcccaagcacgagattcgaaaccttaaccgtttgtggcacccgtgggagagagaagcggttgagtacttcactttgggtgatctatgggatcggntcccatgatctatgactgattcatacttgcaatggaacatgtagacttttctacctttcattaatttacacaca

SEQ ID NO: 261815 - DNA, 408 bp, Glycine max
catgtgtcgtggaacttttgtggttgcaaccactgttggagtggtggaggcgttgaaggatgaagggtattgcaaaatgaacagcacaatgatgaagttggtggctcaacatgccaagaaccacatagggtcagtaactgaggccaagaagctggcttctccttctccttctccttctacttcttcttcttcagtaacttcaaataacctgagagatgatgagaagagaaggatggcagaggagtctctcagaacagttatgtatttgagcacatggggtcctaattcttagatgtagaaaacattataaatataatttacatattacaggacaaaattgatgcgacagtagcataatttaaatgaaggtatacattacacttgtcatatgcacgttatctatatgtg

SEQ ID NO: 261816 - DNA, 371 bp, Glycine max
gttaacactttccaatacaataatcactaactgaatattcgatcggagatgtctgccgccggcgaagaagctaacgctcccgccgtcgaaaagccggttgaggaggtgaaggcgccgaaccccgcgaaggagaagaaacctaaggctccgaaggaaaagaagccaaaacaggccaaaacagcttcacatcctccatattttcagatgattaaggaggctttgatcgctttgaacgagaaaggaggatcgagtccttatgcgatagcgaagtacatggaggagaagcacaaggcggtgctccctgcgaatttcaagaagattctaggtctgcaactaaagaaccaagctgcgagagggaaactcgtgaagat

SEQ ID NO: 261817 - DNA, 443 bp, Glycine max
acgcgtacgcccacgcgtccgctttctccaagttgatgacgttactttactggttgaccgtcagaatgatatgcgcttgggcattgacgatatgtcttatgaggagcttcttgcattaggggagcggattggcaaagtaaacacacgtttgtcagaggaaatgattacaagtcaaatgaagacaaaatcttatttattactagctactaatgctattaacttggatgaggcagcttccgaggaacaggaaactgattcttgcataatatgccaggatgaatataaaaaccgagaaaaaattggtattcttcaatgcgggcacgaatatcacgcagactgttcaaagaaatggttacttgtgaaaaatgtgtgccccgtatgcaaatcagaagcattgactcctggagagaagtgtgtataaaatctgaggattacatgtctct

SEQ ID NO: 261818 - DNA, 455 bp, Glycine max
cggcccagtgctcatcgaggcttaaaccctttcggcggcagcgaaaaaagtctccccgggcccagacccaaacaatgaggaagaaaaaacaagggttcagaagacccgttgtcataaaaaagccgaagcaaccgcaagagcaacccagcgttgatcctattacgggaaagaaaatccccaaaagtttcgtgttttcgcgaggcaagttgccggctcctctcaaacagcttcagatggacctcagaaagttgatgcttccatacactgctctcagccttagggaaaagaaacggaataatctgagggactttctgaatgttgctggacctatgggtgtcacgcatttcttcatattgtcaaaaactgctacttcatcttacttgaaggttgcaactacccctcaagggcccactcttacgtttaagatacatgaatactcattggccgctgacatt

SEQ ID NO: 261819 - DNA, 452 bp, Glycine max
cccacgcgttcggggtagcggaaatgacaattctttgaattctgatggaaatgctgctgatggaggggcaaaattagagaatgctgcattgtcatggtcaaagggcatctataaggacacacgcacgggtggggctacagaaaaatccgatcagaatccaaatgctgataaatttcctacattaaggagaagaaaacatctgtttgtcattgctgtggattgtgataccaattgaagccttcttgaaactattaaagccatctttgagactgctgaaaaggatagggcagatagcattgtaggtttcatataggcaacatcattaacaatatcagagatacagtcattactaatctcaagtggctcgagacccatcgatgatgatgcttatatttgcaatagtggcagtgatctatactatacatacgtcaattccggagatcgtccatttg

SEQ ID NO: 261820 - DNA, 251 bp, Glycine max
tccatcggcagttagagacagagagagagagaaacaaaaccctaattggtgagcggcgaaaggggcgcaaccggcggcggctgcagcagcaacaggagcagcagtaatcgatcaagtgcagcgcttcgggcggaagacgacagcggtggcagtgacctactgcacgcgtggtctatgcctcatcaagatcaatggctgtccgatcgagctggtggagcctgagattctccgtttcaaggccttcgagccaa

SEQ ID NO: 261821 - DNA, 451 bp, Glycine max
agaagaaacagaattgaattgaattgcgtttgcgccattgaaaatcggaagtaatggaattgcattgctccgtgaaaaaattggaaaacgagaaagcgcttgagtttctcggaggcgttcctcttctgcagaggcttccgagctcgtctctgaggaagatagctcaacttgtggatgtcaaacactgtgagccacgagagtatgttgctcgcgagggtgaacctggagatggcgtgtacttcatattggatggagaggctgaggttcttggatctgctagggccaatgatgaacatcgaccagagttccaattgaaacaatatgactactttggttatggtttgtcaaacacagttcaccaggcagatgttgttgctttgtctaagctcacatgcttagtgcttccccatgtgcactcaacactgctgcagccaaagtctatctggagagc

SEQ ID NO: 261822 - DNA, 466 bp, Glycine max
ctgaaggccgcggcagccgcggccaccgcgccacccaagaaggaccaggccaagcccggagcgcgcagcggcgcgccggcccagttgccgtcgaagccgcttcctccctctcaggctgtaagggaggctaaaaatgaaacttcttacggcggtcgtggtggtggccgaggaggtggaagaggatttggacgcggccgtggtggcggcggtggctttggccgtgatttttccaatgatgataactcatcggcccctgctaaccaaggatcttttgaaggagattctgggaatccctcagaaagacgcggttatggtggaccccgtgggccctaccgtggtggcggcagtggacgtggtcgtcgtggaggttttagcaatggtgaaactggtgatgaaggacgtccaagaagagcatttgaacgccacagtgggactggacgaggaaatgaatcaaacgggaagggtc

SEQ ID NO: 261823 - DNA, 472 bp, Glycine max
tccacgcgtccgcactttcactggaatcacaatcctgaaacagaaacatcttagcatttagcgatactactagacaacatgaccaccacattggaaagaggtttctcggaagagcaagaagctctggtggtgaagtcatggaatgtcatgaagaagaattctggagagttgggtctcaagtttttcttgaaaatatttgagattgctccatcagctcagaaattgttctcattcttgagagattcaacggttcctttggagcaaaatcccaagctcaagccccatgccgtgtctgtctttgtaatgacctgtgattcagcagttcagctgcggaaggccggaaagtcactgtcagagaatcaaacttgaaaaaattaggtgctacccattttagaaccggcgtagcaaacgagcatttcgaggtgacaaagtttgcacttttggagaccataaaagaagctgtaccagaaat

SEQ ID NO: 261824 - DNA, 455 bp, Glycine max
gggatgaggatgataatggggagactggggatgatgagatgggggtcgaagatgatggggagtttgaagatgacgatgaagaagaagactatggtgctgggtatcttgttcagccagttggacagtctgatgctctcaatgctggaggagctgatgtggatggtggaaatgatgacgatggtgaagaggaggatgaagttgatgacgacgacgatgatcaggtgttgcctcctgctgactcttcccacaagatgaagagggatgatgaagaggacgtggactacgatgacgatgtggtagcattcacgaagtcacccaagaagcatcattgacttctattatatatatcaatgttcttgttctgtttcaagcttccatgtgttggaagcagggaaacctcagttttagatagaataacgattgattaagttttaggaatttagctctctcatgaa

SEQ ID NO: 261825 - DNA, 481 bp, Glycine max
cggacttgaagggtccgacccgcgcgtccgcttccacttccaattttcaataattcacgactccttccgagatctctctctctcgcccacaggccagccatggcgaatacggggaatttagacgcggcgatagagcaattgctgaacgtggagaagcagatgaggctcgccggtgacgtggcgggtaccagaaaagcagccaccgatattttgcagctctgcttcgatgcacgagcctggaaaacactcaatgaccagattgtcgttttgtcaaaacgacgtggccagctcaagcaggctgtaacagctatggtgcaacaggctatgcaatatattgacgagacaccagatatcgaaactcgcatagaactcatcaaaacgttgaacagtgtgtctgcagggaagatatacgtggaaattgagagagctcgattgatcaaaaaacttgcaaagattaaggaagaacaagggcttatagctg

SEQ ID NO: 261826 - DNA, 457 bp, Glycine max
attgactagtatcattaagatggctaattcctacttatccttgcttgtcttgatccttgtaggtctgctcctcacccctcaagggcttgctgatgaatctgattcttactataagccaccagtttacaagaaaccaccagtgtacaagcccaagcccaagccacccattcacaagcccaagccacccgtttacaagcccaagccacccgtttacaagaaacccccttatggtaagtacccaccagttcaagacaacgatcacttctaaaccatgcaacaaggcatgttaatgttaactatctactaaaataaagaggttcagttaacctactacgtacgttgctccttttaattcctaaatcgtaatttacaactatgtacggatgagacattcttggctagctctgcacttcaatcctttatttgtacaatgctatggccaagtcaataccatgca

SEQ ID NO: 261827 - DNA, 446 bp, Glycine max
cttacttcagctctgacctttcgaccacttgtttggataatccgacccttgaatgggttaagcagggcccaaaaaccccggggacctaatccttgcttccggctgttcctttgaagggtgctgctgatcaggttcagaagaccaacaactcgcaggatgtggtggctgcacaagatgattctgcaaaaaccctttccgaagagcttgcagacattgaatcccagctcaagttctttgagaccccttctttacttgatgaagcctgtgctgatgctacattggcgtctttgctcggcggagacgcaactcatgacgccgacggataccctatgaacctttggagcttcgacgacctgccttccatggcacgagtcttctgaacaccctctatctcccctattatgtaaataaagctacaagaattgtgatcgcgatgttggtgatgg

SEQ ID NO: 261828 - DNA, 369 bp, Glycine max
atttggcgttcggagcgactgaactaatcattaatttgcactcgctgcttcagcttcgtcagccttcttttgcatcatttatatctcttgagaaatggcacaagaaacctttctattcacatctgaatctgtaaacgagggtcaccccgacaagctgtgcgaccagatctctgatgcagtacttgatgcgtgccttgaacaggaccctgacagcaaggttgcctgtgagacatgcaccaagaccaacatggtcatggtcttctgagacatcacatccaaggccaacgtagactatcaaaagattgtccgcgacacatgccgctaaattggattcatctctgatgatgttggtcttgatgctgacaaatg

SEQ ID NO: 261829 - DNA, 416 bp, Glycine max
cttgggccaaagtggaggacttgacactgagggtaatgaacttccacgtttagtctatgttggtcgtgaaaagcgtccagggttccaacatcacatgaaagctggtgccatgaatgcccttgttcgagtatctgcagtccttaccaatggacctttcttattgaatcttgattgtgatcactacataaacaacagcaaggccttgagggaagctatgtgctttatgatggatcccaatcttggtaaacatgtttgctatgtccagtttccgcagaggtttgacggtattgataggaatgatcgatatgccaatccgtatacagttttctttgatataaacttgaaaggtttggatggcattcaaggtcctgtttatgtgggtactggatgcgtcttcaacaggactagcttatatg

SEQ ID NO: 261830 - DNA, 453 bp, Glycine max
gagagatcgaaatttcccattggggcaatatacagatcacagagcattacagtattatgcatgctggtgctcagagcaaaggagaattttctaggcttgactatcagaccaggcaatttttaagaggtgcatcagcctttaggcgtcttgttgccaagctaccaccaagagctcattctgtgtactacagggatgaaattggcaacatttccacttctagtttatggggtgactcaaaaaagacagaactggagattgaacctaggtaccctatgtttggtggctggaaaactgcctttaccattggatatggcttgccacttcgagacttcttatttggatcggatggaaagcgcttccttaatatctcttttggtgcccctattagtgagttggtcattgacacactctttgtgaaggttgttttgccagagggttctaaagatatttcag

SEQ ID NO: 261831 - DNA, 357 bp, Glycine max
cccacgcgtccggtctgcatttgcaacaaaggccaaagttcgccgagctattgaggctgaaggaatgcccttcacttatgtgtcaagcaacttctttgctggttacttcctgcccaacttgtcacagcctggagccacagctgcccccagagacagagttattatcctaagagatggaaaccccaaagctgtttttaacaaggaagaagatattggaacttatacaatcaattctgtggatgatccaagaaccttgaacaaaattctctacattagaccaccagctaataccttgtcgtttaatgagcttgttactctctgggaaggaaagattggtaaaactcttgaaagaatcta

SEQ ID NO: 261832 - DNA, 377 bp, Glycine max
cgtccacgcatccggtctgcatttgcaacagggttccattttcgccgagctattgatgctgaaggaaggccttttactgatgtgtgacgcaacttctttgctggttacttcctgcccaacttgtcacagcctgtagccacagctgcccccagagacagagttattatcctatgagatggaaaccccaaagctgtttttaacaaggaagaggatattggaacttatacaatcaattctgtggatgatccaagaaccttgaacataattctctacattacaccaccagctaataccttgtcgtttaatgagcttgttactctcttggagggaaagattggtaaaactcttgaaagaatctatgttccagaaaaacaact

SEQ ID NO: 261833 - DNA, 386 bp, Glycine max
  unsure (1)..(386): unsure at all n locations
ctttgaaagggttcacgaagaagcaccaatccgctccgagttgtatgtcttgcagagctagaggatgtcaacnatgcctcgctatgatgataaatatggaaatacccgcctctatgttggacgcttgtcttcgaggactcgttcacgtgacctgaagcgtgtcttcagcagatatggaagagttcgaggcgtagatatgaagaatgatttcgcctttgttgaatctagtgatcctagagatgctgatgatgctagatacaacctgaatggacgtgatgttgcaggaagtcgtattatcgtggaatttgacaacgggggtcctcgaggcttccgggaccaggaatatatgggtcgggagacacctactggatctgggcgatgcttta

SEQ ID NO: 261834 - DNA, 462 bp, Glycine max
  unsure (1)..(462): unsure at all n locations
agcgcggtccgctctgtgttngccggctgangattcccaacgagccaccttcttcggttctcgcaaaggttaagggagggttggtaaaggaaagactcacattaacattggcgtcattggacatgtcgactcttggaagtcaactaccactggtcatttgatctacaagcttggaagtatcgacaagcgtgtgattgaaaagttcgagaaggaggctgctgagatgaacagaggtcattcaagtatgcctaggtgcttgacaaggctcaacgctgagcgcgaaagaggaattaccatngatattgctttgtggaaagttgaaaccaccaagtactactgcacagtcatcgatgcccctcgacatcgtgactttatcaagaacatgattactgntaccttccaggctgattgtgctgtccttatcattgactccaccactggtggttttgaagctggtatttc

SEQ ID NO: 261835 - DNA, 336 bp, Glycine max
cagcctatcatggcgtgagttggtgactacactatcaacataaatgtgtcagtgtgacaggtagaggctactggaggctagcacacgagtttagtacaagtatgacgctcgataatcttccagctatacctacactagtccttgtcatgatgggcctgactaatatccctggataacggtcaaaatcatgaatcctatgaactcagcttctgacgggtcatgcgaaatatgacttgatatctaattaaactggtcctgtatattgtaacacttaagacgtcagattatgagtcatatattcatccattgagtggttcactcagaatctcactcaga

SEQ ID NO: 261836 - DNA, 450 bp, Glycine max
ccgatgaatgccttcctccgctggacatgtcaaagcagccacctacccaggagttggtggcgagggatctgcacgccaacgagtggcgattcaggcatatttttcggggtcaaccgcgtagacacttgctgcaaagtggttggagtgtttttgtcagctccaagagactagttgctgcggatgcgtttatatttttaaggggtgagaatggggaacttcgagttggtgttaggcgtgcaatgagacaacatggtaatgttccatcatcagttatctcaagccacagcatgcatatcggtgttattgcaactgcttggcatgccatattgactggcaccatgttcactgtgtattacaagcccaggactagtccagcaaagtttattgctccctatgatcaatacatggagtctcttaaaaacaattataccattgggatgcggttcaaaa

SEQ ID NO: 261837 - DNA, 464 bp, Glycine max
gacgcgtccgcccacgcgtccggacgtcaaggctatatcggcaggctggggttaacccattggcaggttgtgtaccaactctggctacaattccagtctggattggtctctaccaagctttatcaaatgtggcaaatgagggactgctaaccgaaggtttcctttggatcccctctttgggtggtcctactaccattgctgctagacaaagtggagctggaatttcttggctttttccatttgtggacgggcatccacctttgggttggcaagatactgcagcatatcttgttttacctattcttcttgtcgtttctcaatacgtttcaatggaaatcatgaaaccacctcagacagatccttctcaaaagaatcaacttcttattttaaagtttcttccactcatgattggctacttctcactatctgtcccatcaggactaacaatttactggtttataaac

SEQ ID NO: 261838 - DNA, 401 bp, Glycine max
  unsure (1)..(401): unsure at all n locations
cccacgcgtccgcgaaaactccttatggtcaccttcaaaaccagtcaaccaacgtgatgctgatctgatccatttttgggataagttccgcaaagctcctgagggttctctcaggaaaaatgcagctcagaaacaagttttggaagcaatgtctcatagaatgcatgtagacaacagtgtaaaacttattgggaagcttttatttggtattgaaaagggtccagaagtactcaacgctgttagaccggcaggatcggcacttgttgatgattggcactgccttaaaaccatggtgaggacttttgagacacattgtggatccttgtctcagtatggcatgaaacatatgaggtcctttgcaaacatctgcaatgtanggataaagaatgagcaaatggctg

SEQ ID NO: 261839 - DNA, 459 bp, Glycine max
catattcaccaacatctccatcttattctccatcaagcccaacatacagtcccagcagcccgtagaattctggtgtgagcccagactatagccccagttcgccccaatttagtcccagtacgggttactcaccaagtcaacctggttactcgccatcgtcgaccagccagtacactccacaaactagtgacaaggatgatagaggcactcgctgaggtaaactaacagctctgctgaagcgcaaattcatgacttaaaagtttttatcttattggatggacagcatttacgatgtaaatagtgaagaatttcttccctggagaaatgttgactgtaaaaaattcctgattctgccatctttttctcctattggttttaaattgtgaaaagaaggtctatttggccaaagttcttgtagtggccggaaactatcagatttctagaaatccctatatttta

SEQ ID NO: 261840 - DNA, 361 bp, Glycine max
ctttgttcgagataaggttttccctatcaaagctgaattgttgaaaccacaggaggaaatggaaagacacataactgatctcattaaaaagagtttagaagatgttactggcatagaatttcgaatgtttatggattttctgaagagtttgagcctatttggagaaaaggctccggctgagcggatgaaagagcttattggaatcattgaagggcaagctgatttagatgcacagttcaatgtatcagatgcagatcatattgaccggttgatatcttgccttcacatggcacttccatttgttgtgaggggtgcatcaagcaacatatttctcaactatataaacatatatataatatct

SEQ ID NO: 261841 - DNA, 450 bp, Glycine max
cccacgcgtccgctagtatccgatcctctgtcctctcgaagctttcatcgttcaacatattctcaccatctcagtcatgggcctgctatcttgttttaggtctaccgtcctgagaaaatgttccaaaggaagctctggcatgtcaagattcctgtatacgaacaattttcaacgaaacttgatttcgtctggtggcaatgaatcgtattatgggtattttaacaggagatcatacacttcactttatatgggaactggaactgtgggtgggattacaagtgctagaatcagggtgccaaatgtaggatgtgaaggattcatgtgctcaagtcatctgtcaatcactcaaagaaattcaagattgatccattctactagcaagattgttccaaattctgaaattcagaatataactactgagatggtgaagacaccagaggtctcaagatg

SEQ ID NO: 261842 - DNA, 409 bp, Glycine max
cccactcgttcgattgtcattgcaactcggtattcctgatgcttccatcgctcaacagactgggatcatctaacctatggcgctggtttctcggaatacgactaccgccatgcgcaaatggccaaaatgaagcgctgacacgacatgatacgtgtatacaaccactttcaaaccaaactcgatgctcgctgctccgaatatgaacacttctggatacataatcaacttatgaagcactctactgtgtataggacacatgaacaggttgtggcattacacgctgcatcacctatactctccaaactattgatgcgaatgagaaaagtccttatgaaatctatgtatcactgaaaccattggatgattgcaacgaactactagcatgaatgcctgatattgagataccatc

SEQ ID NO: 261843 - DNA, 380 bp, Glycine max
gtttacaccgagcagccacacctcccgcagcttccatggttctcaaaactgaactatgccggttcagtggtgccaagatctacccaggaaagggcatcagatttgttcgtggtgattctcaggttgtcctgtttgcaaactcaaaatgtatgaggtatttccacaatcgtctgaagccttcaaagctcacctggactgcaatgtacagaaagcaacacaaaaaggacattgctcaataagctgtgatgatgaggagacgtgctgccaaaaagccttactctaggtccattgttggtgcgaccttggaagtcatccaaaaaaagagagctgagaattcaaaagttcgagatgcatctagggaagctgctcttcgtgaaatt

SEQ ID NO: 261844 - DNA, 271 bp, Glycine max
ggcgcgtccgcttataaccgatcatccgcacgtacataggtttccgtggttctcaatactgaactatgctagtgcggtggctacctgatgtacgcacaaaagggcatcagatatgctcgtggtgattctcaggatgccctcgttagcaaactgatgacgtaacgatgtcttcatacaatcgcttaagaccttcgaagattaagtggactgcattggacagaaagtgacactgaaaggacattgatacagaggctttgagaacaaggacaca

SEQ ID NO: 261845 - DNA, 275 bp, Glycine max
aaaaagaacagaaataatttatatcttcttaaagaacaaaatgtttgttatgcttaatatcgggaggttggtctgtatttgtattcactccgtccttgattcaagtagttttttctcggcgaaattgcccgaagcctacgctttcttgaatccaattgtggatattatgccagtaatacccttactcttttttcttttagctcttgtttggcaagctgctgtaagttttcgatgatatctgtaatttgagtaatgtcttagaacaaaaagagagt

SEQ ID NO: 261846 - DNA, 435 bp, Glycine max
gggagcaacaacagtctcgatctgaagaaccgagagtgcgagaggaccgacacgctgatagagacagggaaatatcacgtgaaagaggtagggacaaagacagagaacgggagcgatcacgtgaacattctcatgaaagggtcagggatcgcgatcatagggaggataggcaccacatagaccgggataggaacagggacagagaccgagacagggaaagagatagagatcgtgggcgtgatcgagatagaacacgggaccgtgatcgtgagcgagggaaggaccgtgatcgggatcgagaatatgatcgacatcgtgagagggatagagattatgaagttggtgaccctgatcgaggacgctcacgttatacggagtctgattatgatcgtgttgaatctaaacatggggaaaggaatcatgactattaacctg

SEQ ID NO: 261847 - DNA, 451 bp, Glycine max
  unsure (1)..(451): unsure at all n locations
ggttacttgaaaatctcgaatcgctaaatttggattaagttttcaaccgaaccgcggaaccggttgctcgacctggctaactctcaggcaagtggctcggacgctgattccagcaacacgcggctggtggttgcactgtatgacgccctaaactccggcgactccaacgccgtcgtcaagatcgtcgccgccgatctcgagtggtggttccatggtccgccctctcaccagtttttgatgcgcatgctcaccggcgactccgccgccgacaactccttccgattcgttccgcagtccatcgccgccttcggctccaccgtcatcgtcgagggctgcgactccgcccgcaacattgcctgggtccacgcctggaccgtcactgatgggatgatcactcaaatcagagagtacttcaacaccgncctcaccgtcactcgcatccacgattccg

SEQ ID NO: 261848 - DNA, 396 bp, Glycine max
  unsure (1)..(396): unsure at all n locations
gccacgcgtacgatgaattcaaaaactaagactaatttgtagagcttcgcttgattcctgaggagcaggcatgtcgaacacatgcggaaactgtgactgcgctgacaagactaactgcaccaagggaaacagctatggtgttatagtagagactgagaagagctacatcgagactgttgacatggatgttccagcagctgagcatgatgggaagtgcaagtgtggcactaactgcacttgcacggactgcacttgtggccattaaggaatatgtctgaaaatgtaattgacatgtgttaggcaatacatatctncaaataatgtaatcttcgtatgaataaatgtgtgcctgtatcctacttcatgatctgtgtagtcatgcagtctgaatcatgt

SEQ ID NO: 261849 - DNA, 346 bp, Glycine max
ctcaaacctaccacctgtctttaggattcttgtacttattaaccaccctgtgatcgcagacgcaacactctcgctggacacttcctttcacatatggcttctcacgacagcatctacgctcttccaaccttcgcttatgatctcgactacaatcacctcaatcgcactcccgatgatcctatcctcggagtaactgtcgcttatgacaaagatccaagtccatttaatctcaacttgtgatctgacgcttaccgaactgatgaacgaaaacctaccgttgtgaatgtacagaggccagttgaacagcaactcataaatgacgtttcaatgcacagggaatatattc

SEQ ID NO: 261850 - DNA, 451 bp, Glycine max
gaaagacatgaaattcaaatgaagaaagccaaactaattggcatgcttgatgaggtggagcggaggtacaggcagtaccaccagcagatggagatagtgggttcatcatttgagcaagctgcggggattggttcagcaaggacttacactgcccttgcattgcatacaatctcgaagcagtttcggtgcttgaaagatgcacttgcagggcacgttcgtactgcgaataagagcttaggagaagaagattgctttggaggtaaaatggaaggttcgaggctcaaatatgttgaccatcatcttcggcaacagcgagctctccaacaattgggaatgatccagcacaatgcttggagaccccatagaggattgcctgaaagatccgattctgttcttcgtgcttggctcttcgaacacttcctccagccttatcctaaggattcggacaagc

SEQ ID NO: 261851 - DNA, 471 bp, Glycine max
tggaccgacccgtccgacagcataagccaaattttgagtaaactagtgtgcacactatcccatgcctagtgggggtggggatcctctcgttgttgggggagtaattggggatgtattggatccttttgaatattctattcctatgagggttacctacaataacagagatgtcagcaatggatgtgaattcaaaccctcacaagttgtcaaccaaccaagggtaaatatcggtggtgatgacctcaggaacttctatactttgattgcggttgatcccgatgcacctagcccaagtgaccccaatttgagagaatacctccattggttggtgactgatatcccagcaacaacaggggctagtttcggtacgtatatgatgtttttccatttttaaaacctataattgtctgtgcttaaagttaaacctattcaaaccattatttttaatttaaaattagtgagttttattta

SEQ ID NO: 261852 - DNA, 447 bp, Glycine max
aaagagaggaggagattgcgaaggcaaagcatgccttggaaagaaagaagaagttagcagagaaagctgcagccaaagcagccatcagagcacaaaaggaagctgagaagaagcttaaggaccgtgagaagaaagcaaagaagaaatcaggtgctgcagctgtggccaaccctgaggatgaaccaaaagatgaagttgtcgaggctacagagccagaaaaggttaacgatgatgtccaagtcctggctccagtgaaggaaaaggtccaaaaggagagtggcatcaggtccaggggccgagcaagaggcccagactcgattccaaaagctattattaagcggaagaagtctaacaattacctgatatgggctgcagctgcggctttgctagtcctcctgttggcagtgcttggatacatctatcttttctgaaaagcttaaatgtaga

SEQ ID NO: 261853 - DNA, 454 bp, Glycine max
aataaaaataattgtaactcatgtctaataatgcactaataactctgtaacaccaccttcatggtggcgattccagttcaaagcgactcaagcacttgttcgactcttttatcctacgcactcctccctgcttatcctgcgcatctttcacctagatcctccccttcactccttcactttcctatttcagtgggaaagaatcatgagttgtttcagctgttgcgaagaggatgacctccataaggctgctgaaagtggaggaccctatgttgtaaaaaatccagcagggaatgatggaaattatcatgcttctcaaactgcaaagcagggcactcagcctgttaaacctcagcccattgaagttcctaatatatcagcagatgaactgaaagaagttacggataactttggtcaagattctctgattggagagggatcctatggaagagtatat

SEQ ID NO: 261854 - DNA, 456 bp, Glycine max
aatacacatcacggcaactcatgtctaatggtgcactaatcactctctgacaccatcttcatgatagggattccagttcagaacgactcaggcactagttccactctttaatcctacacactcctacctgcttatcctgcgcatcttacacctagatccttcccatcactccttcactatcctattccagtggcaaagaaccatgacttgcaacagctaacgcgaacaggatgacctccataacgctgctgaaagtgcacgaccctatgttgtaaaaaatccatcatggaatgatgccaattatcatgcttctcatactgcaaaccaaggcactcagcctgttaaacctcagcccatcgcagtttctaatatatcatcagatgaactgaaagcagttacggataactctagtcaagattctctgattgtacagggatcctatggaagagtatatta

SEQ ID NO: 261855 - DNA, 452 bp, Glycine max
gtcttacctttccattatcaaaatggctgtttcggctatcacaggagcgaggctaaccctagggatagggttggcgatacctctttcctctcccacgcgctctcgaaccgtcgcaatggccgtatccgtcgaccccaagaccgacaacaaactcactcttaccaagtccgaggaagctttcgctgctgccaaggagctgatgcctggaggtgtcaactccccagttcgtgccttcaaatccgtgggtggtcaaccaattgtgattgattcagtcaaagggtctcgtatgtgggacatcgacggcaatgagtacattgactacgtcggttcttggggtccccgcatcattggtcacgctgatgatcaagtgctttcagctctggttgaaaccatgaagaaaggaactagctttggtgcaccctgtctgctggaaaacactttggcagagctgg

SEQ ID NO: 261856 - DNA, 313 bp, Glycine max
tcgaattgacagagagtcagaagaaaaagtggaacgggtgtgtgctcctcaaacagatgatattgccaaaaccgctagcggcgaagctggctcaaatgatactgcaaatggatgatacaagctgttcccgcatacaagtcatgctgctgaagatcttctgcacaattatggtataaccgtcctcgaattactcgtgaacgctctcgccaaagctctcggtcatactgaatgcaacctgataccactgctaacttccatggagaactatgttacattacactactgagactggcataccaatctacacccaatc

SEQ ID NO: 261857 - DNA, 465 bp, Glycine max
  unsure (1)..(465): unsure at all n locations
gtggtgttgctgttgcaaattgcaacactcagtcagcactgcaccactgcatttcatttccgagcttagctacaactacaagcccacgtcgctttcataaaaccacacccacctgccaccatcactttccccaaaacgcaacatcatcaaaacttaaactcagagaatcagagagagagagagagagaaatgagtgaagaagccaaaaagaacttcgccggagctctaacggcgaggcccaactccgatgagccgaaaccggcaccggtgccagctgttcccccgaagaaggtcatcatcaagagcgctgatatgatccccgacatgcagaaggaggccgttgatatcgccgtcgccgcgtttgagaagtacaatgtggagaaagacgttgcggagcagataaagaaggagttcgataagaggcatggccccacgtggcattgtatcgntggacgtaattttggc

SEQ ID NO: 261858 - DNA, 384 bp, Glycine max
cgcccactcgtccggtgttttttcaaggcaggtctacttaagctaccggcggacacggctctctcgtcggaccctgtattccgccctctcgttataaatgccatcatcacgaagatcccatctttgctatttacgctgaggctcaccaaaagctctccaagcttggatttgctgatgcctaaacaacgtttaggggattgttgaagaggcatggtgcccataatatttctctaaaaaattgtctggccatggtttttaatgccaatgtcggttccccagattttacatagcttttgaatgtatcttgctggacgtaactatgattcgtaagctagtcagtcgtttctatttgtccatgatacttatggtaaattacattgttca

SEQ ID NO: 261859 - DNA, 453 bp, Glycine max
cggatctcggtgttgccaatgcgcaccaggtgcagcatctcagaaggtcacgcccaagaaaggctaggcctcagattcctggacctcctacttcaaaaggagaaactatagagaacaacaagaaaattggtctttgggcagtgaagttaccttcagcagattcaattgtagttcgacgaacgctagggattctaacagaaaacctccatggtctccctgggctgaacgagagtgctgagacagttgagaaaagggaagccttctggtcatctgtgaagccagctcattttggtgtgaaaataggctcaaaatctttcttgggcattctccgaatcatcatggttggagttttcattggtctttatggaagtattggttttggaaagcagcttcttttgaaatttcctgaaatattcagccttggctggttcatgaagaatggcccctctgaag

SEQ ID NO: 261860 - DNA, 286 bp, Glycine max
  unsure (1)..(286): unsure at all n locations
cgaaaaccctaggtagagagctcttcctccgtttctcacagcaatggccgccgcagcacgcccgctcgggaccgtgcaggccctcgacggtgacatggcaaccgatgcctncggcaccggtcccatccctgacctcatgaaagcctttatccggcccgacatcgtcaatttcgtacactcgaacatcttcaagaacagccgtcagccatacgccgtcagtccgcgggcctggtaacaaaacttcggccaaatcttggggtcccggccaaccgcgttccggaatccc

SEQ ID NO: 261861 - DNA, 372 bp, Glycine max
gagagagtgttcttcgtttgctaccttctcccagaaatggttacgttcaggtttcaccagtgccaggtggtcgggagggctctcccaacggaagcagatcagcatccgaagatctaccgaatgaagctctgggccaccaacgaggttcgcgccaagtctaagttctggtattttttgaggaagctgaagaaggtgaagaagagcaatggtcaagttcttgctatcaacgagatttttgagaagaacccaaccaagattaagaactacgggatatggttgcggtatcagagtaagactggttaccacaacatgtacaaagagtaccgcgataccactctaaacggttcaattgaggcaatgtacaatgaaaat

SEQ ID NO: 261862 - DNA, 452 bp, Glycine max
  unsure (1)..(452): unsure at all n locations
aagtctttgactttgaagggaaagcctcattttgctgacttcagtttggtgccttatgattggggtggctttgtgcatccatggattgaggcactggccaagaacaaggttggcttggaggagcttaggctcaagaggatggtggtctcggatgagagcctggagctactctctcggtctttcacacacttcaagtctttggttcttgttagctgtgaagggttctacactgatggccttgctgctttagctgcaaattgcaggtttcttaggcagctggatctgcaagaaaatgacgttgaagatcacaaaggccagtggctaagttgctttcctgacaactgcacatcactggcttctcttaattntgcttgccttaaaggagatgttagtttgggagcactagagagactggtggccagatctccttacctgaagagtttaaagctgaa

SEQ ID NO: 261863 - DNA, 371 bp, Glycine max
acgcgtccgcttatacacactcattttaaggctgttatatatatttctgttattgaaacttaggttgtcagagctgctgaaggtcgccttcctgtatttttggatggtggtgttcgccgtggaactgatgtcttcaaggcattagcactaggtgcctctggcatatttattggacgccctgtggtgttctccttggctgctgaaggagaggctggtgtaagaaacgtgctgcggatgctacgtgaggagtttgagctaaccatggccttgagtggttgcacctcactcaaggatatcactcgtgatcacattgtcactgattgtgaccaaccttgcattcttccccgcgcattgccaagattatgaaaaat

SEQ ID NO: 261864 - DNA, 425 bp, Glycine max
agagacttgatattacagttggttgagagaattatcacatctcctaaagctcgttctatctggctgaatggggctgtcagaaggggggagcgtgttgtgcccccatgggcacttgattctctattgagagttactttccctcttccttcagcccgggtcaaggccactgaaagatttgaagctgtttatccaacattaagagaagttgcccttgccagttcccctggaagcaaagcaataaagcatcttgcacaacagatactaagctttgcaattaaagctgcaggagaagctaattctgacctatcaaaggaggcaagtgacatttttatttggtgtttgactcagaaccctgaatgttacaagcaatgggattttctttatatggataaccttgaagcaaagtgttgtgtattgagaaaact

SEQ ID NO: 261865 - DNA, 272 bp, Glycine max
ttttcctttgtttctatggctcctgcagatttatatttccgatgcttagttgatgacctggcgggggccaccgaccactatgctctctagaaagccttctctcaatttggcgaaatcgtcgaatcaaaggtcatcaacgatcgtgaaactggaagatccataaggtttgtatttgtgaccttctccacagagcatgcgatgagagacgcaattgaaggaatgaactgccagaacctttacggtcgttatataaccgtgaacgatgctcaatc

SEQ ID NO: 261866 - DNA, 459 bp, Glycine max
cggacgcgtgggggaaaattagcctcacaaaagcaaagatcaaacaaaccaaggacgagaacgcgatgttgcttgaacttgcacttggtttattggttttggctctgtttctgcacttgcgtcccacacccactgcaaaatcaaaagcacttcgccatctcccaaacccaccaagcccaaagcctcgtcttcccttcataggacaccttcatctcttaaaagacaaacttctccactacgcactcatcgacctctccaaaaaacatggtcccttattctctctctactttggctccatgccaaccgttgttgcctccacaccagaattgttcaagctcttcctccaaacgcacgaggcaacttccttcaacacaaggttccaaacctcagccataagacgcctcacctatgatagctcagtggccatggttcccttcggaccttactggaagttcgtga

SEQ ID NO: 261867 - DNA, 369 bp, Glycine max
tacacttcatgggccattgggtactctgtggctaacctggcccggtcctttatcaggaacgagaggaagattcaccctgtgtctgttctggctaaaggcttttatgggatcgatggagaagtgttcctgagtttgcctgcaatgattggtagaggagggatactgggtgtgaccaatgtgcacttgaatgaagaggagacacagaggcttagagattcggccaagaccattctcgaagtacagactcagttgggtatttgaattttctgcgatgggtacttgctctttttttcctttaattttcttttgaacttcccaccaacatgatgtggtttcgcctaaattattagtagtacttgctactgttag

SEQ ID NO: 261868 - DNA, 456 bp, Glycine max
cccacgcgtccgaagaaaactaaggaaggaaggaagagtgagcgtgaaagatgccttgggcgaggctttcagggtctccaaggctcgacgttgctattgacatgggcaatccatttctcaatctcactgttgatggtttccttaagatcggagctgtcgcagccacgcgatcagctgctgaagatacttatcatattatccaaaaggggaatatctcaagtcatgatttcgagaaaacgttgaagaagatgtgcaaagaaggtgtatattggggaactatagctggcgtttatgttggaatggaatatggggtagagaggatccgtggcaccagagattggaagaatgccatgattgggggtgcagtaactggggccctggtatctgcagccagcaacaacaagaaagacaaaattgcaatagatgccattactggggcagcaattgctactgctg

SEQ ID NO: 261869 - DNA, 364 bp, Glycine max
  unsure (1)..(364): unsure at all n locations
accgtacgcgtccgcccacgcgtccgnattgttaaagatggataccaatggaggaaatatgggcaaaaggtgaccggagataacccttgtcctagagcatatttcaagtgctcttttgctcctagctgccctgtcaaaaagaaggtaaatatatataatcaaccaagtgctaactagtaactaggaaatggtttggtttgcttactcacatgttagtagggaaatggatctcaagctaagtttgtttagaacttggattggttattcaagtgcaaagaagtgtggatgatcaatctgttctggttgctacttatgaaagggagcacaatcatgctcaggtttcttcccaaatggaaacaacatc

SEQ ID NO: 261870 - DNA, 443 bp, Glycine max
gggcaatgaaaataagattgccctaagatttgacaaagtattttggcctaatgtagaactcgggggcactgttgctccgacctcttatacctgtggctattttctcaatcttcacaaagcaacaggccatcctgttcttgtctacatggtagctggaaggttcgcttatgacattgagaagctatctgatgaagcagccgcaaattttgtaatgcaacagctcaagaagatgtttccaaattcttctaagccagttcagtatcttgtgtctcgatggggaacggatccaaactcccttggatgttactcgtatgatttagttggaaaaccactcgatgtgtatgacaagcttcgtgcacctttgggcaatctattctttgggggaaaagctgtaagcttggacaatcaaggatctgtgcatggagcttactcagctggggtca

SEQ ID NO: 261871 - DNA, 327 bp, Glycine max
taatcttccgatccgcgcgtacgatgcgttatgcatgatattaccctttcagctttaaattacaccagcctccattcaagacttgtccgggttttttctgcccactgttatccacttgactcttatcttaatcaactcacaccttcagtccatcctgctcttgaataccttccatctttacaacatcacaataacactgataccctgtctgcccaagcaccagtatatgcagtacttaccaatgtacctatcatattgcctcttgattgtgatcactacatatacatcatctctgccttgagaacagctataaactccatgatatat

SEQ ID NO: 261872 - DNA, 371 bp, Glycine max
ggaagaatcactcccttatccatttgcacaccaaaccatggcctcaaccaacgctctctctggaggctccattctacgctcttccaaccgccagtctatgacccgaagagcgaaccatattggaagagtaaattaccggaaaccgaataaccgtttctccgtgaaagcctacgccaaagagattgcctttgaccagcattcccgctctgctatgcaggccggcattgacaagctcgccgacgctgttgggctcactcttgggcccagagggaagaatgttgtgttggatgagtttggaagtcctaaagtggtcaacgatggtgtcaccattgctcgcgcaatcgaacttcccgatcctatggagaaatgct

SEQ ID NO: 261873 - DNA, 315 bp, Glycine max
cccacgcgtccgggttgtaacagtgatgaggtggacgaattgacaagaatgagatatgcttgtcctgggtggaaggaaaaaataattaattctgatttgaaaagaaaagatggtttatgccctctaacacctgaggagactgcccttacgcttaaggctcttgacattgatcagaacattcaaatctacattgcagctggggaaatatatggaggggaaaggagaatggcaagtctagcgaaggagtacccaaaattggtcacgaaggaaacgctgttggagccatccgaccttcagttcttccaaaatcattca

SEQ ID NO: 261874 - DNA, 292 bp, Glycine max
ctcagggttacccgcgtgagcaatatcaggaatttcagtatttcgtggtgatagactttgaggctagctgtgacaaggataaaaatccccaccctcaagaaataattgagtttccatctgttatagtgagtagcatcactggccagctggaagcgtgttttcaaacatatgtgaggcccacctgcaatcagcttctgagtgatttctgcaaggatctgaccggcatccagcagattcaggtggacagaggtgttacattgagtgaggctctactaaggcatgacaaatggct

SEQ ID NO: 261875 - DNA, 260 bp, Glycine max
gaaaagggtaaggagatgaaagaaaaagctttgcagtggaaggaattggcaaaaagtgctggttttggccctgacggatcttcatttgctaattcggataacatggttcgagatgttcttctgcgcaaaaatgttaaatattcgcattagaagaactcaaatattttaacttactccattgacgtgtgaagactctatatgttaataaccttatctacatgggaaatgaaatgtaccaagtaccaactgatgaattggat

SEQ ID NO: 261876 - DNA, 389 bp, Glycine max
tgaagatgaccaggcagagagcaatgccaacttatacgaaggaagccttgatggcggcgaagctcttggatttggtcctctcttccccactgaaagtgaaagatctttgatggaaagagtcaggcatgagttgaagcatgaactaaaacagggttacaaggagaagattgtggacataagagaagaaattctaagaaagagacgagcggggaagcttccaggggacaccacatcccttttgaaagcttggtggcaatcacattctaaatggccttaccccactgaggaagacaaggctagattggtgcaggaaacagggttgcaattaaagcagataaataattggttcataaatcaaaggaaaaggaactggcatacaaataacccct

SEQ ID NO: 261877 - DNA, 373 bp, Glycine max
ggaggaaggcagcggcggacgttccggctggacacgtggcggtgtgcgtggtgcccagcaggatgaggttcatcgttcgcgccacgcatctgaaccacccgattttcaagatgcttcttgtgaacgccgaagaggaatacggcttctgcaaccacggtcctctcgctataccctgcgacgagtcactcttcgaagagcttcttcagctcgtgtcccgacccgtacccgtacccggattctgcacgctcgaggatttccagagacgctgccacatggatgattgcactggctttgacgtcgtatgagaatcgtagcacgtgcttcgtgacgagccaatttgctgaaaatacatttaatcgtaatcactaactac

SEQ ID NO: 261878 - DNA, 371 bp, Glycine max
ccgagccacgacgtcacgcgtacgcgtccgacttggtgtatggtgggggcagcgttgggctaatgggcttaatatctcggagagtgtatgatggaggctgccatgtcctagggatcattccaaaagctctcatgcctctcgagatatcaggtgaaacagtaggtgaagtgagaattgtttcagatatgcacgagcgtaaagctgccatggctcaagaagctgatgcatttgttgctctccctggaggatatggaaccatggaggagctgatggagatgataacttgggcccaacttggaatccataaaaaaccggttggtctactgaatgttgacggttactataaactgttgcttgcattatttgacaat

SEQ ID NO: 261879 - DNA, 429 bp, Glycine max
ccgaattccggtcgaccaggcgtccggtcacgcgttcgaacatgcctattctacttctcatttcaactcttttgcaattgcgatctttggttcggttttttttactcttggtaagcgtagttcggtgttggagaaccagcttccagttccagaatactgctgaacagagttcggcttcgctttattgggactcagttgtgtttctactaggttatcttctctgaattgcaaatgaatgatcgttgaaaaaccatgaagaaggtgaggagaaagatcggcaagtatgaggtgggtcggactattggcgaatgcaccttcgccaaggttaagttcgcaagaaactcggagacaggggagagcgtggctattaaagtcatggctaagaccaccattctccagcacagaatggttgaacagattaaaagagag

SEQ ID NO: 261880 - DNA, 362 bp, Glycine max
cccgttctgcatcttgatgtgaagccagagaatatactcttggatgagaattacaagggtcttgttgctgattttggtctctcaacgcttgttggaaaggatgtgagtcaagttatgacaacaatgagagggacaagagggtacttggctcctgagtggcttttggaaagaggggtgtcagaaaaaactgatgtttacagctatgggatggttctgttggagatcattggagggagaaggaatgtgtcgagggtagaggatccgagggacaggaccaagacaaagtgggagttctttcccaagattgtgaatgagaaagtgaaggaagggaaattcatggagattgtggatcgtaggttggt

SEQ ID NO: 261881 - DNA, 435 bp, Glycine max
cccacgcgtccggccaaccagtccgtcagtctactcctgcttccaaacgccccctcgctcggtgccctctccacacgcgccaccacctgctgcctcagcgacccgaaccgtaactgcaccaaccatacggacaaggaaaccatcttgctcgacggctgctacttagaacactggctcgtagtcatcgagaagcccgagggcgaccatacccgcgatgacatcatcgatagctacattgaaaccttggacaaggtcatcatacgtgaacaggaagcgaggatgaagatatattcggtttcgactaggcactactatgcgtatggagctctagtgtcatgaagagctttctatcaagcttaaagaatcgcctggagttcggtggatgcttgctgagtcttacttgaaatgtaaagaaaaggattatggatgtgagcc

SEQ ID NO: 261882 - DNA, 378 bp, Glycine max
cccacgcgtccgtctgaatctgaaacctccgtgttggtgttgcatatccaaaccggaattgggaaattgaattgttgaagggaagaagatcaagatggttctggcggagttaggtgggagcatttcgcgtgctctccagctgatgagcaatgcgacagtaatcgacgagaaggtgctcaacgattgcctcaacgacatcactcgcgctcttcttcaatccgatgttcaattcaagcttgtccgcgacatgcagaccaacatcaagaacattgtcaacctcgacgatctcgctgccggtcacaacaaacgcaggatcatccaacaagctgtgtttaacgaactctgcaaaattctggaccctgggaagccctctttcac

SEQ ID NO: 261883 - DNA, 443 bp, Glycine max
cgtacgctttcactgtgttatcaggtgcagctcacgttgattctgatatgggtactcacagggataggcagtggataaagcattgacatgattaaacactatcttttagatatgtctgcttctgctaaatagcttttgaaacttcagttagcaatattattatacttctacaatacataaatcctgtttggataattgtttggataaacacttatagaagtaaggtaaaatgaattgagcttctctcgtaagttaaaatcaacttatgcacttaacttttataaaagatttttcatttaacttttctgaaggccgaagtacataagttgattttagtttatgagaaaatcacatttcattctactttcttgtaagtatttatagagaaatttatcttaacaggatcatagtgcatgtacttatgaaataatctaatgtatgcc

SEQ ID NO: 261884 - DNA, 193 bp, Glycine max
tccattgaacatggcaagtttagaggaaaagggaatgcagttgggttcccagatcatgatgtgctcttcaaattttttggaaccttctcctgaagccaaaattagagatgacatggcttttagaaatagaagacatgttttgataacagttgagcttaaacctggagtggagtatgatgagagcgattttacc

SEQ ID NO: 261885 - DNA, 467 bp, Glycine max
ccagatcccacctccctcccttcaccaaatccccaaaaccgagaaacacctcaacgagtcggcgtctaagacgcttcatttctcatacccctccgccgttacttccttcgtctcctccctcaccggcgacgccgccgacaacaaacaaccatccccggcggccacgaccacgacctcccactttcagatcacgagcctctctcacgtgtcgtccgcggggaagcctccgctttcgtcttcctctttcaagagaaagtgcagctctgagaatttaggttctggaaagtgcggtagctcctctagccgctgtcattgttccaaaaagaggaaaatgaggttgaagagggtagtgagggtaccagctataagcttgaagatggctgatattccaccagatgattattcttggaggaaatatggacagaaaccaattaaaggatcgcctcatccaaggggttactacaagt

SEQ ID NO: 261886 - DNA, 361 bp, Glycine max
ggagagcgtgccagaatggcttcttttgttggagccatggctattgctgacttagtgaagagaaccttggggccaaagggaatggataaaattttgcagtcaacaggtagaggacgtgaagttactgtcacgaatgatggcgctacaatcttgaagtccctccatattgataacccagctgctaaagtccttgttgacatatcataagttcaagatgatgaagttggggatggaactacctcagctgttgtgttggctggtgaacttttaagggaggcagaaaagctggttgcaaccaagattcatccgatgacaataatatcaggttttcgaatggcatcagagtgtgctcgtaatgctt

SEQ ID NO: 261887 - DNA, 376 bp, Glycine max
tccgacccagagcgtccggtgcgactctgtgcttagctaacgttaacagtgacttaagatggcggattctgcagatgtcgcccacgatgttgtgtccctcctgtcttctcctcaaagggactttcttcttcgcaacaacggccatcaggttaaaattgacagcttgaagggtaagaaactcggattggatatttcggcattctggtgcgggccatcgtatacatttacgccgactatggtggatgtgtacaatgaagctgcaaaaaaaggtgacttccagatcgttttcattacggctgatgaatatgatgagtccttttacggttactgtcacaagatgccatggcttgcaatgccattttctgatttagacaca

SEQ ID NO: 261888 - DNA, 408 bp, Glycine max
agcttctattctattctatacctctctttctcattgttattagttgtatagctttaaatttgctgtgcgatttacattgcatctaataaagtaaagtggttactgacacagagaagcatatatagagaaagaaagaaggccctgccctatatagctgaagcaagatgatggaaaacggtggcaaacagacatttgaagtctccaatgacacgcttcaacgagtaggttccaagagctttgatgatgatggccgtctcaaaagaactggaactatttggactgcaagtgcccacataataacagctgttattggttctggggtgctatctttggcttgggctattgctcagctaggttggattgctcgtcctgtggtgatgattctattctctattgtgacttattata

SEQ ID NO: 261889 - DNA, 393 bp, Glycine max
gaacgttcaagacctcatgagcgtgttgctttccttgcttgaaggaaaaactattgagggcgatgaatgttgatattgtcatcaaatcctttgtattgacagtaattcaagcaggaactgaggcaagcattactactcttatatgggcaacaagtttgatattgaataatcctagtgtactagaaaaacttaaagcagaactagacatccaagttggaaaagagagatacatatgtgagtctgatttaagtaagttaacatatcttcaagctgtagtcaaagaaactttaagattgtaccctccagctcctctctcaagacctcgtgagtttgaagaggattgcactataggtggctacactgtcaaaaagggaactcgtctaattacaaatc

SEQ ID NO: 261890 - DNA, 404 bp, Glycine max
  unsure (1)..(404): unsure at all n locations
tcggncaggcgtacgctgcgctctgtacaaggctctactctactgctacaccttctgctctagaaaattcagtggggatgcatggcttcggctactctctctgtagccaaaccagcccttcaggcaaatgggaaaggcttctatgaattctctggcctccgcagctcatcaggcttccttcccttttctagaaaatcttcagaggatttccattctgtcattgccttccagacctatgcagttggaagcagtggaggatacaagaagggtgtgacagatgcaaaactgaaggttgccataaacggatttggaaggattggaaggaacttcttgaagcgctggcacggtcgcaaagactccgctctagatgtcattgccatgaacgacaccggtggcgtgaaaca

SEQ ID NO: 261891 - DNA, 458 bp, Glycine max
ctctaataacatttctaatctcattctccttctgttcaaacactctctctcatggcatcagataagacgattaggatcggcatcaacgggtttggaaggattggccgtttggtggccagggttgcccttcaaaggaatgatgttgaacttgttgctgtcaacgatcctttcatcaccactgattacatgacatacatgttcaagtacgacaccgttcatggccagtggaagcattttgatgtgaaggtgaaggactctaagacccttctctttggtgagaagcccgtcaccgtttttggaatcaggaaccctgaggaaattccatggcgtgaggttcgtgctgattatgttgttgagtcaactggtgtattcactgacaacgacaaggctgctgctcacttgaaaggtggcgccaagaaggttgacatctctgccccaagcaaagatgcacccatgtt

SEQ ID NO: 261892 - DNA, 401 bp, Glycine max
gtttagcctttctatcacctgaaaatgtcttgctccggggggagctgtctttgcagaagcgcctgcaaatgctatcaacagctgcagaagctgctagatgtacccagacttgagctacaccgagtcaaccaccaccgagaccttgatcatcgaagtggcaccagctaatgctcaatttaagagtgctgatataggtgttaccactgagaacgattgctgcaaatgcgctgctaactgcacctgcaacacctgcacttgcacgtgaggagtcgcagagctaaagcattaagcataaatgtcccacagaaacaatgataaacactatatgtactctgaaaactacaaaagcatgtaacatgtattatgatgcactctgtacctttgtgtctaaacaaacaccc

SEQ ID NO: 261893 - DNA, 460 bp, Glycine max
  unsure (1)..(460): unsure at all n locations
cccacgcgtccgctcacgcgtccgctctgaggatcaaaaacttttgagagaaaaggtggagggcctgagtggagatgctggaattgagcgtatggaatctgcattatctgaaacaagatctagatactttgtagtgaaggatgacggaagtccagtgaggtctccaatgattccatctatgcccacaagcccaacttcgatttctactgctgccagctcaagtgaaagaaatatttctaatgagagtcatcataggtcaagccgagtagttcgctccctctataaggaaacaaatacttaccctggagagtctagcttctctgaacccataaccagttcagatagtcagcttggcacatcctctgagaagttgctagcagagaatgaggttctcgtaaatgaatntcttcacaagcatcaccataatgtagctgatggctttgatgtctctaatcacgtt

SEQ ID NO: 261894 - DNA, 389 bp, Glycine max
ctgactttctggcttctgggttttctccctttggtcggttgagctaacagtggcatgagtcatcatcacaattaggttcaaaaaccaccactctgtgtgtttttttccttgtgtttctctcccatgtgtctccttctttgctgagaattgttgtggcagacaagggagtagcttcttctttctaagttgacatatgcacatggcttctcttggggatataggacttgcagcagcaataaacatccttagtgcatttgccttcttactggcttttgccatacttcgaattcaacctataaacgatagggtgtattttccaaaatggtatttgaagggtttaaggagcagtccattgcaagcaagggtatttgtgagcaagtttgtcattt

SEQ ID NO: 261895 - DNA, 395 bp, Glycine max
  unsure (1)..(395): unsure at all n locations
cccacgcgtccgagaagatggagatgtatcagatctggagcaggagaatagcgttgggagcgttcgcgtttgttctgcttttcctatcggcctcagcagacgacgtcgttgtgctctctgaagataacttcgagaaggaagttggtcaggacagaggagctctcgttgagttctatgctccttggtgtggacactgcaaaaagcttgctccagaatatgaaaagcttggtagcagcttcaagaaagccaaatctgttttaatcggcaaggttgactgtgatgagcacaagagtttgtgcagcanatatggagtctctgggtacccaacaattcagtggtttccaaaaggatctcttgaacccaaaaagtatgaagggccacgcactgctgattca

SEQ ID NO: 261896 - DNA, 340 bp, Glycine max
tctatgtcgtcgtttctcaaaaagttgcaagagttaaagcaaaaaccaaagtgagagagagagatgatgaagccatcgatgctcagatctcttcactctgccgacacccgcggcgcctcccacctctcccgccgtggctacgcctccgagccggtgccggagcgcaaggtggccgttctaggtgccgccggcgggatcgggcaacccctctcccttctcatgaagctcaaccccctcgtttccagcctctccctctacgatatcgccggaactccccgtgtcggcgccgatgtcagccacatcaacaccggatctgaagtagtggggtaccaaagtgacg

SEQ ID NO: 261897 - DNA, 466 bp, Glycine max
gagaagctgcgcaccttttcatactagtgctgattgctgaaactgccatcgctcgccattggcacaaagatcccaacaacacttgaaagttgaaacagaaaaacaccaatccctcatcgtactgttccgttatcaattctcgtgtttaaggacacaatttgcttgatacattttcaagttttcatctccatgttttgattttgaagaataaggagtatgcaattgactactacagatatggttttactataagtggcctgtatatggttttgggtcttgcaagtgtaagcagtatggaggatattcaattggatatcagttgggacgatgctgtctgtcccatatgcttggattttcctcataacagtgttctccttcggtgttcattttatgataaaggatgtcgtgcttttggttgtgacacaaatcaattgcactctaattgtttggatcgctttaaaaattc

SEQ ID NO: 261898 - DNA, 446 bp, Glycine max
gcagctccttctagttccggtgtcggtgtgggtgtttgaatctggtgaaggatgtcaattggtccaatcaaccagggtgatgccaacggctccaaccccttcgcttcgtggggtcaattcgtggattttcctctccctccttccatctccggcttcttccccggcttggaattcggattcggattcggatcatccgtgaacacacgtgtggactggagggagactcccagagcgcacgtgtggaagctggtgcttcccggcttctccaacgaggacgtgctggttgagctccaagacgagagggtgctccaagtcagcgtggagagcggcaacttcgtcacgaggtttaaggtccccgacaacggtaacctagaacaactcaaagccaacatgcgtcacggggttctcgttgtcactgttcccaagtttcatcaacccactactac

SEQ ID NO: 261899 - DNA, 444 bp, Glycine max
tggtatcccagcagttctgctaactttgggagccttgttcgtggtggacaccccgagcagggtgattgaacgtggccgcttggaagaaggaaaaacagtgcttaaaaagattcgtggcactgacaacattgaacttgagttccaggaattgcttgaggccagtcgtgtggctaaagaggtcaagcatccattcaggaatcttctcaagcgcaggaaccgaccccaacttgtcatttccgttgccctacagatattccagcaattcacaggcatcaacgcaatcatgttttatgccccggtgctgttcaacacgttaggattcaagaacgatgcatccctgtattctgctgtgataactggggctgtgaacgtgctctccactgttgtatcgatctactcagtggacaaagtgggacgttgcattctagtgctggaagctggtgt

SEQ ID NO: 261900 - DNA, 330 bp, Glycine max
attcaagacagatgttttactcaggcttctgaaatggagatatcctacatccaatgactttggatctgaaatcattcctgcagctgcgagggaaaacaatgtccaagcgtatttcttcattgactattgggaagacattggaacaataaaatcattttacgatgctaacttggctcttactgaagagaatccaatgttcaaattttatgaccccaagacacccatttacacatctgcaagattcctaccaccaacaaagattgacaaatgccggattgtggatgcaataagtctccattgatgtttcctgagagaatgcactgtccaaca

SEQ ID NO: 261901 - DNA, 405 bp, Glycine max
attgaagacagacgttatactcaggcttctgaaacgtaaatatcctacatccaatgagtggggatctgaaatcattcctgcagctacgagggaaaacaatgtccaagcgtatttattcattgactattgccaagacattggaacaataaaatcattttacgatgctaacttggctcttactgaagagaatccaatgttcaaattttatgacccgaagacacgcatttacacatctccaagattcctaccaccaacaaagattgacaaattgcccattgtggatgcaataatctcccatggatgtgtcctgagagaatgcactgtccaacattccattgttggcgaacgttcacgtctggattatggtgttgaactccaggacactgtaatgatcggagctgacta

SEQ ID NO: 261902 - DNA, 343 bp, Glycine max
cccacgcgtccgcccacgcgtccgatttcctcacctccttcaaccgctgctaaattctagggttccgaaatggacgctggcggaaagatcaagaagggcgccggaggtagaaagggcggcggcccaaagaagaagccggtttcaaggtccgtcaaagccggtctccaattccccgtcggaagaattggccgttatttgaagaaaggaaggtacgctcagcgtgtcggtaccggtgctcccgtatacttggctgcagttctcgaatacctagctgccgaggtgcttgagttggctgggaatgccgcacgtgacaacatgaagaacaggattattccaagacacg

SEQ ID NO: 261903 - DNA, 356 bp, Glycine max
  unsure (1)..(356): unsure at all n locations
gttttgatgcaacgctgtcactgagaaaggatctctatctacgaaggagcggaataaaacgcttgtctctgtgattaagagaatggcttcagatcggaaacttcacacttttgaggaggtggcaaagcacaaccagaccaaggattgctggctcatcatttctggcaaggtgtatgatgtcacccctttcatggaggatcatcccggaggtgatgaggttttgttatctgcaacagggaaagatgcaaccaatgactttgaagatgtggggcacagtgattctgctagagatatgatggaaaaatactacattggtgagattgatgcatcaaccgtnccactaaaacggacctaca

SEQ ID NO: 261904 - DNA, 407 bp, Glycine max
cccacgcgtccgagaattcagaatggacgtgaaagaacgaccactgaaactttactgcatggcataccttgccgcgggtcacatgatccctctatgcgacatagcccagttcttcgcctcacgtggccaccatgtgaccatcatcaccaccccttccaacgccgaaatccttcaccagtccaaaaacttccgcgtccacaccttcgacttcccttccgaagaagtaggcctccctgacggcgtcgaaaacttatccgacgtcaccgacctcgaaaaatcctacagaatctacatcgacgacaccacactgctccgcgaacccatcgagagtttcgtggagcgggacccaccggactgcatagttgccgatttcctatactgctgggtggaagacttggctaaaaagc

SEQ ID NO: 261905 - DNA, 396 bp, Glycine max
gaaaaacgcggaggttgaaattgatgctctatccatatgtctcaacatcaatggatgggaagtgatgatatcccttggtttcatggctgcagcaagtgttcgagtagcaaatgaacttggaagaggaagtgccaaagctgcaaagttctctattattgtgtcagtgctcacatcattggccatcggattccttctgtttatattcttcttattttttagagaaagacttgcatatatatttacctcaaataaagaggtggcctttgctgttggggatttgtcacctttgttgtcggtctctatattactgaacagtgttcaacctgtactctcaggagtggctataggaacaaggtggcaaagcattgtagcatatgtgaatatggggtgttatta

SEQ ID NO: 261906 - DNA, 468 bp, Glycine max
tctcccggtgcgaccacgcgtacgctgggataagattaaagattcaacaatggcctctgcttctgctactcttctgaagtcatcggctgttcttgacaagtgcgagtgggtcaaaggccagacccttcgacaacctgtcgtgagatgtaacccttcctcagcatcagctctcaccatcaaagctgcttcctatgctgacgagctcgtcaaaaccgccaaaacagtggcctcaccggggcgtggtattttggcgatggatgagtcaaatgcaacctgcgggaagcgtttggcatctattgggttagagaacacagaagctaatcggcaggcataccgtaccctacttgtgacagtacctggtcttggtgaatacatctctggtgccattctctttgaggaaactctctaccaatccactgtcgattgaaggaagatcgtcgacgtacttgttgaccaaaacattgttcc

SEQ ID NO: 261907 - DNA, 397 bp, Glycine max
  unsure (1)..(397): unsure at all n locations
gttcgacagcccaatgagctaagtgttttctacaagtttttgtatatctcacttggccttgctgggtttcttttggtcatgatcatagttcagaagcaagtgcatttctcacaaagtgagtatggtgtcagtgctggggttgtgctcttcttactatttcttcctcttgctgttgtgtttgttgaacaatataagatcagagagagtcaaaagctagcattcattgacccctccccggtcaagatagtagctgaaggagagtctgcanatggtaatacctctaacacgccaatttcaacagagattgaagaaactagatgggggcaaaaagtgttaagtccaccgnctcgaggtgaggactatactatacttcagccctattcagcttaaatatgat

SEQ ID NO: 261908 - DNA, 440 bp, Glycine max
ctcataagctttacttaattagcaaatccaaatatggcactttcttcttcatcatcgtcaagatccatatttgctttagctttgttcactcttttgcttataggaagttcttcagctcaactctctgagaacttctatgatagtaaatgtcccaaggttttctatgccgtaaaatccgttcttcaatctgctttggctaaagaacctcgccagggagcatctatcgttcgcctcttctttcatgactgctttgtcaatggttgtgatggatcagtactacttgatggcccttcctcagagaagactgcacctcccaacaataactctttgagaggttatgaagtcattgatgccatcaagtctaaggtcgagacagtatgccccggagtggtgtcatgtgctgatattgtaaccattgctgctcgtgactctgttgcaat

SEQ ID NO: 261909 - DNA, 444 bp, Glycine max
cacccttgaggtggagagctctgacactattgacaatgtcaaagctaagattcaagacagggaaggtatcccaccagaccaacagaggctcatttttgctggaaaacagcttgaggatggccgtacccttgccgattacaacattcagaaagagtccaccctccacctggtgctccgtcttcgtggtggcatgcaaatctttgtcaagaccctcactggaaagaccatcacccttgaggtggagagctctgacactattgacaatgtcaaagctaagattcaagacaaagaaggtatcccaccagaccaacagaggctcatttttgctggaaaacagcttgaagatggccgaaccttggcagattacaacatccagaaagaatctaccctccacttggtgctccgtcttcgcggtggtatgcaaatctttgtgaagactcttac

SEQ ID NO: 261910 - DNA, 454 bp, Glycine max
gagcaattgaacaagcaaagaaggctccttgaacaggacaaaacaaaacaaactggtcttgttgtgttgagcctaattgctatcaatattcaatattttatactattctttattcttattcttccagttatatggtttgtatttgctaatagctcccatcaaaggcccaaaaatgggtaccatcgttgaagcagataacacatataccaagatcctaggaagatggccagtcttttattatggcatgggacacatgctcaatgacataactgctgcttgttggttcacatatttattattgttcttgacagatattggactttcaccaaggaatgcagctgttgtgatgctttctggtcaagtggctgatggatttgtcaccatatttgttggtgaactgatagacaggtttggacacttcaagatatggcatggtgctggatctttattggtg

SEQ ID NO: 261911 - DNA, 374 bp, Glycine max
tttgtttctatggcttctgcagaagtagagttccgatgctttgttggtgggcttgcttgggccaccgaccacgatgctctcgagaaagccttctctcaatttggcgaaatcgtcgaatcgaaggtcatcaacgatcgtgaaactggaagatccagagggtttggatttgtgaccttcgccacagagcaggcgatgagagacgcaattgaaggaatgaacggccagaacctcgacggtcgtaatataaccgtgaacgaggctcaatcccgccgccgccaaaaacaaaaccgtcatccccgaccttcaggacatcctccaacgcttcacgtttgacaacatctgcaagatcgcgttcggcttcgacccggagtatc

SEQ ID NO: 261912 - DNA, 464 bp, Glycine max
cgattttcggtgagaaagagtggtactttttcagccctagagacaggaaataccgtaacgggtcccgacccaacagagtagccgggtcgggttattggaaagccaccggaaccgacatgatcatcaccaccgaaggtagaaaagttggcataaaaaaagccctcgatttctacattggcaaagcccccaaaggcaccaaaaccaattggatcatgcacgagtatcgactcctcgactcttcccgaaaaaacaccggcaccaagcttgatgactgggttctgtgtcgtatctacaagaagaactcgagtgcacagaaggcggtgcaaaacggcgtcgttccgagcaacgagcacactcaatacagcaacggttcctcttcctcttcttcgtcacaactcgacgacgttcttgaatcgctgccagcgattgatgaacggtgtttcccgatgccacgtgtcaacacg

SEQ ID NO: 261913 - DNA, 461 bp, Glycine max
cccacgcgtccgcttcacttgacggctcttggtgcttttatgaactttcttcagggacatgtctgactcaggtttatgacacttcaggttcttctgaagggtacacttctgcagcttttcatcctgatggtcttattcttggaaccggcaccacagaatctcttgtcaagatttgggacgtaaaaagtcaggcaaatgttgctaggtttgatggacatgctgggccagtaactgccatatctttctctgagaatggatacttccttgcgactgctgctcatgatggtgttaagctttgggatctacgtaaattgaagaacttcaggaattttgctccatatgattcagaaacaccgacgagctccgtggagtttgatcacagtggatcctacctagcagttgctggctctgatataaggatttaccaagttgcaaatgtaaaatctgaatggaactgtatc

SEQ ID NO: 261914 - DNA, 408 bp, Glycine max
tcctcgctggcttattaatatgcagagatatggtcctccaccatcatatcctcatctgaaggtccctgcactgaatgctcctatcccgcctggagctagctttggctatcatcctggtggatggggcaagcctcctgctgatgaatatgggcgtacactgtatggagatgattttggtgttcaacagcaagatcagcctaactatgaggaatagccattcgataagaccaagcatcgtagagacttgtaagaggaagagcaagatgacgactacgacgaagaagaggaagaagatgaagaaacggcggaggaggaacttgaagctggtattcagtctcgtgatagtctgtcacagcactcccactggagtgaaaacacccgatgttattgacctccagaagcaactga

SEQ ID NO: 261915 - DNA, 366 bp, Glycine max
aatttttctaggggttaatccaattttcgatggcttcttcaaatgttgagtcccgttgcttggtcggtggcctcgcttgggccactgacaaccaacctctcgagaaacccttctttcagtacggcaaaatcgttgaaacgaagattatcaacgatcgtgaaactggaagatccaggggttttggatttgtgaccttcgcctcggagcagtccatgaaagacgccatcgaagggatgaacggccaaaaccttgacggccgtaacatcacttgtaacgaagctcagtcccgtggtggcggtggcggcggaggcggtggaagtggtggatattgtcgtggtcccggtggtggatatggtggtggtggtc

SEQ ID NO: 261916 - DNA, 338 bp, Glycine max
  unsure (1)..(338): unsure at all n locations
cccacgcgtacggttagagacagagagagagagaaacaaaaccctaattggtgagtggcgagaatggcgcagccggcggcggcagcagcagcaacaggagcagcagtaatcgagcaagtgcagtgcttcgggcggaagaagacagcggtggcagtgacctactgcaagcgtggtcgaggcctcatcaagatcaatggctgcccgatcgagctggtggagccggagatcctccgtttcaaggccttcgagccaatccttctnctcggccgncaccgcttcgccggcgtggacatgcgcatcagagtcaaggggcggcggtcacaccttccagatctacg

SEQ ID NO: 261917 - DNA, 452 bp, Glycine max
  unsure (1)..(452): unsure at all n locations
aatatataagaagatgataaggggaagcgaagcatgtaggtgtgatggagcagaagaaggcagagatagtggcagagctccaagctgtgaagcacaacagtggcaagtcctacaatcagttagcggaggagactggactcaccaacgtctatgttgctcagcttctcaggagacaggctcagctcaatccccaaactgcccctctacttcgggcagcgctgtccgacctgccccaagaccttgtttctgagatgatgagaccccctctgaggtcttatgaccctaatctcatccaagaccncactgtctataggttgaatgaatgctgtatgcatttttggggagagcatcaaagaaataatcaatgaggagtttggtgatgggatcatgtcagcattagaattctactgctcggttgataaaattaaaggagtagatggaaaggatcgtgt

SEQ ID NO: 261918 - DNA, 414 bp, Glycine max
cccacgcgtccgcaaccacttatcccctttctccttctaacgagtgaggaaaaatggcgcgtaagaagatcagagagtatgactcaaagaggttgttgaaggagcactttaagagactctctggcaaggagttgccgatcaagtctgcacaaattaccgcatcaactgatttcactgagctacaagagaaggaaccctggctttcatcttctaaattggttgttaaacctgacatgttatttggaaagcgtggcaaaagtggtttggttgccttgaatttggattttgcacaagttgtttcatttgtgaaggagcgtcttggaaaagaggttgagatgagtggatgcaaaggacccataacaactttcaattgtgaacctttcatcccacacaatgaagagttttaccttaaca

SEQ ID NO: 261919 - DNA, 424 bp, Glycine max
  unsure (1)..(424): unsure at all n locations
gttttctttgtcgttttctgagttgcactggcatgtatcattggaattgctgtttgctgtggcctgccctgtatcattgcacttctttatgcagttacagaccaggaaggggcatcaaaggaagacattgagcagttgtcaaaatttaaattccgaagaattgaaagcaatgagaaacttaccggtactatacaaggacctgttggaggaataatgaccgaatgccaggctgattcacctattgaacatgctctagctgaggaggatgcggaatgttgcatctgcctttcttcttatgatgatggggttgagctaagagaacttccttgcggtcaccattttcactgtgtctgtgtggataaatggctgnatattaatgctacatgccccctctgcaagattaacatcttaaaaagtagcaacc

SEQ ID NO: 261920 - DNA, 450 bp, Glycine max
cgcgtacggttctagcgcaacttcttctagatgcaagggtgatgggtatagaaaatgctcacatcagtgtggcgtcattgtccatgtcgactctgggaaatgcactaccactggtcacctgatttacaagctcggaagccttgacaagcgtgctattgagaggtttgagaaggaagctgctgagatgaacaagaggtctttcaagcatgcctgggtgctagacaaacttaaggctgaacgtgaaagaggaatcaccattgatattgctttgtggaagtttgaaacaccaaagtattattgcacagttattgatgcgcctggacatagggatttcattaagaatatgattactgggacatcccaagctgactgtgctgatcttatcattgattcgaccactggtggttgttgagctcggattttccaggatggacagactcgtgaacatgc

SEQ ID NO: 261921 - DNA, 310 bp, Glycine max
acggatagacaagaaagggcaaggcttcaaggaaaaagttatgatgagattcctggagctgaagcgtctagttataagagttgtgtcatctgttgacaaaaagttagaagtgaaaccgcggtttctggagatttttcaggaagagaattacccaacagaatttccatataaatcaaaggtagttatgctgtttcaaaggatagaaggtgtggaagtttgcctatttgagcatgtatgttcaagaatttggatctgaatgtcaatttcctaattaaacgccgcgtgtacctttcatatttggattctgtga

SEQ ID NO: 261922 - DNA, 396 bp, Glycine max
  unsure (1)..(396): unsure at all n locations
ctcagatgcattacacgctccaaccagagagtgagagagagagacgagactcttagttaggtcaatttcttcaaccaccaccagcatgcaagactccggctccatgaagatctcccctctggatctcatgtccgccatcatcaagggcaagctcgacccctccaacgtctgctactactcctacaacgccgcagctgccgtcctcctcgagaaccgtcaattcctcatgctcctcaccacctacgtcgccgtcctcgtcagctgcttcgtcatcttcatctggcggagatcctnctcccccaaggccaagcctctcgaaccaccaaagcgcgttatcgagaagctttccgaaatcgaggtcgacgacggcaccaagatagtcacccatctttttcg

SEQ ID NO: 261923 - DNA, 358 bp, Glycine max
ctcagattccacgttgggcccgggtggcctggacctctcccaggccttcttcaggcgccatggacaacgccgcccctccgtcgccgaccaagcgccacaacaagatctccgtcatcggcgccggcaacgtgagaatggccatcgcgcagaccatcctcactcatgacctgaccgacgagctcgtcctcgtcgacaccaactgcgacaagctccgcggcgagatgctcgacctacagcacggctgtcgacttcctcccccgcaccaaagatccacgccctccgtcgactactgcgtcaccggcggctccgacctgtgcatcgtcaccgccggcgcccgacagatctccggcgagtcacg

SEQ ID NO: 261924 - DNA, 448 bp, Glycine max
tctcacacactctcttcaatttctagggttttgttattgctttgcctccattccccctttctcagagaaacaacaccttttctcttctccttcgcatctattctttgcgtttggtttttggttgattgaaagcattcacagcgtaattcgttgctgcattttaatcgatttatctaaccaggactgaatgacctaatggagtctaaaggtgggaaaaagaaatctagttatagtagtagtaaatcaattttttacaaaactcccctctgatacagcatttaatacgttagaccaaacagtggaatcaagaaattcagatctgctgcttactctaactgttctcgcaaaccattcttatacacatatcgattgatagttcgttgcatgcaaccataattttattaggaatttttcttctttgttttcaattaaatttttttgttgctct

SEQ ID NO: 261925 - DNA, 383 bp, Glycine max
cttctctgttacgtcctcctctcacagccacagccacagccacaaccacaaccacaaccacgacccggggagtttcagaaaccctaaccccacaataacctctcacaaactcactatttttcatcattcgataattcgaacttccaccatcttccccaaagtttgctatcatggctgggtcggcacccgaaggatcacaattcgatgctcgtcaatatgatgctaagatgaatgagttacttggaactgatgggcaagatttttttacttcttatgacgaagtttgtgaaagctttgatgctatgggattgcaggagaaccttctgaggggtatttatgcatacggttttgagaagccctctgcaattcaacaaagggggatt

SEQ ID NO: 261926 - DNA, 389 bp, Glycine max
acgcttccgcttattcgaatccccggcatgccactgaccaaccaacaccaatcattccctttcagtaccggccgcatagccacgacggcgaaagcggagctcgggacggcggtggcgcggacgggcggagccggctaccaatctgcgtccgtcgacgttcctcacgcataaggtcacagtccacgacagacaacgaggaatcgttcacgagttcgtcgtgcctgaggaccagtctatattacatactgctgaggcccagaatattaccctttcattcaacttcatgcatggctgttgtactagctgtgctgtacgtataaagaagggacacattaggcaaccagatgctcttgggatatctgccgaattgagagacaagggttatgcac

SEQ ID NO: 261927 - DNA, 416 bp, Glycine max
cccacgcgtccgcccacgcgttcgctcaagcaaccatggcaatggcaacccaagcctctctgttaacgccacccctctccggtctcaaagccagcgaccgcgcctccgtgccatggaagcaaaactccagcctctccttctccagcccgaagcccctcaagttctccagaacaatcagagcagcagccgccgacaagaccacagaggccccaccaaaagtagaggctgcaccggccggtttcaccccaccagaactggacccaaacaccctttccccgatcttcgggggcagcaccggcgggctcctgcccaaggcacaggtggaggagttttatgccattacgtgggactaacccaaagaacagatctttgaaatgcccactgtcggcgccgctatcatgagggagggtcctaac

SEQ ID NO: 261928 - DNA, 402 bp, Glycine max
acgattatgatcgactgacgatcgatcctgaattggagaaagagattggagcacaacttgatgaggaccgtgatgcaatgcttccaaagtgtgatgtaattgttatcaacacccctctcactgagcagacaaggcgattgtttgacaaaaatagaattgcgaagtgcaagaaaggtgtctagattgttaacaatgctcgaggggcaattgctgacacccaagcaattgcagatgcttgctccagtggccacgttgcatgttataatggtgatgtttggttcccacagccagctccaaaggatcattcatggcgttacatgccaaaccataccatgacttcttatatttctggcaccaccatagatgcacagttacattatgctgctgtggtcaaagacattc

SEQ ID NO: 261929 - DNA, 449 bp, Glycine max
acggttcgacacaaggccaaatatgagtgacatccacctctcagcagaggaagaagccaccatggaggcagagaccagagactactttgatggggttgcaccacaacgccacacaaagcctcaacgaagtgagtattcacctcaatatgtggatgcttactccaatgcccatcactcttcttcttcttcttctataccagaattcatgcaattccaacgcctcgagaatgatccccaagagaagaaattggagtacaatggaagtcaagtaccgcaagaatttgtagaaacagagtattaccaagatctcaacagcgtggactaacaccaacattcgacgggaacaggatttatcctagtacacaaaaatggagatgactttcacatagaacccgataatgactctggatgccatcactcttgcaagtgcaatccagcaaccaatgatt

SEQ ID NO: 261930 - DNA, 450 bp, Glycine max
ctcgtgaggctgctatggcagttcaaggaaagatggtagattctcagcgtaagaagagcaagtcaaggttgcagaagcttgagaaacaacctgaatggttgaagggtggagagctccgtgattatcaacttgagggtctgaattttcttggtaacagttggagaaatgatacaaatgtcattttagctgatgaaatgggccttggaaaaactgttcagtcagtatcgatgcttggttttctacagaatgcccagcaaatccatggtccttttcttgtagttgttccattgtccactgtatcaaattgggccaaagaattcaggaagtggcttcctgatatgaatattatcatatatgtaggtactcgtgcaagtcgagaggtttgtcaacaatatgaattgtataatgagaaacaacctgggaagccattaaattcaatgcactgttgac

SEQ ID NO: 261931 - DNA, 413 bp, Glycine max
gcgctcgtgaggctgctatggcagttcaaggaaagatggtttattctcagcgtaagaagagcagagcagggtttcgtaagcttgagaaacaacctgaatggttgaagggtggagagctccgtgattatcaacttgagggtctgaattttcttgttaacagttggagaaatgatccaaatgtcattttagctgatgaaatgggccttggaaaaactgttcagtcagtatcgatgcttggttttctacagaatgcccagcaaatccatggtccttttcttgtagttgttccattgtccactttatcaaattgggccaaagaattcatgaagtggcttcctgatatgaatattatcatatatgtaggtactcgtgcaagtcgagaggtttgtcaacaatatgaattttataatgag

SEQ ID NO: 261932 - DNA, 429 bp, Glycine max
acggtcagtctcagtggacatgaaggaccagaaaatgactataattggggatgttgatcctgtagacaggggttggaaagtttacaaaattcagtcttggcaagcttacaaaattctgtcatgttgagatactttcagttggaccagccaaagaggaaccaaagaaagaggagaagaagccagaagccaagaaagatccaaaggaggaatatgctgaacttctgaaggtagttgaagccaattattatcagactagacatctgcaatacccttattactatagcagaactgcggaagagaatccaactggctgcgttatttgctaagtattggagttagatggataataaatgagatcaatgaaagaagatggtggctggagttgagaaagatttggttctgttcttgaaatttccttttttccttttc

SEQ ID NO: 261933 - DNA, 385 bp, Glycine max
cctcggttacaagacaaccccaaatctcatatacctctacttcgtgctcggacatgtaccacttaccttggctatacctactaacagctatccatgcatatcattaagaacctcaaaattctcttaccagactggggtagggtctatatgcttatgggggaactccgataaaccaacatcttccagaacttgatagaagcctggatatacttgttgcaactcctggaagactgctagatttactggagagagctatagtttcattgccaatgattaggtatacatccttatacgaggcaaatataatgctggatattgattttgagccacaaataaagaagattgttgaacaaatggacatgccttcaacatctgccagacatac

SEQ ID NO: 261934 - DNA, 429 bp, Glycine max
cggacgcgtgggctgacataatgggggtgacatggatgaaggtaccaaggagtaaccaactgggtggtcaaatcaaagatgggttgttctacaagttcacgggatttcgtgaccaggatgttgtaactttgaccaattttttccaaaacacctgtggaatatcagtataagagaagcaactttctgttatcggacgtaattggggagaagttgatctaaatggaaatatgctggctttcatgggtggttcaaagcaagcttttgaagtatctttagcagatgtctatcaaacacaggttcaagggaagaatgatgtgatcttggagtttcatgtggatgacacaactggaactaatgagaaagattcactgatggagataagtttccacataccaaattccaacacccagattgctggtgatgaaaatc

SEQ ID NO: 261935 - DNA, 405 bp, Glycine max
  unsure (1)..(405): unsure at all n locations
tcgcccacgcgtccgcccacgcgtccggtctcttcctactctctgtgcatagctgcgttttccgagatcgaaaggtgaggttagtaagtaacaatggtggagaaagccaagggtatgaaggaggaggttgtcactcgagagtacaccatcaacctgcacaaacgcttgcatggctgcacatttaagaagaaggctcctaaagcaattaatgagattaggaagtttgctcagaaagcgatggggacgaatgatgtaagagtggatgtgaagctcaacaaggctgtgtggagccaggggatccggaacgtgccaaagaggattatggtttgcattgctcgcaagatgaacgacgatgacgatgcanaggaagagctctattcccttgatactgtcgtcgaaatcccc

SEQ ID NO: 261936 - DNA, 431 bp, Glycine max
  unsure (1)..(431): unsure at all n locations
gcgaaaactatattgaattaaaatcgctgntgagattcaaagcccctaaaatacatactgacattggttagcagaatacaaatgaattggcattcgttcgcataactagaacgttaaaagaaagacaagagggccagagattatataggatagtttttcacatatacaggccttcaagcaccccttctttcttattaaacatcactttatccttggccttcttaaagtcagcatgagtcaccttcattcgacgttctcgtagagcaagtaaaccagcttcatgacatattgcctatatatcagctacggagaattcgtctttagtcataacaaattcttccaagttgacatcatcagctaatgtcatccttgacgtgtgtatctggaagatgcgtctacttgtttcgatatcaggaagaggaaattctatc

SEQ ID NO: 261937 - DNA, 445 bp, Glycine max
cccacgcgtccgagctgcacaaattaatatccaacactctcaagctttccactttcaaactgtgcccgctcaatttgctttatctttccgaggtaatttcttttactttctttctgaactcaaataaatttctaatgaataccccatcctctcatatctctatgtatctgttttccctttctttgcattccatcttccaacgtcggtgcttgtctgaattaaacatatttctctgtatctgttttctgtctttttcttttttaatattcctgtttgtgttaattttcaatgtttcagagtcttgctttttcttcttcttttatcggatttttttaatagaaagattacatcatggatttttttaaaattataatctcattgatattgattgaacaatttttttgtttcataataatttggtttggatgtgatgtaacttgggttt

SEQ ID NO: 261938 - DNA, 398 bp, Glycine max
  unsure (1)..(398): unsure at all n locations
gagttaacgtagaaaagcttcgtctcttgtcttcgcttctttcaattccttctcctttctagctctctctcttcttatatttccacattccacgtgaaccttctagaactataatagaaagaaaccctccattccatggctccgccgctcgaacacaacggcgtttccacgagcggtgactctcagagatccattcccacgccatttctcaccaaaacctaccagctcgtcgacgatcacaccatcgacgatgtcatttcgtggaacgattctggatcgtccttcatcgtctggaacaccaccgctttcgccaaggatttgcttcctaaatatttcaaagcacaacaacttctccagcttcgttcgccaactcaacactnatggatttagaaaagttg

SEQ ID NO: 261939 - DNA, 427 bp, Glycine max
agaaacaccaagatacacaaaggattagtcacgtgtatttttaaaaatatccaaaagaacatggatggggatgtataatagaaaaagaatactaattggggctttccgctggtagaaaaaataaggcagtacttcccagaattccgatccagagtatacttccatgcaccgattaaataaataactatcagaaacgatataatcctttaatttttggaagaccccttctattttacttacacaaaaaagactacgataagaacgaagaaaaaagtgatcccccttttcttgttagtcttatatccatatttatggagatagaattcatgtcataatttaaaaaatgaacatgtataattctttttcggaatcgaaaatgatgagggagtttttgataatttgaaaagagtattttatggaagaatta

SEQ ID NO: 261940 - DNA, 375 bp, Glycine max
ggaaaattagcctcacaaaagcaaagatcaaacaaaccaaggacgagaacacgatgttgcttgaacttgcacttggtttattggttttggctctgtttctgcacttgcgtcccacacccactgcaaaatcaaaagcacttcgccatctcccaaacccaccaagcccaaagcctcgtcttcccttcataggacaccttcatctcttaaaagacaaacttctccactacgcactcatcgacctctccaaaaaacatggtcccttattctctctctactttggctccatgccaaccgttgttgccttcacaccagaattgttcaagctcttcctccaaacgcacgaggcaacttccttcaacacaaggttccaaacct

SEQ ID NO: 261941 - DNA, 354 bp, Glycine max
attgacctcactcatgcatggatcactcgtcgatgctcaaaacaccaaggacatgagcctgcgctagtgccataggtctctgatcctatttgtgccttggtgaccacagccactggaaagtcataagtactgtgccatttacacaacccacgaagcccaaagcctgagattaagttgataggacacgttcatccctgaaaagacaaacttttggactacgcactcattgaacggtcctaaaaacatgggcccttatcctctatgtactgtggcttcatgccaaccgttattgccttcacacgagaattgttcaagctcttcctacaaacgcacaacgcaacttgatttaacaca

SEQ ID NO: 261942 - DNA, 416 bp, Glycine max
ggcttcagcaagaaaagagggttttcagccgcagttaaagtttttgaggagctgatttccgagggcaatgaaccgggtcaagtcacctatgcttcagttataaatgcatattggcgtcttgggcaatatagcaaagcagaagaggtgtttttagagatggagcaaaaggggtttgataaatgtgtttatgcttattcaaccatgattgtgatgtatggaagaacggggagggtgagaagcgcgatgaagttggtggccaagatgaaagaaagagggtgcaaaccaaatgtgtggatctacaactacttgatagacatgcatgggaaggacaagaatttgaagcaacttgagaagcttgtggaagaaatgaagagacgaagggtagcaccggataaggtgagttacactagcattat

SEQ ID NO: 261943 - DNA, 428 bp, Glycine max
cccacgcgtccgatcatttagagaagcatttgaaggaaaattgtaagcacaaacacatggggcttttattgaacaagtgtgatctagttcctgcttgggcaacaaaaggatggcttagagttttgtcaaaagaatttccaactctagcattccatgcaaacattaacaagtccttcggaaaaggttcacttctatcagttctgagacaatttgctcgattgaaacgtgataagcaagcaatatctgttggatttgttggatacccaaatgttgggaagtcatccgtaatcaacacattgcgtacaaagaatgtctgcaaggttgctccaattcctggggaaacaaaagtatggcagtatataaccctaacaaagaggatctttctgattgattgtccaggtgttgtctaccacatcattgattctgaa

SEQ ID NO: 261944 - DNA, 338 bp, Glycine max
aaattttaaaattgattattcatcatcacattataacactatatcaagttctagaaacatcaacagacatatatatctttataaactatttaaaatctatacaactctttcattacataatattataataatcttctgcaacattattaatcccatcatttttttcatcatataatccctaatttggagtactctcacaggaatattctcttcatacatacctctatcctcataatttactcttttactcaaaatttaacatcaatacttcttattcaactttcatcaacatcattcattattttcaccttcttaaaacaaatttttgtaaccctaat

SEQ ID NO: 261945 - DNA, 276 bp, Glycine max
attttaagattggttatgcatcatcacattatacgactatatgaagttctggaaaccccatccgacatatatgttgttatagagtatgtgaaatctggatagctcttttattacataatagaaaatggtctgctgcaataagattaaacccgtcatttttttcagcagataatttctggtgtggagtactgtcacaggaatatggtggttcattgagacctgaagcctgaaaatttactcttggactcaaaatttaacatcaatattgcttatttt

SEQ ID NO: 261946 - DNA, 428 bp, Glycine max
gcgaattcaagcagaaaatatggaattctacatgtccagagcatgtgttggaaaatctgaatgggggcacggaagattgtaacacagaacaggagcaagaagctattggttttaaggtgaagaatgcaatgctgtatccgcgtgaagtggagaaaggactatggccagaagattattctctttctgatcatgctagactcacagctgtgttttcaccagcaaggatgagatgttctgcctcacaaaactgaatgtacttcatggcactaatagtcttatcccacagaaaaatattcaattttgggaccagtttggtgtaagggtaaaactgaagtgatcccttttttcactttcatttttagtcccctaccaaacatgtcttgccataattagtgattaatctgtcttgtatatgtgtttggagtcaa

SEQ ID NO: 261947 - DNA, 428 bp, Glycine max
acgcaaaatgtgagcggcatcaattttcttatcaaagagggtccaaaagtcaatgcaaagttcgagctgaggccgccaccatatccactgaatggtttggagccggtgatgagccagcagacacttgagtttcactgggggaagcaccacaagacttatgtggaaaatctgaaaaaacaagttgttgggacagagcttgatgggaagtcactagaagagattattgtcacatcatacaataagggtgacattcttccagctttcaacaatgcagcacaggtatggaaccatgacttcttctgggagtgcatgaaaccaggtggaggtggaaaagccatccgggagcttctagaactgattgaaagagactttggttcaattgtaaaattcttgatgaggtcaaggctgctgctgcaacacaatttggt

SEQ ID NO: 261948 - DNA, 433 bp, Glycine max
cccacgcgtccgtttctttatgtgctatagaggccacgaggaaattatcatgaatgggcttgtttctgctgcttctgagattgctgctgggttggccgtaaggcttgcttctatcggacctggcgttggtcaaagcactgctgcacggcaagctgtcgaagggattgcacgacaaccggacgcagagggaaaaatacgaggtactttattgcttagtttggcttttatggaagctttaacaatttatggactggttgtagcattagcacttttatttgctaatccttttgtttaatcctaagaaaatagaaatacatatgcttttttccgaggacttgctttaccggacttgctttttccaatgctatttatcataatattccactcctataattctttattccgtcggacaagaacacaggggaaggactaa

SEQ ID NO: 261949 - DNA, 332 bp, Glycine max
  unsure (1)..(332): unsure at all n locations
agncaagcgtggcgcgcacccgttctgacgcacgtctctctctctctctcgccatggctatggctatgcaaagcgtgatcagaagtctccaagatcctcatcatagcaggagcaggttacaccggcaccgtcctcatcaaaaacggaaaactctcggatttaatcggcgagcttaagttgctggagaagggattggaaaaatctggggagcatgctgaaggcaaaggtgaatatgctgatgccatagctgctcaggtgcatcgcctggcgaatagaattcggcagctagcatcaaacaggccaatcacagtactgaatgggggttctgaaca

SEQ ID NO: 261950 - DNA, 444 bp, Glycine max
cccacgcgtccggaaaggggttcctctaagaattgaaattgggccaaaggatttagcaaatgagcaggttcgcgctgttcgacgtgataatggtgcacagatagacattgctagtgctgatttggttgcggaaataaaaaagttgctcgatactattcaacagaacctgtttgatgttgcaaaacatatacgagatgaatgcattcagatcatacacacttgggatgaatttgtgcaaagctttgaaccaaagaaaaatgatcttagctccttggtgtgacgaggaggaggttgaagcttatgtcaaagcgaggacaaagggtgagattggagcagctaagactctgttgcagccctttgatcaatcagaactcccagaatgcaccaaatgctttgcatcaggaaagcctgcaacaaagtggacatactggggaagaagttact

SEQ ID NO: 261951 - DNA, 328 bp, Glycine max
gaggcacgcgtcacgccacgcgtccggaaaggggttcctctaagtattgaaattgggccataggatttagcatatgggcaaggtcgcgctgtacgacgagataatggtgcacagattgacattgctagtgctgatttggttgcggaaataaaaaagttgctcgatactattcaacagaacctgtttgatgtttcaaaacatatacgagatgaacgcattcagatcatacacacttgggatgaatttgtgcaagctttgaaccacagtaaaatgatcttagctccttggtgtgacgaatacgaagttgaagcttatgtcaaagcgatga

SEQ ID NO: 261952 - DNA, 137 bp, Glycine max
aatctctacatcatatcactcaatatgatcaacctaaaacttaaccccttgccttcacctttcgttgatgacaaatttatttccaccctcaataaagtaaaacctcatctccttaaaaagatgctctcccccatcat

SEQ ID NO: 261953 - DNA, 375 bp, Glycine max
tcgatcattgcatttgcttgggagccaaagggccacaggtttgcagttattcatggtgataaccgtaagcctgatgttagcatttactccatgcgtactggtcagaacagccgagtttcaaaactcactactctgaagggcaagcaagcaaatgctctgttttggtcacctgctggtcgctacattgtactggctgggttgaaaggcttcaatggacagttggaattttacaacgttgatgaacttgaaaccatggctactgctgaacattttatggcaacagatattgaatgggatccaactggaagaaaattaaaatgttgcaactgcagtgacttcagttcatgaaatggagaatggtttcaatatatgggc

SEQ ID NO: 261954 - DNA, 399 bp, Glycine max
tcggtttttgactcagggaaaacttaaaaatgctcaactgagacaaacacaagagataactttgaacataagtgacagccagagggctacacctataagtacagaaaacttactatcgagagttaataataattccgggtctaatgatagaactgtggaggatgagaatggtttttgcgaaaataaaccaaactctggtgcaaagctgcatcaactactggacacaagtcctagagctgatgctgtggcagctggttgatacagaaaaccagtaattgtactggctgatcagaggtagttttggcatatttttaaacccaagcccaaaattactactaacaatttcctgagggatggatcaactgaattttagtatctaaatccatcaaaatcagaact

SEQ ID NO: 261955 - DNA, 251 bp, Glycine max
  unsure (1)..(251): unsure at all n locations
ataaatcatatgataaannagggtaaacatgattacagattaatacacttgtaatttcgtaatggtgtttaaatccagggtatacccacgcgtccgatcgcgagcggcaccatttttttttttttttttttttttttttttttttttttttttttggttttatttttattttttttttttttttttttttattataatttttatttttttttttttttttatataatatttatttatttaatttagaaatt

SEQ ID NO: 261956 - DNA, 386 bp, Glycine max
gtgtggaaacattctgctatggattgcgctgcaatcacaacacaccaatatgtatctgcggagcagattgtgaatggcatgcatcaggcaaaggcagaacgagctgatatagaggagcttacgcttgactgcatcaccaatttccactctcaccatgacctcaaaatcattctccaaaataagccactacccgtgcttattgttaaccgaccaaaatgggaaggtggtttgtacgagggctatgagaacaagcgggtggaagcattacagcttgctgaggaattgagtgctgatttcatttaaaaggtacgttgagctgaaggcagcttcttgtcttacaaccttggtggaacatatgagaaatcataatagtcaatgcaaaatca

SEQ ID NO: 261957 - DNA, 453 bp, Glycine max
cttcttgagggtaccctattgaagccaaacatggtcacccctggatcccaatctgctaaggtttcggctcaagtggttgccgagcacactgtcagagcccttcagagaaccgtgcctgctgcagttcctgctgtcgttttcttgtctggtggccagagtgaggaggaggcatccgtcaacctcaacgccattaaccaggtcaatgggaagaagccatggtcactctctttctcctttggaagggcacttcaacagagcacccttaaggcatggggcggaaaagaagagaatgtgaagaatgctcaagaagcccttttggtaagagccaaggctaactcagaggcaactctgggaacctacaaaggtaactcacagcttgctgatggtgcctcaaagagccttcatgtttcgaactacagctactgatcaatcgaagttggtgttgtttgaaaa

SEQ ID NO: 261958 - DNA, 286 bp, Glycine max
ttcccattcgaccgacgcgtacgcttgttgagggtaccctattgaatccaaacatggtcacccctggatcccaatctgctaaggtttccgctcatgtgcttgccgagcacactgtcagagcccttcatagaaccgtgcctgctgcagttcctgctgtcgttttcttgtctggtctccagagtgaagatgatgcatccttcatacctaacgccattaaccaggtcaatttgaagaatccatggtcactctctttctcctttggaaaggcactttaacagagcaccct

SEQ ID NO: 261959 - DNA, 364 bp, Glycine max
cccacgcgtccgcaattatctagggtttatacaattttcgatggcttcttcagatgttgagtaccggtgctttgtcggtgggctcgcttgggccactgacgaccaagctctcgagagagccttctctcagtacggcgaaatcgttgaaacgaagattatcaacgatcgtgagactggaagatccaggggttttggatttgtgaccttcgcctcggagcagtccatgaaagacgccatcgaagggatgaacggccaaaaccttgacggccgtaacatcactgttaacgaagctcactcccgtggtggctgctgcagctgaagcagtggaagcagtggatatggtggcggtctcaacggtcgatat

SEQ ID NO: 261960 - DNA, 447 bp, Glycine max
gcgcccacgcgtccgcccacgcgtccgttgttccttctccttgtgatcttcttcaaccttcagagtgagaaggcacattcagaaaccacgtttctctcttcttcttcttcttcttctttttcttctctcgaggtcattattaagtattcaccatggaggcaccatctcccaccaaacccaacgacccaacaaaaccttccaacacttccaccacccttagtctggaggccggcccggcccaagcgagcccactccgaaaaatgtttgccgtggcgtccatcgccgactgcatacagttcgggtgggctctttttcctccagctctctcttctaaccccctacgttcagcttttaggagtcccccacgcggcggcctccttcatctggctctgcgggcccatcttcgggctcgtggtacagcccattgtgggctactacagcgaccac

SEQ ID NO: 261961 - DNA, 306 bp, Glycine max
tcggagagagagagaaagagacgaggagagagaaacaaagaagagtgctcccacattacatggggtgcttgcgcttggtgcaccaccaccatcaccaaccggcggcggcgactatacacccgtcgcaaccgccgcagtgtcagccgcaacccgaagttcctcgccggagcatcgatatggagaccgataacgatatgtcagctactgtcattgaggggaatgatgcacgtactggccacataatcgtgaccacaattggaggcgaaaatggggaacctaaacagaccatgagttacatggcagaac

SEQ ID NO: 261962 - DNA, 317 bp, Glycine max
caagaagaggttagctactactggagcaaactttgcaagagcatacaccgcggaattcgggagttgcaagttccctgagaacttcactggttgccaagatcttgccaaacaaaagaaagtgccattccttagtgacgatttggagcttgaatgcgaaggaaaggacaaatacaagtgcggttctaatgttttctggaaatggtgaaaggaggcaaccttttatgcccaactgcgaattattcgctttgcgatgtacctaactgcttgaatatataccatatttttctgcattgctttcagttaaaaaataaagattt

SEQ ID NO: 261963 - DNA, 260 bp, Glycine max
aacgcaaactcttcaagagcatacaccgtgaaattccgaggccgcaaggtcaattataactccactggttgccaagatcttgccaaacaaaacaaagtgccattccttagtgacgatttggagcttgaatgctaatgaatggtcatatacatgtgccgttctaatgtaatctggaaatggtgaaaggaggcaaccttttatgcccaactgcgaattattcgctttgcgatgtacctaactgcttgaatatataccatatt

SEQ ID NO: 261964 - DNA, 438 bp, Glycine max
gtgcaatctaagaaagagctaacaaacaaaacatgggttctttgggcacaatcaacaacgggcctcatgctgtgtgcataccgtacccggcacaaggccacattaacccgatgctaaaactagcaaaactccttcacttcaaaggctttcacataacctttgttaacactgagtataaccacaaacgtcttctcaaagcaagaggccctgattcccttaatggtctctcttcttttcgctttgaaaccattcctgatggtctacctgagactgatctggatgccacacaggatattccttttaacaaccatgtgttaggccactataagaacttggttccctcaatttaagaaccttcttactaaaatcaataactctgatgcccctacagtgaattgcataatctcggatggtgtcatgagcttcactcttgatgct

SEQ ID NO: 261965 - DNA, 448 bp, Glycine max
gcgtgactgatgaagaatttgcaagagaaacgattgctggtttaaatccaaatgtcattaagatgatagaggagttcccactaagtagcaagctagatactcaagcctatggtgatcatacctgtataatagcaaaagaacatttggagcctaacttaggtgggctcactgatgagcaggctatccaaaacaagaagttgttcatcttagatcaccatgactatctcattccttatttgaggaaaataaatgcaaataccacaaagacttatgctacaagaaccatatttttcttgaaagatgatggaaccctttttgttgacaccattggccattgagttaagtaagccacattctcagggtgaagaatatggtcctggtagcgaagtctacgtgcctgccaacgaaagagtggaagcttatatttggttactggcaaaagcttatg

SEQ ID NO: 261966 - DNA, 363 bp, Glycine max
acgcttatgctcttgttactgcttacaagaagtgcaaattcaatatggcccatatagacgtcttggcaccgctgaccacacaaaggtcttactacaacgacacagaaccgcatgctaaacactaatactaccagagaacttataacggaagccttctgattactgaaaccactgacgcctgtcacacggctctatgatatactcgaacccctggcatattgactaagaaccatgttgaagcttgagaacacatagtcgaacccgtatatgccaaatgcagatgtttcttctgccaaatttggcaccaagcatatgggtaaacttacatattcattgtatcacactaatggacaagcacacata

SEQ ID NO: 261967 - DNA, 437 bp, Glycine max
  unsure (1)..(437): unsure at all n locations
atggttgtggactaacagattggtcccttgcttccacctatggaaagctagccatctttacaataggagcatgggccggttcatcaaacggtggagttctcgctggcctagcagcctgtggggtgatgatgaacattgtttccacggcctcagacctgatgcaagattttaagactggctaccttacattggcttcgccacgctccatgtttgtgagccaaataattggcacaacaatgggttgcataatttctccttgtgtattttggattttctacaaagcgtttcctgaccttggggttaaaggtaagtacaagtgaatatcctgccccatatgcaattatataccgtaacatggctatattgggggtacaaggttttggccatctaccaaaaaactgcctnttgcttggttacatattctttgctgctgccgt

SEQ ID NO: 261968 - DNA, 366 bp, Glycine max
ggaacgtggaactgcggcaaccggaatatctcacttctcagatcatatcaatccgacggggttgcagttataatggctccattcagcggcgatgagacggcaccgattttcggcttccttggagccgcagctgccctcgtcttctcctgtatgggagctgtctatggcacagccaagagtggcatgggcgtatcttcgatgggtgtgacgagaccggagctggtgatgaagtctattgtccctgtcgttatggctggagttctcggtatacatgggcttattatggctggaattatcaattgtttttttctggcctttagtcccagggccaaatcttattacctctctgatggatatgcacatatc

SEQ ID NO: 261969 - DNA, 393 bp, Glycine max
  unsure (1)..(393): unsure at all n locations
ctctttccgcattttcccaattaggatgtgtcattgagacagaagaagaagaagaaattggagggggtgtgtgatcgggtcctcaggtgaagatctgaggctgttggtgtctcttttcttttctccgagttccaaagatgagcgcttctaggttcatcaagtgcgtcactgttggggatggtgctgtgggcaaaacctgtttgcttatttgctacaccagcaacacttttgctaccgattatgtgccgactgtttttgacaatttcagcgcaaatgtngttgtcaatgggagcattggggaaaaaatttctgggtttgtgggatactgcttgacaagaggattattacagattaagacctttgagttatccgggtgccgatgttttcatactg

SEQ ID NO: 261970 - DNA, 185 bp, Glycine max
gttgaattgtgagagaaggccaaccataattgatctccctcccaccaagttcaatgattgcgaccttgggaagattcccttttgtggccggaatggtactattttgcctccgtccatggatcctagcatgtctgcttcgagattccaaatgcaggtcttcaagatgccgtcggcgcttaaccgat

SEQ ID NO: 261971 - DNA, 351 bp, Glycine max
acgggctcacagtttcagcaggaactataaattgggatggtcctttaaggattgaagcttcttgaactggcgccaacactatgatatcgaagattgtacgcatggttgaggatgctcaatcacgtgaagcacctgtacaaaggcttgcagattcaatagcagggccatttgtatacagtgtaatgactttgtcagcagcaacatttgcattttggtattttgtaggatcacacatatttcctgatgttatgctcaacgatattgctggcccagaaggagatcctttggtgttgagtataaaactatccgttaaaaagaaatgtgtttggttgtgtcttgttcatgtgcact

SEQ ID NO: 261972 - DNA, 375 bp, Glycine max
acgatttgtttggatatactacaaaatcagtggagtcctatatatgatgtggctgctatactcacatctatgcagtcattgctttgtgatcccaacccaaattctcctgcgaactctgaagcagctcgaatgtttagcgagaacaagcgtgaatacaatcgaagagtgagggaaatcgtggagcacagttggacagccgactaagttcatccttatatgcaggaagctttgacggcatgaattaggttgcagtggtggcacctatatataagaatgattgtgcaaactcatcaagtatatattctcttctttgggggaaattgaatgatagcatcatcttatctttaatttattgtagctactgcattgcatatg

SEQ ID NO: 261973 - DNA, 376 bp, Glycine max
  unsure (1)..(376): unsure at all n locations
ttcaggcatcggatacggtctaaaatatcaggctagatgcatatccgatgtgaaggcagggacagatcacactagcttcctcgctggcactctcagcctcaaagaagaaaatgaggtacatctgattcggctttcgtcgagtggaaccgaactcttctgcgagggattgttctctcatcccaacgagatctgggaccttgtttcttgcccctttgatcaacggatcttttcaaccgtctactctaacggtgaaacgtatggggcagcaatatggcaaatccccgagctatatggcgaggttttttaaaaattcacctcagctagagagaattacctncctcgacactgattctggcaagattaaatgtattctatg

SEQ ID NO: 261974 - DNA, 353 bp, Glycine max
tcgcccacgcgtccgcaatttaccagctatacttgttccttttgaaggttagaagtgctacaggacaaacaatggcagctactcaggaagatgtgaagcttttgggtattgtgggaagcccatttgtgtgcagggtccagattgcccttaagttgaagggaggtgaatacaaatttttggaagaaaatttgggcaacaagagtgatttgcttctcaaatacaaccctgttcacaagaaggttccagtgtttgttcacaatgagaagcccatagcagagttctttgtgattgttgaatacatttgggaaattttagacatggaagaacaaccccatcttaccttctgatcctta

SEQ ID NO: 261975 - DNA, 249 bp, Glycine max
cccacgcgtccgcatttcaccagccatgctagctagttaagaaacttacatgggctacgcgtcaaacacttgctgaaacgcgctaagatgtgatcctttcgcgcactacggtaagcctacttgagctcaacgagcaaactgcacgcctcatgagagaagttgaatacagaagtggggaacaacaaagggacagcatgagcgaaatgctactcaaattcaacgctgtgcacaagatgggcacagcgtata

SEQ ID NO: 261976 - DNA, 397 bp, Glycine max
  unsure (1)..(397): unsure at all n locations
ctctctctgtctcctacgattcgttttgccccttttgttgccctaatttcaaccatgccgggccgtagctccggtggaagatctgcccgtcctgctcctcgggcagctcctcgtcctgctccagttcaccatgctcctcctccagcccctgctcagagtggtggtggatctatgcttggtggcattggttcaaccatagctcaaggtatggcttttggcaccggaagtgcagtggcacacagggctgtggatgcagtcatgggtcctcgtaccattcaacatgaaacagttgttacagaggctgctgctgcttgccctgcacccactgcaaatacttttggtggcgatgcatgcagcattcatacanaggcattccangatttgatgctcatggaca

SEQ ID NO: 261977 - DNA, 430 bp, Glycine max
cccacgcgtccgcgaactccgaagcccttcagcaaccatgtcgaggagaaaggttagggagccaaaggaggaaaatgtcactcttggtccagccgttagagacggtgaacatgttttcggcgtggctcgcatctttgcctccttcaacgacaccttcatccatgtcactgatttgtctgggagggaaacccttgttcgcatcactggtgggatgaaagttaaagctgacagagatgaatcatctccatatgctgctatgcttgcagcacaggatgttgctgccagatgtaaggaactgggcataactgctcttcatatcaggctccgtgccactggtggaaacaagaccaaaacacctggtcctggtgctcaatcaactcttcgagcccttgcacgttcaggaatgaaaaatggtcctatagaggatgtt

SEQ ID NO: 261978 - DNA, 401 bp, Glycine max
ctttcttcttctcgttcttactttgacggtttctagagagagaaagtttgttatagagagagaaagcgcgctgctgcttcttctgctgctgcttcgacagtgagaagagagagagaagcgctcttctccgtaccgtttctagagagagaaactgatggccggagttaatccgaacggcgtcgccgattttccggcgacttcaacgcacggcggacagttcattcattacaacatattctgaaacctcttcgaggttacggctaaataccgtcctgcgatcatgcctgtcggacgcgtcgcctatggaatcgtttgctcgctgctgaataccgatactaatgacctggtcgcggctaataagatagcgaacgctttcgacaatcacatggacgctaaaccta

SEQ ID NO: 261979 - DNA, 374 bp, Glycine max
  unsure (1)..(374): unsure at all n locations
gcgcgccggctcctccgcttctttccaccgctcttctcctcctctcccacgcttccgcttctcgccgcttctggccgctaacaccctcaccgctaataacatctcgccaagaagtggactatacactgttggtgactttatgacaaagaaagaggatttacatgtggtgaaaccgacaacatctgtggatgaagctttagaaattcttgttgaaaacaggataactggttttcccgtgattgatgataactggaaactggttggtgtcgtttcagattatgatttgagagcactggactctatatcagggtttncccaacgggttaaaggataacatgtttccagaagttgacagtacttggaaaactttcaat

SEQ ID NO: 261980 - DNA, 351 bp, Glycine max
tcgcagatttgtaaacctcatgggaggccacatatggattgagagtgagggtcctgacaaagggagcacagggtcatatataatcaaacttgagatttgcggcaatccagatccatccgatcatcaagctgcaaacagaagccaagcatacagtggaagtggtggcctcgatagatttaaacccttcatcaaagatgaagacgacactggtttttctactatacgcaatcaaagaagtttctaatatccaagacaccaacattgcatacctttcgatcacagtcgacaagatggagtacacatactttcaattcttaatatgcatgtgctaaaaagtataatttacaagtt

SEQ ID NO: 261981 - DNA, 286 bp, Glycine max
acgcagacgcgtggacccaaccacacgcttcatatgacatgagctcattgggtgggatacaagaggcgcacggcctttatttacttatctaggaaggtgcagcagtccatgcacagtccgagctgaagccgccaacatattcactgcatgcattggagccggtgatgtgcctagagacactcgcgtcatactggaggaagacccccctgacttatgtactatatccgaacaaacaagttgttggtacagatcacgacggcaaggcactacaagagatcattgtcac

SEQ ID NO: 261982 - DNA, 386 bp, Glycine max
cccacgcgtccgtctatctctctgacacacactcatcattttctagcaaactctctagccgcttcaaatgggctaggaaggttgaataaaaagaaaacaaaccctagcttaattaattaacttgcttgtgttgttaattaatttgttcaacatggaaggatgagtgcctgaagctgatatctctgcctttagagaatgtttgtctctatcatggaaaaatccttatgttcttcgccttgctttctccgctggaattggaggctatctctttggctatgacacatgagtcatatctggatgcccaaacaattttgtacatcatagatgatttcaaagaagcagatagaaagacgtggctgcaagaagctttaatgagtatggcactt

SEQ ID NO: 261983 - DNA, 410 bp, Glycine max
cggacgcgtgggaaaaaaaaaaaagaataatatatagaaaaaggagcatgttgattatatagaaagtaaagggcaacaatcatttttgtttaccatgggtaaggacaccatcgctgacataataacctatataagaaatgctgacatgaataaaaaaggaatggttcaaataccatttactaacataacagaaaacattgtaaaaatacttttacgcgagggttttgttgaaaacgtcagaaaacatagagaaaacgacaaatattttttagttttaactctacggtatagaagaaatagaacaaaaataaaggatcatattaaaagtttttaaatttaaaacggatcagtacacccggtctacgaatatattctaattatcaacgaatccctcgaattttaaggggcat

SEQ ID NO: 261984 - DNA, 380 bp, Glycine max
tagagctaaatgacttgaagatacgatacaggctcgatggaccacttatactccatggaggcacatgcacattcaaagcaggacacaagattggaattgttggaaggacaggcagtggaaagtccactcttatcagtgctttatttcgtctagtggagccggcaggtggaaaaattgtagtcgatggcgtagacatatcttctatcggccttcatgatttgaggtcacgttttggtgttatacctcaggatcctaccctttttaatgggactgttaggtataatttggaccctttagctcaacactctgatcacgagatatgggaagttcttgggaagtgtcagttgcgagaaaccgtccaagagaaacaagaaggcctg

SEQ ID NO: 261985 - DNA, 416 bp, Glycine max
gcaatgaccaagccaacttacactgcaattgttcaacatgccaagaatggaaaacctgctggcatgtttgtacctacaaggaagcatgtccgacttacagctgtggatatgattacatactcaggtgcagacagtggggagaagccatttttattgcggtcagccgaagagcttgaaccttttcttgacaagattactgacgaaatgttgaaagttactttacgggaaggagttggatacttgcatgagggattgaacagtcttgatcatgacattgtgactcagctatttgaagctggctggatacaagtctgtgttttaaacagttccatgtgttggggagtgactttattggctcatttggtagttgtgatgggcacacaatactatgatgggcgggagaatgcacagacaga

SEQ ID NO: 261986 - DNA, 384 bp, Glycine max
cttggactattcgacagcgaagtagaagctgcaagggcttatgacaaggcagctatcaaatgcaacggaagggaagcagtgaccaactttgagccaagtacttatgaaggagagctgaaatctgcagccattaatgaaggaggcagtcagaatcttgatctcaatttgggcatagcaaccccaggacctcccaaagaaaattgggggcaacttcagttcccctccttcccttacaatacacatggtggaagaagttcaatgatggaaaccaatgttagttctggaattggtaatccatctttgaaaagggggggaaaatggttgcaactgaagatcgtccttcattatggaatggcatgtctcctaatttctttcccaatgggg

SEQ ID NO: 261987 - DNA, 274 bp, Glycine max
ggatgccattaccaatggtcatggccgtaccgtttctggttggagcatactttgcaatcgatatgttcataggtactgtggttgtgtttgcttggcagaagcttgactccaagaaggcagagttgatggttccagcagctgcctctggactaatttgtggggaaggactatggactctaccagctgcgattctagctcttgcaagaattaaacctcctatctgcatgaaattcgttcctacctagagcttcacccacaatagaacaaacaattc

SEQ ID NO: 261988 - DNA, 434 bp, Glycine max
tctctctctcgcacgcgaaacccttgttctgttccatgctaacatatctgcagagaaaagcagacaccagaaaaggttcgttcagagacaaaaccccaacgatccaaacggtcattgagcatatcatggcgcgagtcactgagttgaatcggataggaatctgagttagtgatcggttgacgcggtcatggctgctgcgggctccaagctcgagaaggctctcggagaccaattccccgaaggagaacgttactttggcctcgagaatgtctgcaacacttgatactgcaacagcgtctttttcggacatgcactatacttctgagttccgatacgcgaacaattactagagtattatggagataacaaaagcatattggacggggaagaaaatctgttaacttgcttagccgacttattttcacagataagtt

SEQ ID NO: 261989 - DNA, 383 bp, Glycine max
  unsure (1)..(383): unsure at all n locations
ctctctctccctctttctcgtcactagctctgtgcattcttctctcgctctctgccttcggtcacactcggcatttcctttcccaagatagtagaagatggcagacactgaggatattcaacctcttgtttgtgacaatggaacaggaatggttaaggctggatttgctggagatgatgccccacgtgctgtgtttcccagcattgtaggtcgtcctcgtcacactggtgtgatggttggcatgggccaaaaagatgcatatgttggtgatgaggcacaatctaagaggggtattttgactctcaagtaccccattgaacatggaatngtgagcaattgggatgatatggaaaagatttggcatcataccttctataatgagc

SEQ ID NO: 261990 - DNA, 386 bp, Glycine max
ctagacatcccttctacacaacataggtcatcgaacggatctcgaagacccaccatcgcgcgaaagccggtatctttcagaaaatggattcctattcgaagggtgcataaccgcatggataagctcacactaacccgtcaatttgggatccaattcggttccttacgaggtatcgggaccgaatcttggaatgtaataatatctattcatacagatacagacgaaagggttctctattgattcaaacgctctacctacgagatagggatagagaaagaggacaaaaccgaggatttcacatattacttttggtcgaaaaatcgatctgatttttatcgcactttccgctcaatgatgaaatgggccagattctacaggaccaaacc

SEQ ID NO: 261991 - DNA, 386 bp, Glycine max
acgcacacaagcactacaacattttctttggtctctcattctctctatagctagatgggttctggggctttagaactacttctgatcttgggtcttctggctagctcatgcttagcacaagccccaggtgctgcacccacacaaccacccactacaaccccatcaccaccaccaccaagatcagcacctgcaccagcacccaccccgccagcaacaccaccaccagcaacaccaccaccagcagcagcaactcctacaccagcaacatcaccaccagcaacaacaccaacgccaacaccaacagctgcacctttaaaacccaacctgcttcttctcctgcaacctcaccagtcccttccgctagttctccaccagcaccaggcaca

SEQ ID NO: 261992 - DNA, 382 bp, Glycine max
gggacacgcaaagggcgtcacagttgtcaccgacaacaccttcgctcccatggtcatctgggccgctcgtggcggctctgacgtcgtcgttcacagcatctccaagtctatcagtgggggtgctgatattattgcaggggctgtgtgcgggcctgcgagcctagtgaatgcgatgatggaccttcacgacgggtccctgatgctgctgggtccaacaatgaatgcgaaggtggcgtatgaactgtcagaaagaatccgacacttgagccttaggatgaacgagcattgtcaccgtgcgttggtgttcggttcatccttcatggctcaagaaattaaggttgcaagtgatctacccaggccttgaataccacccacagcacga

SEQ ID NO: 261993 - DNA, 391 bp, Glycine max
  unsure (1)..(391): unsure at all n locations
gcgaaaacatggctctaacacttcgttcttcaacttcttttattaatcagaaggaaaccaaagtcctcaaaggctttgacaatgcccctgcaatagttagtttttcaaaattcaagccatcatcatcattgttccggctccgggcaaaaaattccatgcaagaagctcatcacactcgtgagaaatgggagaaggtgctggctccgtcggtcgcacatagccacaatgattcaaagagagtacctgtgtatgtgatgttgccattagacacagtaacaatgggaggaagcttgaacaagcccagagcgtaaattttgggaatgcgagtttgatggcccttgagagtgcangggttgaaagtgtaatggtggatgcctggtggngtttggtg

SEQ ID NO: 261994 - DNA, 331 bp, Glycine max
tgcccttctcgttagcttgatatgataatctaaatgtttcaacactttgtttaacctgagggttttgaatttgggttctctttgttgcacattaaatcttagctgtttcataatagtgcaagggctttggaagagaaaagagctcgtttgggtttagtggaatgtgtgaatcatgagctcctgcaaccttatcctgttctgcatgaaaagcctggtgattatgttgcacatatcaaattcactgtcttgctaatgcccaatggatcagatcgtgttacgtcttactcactccaagagtttttgggtctcacccaacaaaacaattgatgat

SEQ ID NO: 261995 - DNA, 418 bp, Glycine max
cccacgcgtccggtgttttttgttcttggtcgagccttgtactgattaacgagaatggagaacgaggtggagcttggttcccttgaaggtgaaatggccacccagcacatttcacaaccacagaagcgcaagggtggtcttgttaccatgcctttcatcattgcaaatgaggcacttgcgagggtggcaagtttgggccttttgcccaacatgatactgtatttgatggggacctacaggcttcaccttgcccaagcaacccagatacttctctggtcccatgctaccagcaatttcacacctgtggtgggtgctttcattgctgattcttatctgggtcgattcctcgctgttgggttgggttcggccatcacttttctgggaatgacactgctgtggttaacagctattatcccac

SEQ ID NO: 261996 - DNA, 365 bp, Glycine max
tcgcacaaaaagacaacacagagagaagcgtcttaataaacgctcttctctgaaaaacctgattggttctctgcatcacttctctatcgtttcgatcttcgatctctgaaaatgagagagtgcatttcaatccacatcggtcaggccggtattcaggtcggaaacgcctgctaggagctctactgtctcgaacacggcattcagcctgatgggcagatgccaagtgataagactgttgatggaggtgatgatgcttataacaccttgttcagtgaaactggagctgtgaagctcttgcctcgtgcgattttttttttatgacatctcgagcctactgagattgatgaagttaggactgagacata

SEQ ID NO: 261997 - DNA, 242 bp, Glycine max
accggtccgtagtctccacgcttgcggccttttggctaagatcaagtgtagtatctgttcttatcagtttaatatctgatatgtgggccattggcccacacgatattaaatttattttttgaaggggagatcccaatgcagtagcttgctactggggttctcaagcgtcgtccttgttttgcactatagcattgtcctggcgcaccctataacataagtgtaaatatctttaatggtttagt

SEQ ID NO: 261998 - DNA, 444 bp, Glycine max
acgcacacacatactaagaagcaacaattcttctacaatggatctcctccttctggaaaagacggtcatagggctcttcctcgctgcggtggtcgccatcgccgtcttcaccctccgcggccggaaattcaagctcccaccgggcccactccccgtcccaatcttcggcagctggctccaagtcgtcgacgacctcaaccaccgcaacctcaccgatttggccaaaaaattcggtgacatcttcctcctccgcatggggcatcgcaacctcgtcgtggtttctacccctgagctcgtcaaagaggttcatcccctaatctacgcatggcgtggagttcggctcccgcacccgcaacgtcgtcttcgacatcttcaccggaaagggccaagacatggtcttcaccgtctacggcgagcactggcgcaaaatgcgccccatcatga

SEQ ID NO: 261999 - DNA, 352 bp, Glycine max
cccacgcgtccgcaatttaccagctatacttgttccttttgaaggttagaagtgctacaagacaaacaatggcagctactcaggaagatgtgaagcttttgggtattgtgggaagcccatttgtgtgcagggtccagattgcccttaagttgaagggagttgaatacaaatttttggaagaaaatttgggcaacaagagtgatttgcttctcaaatacaaccctgttcacaagaaggttccagtgtttgttcacaatgagaagcccatagcagagtctattgtgattgttgaatacattgggaaaatttgagacatggaagaacaaccccatcttaccttctgatccttacc

SEQ ID NO: 262000 - DNA, 293 bp, Glycine max
gcaaaaccctaattcctaccgcaaggtaaaaaaaaaaacagaaaaccagtggtgcgcgaggccaccgaagttcgatcccttgcaggtggtggacgtgttcgtccgagtcatcggcggcaaagtcggagcggcgagttccctcgctccaaagatcggtccattgggtctctccccaaagaagatcggagaagacattgcgaaggaaaccgcgaaggactggaaaggcctacgcgtgacggtgaagctgacagttcagaaccggcaagcgaaagtgacggtagtgacctacggcg

SEQ ID NO: 262001 - DNA, 297 bp, Glycine max
gtggagcaggaggcgaacgccaacacggcgccgttcgtggcgcgcgtgtcggagttgtgcgcttattacggcgcgctgtttgactcgctcgagtcgacgatggcgcgagagaactcggcgcgagttaggatcgatgagggactgactcggaaggtggggaactctgtggcgtgcgaaggaaggaaccgcgtggaacggtgcgaggtgtttgggaagtggcgagcgcgtatgagcatggctaggttcaagttgaagccgctgagtcagcgagtcgctgagtcgagcaaagcgcgactc

SEQ ID NO: 262002 - DNA, 396 bp, Glycine max
cggacgcgtgggcattctctagcttccaaaccctaacactcctcttcctcttccatcatgggctctggacaatgccggcgaagttcgacccctcccagatagtcgacgtcttcgtccgcgttaccggcggctaaatcggcgcggccagttccctggccccgaaaatcggtcccctcggtctctcccccaagaagatcggagaagacatcgtcaaagaaaccgtcaaggactggaagggcctccgcatcaccgacaagctcaccgttcagaatcgtcaggcgaaagtcaccgtggtcccctccgacgacgccctcgttatcaaggccctcaaggagcccgagcgcgaccgcaagaagaccaagaacatcaagcacaacggcaacatctcgctcgatg

SEQ ID NO: 262003 - DNA, 448 bp, Glycine max
tgccgttcttgatgattttggcatggaatccatgctcgagagattgatgaatgatttcataagtcgcatatctcgagttttctacactgaaattggtggaacctcgctggactcccatcacgggtttgttgttgaatatggaatcaatcgggatgtggaacttggcttccatgtggatgatgcagaagtcaccttaaatatttgcttgggaaacgaattttctggtggagaactgttcttcaggggtgttcgatgtgatgaacatgtaaattcagatatccaaccaggggagatctttgattatccccatgttccaggacatgcaattcttcatcctggtcgtcaccggcatggcgctagacctactacatctgggaatcggatgaatttaattatctggtgtacaagttccgcttttaaagagttgaagaaatatcggaaagatttt

SEQ ID NO: 262004 - DNA, 319 bp, Glycine max
tccacgcgtccgataaaaatgaaaattctaattaaaggaagctacaaaaatacttgagtattggcttaaagaacaaaatgtttgttatgcttaatatctttaattaggtctgtatttgtattcactccgtcctttattcacgtagttttttctcggcgaaattgcccgaagcctacgctttcttgaatccaattgcggatattatgccagtaatacccttactcttttatcttttagcttttcgtttgctacactgctgtaaattttccaacgatttctgtatttgaagtatgtgcttaaaaaaaattaagaatttatc

SEQ ID NO: 262005 - DNA, 348 bp, Glycine max
acgcccacgcgtccgccgctttctaaattctccacccctccgttccactgcttcgtcgcaacaggtgacgataatggcttcgaagaattctcaacaagacacgcgcttagcgagaatcgcctctgcaatccgagtcatccccgactttcctaagccaggaattttgtttcaggacataaccacgctgcttcttgatacaaaggctttcaaagacaccattgacttgtttgttgagaggtacagagatcaaaacatcaatgttgtcgcatgagttgaagctagaggctttatatttggtccacccattgcattagctattggagcaaaatttgtccccatgaggaaacc

SEQ ID NO: 262006 - DNA, 304 bp, Glycine max
  unsure (1)..(304): unsure at all n locations
cggacgcgtgggcggacgcgtggagcgagaaatggcgatggcaatggcgcttcgcaggctgtcatcttcaatagacaagcctatacgccctctcttcaatgcccgttccctctactacaagtcgtctttgcctgatgaagctgtttacgacaaggagcgacccggagttacatggccgaagcagttgaatgctccacttgaggtcgtggatcctgagattgctgatattattgagcttgacaaagctaggcaatggaagggctagaatngataccgtcagagaatttcacctctgtgtctgtga

SEQ ID NO: 262007 - DNA, 362 bp, Glycine max
  unsure (1)..(362): unsure at all n locations
cccacgcgtccgcaacaacacaaggccatcatcatggcatctgcttctcctatgggaagcgaactcaagtccaccttcgctaaaactcttgtagctcccaagggcctctctgcctcttcaccactccacctnctgccttctaagaggcaatttagcttcactgttaggtccatccaatcagaaaagccaacctatcaagtgattcaaccaatcaacggtgatcccttcattggaagccttgaaaccccagttacatccaaccccttgattgcatggtacttatcgaacctccccgcatacaagaccgcattgagcccactactaataaggatcgaagtgggcctggcccatggctaccttct

SEQ ID NO: 262008 - DNA, 381 bp, Glycine max
  unsure (1)..(381): unsure at all n locations
gttcattctctttgcgcagttccctacctctcctttcaagatgcagatcttcgtgaanacgctaacctgaaagaccatcacccttgacgtggaaagctctgacaccatcgacaacgtcaaggccaagatccaggacaaggaatgaattcccccggatcagcaacgtctcatcttcgccggaaagcagctcgaggacagccgtaccctcgccgactacaacatccagaaggagtcaacccttcaccttgtccttcgtctccgtggtggcatgcagatcttcgtcaagactctcactggcaaaaccataaccctaaaagtcgaaagctctgacaccattgacaacgtcaaggccaagatccaagacaaggagggaatcccccc

SEQ ID NO: 262009 - DNA, 376 bp, Glycine max
ctaagctctcttcttcctcgcaaactgcaaagttaactctgagaaagaaaaaccgaacgggcccttttgccatttcctgcaaaacccgtttctcttcttcaattcgcgcgtccatggcttcaccctccatcacagacgccgaaacaaagccgttttctgttctcttcgtgtgcctcggcaacatctgcataagccccgctgctgaaggagtcttcactgacttaatcaacaaaagggacctcaattcgaagttcataatcgactctgctggcaccatcaattaccacgagggaaatgaagccgattcgagaatgaaggcaacttcaaaaaggcttgggattcagataacttctatttcgaggccaatcaagccctc

SEQ ID NO: 262010 - DNA, 348 bp, Glycine max
ttttacttcccctatggctcgtcactccttgctcttagccctcctcctcttcgccgccgtggccagcgccgcgatggcggtggccgcgtccgacgccgacgacatcctgatccgtcaggtggtgccagatgttggcgaagccgaagaggaggacaacctgctgaacgccgagcaccacttcgcgagcttcaaggccaagttcgccaagacctacgccaccaaggaggagcacgatcatcgcttcggcgtcttcaagtccaacctccgcagagccaggctgcacgccaagctcgacccctccgtcgtccacggcgtcaccaaattctccgatctaacttcggccgagtt

SEQ ID NO: 262011 - DNA, 200 bp, Glycine max
acgtgataatgaaaatattcaattattgttcaaggaaaaaaaaaaaaaaaaaaaaaaagaaaaagaaaaaaaaaaaaaaaaaaaaaaaaaaaaaaaaaaaaaaaaaaaaaaaaaaaaaaaaaaaaggaaatactatctaatcacttaaatttaatcaacttgttcaacccatacaacaactttactatgcttaccctaaa

SEQ ID NO: 262012 - DNA, 401 bp, Glycine max
cgggaagcgaccaccgcttctgcgtgcccaccgtatctcaggtgttctttaggcccaacgggcccattaaccgaatcgcgtttcccaaggccaccctcaagaacgacggcttcgtggtggacctgagcttctacgaccttctgggaataccggaatccggttcggtaacggagatcaagaacgcctacaagcaactcgtccgaaagtaccacccggacgtgtcgcctacgggtcgggtcgaggagtacacatagaggtttattcaggtgcaggatgcctacgaaaccctgtctgatccttccagaagagctatgtacgacaaggacatggccaagggcattaacttcgccttcaacgcccgcagacgctataattaccacgatcaggtaattgaacaaaaa

SEQ ID NO: 262013 - DNA, 395 bp, Glycine max
caagaaagaaagaaagaaaaaggtagagaaggagagagagagagagagaaagaaaactgaaggaaagaaaaaaaagataagactaattaactacatttttggtttggtttttcttcatctcgcaggagacacgaagagacaagttacatcacatggttaaaacttgttaaagagttttgtgtttgtgtgtgtgaaagtagtttaaggttgtgggggtggttgaagcttttagctttagctttgcagagatgtcaagtggtggatgcaacatcatagtgtggttcagaagagatctgaagatagaagaccattacagcactgacagcaagagtgagagctggtgctggtgttgcagttttcatatgggcacctgaagaagaaggacaatactaccc

SEQ ID NO: 262014 - DNA, 392 bp, Glycine max
cccacgcgtccgagatgttagagcaaaattagcaaaagatttaccctcaatatcaggggtggagtcacatgacgctaatgtagctgaaaggcaggaaggcacagaggtagtgcaaccttctatgtctgttatggcaggtcctctgctttcaatgcaggactctatgaagtctgatgaaatccttcgctctccaaacaaagatggtttggacattgtggacattgattcagtggagttaaaggatcctcaagtttggagttcatatgcccctgatatatacaatagtatatttgtcaaggagtttgaaaggagaccgtcaagtgattacatggatatgttgcagcaagatatcactccaagcatgcgtaggattctgattgattggcttgtgg

SEQ ID NO: 262015 - DNA, 411 bp, Glycine max
tcgagaatatcttgagcaaccagacattcccaatacatggagagcaatggaggcactgtatgagtcacacaaggctagagccataggagtgagcaatttctcttcaaagaagcttcaagatttgttagatatagcaagagtggttcctgctgttaaccaagtggaattgcacccaggatggcagcagccaaagttgcgcgcattttgtgaatctaaagaaattcatctatctggatattctccactaggttcaccagcagctctcaaaagtgatattcttaagaatcctgttgtcacagagattgcagagagattggggaagacaccagcacaagatgcccttatatggggcttgcaagcaagtcataatgtgctttctaagagcactaatgagtccaaaatcaaaggggg

SEQ ID NO: 262016 - DNA, 381 bp, Glycine max
gtcaatcttttgtgcaaccttactcgaacgcctacggctgctaaatattcaaagcgtatggctcaattgtactgaatggtcaacagaatacaaagcaagctctcgtttactatgtagaatgagaatgatctatctcaaaactgtttcacatgccaacttctgcgaaccaatgcatacaaatagtgcctctaatagctgctaagatagaacaatctcagaagcacactgacatccattaagagaacatcatgccaatatcctatcagtaattagctgcagtatcgagttcaagcacaccttattaatgcttgcatctatgcactctgcaatgaggcacttgttgctataactaatgcagtagaaccatatcaggaactggat

SEQ ID NO: 262017 - DNA, 278 bp, Glycine max
agaccatatgcaacttatatcattgtggatttgaaacccggaaaagtgcattaaaaaaacgagaaaagtaaaatccaaatccaaaacataatgacaagacaggttattatctaaacttcaaaagggtcttcgcaaaattaaaaacaacccattacaattgggcctgttaaatcaatttcctaaattttgggtccagaaccgtttccactgccagcaacaggaccatcctcatccatggctccacccgcatcaccaccaacttcttggtacatctttgc

SEQ ID NO: 262018 - DNA, 238 bp, Glycine max
tataattaggatatcactccttgacatagctctcatcgtttcaccgatctaaatatcgtgacgtgggtttaaatagacgctataagaaacctttgaactaaatcattcatcgttattagatcatactttttaccgatgacatgcacactttaattctatacatatcattctatcgtacattcatatgcttctaccttactaaatccagctcttgcaacatgtgcactacagtttattt

SEQ ID NO: 262019 - DNA, 254 bp, Glycine max
attccgacgctacgacctacgcgtatctcacacgcgtcctcatatgcaataatgttcgagatcatccacactatttcatagagcatcgatgtcctagaacactagattgaggatcacaaacgagtacactttgattagcaaacattttaactcgactgattactctcttaacttcacaaaggtcttcacaaacttaaacaccaccattgacagcacatttagttacttgtgtatatgatcattgactagatcca

SEQ ID NO: 262020 - DNA, 337 bp, Glycine max
aattcgcggacgactcacgcctctcttcatgcgtccatgtgagtctaatatttgcaatgcccaaaatgtaaccattcctgcacaaagccaaaaactatgatctggataaagtcactaacatgcccaatcctgatgctagtgtaacccaccatgattttaatcgcgtcaacccccacagtgatgactactctattcatggctgtgtttccaacccttattctaatcgcattgctatttgctaaatcaaatactcctgtaacagtgctgtctacgacatagcatgatgcacaataccttacccacagacacttagtgcaagtgacacatcaattctata

SEQ ID NO: 262021 - DNA, 435 bp, Glycine max
catacatctattcctcgtctccatcattttgtgttgtgctcgctctgtctctctgtctcggtaaagcgcgtttcagcacccgttaccggcgaacatggagagggttatcggcgggaagtttaagattggtcggaaaatcggaagcggttcgttcggagaaatttatattgcatcaaatatggatacctctgagattgtcgccatcaagatggaaagcaagaagaccaaacatccacagctattgtatgaagcaaagttatatagtattcttcaaggagaaagtggtattccaagtatgaagtggtgtggcactgatggagacaataatgttctagttattgatcttctgggacggagtcttgaagacttttttgtctactgcgggaggaagttttcattaaaaacagttttgatgttggccgatcagatgctgac

SEQ ID NO: 262022 - DNA, 446 bp, Glycine max
gcgcacactttgtacactccgtccctcttccctgtctctcaaatggcttccctgactgaaactttcatgtccctcgcctgtcttcccaatctagttatggtacccggtaccaggatctcccacccaagttcagtttccctctcaattaaggagggacgaagtttcccatccgttacattgcagcccataggatgtcggtttcgatttagatgtgtggcaaaaccagagacagtgaagaaggtgtgccacatagttaagaagcaattagcactaccagaggaatcatctgttactggagagtctaaatttgctgcacttggagctgattctcttgacacggttgagattgtgatgggacttgaagaagaatttggtattactgtggaagaagaaagcgcccagactatcaccaccggtcaagaagctgctgatatgatcgataagct

SEQ ID NO: 262023 - DNA, 383 bp, Glycine max
gattaaagctcatcctaggcacaaggttttccacaagcaaatgcctcctgaaccgggttagcttgcatcaaggcttctccaatattcacctaatctacgctgcactgcgctggaagcatgtgcacatcctcattacaatgaactttgaccaccaaatgcccgtgacaactaatgacacatccaaatgcctccacttaaaaaatctaaacctaggatagctcaaacttacactcaaccaatcaatactctcacatccacagcatgtattccaagttcaagccaattaactctcctcattctgtcgcttcatagacacaaacggataatgaaaccatcagtcaacctatatagagatcaaactgaatcaacacacacgctgtttt

SEQ ID NO: 262024 - DNA, 401 bp, Glycine max
acgcattaacactcatcttaggcacaatgttgatcacatgcaaattcctgctaaagcagcaaaggttgcataatagcttctgcaatcttcacctactctactcttcactgctctggacgcatgttcacatcctttctataatgaactttacaagccaaatgcccgaatctctaatggccatccactgcccccactattcaacttcatactggaattagctggagcatcacctgaactgatcaatatgctcatcccaaaacatattaagcggcagatgggtctcagctttccgcattctgccggttcataaattcaaagggataatgaaacgatgagtcaaccgatatagttatcaatgtgaatcaacagacaggctgtttgttgcctatatataacctttt

SEQ ID NO: 262025 - DNA, 362 bp, Glycine max
cccacgcgtccgcccacgcgtccgattgaattcaaaaacttaagttcattccttgtgtttgactttgttcctcaaaaccaaacatgtcgaacacatgcggcaactgcgactgcgctgacaagactagctacaccaagggaaacagctatggtgttattgtagagactgagaacagttacatcgagactgttgtcatggatgttccagcacctgagcatgatgggaagtgcaagtgtggcactaactgcacttgcacggactgcacctgtggccattaatgaatatatactaaaatgtaattgccatgtgtttggcaatacaaatatccaaataatgtaatcttcgtatgaataaatgtgtgt

SEQ ID NO: 262026 - DNA, 351 bp, Glycine max
ccaatatattccattctctctgtgtatttccctacctctcccttcaagatgcacgtcttggtcaagaccctgaccggcaagaccataaccctagaggttgaaagctccgacaccatcgataacgtcaaggccaagatccaggacaaggagggtatccacacggaccagcaacgtctcatcttcgccggaaagcagtctcgaggacggccgcaccctatccgactacaacatccagaaggaatcaacccttcacctcatcctccgtctacgtggtggcatgcagatcttcgttaagaccctcaccgccaagactattaccctagaagtcgaaagctccgacaccatcgacaa

SEQ ID NO: 262027 - DNA, 421 bp, Glycine max
ctctactgcttcaccttctgctctagaaaattcagtggtgatacatggcttcggctactgtctctgtagccaaaccagcccttcaggcaaatgggaaaggcttctctgaattctctggcctccgcagctcatcaggcttccttcccttttctagaaaatcttcagaggatttccattctgtcattgccttccagacctatgcagttggaagcagtggaggatacaagaagggtgtgacagaagcaaaactgaaggttgccataaacggatttggaaggattggaaggaacttcttgaggtgctggcacggtcgcaaagactcccctcttgatgtcattgccatcaacgacaccggtggcgtgaaacaagcctctcaccttctcaagtacgattcgatcctcggaacttcgatgctgatgtc

SEQ ID NO: 262028 - DNA, 381 bp, Glycine max
gttgggttgtcattgttggcatagcaacaagttgacactaatctaatcacctgcgctgcgtctctttgtattctacgatggacacgcgcggccacgatgaggaggagccaccgaaacctgtggttctgatcacaggatgttccacgggagggataggccacgcgcttgcacgcgccttcgctgagaagaagtgcagggtggtggccaccagcaggtcgcggtcgagcatggcggagctggaacacgaccaaaggttctttttggaagagttggatgttcagtccgatgagagcgtgcgtaacgtggttgatgctgttgtcgacaagtacggtcgcatcgacgtgctcgttaacaacgccggtgttcaatgtgtgggcccac

SEQ ID NO: 262029 - DNA, 428 bp, Glycine max
ccaaactcaagttcaccaaaagcaaccacaacaagcacttctcttatttcctatgacaccctattacagattcacaagcgcagacacttcaaatggctctggaagctcttcaatcacccagaactgccactccatcgtttagtccctttgaagaaaccaacctcagttacttggagacaccgtggaccaaaggaaagcgttctaagcgtaaccgcatggagcagcaactgcaacactcttcatgcaccgaggaagagtacctcgctctctgtctcatcatgctcgctcacggcggcgccagcggtgtccccgccgccaagcctgctgtctccgacaacaattccgcgccgctacccgccgacaaactgagctacaaatgttcggtctgcaacaaaaccttctgctcttaccaagcactcggtggacac

SEQ ID NO: 262030 - DNA, 364 bp, Glycine max
actcgaacctcaattccgggctagacctacgctttcacttttatatatgaaaaaactcatactcatttcattcagccagataccatgtcccaaagaaaaagacattttacttattaacctattgaacttgcaaagggattcaaaaatttggtccaacccttaatcaatttaaaccctacaaggttcttaccactcattatgacattaactttattagtcaaaacttctagtttatcccatttaacatttgaaaaaagtcatattctgtaattacattttggtttcaaatctttcactttactcttgcttgatttctttaaaggttttatattttcacaaaagatttaactttaatttatattac

SEQ ID NO: 262031 - DNA, 210 bp, Glycine max
  unsure (1)..(210): unsure at all n locations
acgcccacgcgtacgattnttattccttctttgtttcttcactttcttccatacacataaccagctcttgtcagaccgttgtcctcaaagttggtatgtcatgtcaagggtgtgctggagctgtaaacagggttttggaaaaaatggaaggtgttgagtcatttgacattgatctgaacgagcagaatgtgacagtgaaaggaaatgtgc

SEQ ID NO: 262032 - DNA, 383 bp, Glycine max
cccacgcgtacgtccacgcgtccggcttaagatcacccaagagagaacctaagagacacagcacagactcacacaaagagttacaagagaaatcatcatggcatcagcagcatctgggtttgtgttgtcacttaatgttgcagctgccaccacaaactcaagggtggtcatgttcaacaccaagaacaacacttctaggtttgatgtaaaggcttcagatgagcctgcagcggcggtacccggcaccgtcacacctccagctgaagctgaagctaaaccaaagccaccacctattggccccaagagaagtgctaaggtgaagattcttaggactgaatcttactggtacaaaagcaccggctcagtggttgctgttgatcaag

SEQ ID NO: 262033 - DNA, 360 bp, Glycine max
ttcctccttgccccttctcatatctccgattccgttaactcccaaaactcgaacgctagccctaaccctaaccataaccctaaccccaactattacaattaccatcctatataagcaatcatttcgactctctttctcagctccacggctgctattctgcctatgcttaatgaaccacatctttcgctaaaacttcaccctctttacaaccttaacaacttagtcaacaccttctagccacagatcttcactaatcttccatagataaagagttctcatgaaaatcatgactttgatcaacattaaaggcaacttcctgcaactcttatatcaaatgtctattattacctaactgaactt

SEQ ID NO: 262034 - DNA, 339 bp, Glycine max
cgcttctcgaagccgctgctggacgatgatttcgaggctgggttcagagaattcaaggaggattcggaaatcgaggatgttgatgacgaggacgatgaagacgaggaggagttgaagaagaagccctttgggttctctcgctccagcaacaaggctgcttctaagcctctctctcgtggatcagcaactgtggaatcaaaggggcaagctgagaagtgtgccaagagaaagaggaagaaccagtatcgtggaatccgtcagcgtccatggggaaagtgggctgctgagatccgtgacccacgaaagggggttcgtgtttggcttggaactttcagcact

SEQ ID NO: 262035 - DNA, 313 bp, Glycine max
acgcgacagacaaacaaacaatttaccagctatacttgttccttttgaaggttagaagtgctaggatacggacaatggcagctactcacgaagatgtgaagcttttgggtattgtgggaagcccatttgtgtgcagggtccaaattgcccttaagttgaagggagttgaataaaaatttttggaaaaaaatttggccacaagagtgatttgcttcttcaatacaaccctgttcacaagaacgttccagtgtttgttcacaatgagaagcccataacaaagtctcttgtgattgttgaatacattgattagaca

SEQ ID NO: 262036 - DNA, 388 bp, Glycine max
tcgaaaaaaacctaccaatggctcccgcaaaggcagagaagaagcccgcggagaagagaccggcggagaaggccccagcggagaagaagccgaaggcggcgaagaagatatcgaaggaaggaggaagcgagaagaataagaagagaacaaagaatagcgttgagacctacaagatctacatattcaaggtgttgaagcaagtgcaccccgacatcgggatctccagcaaggctatggggatcatgaacagtttcataaacgacatcttcgagaagctcgcccagtagtcatcgcgtctcgctaggtacaacaagaagcccaccattacttccagggagatccaaacagcggtgcgtttgggcctaccttgggagttggccaaacatgc

SEQ ID NO: 262037 - DNA, 367 bp, Glycine max
ctggaagaaagatcatcattgatacctatggtgggtggggtgctcatggtggaggtgccgtttcagggaaggaccctaccaaggttgacagaagtggtgcctatatcgtgaggcaggctgcaaagagtgttgtggcaaatggccttgccagaaagtgcattggccaaagtttctaatgcaatggtgttccttaacccttttcaatggttggggacacttattgaaactggaaaaattcttgccaaggaaatcctcaaaattgtaaaggaaattttcaacttaaaacttgaattgatcaccattaacttgaaccttaaaaggggtggccataggttcttaaaaacagttgttaatggacactttgaaa

SEQ ID NO: 262038 - DNA, 207 bp, Glycine max
gaagaagaaagagaggcttggatcactaccatatctttggcaatctgtaaggcgctagagctgctggatatgttgaagaaagaggaagagatgctttctgctgttaaggatagacaatccaaggatggggataaggagttctctaaggatgttcttgatgaacgtgccaagaaagcagaagcttggcatcatgattctgcagttcgt

SEQ ID NO: 262039 - DNA, 431 bp, Glycine max
ctccttccatacatttgctgtatggtctgagagctgctcttgatctgatttttgaggaaggacttgaaaatgtgattgcaagacacagtcgtttaggcaaagcaaccagacttgctgtagaggcatggggtttgaagaattgcacccaaaaggaagagtggtacagtgacactgtgactgctgttcttgttcctgcttacattgatagtactgaaatagttagaagggcatggaagagatacaatttgagcttaggtcttggactgaacaaagttgctgggaaggttttcagaattggacatcttggcaacttgaatgagttgcaactgttgggatgtctagctggtgtggagatgatactgaaagatgtgggctatcctgtaaagcttggaagtggagttgctgctgccagtgcatacttacaggacact

SEQ ID NO: 262040 - DNA, 387 bp, Glycine max
cttgctagggttttaggaaaagacactgtctcgcgagtgaacacaggttacagcaatgggggtcggtggtagaattgggaatttattaagacagacagcaagcaggcaggttagttcagaattgcgatcatccccttcgttttttcaggctatacgcagtatgtcatctgctccaagcacaaagctgtttatcggaggtgtttcatattctactgacgagcaaagtttgagggaagctttttcaaaatatggtgaagttgttgatgctaggataattatggatcgtgaaactggtagatccagaggatttggctatattacatacacttcggttgaggaagcatcaagtgccattcaggccttggatggtcaggacctacatggtcg

SEQ ID NO: 262041 - DNA, 347 bp, Glycine max
agaaaatcctcacccattttcttcgtagccaaacactctgaaattctcagatatggcagggcaagcgtatgtggatgatcacctactgtgtgaaatcgaatgtaaccacctcactcacgccgctatcatcagccaagacggaagcgtttgggctcagagcaccaacttacctcagttcaaacctgaggaaataactgccatcaataatgactttaatgagcctggatcacttgctccaactggattgtatatcggtggcaccaaatacatggtcatccagggtgagcctggtgctgtcattcgaaggaagaagggtcctgctggtgttactgtgaagaataccggtg

SEQ ID NO: 262042 - DNA, 435 bp, Glycine max
ctcttttcaattttcaactctctttggtatttaacttccaccccaactctcctgggactggtgcatttcctgttggctcccatagagtgtggccgtcacatcccaggatcattatgagttgtggctgctttggagcctcaactctcaagaggaaaaggaatccttctcgtactcctaatgagattgatggctttccacttgataatgttaagaatttctctgataaagacctgagactggccactgataactataatccaagcaaaaagctaggacgaggaggttttggtactgtttaccagggaactttaaaaaatggacaacaggtggcagtgaagacactttcagctgggtcaaagcagggagttcgtgaatttttaactgaaattaaaactatatcaaatgttaagcatccaaaccttgttgaattggttg

SEQ ID NO: 262043 - DNA, 341 bp, Glycine max
cccactcgtccgctcaaacgtcccatgcattcatgttatttgaaccttgtgactgttagggctacattgtatctctggcacatactatcaaatccctactgcctacgatccttattctgatgcaaatgctgatgactcacttgctgagtcaataggagtatgtgcatattcgtgattctcagctaaatcttaattttagcctgacaaccgttcttgaatccaaatacaaattcatttctaacaccatacttatagacacatataatgagttctgaacaaatggtacagttattcacttcccataactatctcatgctattcaacttctatgttatcatgac

SEQ ID NO: 262044 - DNA, 364 bp, Glycine max
gaaatggtactgctcgtgcaattaattggtgtggttgtattgtccaagatccacatccagcagtgcgtgctcttggatttcttcccgaagaaggtcatggtgtatatgtggcaaggtggtgtcatgggagtcctgtacatagatatggtctatatgctcttcagtggatagttgaaattaatggaaaaccaactccaaatatagattctttcgttaatgtgacaaaagaactagaacatggcgagtttgttcgtgtaaagacaattcacctcaatgggaagccacgagtcctaacattgaatcaagatttgcattactggcccacctgggaattgagatttgatcctaataatgcgatgtggca

SEQ ID NO: 262045 - DNA, 380 bp, Glycine max
cccacgcgtccgcccattgattccgaagagaaaagaaaagatgtttgagccacaacagctatgcactggcgcgaagaccgaggaattcgacctcgaatcaggagaaaccctctacccagggctgagcgtcggcgagaaccagctccgatggggtttcatccgcaaggtctacggcatcctctccgcgcagatcgtcctcaccaccctcgtctccgtcaccaccgttttctatactccaatcaatgacctcctcaagggcaattccaccctcctcctcatcctcctcttccttcccttcatctttttgattcccctgttgaagtaccagcagaagcatcctcataattacatcttgcttgcactcttcaccgtgtcgatca

SEQ ID NO: 262046 - DNA, 368 bp, Glycine max
tgataacagatttgctccgtcaaaccggcggcaccgccgtcatcgactgcggtctggcgacggagctgtagcgccatggcgccgacctcaatgatcctctttggagcgccaagtgcctcttttccttccctcacctcattcgccaagtgcaccttgattacctggaaaatggtgcagacattataatcacagcatcttaccaagccaccattcaagggtttaaagccaaaggctattctgatgaagagagtgaagccttgctcagaagcagtgttgaaattgcacgggaggcacgcgaagtttactataaaaattgtgctggatgtcgttcgggtgatggggatgatgatggtagaatcctcaaacaa

SEQ ID NO: 262047 - DNA, 437 bp, Glycine max
attgcagagtgttattttgagtatcagcatcaatggctccaattgcagtgggaaacgtgattgcagacggcattttggcttacttggatgaagaaaacaaaccccaaactgtctccattcactctctcgccaccggcaagaaagtcatcatctttggggttcccggtgccttcactcctacttgcagcttgaagcacgttcctggcttcattgagagagcagaagagctgaaagggaagggtgtggacgaaataatctgtatcagtgtgaatgatccatttgtgatgaactcatgggccaaaacattcccagagaacaagcatgttaagttccttgctgatggtgcagccaaatacaccaatgcccttggtcttgagcttgacctcactgacaagggtctcggcgtccgctcaaagaggtttgctcttgctgtggga

SEQ ID NO: 262048 - DNA, 376 bp, Glycine max
gaaaaatataaccgattctttcctttgtttgggctactggccatccgccggaagtttcgggggtaataccgatattttagcaacaaatctaataaatcttagtgtagtgttaggtgtattggttttttttggaaagggagtgttaagtgatttattagataatcgaaaacagaaaatcttgagaactattcgaaactcagaagaattacgggaaggggccattgaacagctggaaaaagcccaagcccgcttaaggaaagtcgaaacggaagcagatcgttttcgggtgaatggctattctgagatcgaacgagaaaaattgaatttaattaattcaatttatacgactttggaacaattagaaaattacaaaaac

SEQ ID NO: 262049 - DNA, 360 bp, Glycine max
ccaagttcactttggtggcagttgaacgagtttgcaaccccacacacaaaaaccaaaggctgagaaatgtcatccccctcgccggtggccacggtggtctccgccgccgcgctgtacgaccgccccaaagccgtgaaagaattcgacgaaaccaaggtcggagtcaaaggtttgatcgattcgggaatcagaaccatcccccctttcttcgtccacccgcccgaaaccctagcggacctcaagcgcggaaccaaacccgggtccgcgccggagatccccacggtggacctcgccgccgaggagagctcccgcgccgccgtggtggagcatgtccggcgggcggcgagcaccgtgggattc

SEQ ID NO: 262050 - DNA, 331 bp, Glycine max
gtggttgaaagttaagaagtagcaaagatgtttccattcgggcacaagggtcaaaagataaaggggactatggtggttatgcagaagaatgtgttggatatcaacagcatcaccagtgttgacgggatcgtcggcaccggcttagacttcttaggcagtgcactcgatacagttacttttttagcctcctccatctccatccaacttattagtgctaccaaagctgatggtgggaaaggaaaaggtggaaaggctacaaatttgagaggaaagataacattaccaaccatatgagcttaagaagaagcatacgatgctcaatttgattggg

SEQ ID NO: 262051 - DNA, 354 bp, Glycine max
aaacaagccaagtgaaagagagaagaaaagtcaaagacaatgtcagggatcattcacaagatggaggagacccttcatgtgggaggccacaagaaggatgaggagcacaagggtgagcagcaccatggtggagaatacaaaggggagcatcatggtgaacacagtactgaatacaaaggagagcatcatgttggtgagcacaagccggagcaccatggaagagaagagcacaaagaggggttcctagacaagatcaaggacaagatccacggcgaggaaggtggcgccaccgccgagggcgagaagaagaagaagaagaaggggaagaagaagcatgaacattgccattacagc

SEQ ID NO: 262052 - DNA, 251 bp, Glycine max
ctcaaaggctgatgtgtatagttttggcatggtgcttttggaacctggtgagtgggattaggaactttgagatccaaggttctgtggttaggagtgaagagtggtacttccctggttgggcctttgataagatgtttaaggagatgagagtggaggagattttggatgggcaaattatggatgcttatgatagtagggcacactttgagatggttaataggatggtgaagactgcaatgtggtgtctgcaa

SEQ ID NO: 262053 - DNA, 151 bp, Glycine max
ttccattccatcacaatgttcaaaacataaaggagacgattttttttattcagaacaatctcttagatatcaacaccatcaccatttcttacgctatcttctgcacccacttaaacttcttatgcattacactctattcaattactttttt

SEQ ID NO: 262054 - DNA, 377 bp, Glycine max
  unsure (1)..(377): unsure at all n locations
actcctatacttccaccacctccantattctcccttccaccacctgatcaatactattatagcaagcctccttctcaacaacactctccacctcctccttcacctcattcttcacctccaccaccacattcaccaccaccaccaacaccattttatccctatttatcaccaccaccacctcctccacttcactctcctaccccaccactttattcaccaccacctccacccccatcttcaccaccttttatagaatcaccttctcctccaccacctacaccacctttttaaaatcattcaccacctccaccatcaccacactttttcaccttaccatctctcaccatcaccatcaccacccatcttccccattcaat

SEQ ID NO: 262055 - DNA, 428 bp, Glycine max
ctcttcgagggtttgggtttctcttcctcccttggagaaaaagaagagccaccgctgcgacgccgttcgtgcatttttgaggtgccgctgtcatgtttgggcgtggtggaccaaggaggagtgataactccaaatattatgatattctcgggatttccaaaaatgccagtgaagatgaaatcaagaaggcctatagaaaggcggctatgaagaaccatccagataagggaggagatcctgaaaagtttaaggagttaggtcaagcatatgaagttttaagtgatcctgagaagaaagaactgtatgaccagtatggtgaagatgcccttaaagaagggatggggggaggaggctcgtttcataatccatttgatatatttgaatcattttttggaggagcaaagcttggtggtggtggtagttcccga

SEQ ID NO: 262056 - DNA, 400 bp, Glycine max
  unsure (1)..(400): unsure at all n locations
ggtccggaannttcccggtgtcgatcccagcgcgtgccagtaattgtttttttaatttgaaataaaatgtccgggaatcaatccacatagaattgagtgagacccctccatgggtgggagggcacatagaaatgaggagcacaatatgataacatccatggtgatgcacaaaggtgaacacaaaggagaacaccatggtgagcacaaaggtgaacacaaaggagaacaacaccatggggagcacaaggagggacttgtggataagatcaaggacaagatccatggtgatggccatgacaagggtgagaaaaagaagaagaaggacaagaagaagaaggagcatggacatgaccatcatggtcatagcagcagcagtgacagtgattagatcttatatgtt

SEQ ID NO: 262057 - DNA, 385 bp, Glycine max
  unsure (1)..(385): unsure at all n locations
ccacgcgtncgtgattaccgtgttcgtgttggaggggtggccgaaagagaccagttcccaaaggtattgtttatgggaagcccacaaaccatggagttacccaactgaaatttcagcgaagcaagaggtcagttgccgaggagcgagctggacggaagctgggtggacttagggtcctcaattcttactgggtgaatgaggactctacttataaatactttgaggtgattctggtggatgttgctcatgctgctattagaaatgatcccagaatcaattggctcgccaatccagtgcacaagcacagagagctgcgtgggcttacctctgccgggaaaagcaacatgggtttacgtggcagaggacatctatatcacaaagcacg

SEQ ID NO: 262058 - DNA, 378 bp, Glycine max
ttgaattctcgacccgagcgtccgcatgctctaattgagatgtactatgatctggtttctgggggaactgagaatcacccggttggggagagtctgaagaataaggagaccgatggctccagagttgagaaggtgttgtaagcagttcatattgcatctaataaaaacactgttcctggagatatgtctgccatgcttcctgttctcatcactgactggaacccctgctcttactcctataggatctgttgaggaggattttgttaaggtagcacatgctcttagatgcatcagtgcagttggctgtgaagattaagggtcagagcacaagaacaaagctctaggacttcttgaccgcaattcaatcatcttctacct

SEQ ID NO: 262059 - DNA, 420 bp, Glycine max
cccacgcgtccggagaaagagagtgaagagagaagaagatggcgtcgagcggagcggggccggtttggagggcagcggggatgacatacatcacatactcaaacatatgcgcgaatctggtcaggaattgcctcaaggaaccctacaaggctgaagccatctctcgtgagaaggtccattttgctctctccaaatgggtcgacgccaagcctgaaaaacctagtacgcctcttctcttttattactgcgcttccaccatcaatcattttattttcatattaatcgatcctctcattcccctaattaaattaccctaaatcctgcatcaccaatttgtatactttatgttcgtcataaccatctcatgctaggattcattcccgtataatgcggattaatttgtgccagatccatttctct

SEQ ID NO: 262060 - DNA, 402 bp, Glycine max
cccactcgtccgaacctatcaagtgattcagccaatcaacggtgacccattcattggaggcggggaaaccccagttacatccagcccttttatcgcatggtacttgtccaacctgcccgcatacagaaccgcagtgagcccactactaagagggatcgaggtgggcctggcccacggataccttctggtgggcccattcgtgaaggccggtcctcttatgaacaccgagatcgccggtcaagctggctctctggccgccggtgggcttgtggtgatcctcatcctttgcctcacaatctatgggatttcatccttcaacgaatgatccccatccactgctccgtcgctgaccttgacgggccgcatgaaagagcccgatcagctccaaactgctgatgggtg

SEQ ID NO: 262061 - DNA, 359 bp, Glycine max
gccttgtactgattaacgagaatggacaaggaagtggagcttggttcccttgaaggtgaaatggccacccagcacatttcacaaccacagaagcgcaagggtggtcttgttaccatgcctttcatcattgcaaatgaggcacttgcgagggtggcaagtttgggccttttgcccaacatgatactgtatttgatggggacctacaggcttcaccttgcccaagcaacccagatacttctctggtcccatgctaccagcaatttcacacctgtggtgggtgctttcattgctgattcttatctgggtcgattcctcgctgttgggttgggttcggccatcacttttctgggaatgacact

SEQ ID NO: 262062 - DNA, 321 bp, Glycine max
ctcttcccatccctcacctcaacgctgcatcttcacgtcgtctcacgaggtgcatatagtagagagggaaaatgagtcgaggaggcgcattatcatcagcgaagggaaagaagaagggtgctacattcaccattgactgtgcaaagccagtggaagataagatcatggacattgcttctctcgaaaagtttcttcaagagaggatcaaggttggtggcaaagctggtgctcttggtgacagtatcactgttacccgcgagaagaccaagatcattgtcacctctgacagtaacttttccaaacggtatttgaagtacttga

SEQ ID NO: 262063 - DNA, 407 bp, Glycine max
ctgtcccatatagttgttttggcaccgctgaccagacagaggtcttacgacaacgtcccacagcccggtgccatcctctactactcccagagaacttccaacggaggccttctcattactgaagccactggcgtctctgacacggctcaaggctatccgcaaacccctggcatatggactaaagaccatgttcaagcttggaaacccattgtcgatgccgtccacgccaaaggcggtgttttcttctgtcagatttggcacgttggaagagtttcagattcagtttatcagccaaatggacaagcacccatatcttctacggacaagccactcacaccccaaattcgaagtaatggcattgatcaagtacaatttacccctccaaggagattaacgactgatgaaat

SEQ ID NO: 262064 - DNA, 366 bp, Glycine max
  unsure (1)..(366): unsure at all n locations
gtctagctctctggaagaccaagacgctggataaggattacgaggctctgcatgcaaggtgggagaatcttaagtccaactatgacagcctcctcaaggagaaagacaacttaaaagctgaggtggcgagcctcaatgagaaggtgcttgcaagagggaaacaagaggggcacatgaagcagcaggctgaaagtgaagaagaaacaaaaagattattgcatttgcatgaacatgaaccaccccagaggcttttactggaatcagtttcggagggagaaggatccaaagtctcttctgttgtcnggggttgtaaacaagaagatatcatttcagccaggagtgatattttggattcagatagtccac

SEQ ID NO: 262065 - DNA, 457 bp, Glycine max
  unsure (1)..(457): unsure at all n locations
ataatatcaggatagcagagacttaacatcaaataatccaagtgtaagtttggctagcacgtggcgaggcatttgttctcctgacatttctgtgactcttccaaatacttcaccaaagtcctttcggtctgacaatacaatttctgaaaggtcacatgcgccaccagacccaacaaacatgcaagtgaaaggatctgcttcagatgtatttcgtgtcagtgtttccagtgccccaagtacatctagtcatggatctgcacctgatgactgtgatgctttgggggatgtatacatatggggagaggttacctgtgaaaatgttaaagttggtgctgataaaaatgtaaattatgtcagccccagggcagatgtacttctccccagaccactggaatccagcgtagttttagatgtacatcatatagcatgtggtgttagacatgnctctctagtcact

SEQ ID NO: 262066 - DNA, 237 bp, Glycine max
ttttgttgcttcaaaaaaaaaaaaaaaattaaaaaaaaaaaaaaaaaaaaaaaaaaaaaaagaaagaattataaaaaaaaaaaaaaaaaaaaaaaaaaaaaatgggccgtccgttctaaataatccaaatttccttccgcctacatacaaccaaatagaacttcaataggctcaccaaaattaaattaactgtccgtcgttttaaaacttatttacttgaaaaacctttaaataacc

SEQ ID NO: 262067 - DNA, 458 bp, Glycine max
  unsure (1)..(458): unsure at all n locations
actctacgaccttagctctgcctctgggttgaagaagcttgatgagtaccttctcccacgcagctggtcaccgggtaccaagctacaaaggatgatcttactgtttatgcagctttgccaactgctccatcagatgaatatggaaatgtttccaggtggtacaagcacattgatgctttgttgagaatctctggtgtttctggcgagggatctggtgttattgttgaaggatccctggttgcggagcctgttgcaactcccccagctgctgacactaangctgctgttgctgaggatgacgatgatgatgatgttgatttgtttggtgaagagactgangaagagaagaaggcagctgaggaacgggcagctgcagtgaaagcatctgcaaaaaaagaagagtctgggatatcatcttgtctggtggatgtaaaaccatgggatgatgaaactgacat

SEQ ID NO: 262068 - DNA, 475 bp, Glycine max
  unsure (1)..(475): unsure at all n locations
cccacgcgtccgcaaaacttctctctcacactcactttctctctctataactctntctcacccgctgagggtttccttttcatcgcatcttgagtttgcaacctcgtcttgtgatttccatggagggtgctgggatggaagagaataatattattaatgatgatgataataataacaagtctgaggcgcatttgacttctgccgctgcttttgtggagggtggaattcaggacgcttgtgatgatgcttgcagtatatgccttgaagctttctgtgatagtgatccttccacggtgacgagctgcaagcatgagtttcatcttcagtgcattctcgaatggtgtcaaagaagctcccagtgccccatgtgttggcagcctatcagtctcaaagatccaacaagccaagaattacttgaggcagtggaaagagagcngaaacttatgttcaatccatctagaaatgccacaatatt

SEQ ID NO: 262069 - DNA, 465 bp, Glycine max
ctctcccattctctcgcatctcaatacccttttgatttgtgaaaggaaagcaaacatgcttgatcaggtccaacaccctacaatcatggacaaggttgctggccagctccatctccgttctggtgtttctggtattaggagttatgaaggagcctactgccaccccacaatgtaccaaagaccctcttttgggaattactcgaatgctgcattgcagtatcctgtgatgccctcatgcaaagctactatggatttgtctgctgctgcaacaactgcctcccccgtctttgttgctgctccagcagagaaaggccattttcttatagactttctcatgggaggtgtttcagcagctgtctcaaaaactgctgctgctcccattgaacgtgttaagcttttgatccagaaccaggatgagatgatcaaaactggtagactttctgagccctacaaaggtattggtga

SEQ ID NO: 262070 - DNA, 421 bp, Glycine max
gtggattgacacatttgctgaatgggtggacctatggccctcacactttccaacttatggtggcacttactgtctccaaaatactcactgcattggtgtcatgtgccactgccataaccctcatcactctgatcccattgcttctcaaagtgaaggtcagagagttcatgctgaagaaaaagacgtgggatcttggacgtgaggttgatcatattatgagacaaaaggaagctgcaatgcatgtaagaatgcttactcaggagatacgtaagtcactcgatagacatacgattctgcataccactttggtggagctgtctaaaacacttggcttgcaaaattgtgctgtgtggatgcctaatgttgataagactgagatgaacctcactcatgaattgaatgggaggaattttaatttgac

SEQ ID NO: 262071 - DNA, 385 bp, Glycine max
  unsure (1)..(385): unsure at all n locations
ctgactcgtccttcctccctttctttttgtccccttcaaccaatctacagccagaagctagtactcctctattcgttacaganaacntttatagagagtatcttgaatactattatcctaaaacggtatttcgaggagaggcttgtgatgatcttggaagaactttctgtgagaccgagtatcagaatggtttctactatagaaatgtgaaaaccctttttattgccatgactactgcgttttcaatgtcaaccagtactaattgtagtgttgaatgtacataggtataatgctattgatctcattttatattgattttcagtatcactataaaactttacaataattatacancttttttaaattcatttttttgttattcatt

SEQ ID NO: 262072 - DNA, 377 bp, Glycine max
tgataatgtaaaattactttaattgtcagtatataatccattttctcaactatcaattgcagagagaaattatcacttttggtgaaattgtcttgagctagttgaaaatgatttcggtgtgcactcaaagatggagtatatatgatgaatttcttttcagggatattctccactaggttcaccagcagctctcaaaagtgatattcttaagaatcctgttgtcacagagattgcagagagattggggaagacaccagcacatgttgcccttcgatggggcttgcaagcaagtcatagtgtgcttcctaagagcactaatgagtccagaatcaagggaaattttgatatctttgactggtctattcctcaagatttga

SEQ ID NO: 262073 - DNA, 436 bp, Glycine max
cccacgcgtcctcccacgcgtccgataaatattccgttttgcgtttctctgcctaaaaggatggaaagatgggtcaagcactaggttgctatcaagttgatcagtcaaatgtggctatcaaggagcattttggaaaatttgatgatgtcctagaacctggatgtcattgcctgccttggtgtcttgggtaccagattgctggtagtttgtcactgcgtgtgcagcaacttgatgttcgatgtgagacgaaaaccaaggacaatgtctttgtcactgtggttgcatctgtgcaataccgagctgtgtctgagaaagcatctgatgcattctataggcttaccaacacatgggagcagatccaatcatatgtttttgatgtcatcagggccagtgtaccaaagttggagttggattctgtctttgagcagaagaatga

SEQ ID NO: 262074 - DNA, 366 bp, Glycine max
cccactcttccgcgttaagctagtgtctatctgatccagctacagcatatagatcaaggaaggaaggaacgaacatgttgggtgttataaagcacaagactattcaccctgccttctcctcaatcagacacttgtcttctgcagctaaagagattactgtcagggaagctctgaactccgcactccatgaggaaatgtcagctgatcctaaagcgttcttgatcggtgaagaggttggggaatatcaagttgcatacaatatatccaatgtgctgctcgacaagtattgccccaacagggttctcgatactccaatcacttaggcttggtttactgatattggaattggcgcttcttactatggtc

SEQ ID NO: 262075 - DNA, 418 bp, Glycine max
attgaaagttcttcctggtgcaaaggttcctgctgatggtattgttacttggggatcgggtgatgtaaatgagagcatggtaactggtgaatctgtacctattatgaaggaggtgaatgcttccgttattggaggcacaataaatttgcatggcgtccttcacgtataagctaccaaagtaggatctgatacagttttgagtcagattattagtttggttgagatggcccagatgtccaaagctcccatccagaagtttgctgattatgtagcaagcatatttgttcctacggttgtttctttagcattattgacactattgggttggtatgttgctgggtctattggagcttacccagaataatggctgccagaaaatggaaatcactttgttcttgccctaatgttcgcaatatct

SEQ ID NO: 262076 - DNA, 426 bp, Glycine max
cttaactagcataaaaatcacgtttgcaattctgcgtgttctttccccacccttcattatacgtacgagattcatccacccaccctctagctaccaataaaattgttcactttcactaattaattttatagtatggaaattgaagagcaaacgatgaaaatgatgatgaagtcgtcgtctaggttcagacgtatctgtgttttctgtggcaccagccctggcaagaaccccagctaccaactcgctgccatccaactcgccaaacaacttgtggagaggaacatcgacttggtttatggaagagggagcattgggttgatgggtttaatctcacaagttgtgtttgatggtggacgccacgtgttaggggtgattccaacaactcttatgccaagaaaggtatttttattttattctatttttcat

SEQ ID NO: 262077 - DNA, 467 bp, Glycine max
  unsure (1)..(467): unsure at all n locations
cccacgcgtccgataacataaaatcttcctccgttcaatcttcatctctctctctctattggtgtgggttaagcaaaaatcatgggtccgatggtgctgagccaactcgccaccggtcttagcgttctagccggagcggttctggtgaaatcggttatggaccagaagcccatggcaggcccattcactcgctgccccacgtgcaacggaaccggtcgagtcacgtgcctctgctcgcgttggtccgacggcgacgtctgatgctccacgtgctccgggtcgggtcgcatggcctgcagcagttgcggcggctccggtaccggtcgacccttgccggcgaaaatcgcgattcgcccgccgaaccgcccaattaattagttcaccaattcgttgggctcgctcgctcgcttgctactactnnctttattttagcgtcagtataacattttaattttatatagcttttt

SEQ ID NO: 262078 - DNA, 413 bp, Glycine max
ctttcatcatgcatcaataacaacagggcaccttctgcgccatcaattctccaaggcaaagggtttgtcactcaaagagctggggctaaaaacaagcgttggtgccaataaacttcaagttattaaagcagctgcacgcattgatacagaagtagtttctgaaaccacgaagggtggtggcctacgtggaaaattgaataaggtggtgctggcttatagtggtggcttagacacatcagtcattgttccatggctgagagagaattatggttgcgaagtttgttgcttcactgctgatgttggccaaagcataaaagaattggatggtttagaagcaaaagccatagccagtggggcttgtcaattagtggtaaaggactcgaacgaggaatttgttagagagtacatatttc

SEQ ID NO: 262079 - DNA, 367 bp, Glycine max
tccagctccagctaatcaccaatgctctcctcaactgcagcaacatctgcgtcgcgcagatcgtctccgcttcgtggtcgaacaacatctacaactctccggccgccggggctcctgcgcctcccgcggccaccgccacggacgccgctacggtgcctctccccgtcgtcgtcgccgccaacgaggacgtcgttgtctccgccgcggcagacgagaacggtgctgtacagttaaacagtagttcttattcttcatttttgaaatccgatgcaagcaaaacgattcatgccgctgaaagactgggtaggggtattgagactgatggaattaccacccctgtggttaacacttctgcctacttttttaa

SEQ ID NO: 262080 - DNA, 351 bp, Glycine max
cccactcttcctcccacgcgtccgggaaagaataaattggagagagcaagagaactagttgaaaatgcagttgaatcggccccagctgatcaagtgaaaccactttacctgcaatatgccaagctggaggaggactatggactagcgaagcgagctatgaaggtttatgatcaagcaactaaggctgttcctaacaatgagaagttaagcatgtatgaaatatatattgctcgtgcagctgagatatttggtgtacccaaaacatgggagatctatgaacaagcaattgaatctggtcttccagacaaggatgtcaaaaccatgtgtttgaagtatgctgagttggaaaaa

SEQ ID NO: 262081 - DNA, 385 bp, Glycine max
tgtcattttaatcccaaccgcataataacaatttcagaattttctgggctctagagagattggcgagtttattagcggggccctttcatggtctatggcaaaggctatacttgctcctcttgagaccatcaggacaagaatggtagttggtgttgggtcaaaaaatattgctggtagtttcatagacgttatagagcagcatggatggcaaggactgtgggctggaaacatgatcaatatgcttcgtatagttccaacacatgccattgagctaggcacatttgagtgtgtcaaacgggctatgacatccctgcatgagaaatgggaacacaatgaataccccaagttgcagataggttccatcaatttcaacttatctttatct

SEQ ID NO: 262082 - DNA, 384 bp, Glycine max
cccactcgtccgcccacgcgtccgattttcttactttcctctcacgctctgccacaagactgggtctccgcaataacggaataaaaaaacaagtttaattactattatggcgccgagggatcataagacaagcaacgctaaggctaacggtaacggtaacagcggggtgaaggaggtgcattttcgtggagtgagaaagaggccgtgggggagatacgccgcggagatcagagatcccggcaagaagagccgcgtctggctcggaaccttcgacacggctgaggaggcaacgcgtgcctacgacgccgcagcacgagagtttcgcggccctaaggccaagacaaacttccctctccctttggaaaatgttaagaactcgagccc

SEQ ID NO: 262083 - DNA, 395 bp, Glycine max
  unsure (1)..(395): unsure at all n locations
ctagctctgtcgttccgtcgttgccgatggcgtttcgggtgcgaagccctgacctccgctcgcgcgttcttctctctctcttgtccatcgcttccgccaatgtcttcttcgaagagcgtttcgatgacgggtgggaaaatcgatgggttaaatcagattggaaaaaagatgagaacgtggctggggagtggaaccacacctctggtcaatggaatggagacgcttatgacaaaggtattcaaaccagtgaggattacagattctatgctatttcagctgagtaccctgaattcatcaacaagggtaagacactagtctttcaattttctgttaagcacgaacagaagctngactgtggtggtggctacatgaagttgctcagtggggatgttgat

SEQ ID NO: 262084 - DNA, 372 bp, Glycine max
gctggagaaactgaataagtatgctactgtggttcgtgttttggctcacactcagatcaggagaatgaaagggttgaagcagaagaaagcccatatcatggaaattcaggttaatggtggtagtattgcacaaaaggtggactttgcatacagtttctttgagaaacaggttcctattgatgcagtgttccagaaggatgagatgattgacatcattggtgtgaccaagggtaaaggttatgagggtgttgtcactcgttggggtgttatcccgcctccccgtaagactcacaaaggtttgaggaaagttgcttgtattggtgcctggcatcctgcaagagtttcattcactgttgccagggctggtcagaa

SEQ ID NO: 262085 - DNA, 443 bp, Glycine max
accgaaccgcaatttccacccaggcgtccgaattgttaaaggaagcgaaagaaagattgatcaaattatcgcagaggaattgaagatgggggggagagggatactgggttttgaatatggtatagttcaggccccattaggccctgatatctctgctcccccacttgttgctgcagttgccaatgctggtgctcttggacttcttagggcccctgattgggaatcgccggattacttgagggaactcataaagacgactaggaccttaactgataaacccttcggggttggcgtcgttctagcttttccttttgaggagaatttgaatgtcattttggaagaaaaagttgcagtcttgcaagtttattggggtgattgtacaaaggaattggtgaataaggctcattccgctgggatcaaaagttgtcctcaagttgggaata

SEQ ID NO: 262086 - DNA, 418 bp, Glycine max
cccactcgtcctcccacgcgtccgaccttctatacttgttccttttgaaggttagaaggggcggaatacaaacaatggcagctactcatgaagatgtgaagcttttgggtattgtgggaagcccatttgtgtgcatggtccagattgcccttaagttgaagggagttgaatacaaatttttggaagaaaatttgggcaacaagagtgatttgcttctcaaatacaaccctgttcacaagaaggttccagtgtttgttcacaatgagcatcccatagcagagtctcttgtgattgctgaatacattgatgagacatggaagaacaaccccatcttaccttctgatccttaccaaagaaccttggctcgtttctggtccaaattcattgatgataagattgtgggtgctgtatcgaaatc

SEQ ID NO: 262087 - DNA, 272 bp, Glycine max
gctggaatcagtgattggggcatgctctgtgtgctggacggctgtccaaagctgaggaaacgagatgtaagggactgtccatttggcaacttaactcttctgtcaggcttggggaagtatgagtcaatgagatcactgtggatgtcagactgcaatttgacaatgaatggtgttagattgttggcccaagaaatgcctaggttgaatgttgaagtcataaaggaagaaagctatgagactcatcaagctaaaaaagtttatgtttatcgatc
